United States Patent Application Publication US 2022/0096574 A1 - sequence listing, part 15

SEQ ID NO: 68697 - protein, 341 aa, Massilia armeniaca
  misc_feature (1)..(341): tr|A0A2R4C5E7|A0A2R4C5E7_9BURK S-adenosylmethionine:tRN A ribosyltransferase-isomerase OS=Massilia armeniaca OX =2072590 GN=queA PE=3 SV=1
MYSLSDFDFNLPPERIAQFPLPDRSASRLLHVDGPRLADRQFTDILELLQPGDLLVMNDTRVLKARFFGVKDSGGKVEVLVERVLDTRTVLAQVRASKSPGPGVKIRLAEAFDVTVGERAGEFYTLNFEADVFDLIEQYGRLPLPPYIEHAPGEVDENRYQTVFNKVPGAVAAPTAGLHFDEALLQKLKDKGVNFAYVTLHVGAGTFQPVRTENLSEHKMHTEWYTMPQETVDAVRATRAAGRDVIAVGTTSLRALESASQTGELVAGSADTALFITPGYLFKTVTRLITNFHLPKSTLLMLVSAFAGYDEIRAAYAHAIAHEYRFFSYGDAMLLTTPNRA

SEQ ID NO: 68698 - protein, 340 aa, Massilia aurea
  misc_feature (1)..(340): tr|A0A422QJC7|A0A422QJC7_9BURK S-adenosylmethionine:tRN A ribosyltransferase-isomerase OS=Massilia aurea OX=373 040 GN=queA PE=3 SV=1
MYSLSDFDFELPPERIAQLPLPDRSASRLLQLDGDQITDRHFADIVGQLQPGDLLVMNNTRVLKARFFGVKETGGQVEVLVERVLDNRTVLAQVRASKSPKPGNRIRLADAFDVTTGERAGEFFTLHFEGDVFELIEAHGRLPLPPYIEHTADEFDEQRYQTVYSKEPGAVAAPTAGLHFDQPLLDKLAQKGVKFAYVTLHVGAGTFQPVRVEDLSEHKMHTEWYTIAQETVDAVRAAKAAGRDVVAVGTTSLRALESASQSGELQAGSADTALFITPGYTFKTVSRLVTNFHLPKSTLLMLVSAFAGYAPIRKAYAHAIANEYRFFSYGDAMLLTTTSR

SEQ ID NO: 68699 - protein, 340 aa, Massilia eurypsychrophila
  misc_feature (1)..(340): tr|A0A2G8TKD8|A0A2G8TKD8_9BURK S-adenosylmethionine:tRN A ribosyltransferase-isomerase OS=Massilia eurypsychrop hila OX=1485217 GN=queA PE=3 SV=1
MYSLSDFDFNLPPERIAQVPLPDRSASRLLLLDGDAIADRQFADIVDLLSPGDLLVMNDTRVLKARFFGVKETGGSVEVLVERVLDSRTVLAQVRASKSPKPGNRIRLADAFDVVAGERAGEFFTLHFDADVFELIEAHGRLPLPPYIDHAADEFDEQRYQTVYSKEPGAVAAPTAGLHFDDALLARLAARGVRFAYVTLHVGAGTFQPVRVEVLAEHNMHTEWYTVPQATVDAVGAARAAGKDVVAVGTTSLRALESASQSGALVAGSADTALFITPGYTFKTVSRLITNFHLPKSTLLMLVSAFAGYEPIRRAYAHAIASEYRFFSYGDAMLLTTKSL

SEQ ID NO: 68700 - protein, 341 aa, Massilia flava
  misc_feature (1)..(341): tr|A0A562PCL3|A0A562PCL3_9BURK S-adenosylmethionine:tRN A ribosyltransferase-isomerase OS=Massilia flava OX=871 742 GN=queA PE=3 SV=1
MYSLSDFDFNLPPERIAQFPLPDRSASRLLHVDETRLADRKFTDIVDLLQPGDLLVMNDTRVLKARFYGVKDSGGKVEVLVERVLDTRTVLAQMKASKSPGPGVKIRLADAFDVTVGERAGEFFTLHFDADVFELIERHGRLPLPPYIEHAPGEVDENRYQTVFGKVPGAVAAPTAGLHFDDALLEKLRDKGVRFAYVTLHVGAGTFQPVRTENLAEHKMHTEWYTMPQETVDAVRAARAAGRDVVAVGTTSLRALESASQSGELVAGSADTALFITPGYRFKTVTRLITNFHLPKSTLLMLVSAFAGYDEIRAAYQHAIDNEYRFFSYGDAMLLTTRNRA

SEQ ID NO: 68701 - protein, 346 aa, Massilia glaciei
  misc_feature (1)..(346): tr|A0A2U2HH78|A0A2U2HH78_9BURK S-adenosylmethionine:tRN A ribosyltransferase-isomerase OS=Massilia glaciei OX=1 524097 GN=queA PE=3 SV=1
MYSLSDFDFILPPERIAQTPLPERSASRLLHLDGAAIVDRQFADIVDLLAPGDLLVMNDTRVLKARFFGVKETGGNVEVLVERVLDNRTVLAQVRASKSPKPGNRIRLADAFDVTTGERAGEFFTLTFDGDVFELIEAHGRLPLPPYIDHAADAFDETRYQTVYSKAPGAVAAPTAGLHFDQALLDRLAAKGVQSATVTLHVGAGTFQPVRVEVLAEHNMHTEWYTVPQATVDAVCAARARGNAVVAVGTTSLRALESASQSGQLAAGSADTALFITPGYRFKTVTRLITNFHLPKSTLLMLVSAFAGYEEIRAAYAHAIAHDYRFFSYGDAMLLTTQSLAGPDHA

SEQ ID NO: 68702 - protein, 341 aa, Massilia lurida
  misc_feature (1)..(341): tr|A0A562QXA7|A0A562QXA7_9BURK S-adenosylmethionine:tRN A ribosyltransferase-isomerase OS=Massilia lurida OX=10 36180 GN=queA PE=3 SV=1
MYSLSDFDFNLPPERIAQFPLPDRSASRLLHVDESRLVDRKFTDILDLLVGGDLLVMNDTRVLKARFFGIKDSGGKVEVLVERVLDTRTVLAQVRASKSPGPGVKIRLADAFDVTVGERAGEFFTLKFDADVFDLIEQYGRLPLPPYIEHAPGEVDETRYQTVFNKVPGAVAAPTAGLHFDEALLQKLKDKGVQFAYVTLHVGAGTFQPVRTENLAEHKMHTEWYTMPQATADAVKATRAAGRDVIAVGTTSLRALESASQSGTIEAGSGDTNLFITPGYCFKAVTRLITNFHLPKSTLLMLVSAFAGYDEIRAAYAHAIAHEYRFFSYGDAMLLTTPNRA

SEQ ID NO: 68703 - protein, 341 aa, Massilia lutea
  misc_feature (1)..(341): tr|A0A4P6KYC4|A0A4P6KYC4_9BURK S-adenosylmethionine:tRN A ribosyltransferase-isomerase OS=Massilia lutea OX=321 985 GN=queA PE=3 SV=1
MYSLSDFDFNLPPERIAQFPLPDRSASRLLHVDGSRLVDRKFTDILDLLQPGDLLVMNDTRVLKARFFGIKDSGGKVEVLVERVLDTRTVLAQVRASKSPGPGVKIRLADAFDVTVGERAGEFFTLKFDADVFDLIEQYGRLPLPPYIEHAPGEVDETRYQTVFNKVPGAVAAPTAGLHFDEALLQKLRDKGVNFAYVTLHVGAGTFQPVRTENLAEHKMHTEWYTMPQATVDAVKATRAAGRDVIAVGTTSLRALESASQSGTIEAGSADTALFITPGYAFKSVTRLITNFHLPKSTLLMLVSAFAGFDEIRAAYAHAIANEYRFFSYGDAMLLTTPNRA

SEQ ID NO: 68704 - protein, 345 aa, Massilia namucuonensis
  misc_feature (1)..(345): tr|A0A1I7LA54|A0A1I7LA54_9BURK S-adenosylmethionine:tRN A ribosyltransferase-isomerase OS=Massilia namucuonensi s OX=1035707 GN=queA PE=3 SV=1
MSSFLYSLSDFDFNLPPERIAQFPLPDRSASRLLHVDGARLHDRKFTDILDQLQAGDLLVMNDTRVLKARFFGVKESGGKVEALVERVLDTRTVLAQVRASKSPGPGVKIRLADAFDVTVGERAGEFYTLHFEADVFELIEAHGRLPLPPYIEHAADAVDETRYQTVFNKVPGAVAAPTAGLHFDEALLQKLRDKGVNFAYVTLHVGAGTFQPVRTENLAEHKMHTEWYTMPQATVDAARAARAAGRDVVAVGTTSLRALESASQSGRLEAGSADTALFITPGYRFKTVTRLITNFHLPKSTLLMLVSAFAGYDEIRAAYAHAIAHEYRFFSYGDAMLLTTQARA

SEQ ID NO: 68705 - protein, 340 aa, Massilia oculi
  misc_feature (1)..(340): tr|A0A2S2DK16|A0A2S2DK16_9BURK S-adenosylmethionine:tRN A ribosyltransferase-isomerase OS=Massilia oculi OX=945 844 GN=queA PE=3 SV=1
MYSLSDFDFELPPERIAQLPLPDRSASRLLQLDGDQILDRHFSDIVDQLQPGDLLVMNNTRVLKARFFGVKETGGQVEVLVERVLDERTVLAQVRASKSPKPGNRIRLADAFDVTVGERAGEFFTLHFEGDVFELIEAHGRLPLPPYIEHTADEFDEQRYQTVYSKEPGAVAAPTAGLHFDQPLLDKLAQKGVRFAYVTLHVGAGTFQPVRVEDLSEHKMHTEWYTISQETVDAVRAAKAAGRDVVAVGTTSLRALESASQSGELVAGSADTALFITPGYTFKTVTRLVTNFHLPKSTLLMLVSAFAGFAPIRKAYAHAIANEYRFFSYGDAMLLTTTSR

SEQ ID NO: 68706 - protein, 347 aa, Massilia phosphatilytica
  misc_feature (1)..(347): tr|A0A2S8H0U6|A0A2S8H0U6_9BURK S-adenosylmethionine:tRN A ribosyltransferase-isomerase OS=Massilia phosphatilyt ica OX=2026176 GN=queA PE=3 SV=1
MSKTYSLSDFDFDLPPERIAQVPLPDRSASRLLQLDGDRITDRHFADIVGQLQAGDTLVMNNTRVLKARFFGQKDTGGQVEVLVERVLDPRTVLAQVRASKSPKPGSRIRLADAFVVGVGERAGEFFTLHFDGDVFELIEAHGRLPLPPYIEHDADDFDEQRYQTVYSKEPGAVAAPTAGLHFDQALLDKVAAKGVRIAYVTLHVGAGTFQPVRVENLAEHKMHSEWYTIPQETVDAVRAAREAGRDVVAVGTTSLRALESASQSGALVAGSGDTNLFITPGYLFKTVTRLITNFHLPKSTLMMLVSAFAGYDEIRAAYAHAIASEYRFFSYGDAMLLTTHSRATRN

SEQ ID NO: 68707 - protein, 341 aa, Massilia plicata
  misc_feature (1)..(341): tr|A0A4P7BEV2|A0A4P7BEV2_9BURK S-adenosylmethionine:tRN A ribosyltransferase-isomerase OS=Massilia plicata OX=3 21984 GN=queA PE=3 SV=1
MYSLSDFDFNLPPERIAQFPLPDRSASRLLHVDGARLVDRQFTDILELLQPGDLLVMNDTRVLKARFFGVKDSGGKVEVLVERVLDTRTVLAQVRASKSPGPGVKIRLAEAFDVTVGERAGEFFTLKFEADVFDLIEQYGRLPLPPYIEHAPGEFDETRYQTVFNKVPGAVAAPTAGLHFDEALLQKLKDKGVNFAYVTLHVGAGTFQPVRTENLAEHKMHTEWYTMPQETVDAARAARAAGRDVIAVGTTSLRALESASQSGELVAGSADTALFITPGYLFKTVTRLITNFHLPKSTLLMLVSAFAGYDEIRAAYAHAIANEYRFFSYGDAMLLTTPNKA

SEQ ID NO: 68708 - protein, 345 aa, Massilia psychrophila
  misc_feature (1)..(345): tr|A0A2G8T636|A0A2G8T636_9BURK S-adenosylmethionine:tRN A ribosyltransferase-isomerase OS=Massilia psychrophila OX=1603353 GN=queA PE=3 SV=1
MYSLSDFDFDLPPERIAQIPLAQRSASRLLQLDGDAIVDRQFGDIVDLLAPGDLLVMNDTRVLKARFFGVKQTGGNVEVLVERVLDSRTVLAQVRASKSPKPGNRMRLADAFDVVVGERAGEFFTLTFDADVFALIEAHGRLPLPPYIDHAADAFDERRYQTVYAKQPGAVAAPTAGLHFDDALLAKLAAKGVDFAYVTLHVGAGTFQPVRVEVLAEHNMHTEWYTVPQATVDAVGAAKAAGRAVVAVGTTSLRALESASQSGVLAAGSADTALFITPGYTFKTVTRLITNFHLPKSTLLMLVSAFAGYQPIRRAYAHAIASQYRFFSYGDAMLLTTGQHKNPDA

SEQ ID NO: 68709 - protein, 341 aa, Massilia sp.
  misc_feature (1)..(341): tr|A0A0Q5HQY2|A0A0Q5HQY2_9BURK S-adenosylmethionine:tRN A ribosyltransferase-isomerase OS=Massilia sp. Leaf139 OX=1736272 GN=queA PE=3 SV=1
MYSLSDFDFHLPPERIAQLPLPNRSASRLLQLDGDQILDRHFADIVDQLQPGDLLVMNNTRVLKARFFGVKETGGQVEVLVERVLDNRTVLAQVRASKSPKPGNRIRLADAFDVTTGERAGEFFTLHFEGDVFELIEAHGRLPLPPYIEHTADEFDEQRYQTVYSKEPGAVAAPTAGLHFDQPLLDKLKEKGVNFAYVTLHVGAGTFQPVRVEDLSQHHMHTEWYTIGQETVDAVCAAKAAGRDVVAVGTTSLRALESASQTGELVAGSADTALFITPGYKFKTVTRLITNFHLPKSTLLMLVSAFAGYAEIRKAYAHAIANEYRFFSYGDAMLLTTQSRQ

SEQ ID NO: 68710 - protein, 341 aa, Massilia sp.
  misc_feature (1)..(341): tr|A0A344JIU8|A0A344JIU8_9BURK S-adenosylmethionine:tRN A ribosyltransferase-isomerase OS=Massilia sp. YMA4 OX= 1593482 GN=queA PE=3 SV=1
MYSLSDFDFNLPPERIAQFPLPDRSASRLLHVDGPRLADRQFTDILALLQPGDLLVMNDTRVLKARFFGVKDSGGKVEVLVERVLDTRTVLAQVRASKSPGPGVRIRLAEAFDVTVGERAGEFYTLKFEADVFDLIEQYGRLPLPPYIEHAPGEVDETRYQTVFNKVPGAVAAPTAGLHFDEALLQKLRDKGVNFAYVTLHVGAGTFQPVRTENLAEHKMHTEWYTMPQETVDAVRATRAAGRDVIAVGTTSLRALESASQTGELVAGSADTALFITPGYRFKTVTRLITNFHLPKSTLLMLVSAFAGYDEIRAAYAHAIAHEYRFFSYGDAMLLTTPNRA

SEQ ID NO: 68711 - protein, 340 aa, Massilia timonae
  misc_feature (1)..(340): tr|A0A1S2NDR7|A0A1S2NDR7_9BURK S-adenosylmethionine:tRN A ribosyltransferase-isomerase OS=Massilia timonae OX=4 7229 GN=queA PE=3 SV=1
MYSLSDFDFELPPERIAQLPLPDRSASRLLQLDGDQILDRHFSDIVDQLQPGDLLVMNNTRVLKARFFGVKETGGQVEVLVERVLDDRTVLAQVRASKSPKPGNRIRLADAFDVTTGERAGEFFTLHFEGDVFELIEAHGRLPLPPYIEHSADEFDEQRYQTVYSKEPGAVAAPTAGLHFDQPLLDKLAQKGVKFAYVTLHVGAGTFQPVRVEDLSEHKMHTEWYTISQETVDAVRAAKAAGRDVVAVGTTSLRALESASQSGELVAGSADTALFITPGYTFKTVSRLVTNFHLPKSTLLMLVSAFAGFEPIRKAYAHAIANEYRFFSYGDAMLLTTTSR

SEQ ID NO: 68712 - protein, 340 aa, Massilia timonae
  misc_feature (1)..(340): tr|K9DY01|K9DY01_9BURK S-adenosylmethionine:tRNA ribosy ltransferase-isomerase OS=Massilia timonae CCUG 45783 O X=883126 GN=queA PE=3 SV=1
MYSLSDFDFELPPERIAQLPLPDRSASRLLQLDGDQILDRHFSDIVDQLQPGDLLVMNNTRVLKARFFGVKETGGQVEVLVERVLDDRTVLAQVRASKSPKPGNRIRLADAFDVTTGARAGEFFTLHFEGDVFELIEAHGRLPLPPYIEHSADEFDEQRYQTVYSKEPGAVAAPTAGLHFDQPLLDKLAQKGVKFAYVTLHVGAGTFQPVRVEDLSEHKMHTEWYTIAQETVDAVRAAKAAGRDVVAVGTTSLRALESASQSGELVAGSADTALFITPGYTFKTVTRLVTNFHLPKSTLLMLVSAFAGFEPIRKAYAHAIANEYRFFSYGDAMLLTTESR

SEQ ID NO: 68713 - protein, 341 aa, Massilia umbonata
  misc_feature (1)..(341): tr|A0A4P8I239|A0A4P8I239_9BURK S-adenosylmethionine:tRN A ribosyltransferase-isomerase OS=Massilia umbonata OX= 864828 GN=queA PE=3 SV=1
MYSLSDFDFNLPPERIAQFPLPDRSASRLLHVDETRLVDRKFTDILDLLQPGDLLVMNDTRVLKARFFGVKDSGGKVEVLVERVLDTHTVLAQVRASKSPGPGVKIRLAEAFDVTVGERAGEFFTLKFDADVFDLIEQYGRLPLPPYIEHAPGEVDETRYQTVFNKVPGAVAAPTAGLHFDEALLQKLKDKGVNFAYVTLHVGAGTFQPVRTENLAEHKMHTEWYTMPQATVDAVKAARAAGRDVIAVGTTSLRALESASQSGTIEAGSADTALFITPGYRFKSVTRLITNFHLPKSTLLMLVSAFAGFDEIRAAYAHAIANEYRFFSYGDAMLLTTPNRA

SEQ ID NO: 68714 - protein, 340 aa, Massilia yuzhufengensis
  misc_feature (1)..(340): tr|A0A1I1T6Z5|A0A1I1T6Z5_9BURK S-adenosylmethionine:tRN A ribosyltransferase-isomerase OS=Massilia yuzhufengens is OX=1164594 GN=queA PE=3 SV=1
MYSLSDFDFDLPPERIAQLPLPDRSASRLLQLDGDRITDRHFADIVDQLQPGDLLVMNNTRVLKARFFGVKETGGQVEVLVERVLDNRTVLAQVRASKSPKPGNRIRLANAFDVVTGERAGEFFTLHLEGDVFDLIEAHGRLPLPPYIEHSADEFDEQRYQTVYSKEPGAVAAPTAGLHFDQPLLDRLAAKGVQFAYVTLHVGAGTFQPVRVEDLSAHQMHTEWYTIPQETVDAVRAAKLAGREVVAVGTTSLRALESGSQTGELLAGSADTALFITPGYTFKTVTRLVTNFHLPKSTLLMLVSAFAGYEAIRKAYAHAIANEYRFFSYGDAMLLTTTSR

SEQ ID NO: 68715 - protein, 341 aa, Massilimicrobiota sp.
  misc_feature (1)..(341): tr|A0A1Y4R3U8|A0A1Y4R3U8_9FIRM S-adenosylmethionine:tRN A ribosyltransferase-isomerase OS=Massilimicrobiota sp. An142 OX=1965564 GN=queA PE=3 SV=1
MKISEFDYDLPEELIAQTPLQKRDTSRLMVLDRKTKTIEDKHFYDILDYLHAGDILVRNNTKVIPARLYGIKEETGGHVEVLLLKDLGEDVWECLVGNARIVKMDTIITFGDGSLKAKCVHIGEEGIRHFQMMYEGIFYEVLDHLGTMPLPPYIKEKLDDPHRYQTVYAKVEGSAAAPTAGLHFTEDILKKAQDKGVEILDVTLHVGLGTFRPVKVDDVLEHHMHSEFYMIDEDTAQKLNQAKANGQRIISVGTTSTRTLEANFKKYGKFQATQESTDIFIYPGYQFEAIDALITNFHLPKSTLVMLVSAFADKDYIMKAYHHAVEEKYRFFSFGDCMFIQ

SEQ ID NO: 68716 - protein, 341 aa, Massilimicrobiota sp.
  misc_feature (1)..(341): tr|A0A1Y3TFI3|A0A1Y3TFI3_9FIRM S-adenosylmethionine:tRN A ribosyltransferase-isomerase OS=Massilimicrobiota sp. An80 OX=1965658 GN=queA PE=3 SV=1
MKISEFDYDLPEELIAQTPLQKRDTSRLMVLDRKTKTIEDKHFYDILDYLHAGDILVRNNTKVIPARLYGIKEETGGHVEVLLLKDLGEDVWECLVGNARIVKMDTVITFGDGSLKAKCVHIGEEGIRHFQMMYEGIFYEVLDHLGTMPLPPYIKEKLDDPHRYQTVYAKVEGSAAAPTAGLHFTEDILKKVQDKGVEILDVTLHVGLGTFRPVKVDDVLEHHMHSEFYMIDEDTAQKLNQAKANGQRIISVGTTSTRTLEANFKKYGKFQATQESTDIFIYPGYQFEAIDALITNFHLPKSTLVMLVSAFADKDYIMKAYHHAVEEKYRFFSFGDCMFIQ

SEQ ID NO: 68717 - protein, 341 aa, Massilimicrobiota timonensis
  misc_feature (1)..(341): tr|A0A1Y4T1W4|A0A1Y4T1W4_9FIRM S-adenosylmethionine:tRN A ribosyltransferase-isomerase OS=Massilimicrobiota tim onensis OX=1776392 GN=queA PE=3 SV=1
MKLSEFDYNLPEELIAQTPLQKRDTSRLMVLNRKERTIEDKHFYDILDYLHAGDILVRNNTKVIPARLYGTKEETNGHVEVLLLKDLGNNVWECLVGNARIVKMGTIITFGDGSLKAKCIYIGEEGIRHFEMIYDGIFYEILDHLGMMPLPPYIKEKLEDSSRYQTVYAKIEGSAAAPTAGLHFTDEILEKVQEKGVEILDVTLHVGLGTFRPVKVDDVLEHHMHSEFYMIDEETAQKLNTAKANGQRIISVGTTSTRTLEANYKKYGQFKVTQESTDIFIYPGYQFEAIDALITNFHLPKSTLVMLVSAFADKEFIMKAYHHAVEEKYRFFSFGDCMFIQ

SEQ ID NO: 68718 - protein, 328 aa, Massilioclostridium sp.
  misc_feature (1)..(328): tr|A0A316TAY7|A0A316TAY7_9CLOT S-adenosylmethionine:tRN A ribosyltransferase-isomerase (Fragment) OS=Massiliocl ostridium sp. OX=1935928 GN=DBX37_01915 PE=3 SV=1
MKTSDFYFDLPQELIAQTPIEPRDHSRMLVLSRETGEITHKHFYDVIDYLNEGDTLIVNDSRVLPARIYGEKVDTGSKIEFLLLEQKQQDVWEILCKPGKKAKPGVRFNFHNLLEAEVLEVLEDGNRIVKFHYEGNFFHILDQIGQMPLPPYITEKLQDQERYQTVYSHEVGSAAAPTAGLHFTKELMEKIRQKGVNIAAVTLHVGLGTFRPVKVDDVTKHKMHSEHYEISPKTAELIRKTKQNGKRVFAVGTTSCRTLESVGTAHNGEIVAEDGYTDIFIYPGYQFKVIDGLITNFHLPESTLIMLVSAFAGYDSIMNAYQTAVKEK

SEQ ID NO: 68719 - protein, 390 aa, Mastigocladus laminosus
  misc_feature (1)..(390): tr|A0A4D9C8I2|A0A4D9C8I2_MASLA S-adenosylmethionine:tRN A ribosyltransferase-isomerase OS=Mastigocladus laminos us UU774 OX=1594576 GN=queA PE=3 SV=1
MQEQLAKTNSHLISKQTSENSELDFSLAGYDYELPTELIAQNPAVPRDGSRLLVVNSQNVGTETAPQHYIFRDLPQILRPGDLLVMNNTRVLPARLYGHKSTGAEVEVLLLEERQHNRWLALVKPGKRFKRGSQIVFTAKVNTDGDHPTTPVPSHSLTATVIATDAATGGRLLQFELPEEVSLLQLLDAFGEIPLPPYITTTEAQSEQYQTVYAQNPGAVAAPTAGLHFTPELLQKLCEQNINQAFVTLHVGVGTFRPVEVENVTTHTMHEEWIEVPQNTVEQIRATKAAGGRIIAVGTTVVRALEGAATKGELQPFCGKTNLFIYPGYQWRVVEGMITNFHLPRSSLLMLVSALIGRQRLLNIYQEAIASQYRFYSFGDAMLILPEATI

SEQ ID NO: 68720 - protein, 381 aa, Mastigocoleus testarum
  misc_feature (1)..(381): tr|A0A0V7ZNW2|A0A0V7ZNW2_9CYAN S-adenosylmethionine:tRN A ribosyltransferase-isomerase OS=Mastigocoleus testaru m BC008 OX=371196 GN=queA PE=3 SV=1
MQQHTPDLLRENHELDFNLQGYDYELPPEFIAQNPVVPRDSSKLLLVNTLSAEEEKANGHYIFRDLPEILKPGDLLVMNNTQVIPARLYGRKSTGAEVEVLLLQEQQSNCWLALVKPGKRFKLGTKIIFTTGGNQPENGGGTFPNSLTAKVLETDEATGGRLLQFDLPSDVSLLQCLDKFGEVPFPPYITDTKAASEQYQTVYAKNPGAVAAPTAGLHFTPELLEKLSQKGIGSSFVTLHVGVGTFRPVEVENVTTHKMHEEWIDVPRETVEKIRQTKAAGGRVIAVGTTVARSLEGAAIGGEIQPFTGKTDIFIYPGYKWQAIDGLITNFHLPRSSLMMMVSALIGRQRLLDVYQEAIALKYRFYSFGDAMLILPYVSKE

SEQ ID NO: 68721 - protein, 409 aa, Mediterranea sp.
  misc_feature (1)..(409): tr|A0A1Y4HPQ5|A0A1Y4HPQ5_9BACT S-adenosylmethionine:tRN A ribosyltransferase-isomerase OS=Mediterranea sp. An20 OX=1965586 GN=queA PE=3 SV=1
MTQDPKHIRISDFSYNLPDERIAKFPLPVRDESKLLLYRHGEVSEDHFYHLPQYIPAGALMVFNNTKVIQARLHFRKDTGAFIEVFCLEPLEPHDYALNFQQTGHVSWLCLIGNLKKWKEGTLHREMTVKGMNVTLSATRGECRGTSHRVDFEWNNSQVSFADILEVFGELPIPPYLNRKTEASDLETYQTVYSKIKGSVAAPTAGLHFTPRVLDALKEKGIELEELTLHVGAGTFRPVKSEEIEGHEMHTEYISVSRHTIARLIAHGGQAIAVGTTSVRTLESLYHIGLTLMKHPDASDEELTVRQWQPYECSPDELATPATQALSAVLAYLDRHGLETLHTSTQIIIAPGYDYKIVKAMVTNFHQPQSTLLLLVSAFVHNDWRTIYNYALKHDFRFLSYGDSSLLVP

SEQ ID NO: 68722 - protein, 352 aa, Mediterranea sp.
  misc_feature (1)..(352): tr|A0A1Y4HVK8|A0A1Y4HVK8_9BACT S-adenosylmethionine:tRN A ribosyltransferase-isomerase OS=Mediterranea sp. An20 OX=1965586 GN=queA PE=3 SV=1
MKLSQFKFKLPEEKIALHPAKYRDESRLMVLHRKTGEIEHRVFKDILDYFDDQDVFIFNDTKVFPARLYGNKEKTGARIEVFLLRELNEELRLWDVLVDPARKIRIGNKLYFGEDDSMVAEVIDNTTSRGRTLRFLYDGPHDEFKKALYALGETPLPHSIINRPVEPEDAERFQSIFACNEGAVTAPTANLHFSRELMKRMEIKGINFAFVTLHAGLGNFREIDVEDLTKHKTDSEQMFVTSEAVEIVNRAKDLHKQVCAVGTTVMRAIESTVSTDGHLKPYEGWTNKFIFPPYDFTVANAMVANFQMPLSTLLMIIAAFGGYEQVMNAYDVALKEDYRFGTYGDAMLITDK

SEQ ID NO: 68723 - protein, 359 aa, Mediterraneibacter butyricigenes
  misc_feature (1)..(359): tr|A0A391PE89|A0A391PE89_9FIRM S-adenosylmethionine:tRN A ribosyltransferase-isomerase OS=Mediterraneibacter bu tyricigenes OX=2316025 GN=queA PE=3 SV=1
MKTSDFYYDLPEELIAQDPLEDRSSSRMLVLNKVTGEWEHRVFKDIIDYLNPGDCLVINDTKVIPARLIGVKPDTGAKIEVLLLKRKEKDVWEALVRPGRKLRPGAKVSFGEGLLTGEILEIAEEGNRLIKFHYDGIFEEILDQLGQMPLPPYIKHQLKERERYNTVYAVHEGSAAAPTAGLHFTPELLEQIEKKGIDIARITLHVGLGTFRPVKADEIQDHHMHSEYYEISEEAAQKVNATKERGGRVICVGTTSCRTVESAADENGRLKACSGWTEIFIYPGYKFKILDGLITNFHLPESTLVMLVSALAGREHILAAYEEAVKERYRFFSFGDAMYIGTTPNQTNVGSSQESEKSK

SEQ ID NO: 68724 - protein, 341 aa, Mediterraneibacter sp.
  misc_feature (1)..(341): tr|A0A4Q8U155|A0A4Q8U155_9FIRM S-adenosylmethionine:tRN A ribosyltransferase-isomerase OS=Mediterraneibacter sp . gm002 OX=2527876 GN=queA PE=3 SV=1
MKTSDFYYDLPEELIAQDPLEDRSSSRLLILDKETGKTEHHIFKEIIDYLNPGDCLVINDTKVIPARLIGEKIGTGAKIEVLLLKRKEKDVWETLVKPGKKMKVGAQVSFGNGLLIGEVIEVVEEGNRLIKFHYEGIFEEVLDQLGEMPLPPYITHQLQDRNRYNTVYAKNEGSAAAPTAGLHFTPELLDAIQKKGVDIARVTLHVGLGTFRPVKVEDVTEHHMHSEFYQVDEEAAEKINRAKDGAGRVICVGTTSCRTIESAADETGHLKPCSGWTEIFIYPGYKFKMLDCLITNFHLPESTLIMLVSALAGKEHVMAAYEEAVKDRYRFFSFGDAMFIK

SEQ ID NO: 68725 - protein, 341 aa, Megamonas funiformis
  misc_feature (1)..(341): tr|H3KA11|H3KA11_9FIRM S-adenosylmethionine:tRNA ribosy ltransferase-isomerase OS=Megamonas funiformis YIT 1181 5 OX=742816 GN=queA PE=3 SV=1
MLLNEFDYNLPEELIAQTPCAKRDHSRLMVLNRKEKTIEHKHFYDIKQYLRKGDTLVFNDTKVMPARLIGHRAKTGGKVEVFLLKRLTNTNQWEVLVKPGKKAQLGNIIEFSDELACEVVGHTNFGGRIVEFKFDGIFEEILDRLGETPLPPYIHEKLEDKNRYQTVYAREEGSAAAPTAGLHFTKELLAEIKEMGVNLAFVTLHVGLGTFRPVNVDNIEDHVMHKEFYHIEKEAADIINQTKANGGRVIAVGTTSIRTLESAAKEDGTISPIAEETGIFIYPGYKFKIVDSIITNFHLPKSTLIMLISAFAGREYVLSAYEEAVKEKYRFFSFGDAMFIE

SEQ ID NO: 68726 - protein, 340 aa, Megamonas hypermegale
  misc_feature (1)..(340): tr|A0A239T7B9|A0A239T7B9_9FIRM S-adenosylmethionine:tRN A ribosyltransferase-isomerase OS=Megamonas hypermegale OX=158847 GN=queA PE=3 SV=1
MLLSDFDYNLPEELIAQTPCQQRDHSRLMVLNRKDKSISHKHFYDLKQYLKKGDTLVFNDTKVIPARLIGHRAKTGGKVEVFLLRRTEGNRWETLVKPGKKAQIGNIIEFSDELSCEVIDHTDFGGRIVEFKFDGIFEEILDRLGETPLPPYIHEKLADKNRYQTVYARENGSAAAPTAGLHFTKELLEEIKAMGVNLAFVTLHVGLGTFRPVNVDNIEDHVMHKEFYHIEKEAADIINNTKKNGGRVIAVGTTSIRTLESAAKEDGTIEPIADETGIFIYPGYKFKIVDAIVTNFHLPKSTLIMLISAFAGREYVLSAYEEAVREKYRFFSFGDAMFIE

SEQ ID NO: 68727 - protein, 341 aa, Megamonas hypermegale
  misc_feature (1)..(341): tr|A0A378P1A2|A0A378P1A2_9FIRM S-adenosylmethionine:tRN A ribosyltransferase-isomerase OS=Megamonas hypermegale OX=158847 GN=queA PE=3 SV=1
MLLNEFDYNLPEELIAQTPCAKRDHSRLMVLNRKEKTIEHKHFYDIKQYLRKGDTLVFNDTKVMPARLIGHRAKTGGKVEVFLLKRLTNTNQWEVLVKPGKKAQLGNVIEFSDELACEVVGHTDFGGRIVEFKFDGIFEEILDRLGETPLPPYIHEKLEDKNRYQTVYAREEGSAAAPTAGLHFTKELLAEIKEMGVNLAFVTLHVGLGTFRPVNVDNIEDHVMHKEFYHIEKEAADIINQTKANGGRVIAVGTTSIRTLESAAKEDGTISPIAEETGIFIYPGYKFKIVDSIITNFHLPKSTLIMLISAFAGREYVLSAYEEAVKEKYRFFSFGDAMFIE

SEQ ID NO: 68728 - protein, 341 aa, Megamonas rupellensis
  misc_feature (1)..(341): tr|A0A411ZV58|A0A411ZV58_9FIRM S-adenosylmethionine:tRN A ribosyltransferase-isomerase OS=Megamonas rupellensis OX=491921 GN=queA PE=3 SV=1
MLLNEFDYNLPEELIAQTPCAKRDHSRLMVLNRKEKTIEHKHFYDIKQYLRKGDTLVFNDTKVMPARLIGHRAKTGGKVEVFLLKRLTNTNQWEVLVKPGKKAQLGNIIEFSDELACEVVGHTDFGGRIVEFKFDGIFEEILDRLGETPLPPYIHEKLEDKNRYQTVYAREEGSAAAPTAGLHFTKELLAEIKEMGVNLAFVTLHVGLGTFRPVNVDNIEDHVMHKEFYHIEKEAADIINQTKANGGRVIAVGTTSIRTLESAAKEDGSISPIAEETGIFIYPGYKFKIVDSIITNFHLPKSTLIMLISAFAGREYVLSAYEEAVKEKYRFFSFGDAMFIE

SEQ ID NO: 68729 - protein, 341 aa, Megamonas rupellensis
  misc_feature (1)..(341): tr|A0A412CH06|A0A412CH06_9FIRM S-adenosylmethionine:tRN A ribosyltransferase-isomerase OS=Megamonas rupellensis OX=491921 GN=queA PE=3 SV=1
MLLNEFDYNLPEELIAQTPCAKRDHSRLMVLNRKEKTIEHKHFYDIKQYLRKGDTLVFNDTKVMPARLIGHRAKTGGKVEVFLLKRLTNTNQWEVLVKPGKKAQLGNVIEFSDELACEVVGHTDFGGRIVEFKFDGIFEEILDRLGETPLPPYIHEKLEDKNRYQTVYAREEGSAAAPTAGLHFTKELLAEIKEMGVNLAFVTLHVGLGTFRPVNVDNIEDHVMHKEFYHIEKEAADIINQTKANGGRVIAVGTTSIRTLESAAKEDGSISPIAEETGIFIYPGYKFKIVDSIITNFHLPKSTLIMLISAFAGREYVLSAYEEAVKEKYRFFSFGDAMFIE

SEQ ID NO: 68730 - protein, 341 aa, Megamonas sp.
  misc_feature (1)..(341): tr|A0A1H8CT71|A0A1H8CT71_9FIRM S-adenosylmethionine:tRN A ribosyltransferase-isomerase OS=Megamonas sp. Calf98- 2 OX=1855330 GN=queA PE=3 SV=1
MLLNEFDYNLPEELIAQTPCAKRDHSRLMVLNRKEKTIEHKHFYDIKQYLRKGDTLVFNDTKVMPARLIGHRAKTGGKVEVFLLKRLTNTNQWEVLVKPGKKAQLGNVIEFSDELACEVVGHTDFGGRIVEFKFDGIFEEILDRLGETPLPPYIHEKLEDKNRYQTVYAREEGSAAAPTAGLHFTKELLAEIKEMGVNLAFVTLHVGLGTFRPVNVDNIEDHVMHKEFYHIEKKAADIINQTKANGGRVIAVGTTSIRTLESAAKEDGSISPIAEETGIFIYPGYKFKIVDSIITNFHLPKSTLIMLISAFAGREYVLSAYEEAVKEKYRFFSFGDAMFIE

SEQ ID NO: 68731 - protein, 339 aa, Megasphaera cerevisiae
  misc_feature (1)..(339): tr|A0A0J6WUB6|A0A0J6WUB6_9FIRM S-adenosylmethionine:tRN A ribosyltransferase-isomerase OS=Megasphaera cerevisia e DSM 20462 OX=1122219 GN=queA PE=3 SV=1
MKLTDFSYDLPKELIAQHPAEPRDHARLMMYDRKSGAVEHRHFYDLAEELHEGDVLVFNDSRVIPARLYGKRLPTGGKVEVLLLTPVAEDSWEVLVKPGKKALPGTTLAFDGGMTAEVIDKTEFGGRILKFHYDGVFDDIIDAIGEMPLPPYIHEKMENPEEYQTVYARERGSAAAPTAGLHFTDELLEKIRAKGVEEVFITLHVGLGTFRPVEEENIEDHAMHSEFYSITKSAADTINQARTEGRRVIAVGTTSIRTLESAGTTGKLQAGSGWTNIFIYPGFTFHIVDALVTNFHLPESTLLMLISALSDRDKILHAYTLAVAEKYRFFSFGDAMFIR

SEQ ID NO: 68732 - protein, 339 aa, Megasphaera elsdenii
  misc_feature (1)..(339): tr|G0VPU2|G0VPU2_MEGEL S-adenosylmethionine:tRNA ribosy ltransferase-isomerase OS=Megasphaera elsdenii DSM 2046 0 OX=1064535 GN=queA PE=3 SV=1
MKLTDFYYDLPKELIAQHPAEPRDHARLMLYDRQTGAVEHKYFYDLVDELHEGDVLVFNDSRVIPARLHGKRTPTGGKVEVLLLTPVGDDRWEVLVKPGKKALPGTVIEFPEGLTGTVEDRTDFGGRIIKFAYEGDFDAIIDKIGEMPLPPYIHEKMEDPDEYQTVYANERGSAAAPTAGLHFTEELLQKIRDKGVEEVFVTLHVGLGTFRPVEEENIEDHQMHSEFYSITPEAAATINKAKAEGRRVIAVGTTSIRTLESAGTTGTLQAGSGWTNIFIYPGFTFHIVDALVTNFHLPESTLLMLISALSTREKILKAYEIAVQEKYRFFSFGDAMFIH

SEQ ID NO: 68733 - protein, 339 aa, Megasphaera elsdenii; identical to SEQ ID NO: 68732
  misc_feature (1)..(339): tr|R7MW42|R7MW42_9FIRM S-adenosylmethionine:tRNA ribosy ltransferase-isomerase OS=Megasphaera elsdenii CAG:570 OX=1263087 GN=queA PE=3 SV=1

SEQ ID NO: 68734 - protein, 339 aa, Megasphaera genomosp.
  misc_feature (1)..(339): tr|A0A2J8BBG8|A0A2J8BBG8_9FIRM S-adenosylmethionine:tRN A ribosyltransferase-isomerase OS=Megasphaera genomosp. type_2 OX=699193 GN=queA PE=3 SV=1
MKLVDFNYELPEELIAQHPVEPRDHARLMIYDKETGEVGHRHFYDLVDELKQGDVLVFNDSRVIPARLHGKKKETGGKVEVLLLTPLGDDRWEVLVKPGKKALPGTEIVFSSALRGVVEARTDFGGRIVRFIYDGVFDELLDAVGEMPLPPYIHEKPDDPEDYQTVYARERGSAAAPTAGLHFTETLLQKIRDKGVKTVFVTLHVGLGTFRPVSEETIENHRMHSEFYSVTPEAAACINMAKKEGRRVIAVGTTSIRTLESAGKSGVVQAGSAWTDIFIYPGYTYRIADALVTNFHLPESTLLMLISALSTREKILHAYAIAVAERYRFFSFGDAMFIR

SEQ ID NO: 68735 - protein, 339 aa, Megasphaera genomosp.
  misc_feature (1)..(339): tr|D3LT20|D3LT20_9FIRM S-adenosylmethionine:tRNA ribosy ltransferase-isomerase OS=Megasphaera genomosp. type_1 str. 28L OX=699218 GN=queA PE=3 SV=1
MKLSDFSYELPKELIAQHPAEPRDHARLMVYDKITGAVAHRYFYDLAAELHKGDVLVFNDSRVIPARLHGKKKETGGKVEVLLLTPVGEDCWEVLVKPGKKALPGTTIEFSSRLCATVKERTDFGGRIVQFHYDGVFDEILDQIGEMPLPPYIHEKMKNPDEYQTVYARERGSAAAPTAGLHFTRNLMEKIRAKGVETVFVTLHVGLGTFRPVEEENVEDHEMHSEFYSVTPAAAAAVNRAKAEGRRVVAVGTTSIRTLESAGKEGVVQAGSGWTDIFIYPGYTYRIADALVTNFHLPESTLLMLISAMSKREKILQAYRIAVAEGYRFFSFGDAMFIR

SEQ ID NO: 68736 - protein, 339 aa, Megasphaera hexanoica
  misc_feature (1)..(339): tr|A0A344MIH0|A0A344MIH0_9FIRM S-adenosylmethionine:tRN A ribosyltransferase-isomerase OS=Megasphaera hexanoica OX=1675036 GN=queA PE=3 SV=1
MKLTDFSYELPKELIAQHPAEPRDHARLMLYDKKTGAVEHKHFYDLADELQAGDVLVFNDSKVIPARLYGKRVPTGGKVEVLLLTPVGEDRWEVLVKPGKKALPGTTIEFPGGLQAEVLDRTDFGGRVVHFTYDGVFDDIIDQIGEMPLPPYIHEKMEDPDEYQTVYARERGSAAAPTAGLHFTDELLQKIRDKGVEEVFVTLHVGLGTFRPVEEENIEDHQMHSEFYSITPEAADAINRAKAEGRRIIAVGTTSIRTLESAGTTGTLKAGSGWTNIFIYPGFTFHIVDALVTNFHLPESTLLMLISALSTREQILHAYDIAVREKYRFFSFGDAMFIH

SEQ ID NO: 68737 - protein, 341 aa, Megasphaera micronuciformis
  misc_feature (1)..(341): tr|E2Z9B5|E2Z9B5_9FIRM S-adenosylmethionine:tRNA ribosy ltransferase-isomerase OS=Megasphaera micronuciformis F 0359 OX=706434 GN=queA PE=3 SV=1
MILKLSDFSYELPQELIAQHPAEPRDTARLMLYDKKTGETENKIFRQLTDELHQGDVLVFNDSKVIPARLHGTRVPTGGKVEVLLLTPVGEDRWEVLVKPGKKALPGSTLSFGERLTGVVEDRTDYGGRVIHFTYDGVFDHIIEEIGEMPLPPYIHKKPENPDDYQTVYAREKGSAAAPTAGLHFTDELLEKIRDKGVETVFVTLHVGLGTFRPVEEENIEDHVMHSEYYSITPEAAAAVNRAKEEGRRIVAVGTTSVRTLESAAEKGRLKAGAGKTNIFIYPGYTFRIVDALVTNFHLPESTLLMLISALSDREHILKAYETAVREKYRFFSFGDAMFIH

SEQ ID NO: 68738 - protein, 339 aa, Megasphaera paucivorans
  misc_feature (1)..(339): tr|A0A1G9UVB7|A0A1G9UVB7_9FIRM S-adenosylmethionine:tRN A ribosyltransferase-isomerase OS=Megasphaera paucivora ns OX=349095 GN=queA PE=3 SV=1
MKLSDFTYELPKELIAQHPAEPRDHARLMVYDKKTGDVAHHYFYDLVDELQSGDVLVFNDSKVIPARLFGHRIPTGGKVEVLLLTPCGEDTWEVLVKPGKKALPGTQLAFEGGMTADILDKTDFGGRIVKFNYDGVFDDIIDTIGEMPLPPYIHEKLEDKEQYQTVYAREKGSAAAPTAGLHFTEELLKKIRDKGVQEVFVTLHVGLGTFRPVEEENIEDHEMHSEFYSITPEAAAVVNRAKMEGRRVIAVGTTSIRTLESAGTSGELKAGSGWTNIFIYPGFTFHIVDALVTNFHLPESTLLMLISALSEREKILKAYEIAVQEQYRFFSFGDAMFIR

SEQ ID NO: 68739 - protein, 339 aa, Megasphaera sp.
  misc_feature (1)..(339): tr|S7HKS1|S7HKS1_9FIRM S-adenosylmethionine:tRNA ribosy ltransferase-isomerase OS=Megasphaera sp. NM10 OX=12731 03 GN=queA PE=3 SV=1
MKLTDFYYDLPKELIAQHPAEPRDHARLMLYDRQTGAVEHKYFYDLVDELHPGDVLVFNDSRVIPARLHGKRVPTGGKVEVLLLTPVGDDRWEVLVKPGKKALPGTTIEFPEGLTGTVEDRTDFGGRIIKFAYQGNFDDIIDKIGEMPLPPYIHEKMEDPNEYQTVYANERGSAAAPTAGLHFTEELLQKIRDKGVEEVFVTLHVGLGTFRPVEEENIEDHQMHSEFYSITPEAAAKINKAKAEGRRVIAVGTTSIRTLESAGTTGTLQAGSGWTNIFIYPGFTFHIVDALVTNFHLPESTLLMLISALSTREKILKAYEIAVQEKYRFFSFGDAMFIH

SEQ ID NO: 68740 - protein, 339 aa, Megasphaera sp.
  misc_feature (1)..(339): tr|A0A3C1CRC6|A0A3C1CRC6_9FIRM S-adenosylmethionine:tRN A ribosyltransferase-isomerase OS=Megasphaera sp. OX=20 23260 GN=queA PE=3 SV=1
MKLTDFSYELPKELIAQHPAEPRDHARLMLYDKKTGAVEHKHFYDLVDELQAGDVLVFNDSKVIPARLYGKRVPTGGKVEVLLLTPVGEDRWEVLVKPGKKALPGTTIEFPGGLQAEVLDRTDFGGRVVHFTYDGVFDDIIDQIGEMPLPPYIHEKMEDPDEYQTVYARERGSAAAPTAGLHFTDELLQKIRDKGVEEVFVTLHVGLGTFRPVEEENIEDHQMHSEFYSITPEAADAINRAKAEGRRIIAVGTTSIRTLESAGTTGTLKAGSGWTNIFIYPGFTFHIVDALVTNFHLPESTLLMLISALSTREQILHAYDIAVREKYRFFSFGDAMFIH

SEQ ID NO: 68741 - protein, 339 aa, Megasphaera stantonii
  misc_feature (1)..(339): tr|A0A346AXK8|A0A346AXK8_9FIRM S-adenosylmethionine:tRN A ribosyltransferase-isomerase OS=Megasphaera stantonii OX=2144175 GN=queA PE=3 SV=1
MKLSDFYYDLPKELIAQHPAEQRDHARLMLYDRQSGAVEHKHFYDLIDELHQGDVLVFNDSRVIPARLYGKKSPTGGKVEVLLLTPVGEDTWEVLVKPGKRALPGAVIEFPEGLTCQILDRTDFGGRIVKFEYDGVFDDIIDKIGEMPLPPYIHEKLEDPDEYQTVYARERGSAAAPTAGLHFTDELLERIKAKGVELVFVTLHVGLGTFRPVEEENIEDHEMHSEFYSITEEAAQTINRAKAEGRRIVAVGTTSIRTLESAGTTGVLQAGSGWTNIFIYPGYTFHIVDALVTNFHLPESTLLMLISAMSTREKILKAYEIAVQEKYRFFSFGDAMFIR

SEQ ID NO: 68742 - protein, 342 aa, Mehylophilales bacterium
  misc_feature (1)..(342): tr|A0A258LB50|A0A258LB50_9PROT S-adenosylmethionine:tRN A ribosyltransferase-isomerase OS=Mehylophilales bacter ium 35-46-6 OX=1970535 GN=queA PE=3 SV=1
MKTQDFDFYLPSHLIAQHPTQERTASRMLCLDGNSGNLQDKLFLDFPARCNAGDLLIFNDTRVIKARLFGHKESGGNVEVLIERVINSHTAYAHVRASRSPKIGSRIRLSDAFDVTVTARHDDLFELQFLSEVSVFDLLEQHGALPLPPYITHAATGDDEERYQTVFAKNLGAVAAPTAGLHFNENVLEALQQKGVNIAYVTLHVGAGTFQPVRVDDIAEHKMHSEWFSIPQSTVDLINSTKANGGRVTAIGTTALRALESAAQSGVLKAGDGDTDIFITPGYQFKVVDRLFTNFHLPKSTLLMLVSAFAGAEHIKKAYAHAVANEYRFFSYGDAMLLEKQS

SEQ ID NO: 68743 - protein, 338 aa, Meiothermus cateniformans
  misc_feature (1)..(338): tr|A0A399EB07|A0A399EB07_9DEIN S-adenosylmethionine:tRN A ribosyltransferase-isomerase OS=Meiothermus catenifor mans OX=482825 GN=queA PE=3 SV=1
MNLEDFDYPLPPELIAQSGAEPRDTSRLMVIERSSGQMAHRIFRDLPQYLRAGDVLVLNQSKVIPARTFATNPHGTALEVLLVREIPSSPGLWEALLKPAKRAKVGSRLTFPDGLFATVEAIEADGTRLLRFSGNVWEHLENIGKMPLPPYIHASVDPARYQTVYAKTPGSVAAPTAGLHFTPELLDRVRGLGVDIHYVTLHVGPGTFKPVHDDPDRHVMHLEPYEVSPQTAEAINRAKAEGRRVIAVGTTVVRTLETAYSAELSGVRAGSGETQLFIRPGFRFNVIDALITNFHLPKSTLLMLVSAFMGHGLMKQAYQTAVAERYRFYSLGDAMLIL

SEQ ID NO: 68744 - protein, 334 aa, Meiothermus granaticius
  misc_feature (1)..(334): tr|A0A399F704|A0A399F704_9DEIN S-adenosylmethionine:tRN A ribosyltransferase-isomerase OS=Meiothermus granatici us NBRC 107808 OX=1227551 GN=queA PE=3 SV=1
MSGLSYHYALPPELIAQEGVEPRDASRLMVLHRDSGRLEHRIFREIPLYLRPGDVLVLNESKVIPARLYARKPTGARIETFLVRDLGENRWEVLLRPAHKAPVGTELWFPDGLRARVEGVEADGTRVLRFSESVWEHLERLGQTPLPPYIHAAVDPQRYQTVYAKTPGSVAAPTAGLHFTPELLERIQAMGVELHTVTLHVGPGTFKPVKGDPEAHPMHTEPYEIPAESARAINQAKAEGRRVIAVGTTVVRTLESAWGREGLEAGVGQTQLFIRPGFTFRAVDALVTNFHLPNSTLLMLVSAFAGHERVLQAYQTAVEERYRFYSLGDAMLIL

SEQ ID NO: 68745 - protein, 339 aa, Meiothermus hypogaeus
  misc_feature (1)..(339): tr|A0A511R6D2|A0A511R6D2_9DEIN S-adenosylmethionine:tRN A ribosyltransferase-isomerase OS=Meiothermus hypogaeus NBRC 106114 OX=1227553 GN=queA PE=3 SV=1
MNLEDFDYHLPPELIAQSGAEPRDASRLMVIHRSTGQIEHRIFRDLPGYLQAGDVLVLNESRVIPARTFATNPYGTLLEVLLVREIPTDAGSGGLWEALLKPARRARVGSVLTFADGLQAMVEAVEEDGTRLLRFAGNVWEHLENIGKTPLPPYIRASVDPERYQTVYAKTPGSVAAPTAGLHFTPELLDRIRGLGVTICYVTLHVGPGTFKPVQGDPNQHHMHLEPYEVPRPTAQAINQAKAEGRRVIAVGTTVVRTLETAWNGTQVRAGAGETQLFIRPGFQYHVVDALVTNFHLPKSTLLMLVSAFMGHELMQWAYQTAVAERYRFYSLGDAMLIL

SEQ ID NO: 68746 - protein, 336 aa, Meiothermus luteus; identical to SEQ ID NO: 65798
  misc_feature (1)..(336): tr|A0A399EBL7|A0A399EBL7_9DEIN S-adenosylmethionine:tRN A ribosyltransferase-isomerase OS=Meiothermus luteus OX =2026184 GN=queA PE=3 SV=1

SEQ ID NO: 68747 - protein, 339 aa, Meiothermus roseus
  misc_feature (1)..(339): tr|A0A399F3N1|A0A399F3N1_9DEIN S-adenosylmethionine:tRN A ribosyltransferase-isomerase OS=Meiothermus roseus OX =1644118 GN=queA_1 PE=3 SV=1
MNRLDDYDYHLPPELIAQAGVEPRDASRLMVLHRDDGGLEHRVFRDVVEYLREGDVLVLNQSKVIPARLFATNPHGTPIEVLLVRELSLLAEGRGSVWEAMLKPAKRAKGGLRFADGLEAEVIAVEEDGTRVLRFSDNVWEHLEALGQTPLPPYIHASVDPRRYQTVYARTPGSVAAPTAGLHFTPELLERIRAMGVETRYVTLHVGPGTFKPVKDDPERHTMHAEPYEVPLETAEAVGRAKAEGRRVVAVGTTVVRTLESAWQEGKLRAGQGETQLFIRPGFTFNVVDALITNFHLPRSTLLMLVSAFAGHELTMRAYRTAVEQRYRFYSLGDAMLIL

SEQ ID NO: 68748 - protein, 359 aa, Meiothermus roseus
  misc_feature (1)..(359): tr|A0A399ETE4|A0A399ETE4_9DEIN S-adenosylmethionine:tRN A ribosyltransferase-isomerase OS=Meiothermus roseus OX =1644118 GN=queA_2 PE=3 SV=1
MRVGSLEPGLEFSLPPELEAHAPPEARGLARDEVRLLVSHKQGDRLVHARFRELGEFLREGDVLVINTSGTLPAALPAFRDDGSEFRLHLSTRLPGGVWSVELRQLEGGATKPFFEVRAGEVLALPGSATVHLLAPYRMEGHPPSRRLWIAVFSFPQPYTLNPLPYLLEHGKPIRYGYVAEEWPLEFYQSVYATLPGSAEMPSAGRAFTPELITRLVAQGVLVVPLLLHTGVASLESHEPPYEEFYRVPPGTAQVVNQARAEGRRVIAVGTTVVRALETVADALGRVHPGEGWTRLVITPQRGVRVVDGILTGWHEPKATHLAMLEAIAGRRHLELAYCAALEHRYLWHEFGDLHLILP

SEQ ID NO: 68749 - protein, 338 aa, Meiothermus ruber
  misc_feature (1)..(338): tr|A0A0S7AGK6|A0A0S7AGK6_MEIRU S-adenosylmethionine:tRN A ribosyltransferase-isomerase OS=Meiothermus ruber H32 8 OX=1297799 GN=queA PE=3 SV=1
MNLEDFDYHLPPELIAQSGAEPRDASRLMVIDRQTGQITHRIFRDLPQYLRAGDVLVLNQSKVIPARTFATNPHGTGLEVLLVREIPSGEGLWEALLKPARRAKVGSRLTFPDGLFATVEAIEADGTRLLRFSGNVWEHLENIGKMPLPPYIQASVDPARYQTVYAKTPGSVAAPTAGLHFTPELLDRVRGLGVDIQYVTLHVGPGTFKPVHDDPDRHVMHLEPYEVSPQTAEAVNRARAEGRRVIAVGTTVVRTLETAYSAELGGVQAGAGETQLFIRPGFKYNVIDTLITNFHLPKSTLLMLVSAFMGHGLMKQAYQTAVAERYRFYSLGDAMLIL

SEQ ID NO: 68750 - protein, 338 aa, Meiothermus ruber; identical to SEQ ID NO: 68749
  misc_feature (1)..(338): tr|D3PP30|D3PP30_MEIRD S-adenosylmethionine:tRNA ribosy ltransferase-isomerase OS=Meiothermus ruber (strain ATC C 35948 / DSM 1279 / VKM B-1258 / 21) OX=504728 GN=queA PE=3 SV=1

SEQ ID NO: 68751 - protein, 336 aa, Meiothermus silvanus
  misc_feature (1)..(336): tr|A0A4Q4KZY2|A0A4Q4KZY2_9DEIN S-adenosylmethionine:tRN A ribosyltransferase-isomerase OS=Meiothermus silvanus OX=52022 GN=queA PE=3 SV=1
MLLEDYDYLLPPALIAQSGAEPRDSSRLMVVHRGTGQLEHRIFRDIPEYLRPGDLLVLNQSKVIPARTFAANAHGTPIEVLLVRELEPDLWEALLKPAKRAKGLLRFAGGLTAEVVKVEEDGTRVLRFTGGLWEHLERIGQTPLPPYIHASVDPERYQTVYAKTPGSVAAPTAGLHFTPELLERIRGMGVEVRFVTLHVGPGTFKPVKEDPERHVMHLEPYEISPETAQAVNRAKAEGRRVIAVGTTVVRTLESAWEDSSAGGGVKAGVGETRLFIRPGFEFKATDALITNFHLPRSTLLMLVSAFAGHDLTMRAYRTAVEERYRFYSLGDAMLIL

SEQ ID NO: 68752 - protein, 362 aa, Meiothermus silvanus
  misc_feature (1)..(362): tr|D7BG87|D7BG87_MEISD S-adenosylmethionine:tRNA ribosy ltransferase-isomerase OS=Meiothermus silvanus (strain ATCC 700542 / DSM 9946 / VI-R2) OX=526227 GN=Mesil_0061 PE=3 SV=1
MTLKEPSLDFVLPAELEAREPPEARGLERDQVRLMVSYRSSDRLVHTQFREIPQHLRAGDVLVINTSGTLPAALPATREDGKELRLHLSSRLPGGLWTVELRRVEEGASKPFSEGQAGETLRLPGRASVRLLTRYKLQPSETQVPTPSQGKTLSRLWIATFSFPDPIPYLLEHGQPIRYGYVPRSWPLEFYQSVYTTEMGSAEMPSAGRAFTAEIITRLVAQGVQVAPLLLHTGVASLEDHEPPYEEFYRVPPETARAVNQARADGRRVIAVGTTVVRALETVTDVYGVVHPGEGWTQLVITPQRGVRAVDGILTGWHEPKATHLMMLEAIAGREPLAVAYRAALERRYLWHEFGDLHLILP

SEQ ID NO: 68753 - protein, 336 aa, Meiothermus sp.
  misc_feature (1)..(336): tr|A0A370K156|A0A370K156_9DEIN S-adenosylmethionine:tRN A ribosyltransferase-isomerase OS=Meiothermus sp. QL-1 OX=2058095 GN=queA PE=3 SV=1
MRLEDFDYHLPPELIAQQGAEPRDAARLMVVERQSGRIEHRVFRELPHYLRPGDVLVLNESKVIPARTFAQNPQGTPIEVLLVRELPGGDGRWEALLRPARRARVGTRLTFPEGLCATVEAVQADGSRLLRFEGDIWAHLERIGQTPLPPYIRAPVEPTRYQTVYARTPGSVAAPTAGLHFTPELLACLQAMGVEISYLILHVGPGTFKPVKESPETHVMHREPYEIPPSTAAAVNQAKAQGRRVIAVGTTVVRALETAWSETGLQPGAGETQLFIRPGFHYRVVDALITNFHLPRSTLLMLVSAFMGHELMRRAYQTAVAERYRFYSLGDAMLIL

SEQ ID NO: 68754 - protein, 378 aa, Meiothermus sp.
  misc_feature (1)..(378): tr|A0A323UB03|A0A323UB03_9DEIN S-adenosylmethionine:tRN A ribosyltransferase-isomerase OS=Meiothermus sp. Pnk-1 OX=873128 GN=DNA98_02915 PE=3 SV=1
MRLRETSLDFVLPAELEAHEPPEARGLERDQVRLMVSYRSSDRLVHTRFREIPQYLGAGDVLVINTSGTLPAALPATAEDGRELRLHLSSRLPGGVWTVELRTPVSATEGGEQALTTKPFFGGRVGETLGLPGGASATLLARYRLGLEGATETPGPERFTPLHSGESRLWIAALEIPHGLQPTAYLLEHGQPIRYSYVPQPWPLEFYQTVYATELGSAEMPSAGRAFTPQIITRLVAQGVQVAPLLLHTGVASLEEHEPPYEEFYRVPPETARLVNQARADGRRVIAVGTTVVRALETVTDVYGVLHPGEGWTKLVITPQRGVRAVDGILTGWHEPKATHLLMLEAIAGKRHVEIAYRAALREQYLWHEFGDLHLILP

SEQ ID NO: 68755 - protein, 358 aa, Meiothermus terrae
  misc_feature (1)..(358): tr|A0A399EIC6|A0A399EIC6_9DEIN S-adenosylmethionine:tRN A ribosyltransferase-isomerase OS=Meiothermus terrae OX =1408545 GN=queA_1 PE=3 SV=1
MTLKGPSLEFALPEELEAHEPPEARGLSRDGVRLMVSYRQGDRLAHARFRDLPEFLREGDVLVVNTSGTLPAALPAFREDGSELRLHLSTRLPGGVWTVELRRLEDGATKPYGGGQAGETLRLPGGASVTLLARHRMEGAGKAGSRLWVASFSFPEPYAPDPLPYLLEHGKPIRYGYVGQEWPLEFYQTVYATEMGSAEMPSAGRAFTPEVLTRLLSQGVLVVPLLLHTGVASLESHEPPYEEFYRVPPVTAQAVSQAKAEGRRVVAVGTTVVRALETVADPLGRVHPGEGWTRLLVTPERGVRAVDGILTGWHEPKATHLMMLEAIAGRGHLEAAYQAALEQRYLWHEFGDLHLILP

SEQ ID NO: 68756 - protein, 348 aa, Meiothermus terrae
  misc_feature (1)..(348): tr|A0A399EDP5|A0A399EDP5_9DEIN S-adenosylmethionine:tRN A ribosyltransferase-isomerase OS=Meiothermus terrae OX =1408545 GN=queA_2 PE=3 SV=1
MLGGVGASYTLENFDYHLPPELIAQQGAEPRDASRLMVLHRAGGRLEHRVFRDVVEYLRPGDVLVLNQSKVIPARLFATNPQGTPVEVLLVRELSPEGMAEGRGSVWEAMLKPAKRAKGGLRFADGLGAEVIAVEEDGTRVLRFSGNVWEHLEALGQTPLPPYIHASVDPRRYQTVYARTPGSVAAPTAGLHFTPGLLERIRATGVETRYVTLHVGPGTFKPVKDDPDRHTMHAEPYEVPLETAEAVGRAKAEGRRVVAVGTTVVRTLESAWQGQGLRAGGGETRLFIRPGFAFRAVDALITNFHLPKSTLLMLVSAFAGYDLTMQAYRTAVEERYRFYSLGDAMLIL

SEQ ID NO: 68757 - protein, 362 aa, Melaminivora alkalimesophila
  misc_feature (1)..(362): tr|A0A317R9U7|A0A317R9U7_9BURK S-adenosylmethionine:tRN A ribosyltransferase-isomerase OS=Melaminivora alkalime sophila OX=1165852 GN=queA PE=3 SV=1
MATPARPYTLSDFDFDLPEGLIAQHPASERSGSRLLDGRSAPPVDRVFRELPALLAPGDLLVFNDTRVLRARIFGEKASGGRLELLIERVLDAGEVVAHMKVSKKPRPGARLHLAGGSTGGGFDATLLSRWPDEDGPLFRLALHAPDGASAWELMERHGHLPLPPYIERRQGDGEDPDAAEDAQRYQTIFAARPGAVAAPTAALHFDEGVLAALAARGIERASVTLHVGAGTFQPVKTENLAEHRMHSEWYDIPPGTLAALERCRQRGGRVVAVGTTTVRTLESWARTGQATGDTRIFITPGFAFQVVQLLVTNFHLPRSTLMMLVSAFAGHAHVMDLYRYAIAQRYRFFSYGDAMLLERRP

SEQ ID NO: 68758 - protein, 362 aa, Melaminivora sp.
  misc_feature (1)..(362): tr|A0A2R3QBB7|A0A2R3QBB7_9BURK S-adenosylmethionine:tRN A ribosyltransferase-isomerase OS=Melaminivora sp. SC2- 9 OX=2109913 GN=queA PE=3 SV=1
MTDTARVFSLSDFDFELPETLIAQHPVPERSASRLLDGRHSSPADRIFRDLPALLSAGDLLVFNDTRVLRARIFGEKASGGRLELLIERVLEGNEVVAHMKVSKKPRPGATLHLAGGSARGGFDATLLSRWPDEDGPLFRLALRAPDGATAWELMERHGHLPLPPYIERRQDGDHDPDEAEDAERYQTVFAARPGAVAAPTAALHFDAGVLEQLAARGVQTASVTLHVGAGTFQPVKTENLAEHRMHSEWYDIPAATLAALERCRQRGGRVVAVGTTTVRTLESWARSGQATGDTAIFITPGFAFQVVDLLITNFHLPRSTLMMLVSAFAGYEHVMRLYRHAVEQRYRFFSYGDAMLLERRP

SEQ ID NO: 68759 - protein, 367 aa, Melaminivora sp.
  misc_feature (1)..(367): tr|A0A2P1NH22|A0A2P1NH22_9BURK S-adenosylmethionine:tRN A ribosyltransferase-isomerase OS=Melaminivora sp. SC2- 7 OX=2116657 GN=queA PE=3 SV=1
MPHAPARAFHLSDFDFELPEALIAQHPAPERSASRLLDGRAAPAADRIFRELPQLLQPGDLLVFNDTRVVRARIFGEKASGGRLELLIERVLAGNQVVAHMKVSKKPPPGATLHLAGGSAGGGFDATLLSRWPDADGPLFRLALHAPDGATPWQLMERHGHLPLPPYIERQQSSGSDPDAAEDEQRYQTVFAAHPGAVAAPTAALHFDEAVLAALAGRGVERASVTLHVGAGTFQPVKTENLHEHRMHSEWYDIPQATLAALERCRARGGRVVAVGTTTVRTLESWACTGQATGDTSIFITPGFSFQVVQLLITNFHLPKSTLMMLVSALAGYEHVMALYRHAINQRYRFFSYGDAMLLERAPERAP

SEQ ID NO: 68760 - protein, 341 aa, Melghiribacillus thermohalophilus
  misc_feature (1)..(341): tr|A0A4R3NDU6|A0A4R3NDU6_9BACI S-adenosylmethionine:tRN A ribosyltransferase-isomerase OS=Melghiribacillus ther mohalophilus OX=1324956 GN=queA PE=3 SV=1
MNIADFDFELPEQLIAQQPLKDRSSSRLMVLTRDNHEIRHTSFTQIKHYLRPGDCLVLNDTKVLPARLFGIKKDTGAKIEVLLLHQREKDHWEVLVKPAKRVKKGTIIEFGEGLLTAECVRELEHGGRVLSFHYKGIFLEILNELGEMPLPPYIKTQLDDQDRYQTVYAREEGSAAAPTAGLHFTAELLKEIQQMGVHLAYITLHVGLGTFRPVNVENIEEHDMHAEFYRMNQETASLINRVRTNGGRIIAVGTTSTRTLETIVQKHGHFQEDSGWTDIFIYPPYEFQGIDGLLTNFHLPKSTLIMLVSALAGRDFILKAYREAVKQEYRFFSFGDAMLIL

SEQ ID NO: 68761 - protein, 343 aa, Melghirimyces algeriensis
  misc_feature (1)..(343): tr|A0A521AUR4|A0A521AUR4_9BACL S-adenosylmethionine:tRN A ribosyltransferase-isomerase OS=Melghirimyces algerie nsis OX=910412 GN=queA PE=3 SV=1
MDVTMFDFHLPEELIAQEPIRERSNSRLMVVDREEGTVTNRKFPDLLNYLIPGDVLVVNDTRVRPARLVGMKKDTGAKVELLLLNPLGNNRWEALVKPAKRVREGTEICFGDGVLTAVAEQKTEAAGGRIFHLQYDAPDIEQLLKSLGEMPLPPYIRKQLDEPERYQTVYSKNVGSAAAPTAGLHFTPELLEQMKEMGVQIAPITLHVGLGTFRPVTAEKVAEHQMHAEYYEVSDRSAKIIQKAKAEGRRVVAVGTTSVRTLESVAQEHGEIVATSGWTDIFIYPGFRFQVVDALLTNFHLPRSTLLMLVSAFASRELILSAYHEAVREKYRFFSFGDAMLIL

SEQ ID NO: 68762 - protein, 343 aa, Melghirimyces profundicolus
  misc_feature (1)..(343): tr|A0A2T6BH07|A0A2T6BH07_9BACL S-adenosylmethionine:tRN A ribosyltransferase-isomerase OS=Melghirimyces profund icolus OX=1242148 GN=queA PE=3 SV=1
MDVSLFDFELPEELIAQEPAAERSGSRLMVVDRDRGTVSHRRFPDLLEYMNPGDVLVLNDTRVRPARLIGTKEGTGARVELLLLNPLGEDRWEALVKPAKRVKEGTVIRFGDGLLSAVAKEKTEAAGGRVFQLRYGSSDLDKLLEDLGEMPLPPYIRKQLDEPERYQTVYSRVVGSAAAPTAGLHFTPQLLDRAKQKGIRLAPITLHVGLGTFRPVTAENVEDHRMHAEYYEVSETSAGVIRSAGQEGKRVVAVGTTSVRTLESVAREHGEIRAARGWTDIFIYPGYRFRVVDALLTNFHLPRSTLLMLVSAFASRELILQAYRTAVRKRYRFFSFGDAMLIL

SEQ ID NO: 68763 - protein, 339 aa, Melghirimyces thermohalophilus
  misc_feature (1)..(339): tr|A0A1G6JJC6|A0A1G6JJC6_9BACL S-adenosylmethionine:tRN A ribosyltransferase-isomerase OS=Melghirimyces thermoh alophilus OX=1236220 GN=queA PE=3 SV=1
MFDYPLPEDLIAQEPTEERSASRLMVVDRETEKIQHRRFPDILDYLGAGDVLVLNDTRVRPARLIGTKEGTGARIELLLLNPLGEDRWESLVKPAKRIREGTIVHFGEGDLTAVAEEKTEAAGGRVFRLHYNTSDLERLLDKLGEMPLPPYIRKQLDEPERYQTVYSREVGSAAAPTAGLHFTRELLEQAKEKGVEIVPITLHVGLGTFRPVTAENVEEHQMHAEFYEVSEVSATAIQKAKERGNRVVAVGTTSVRTLESVAREHGEVRATRGWTDIFIYPGFPFRVVDTLLTNFHLPKSTLLMLVSAFASRELMLEAYRTAVSERYRFFSFGDAMLIL

SEQ ID NO: 68764 - protein, 345 aa, Melioribacter roseus
  misc_feature (1)..(345): tr|I6YWW6|I6YWW6_MELRP S-adenosylmethionine:tRNA ribosy ltransferase-isomerase OS=Melioribacter roseus (strain JCM 17771 / P3M-2) OX=1191523 GN=queA PE=3 SV=1
MKLSDFKYNLPKTAIAKFPVTPRDAAKLMVLNRATEEIEHKVFSDIIDYMDKGDVVVINKTKVMQARLIGKKERTNAKIEVFVLRELNKEENIWDVIVDPARKVRIGNRIYFNDNLWCEVIDNTTSRGRTVRFNEDAGDIFKAIEEIGNTPLPPYIKREPVPEDRENYQTIFAEIDGSVAAPTAGLHFTPQLVKKIEKKGIKFVPVILHIGLGTFRPVEVEDLTKHRMDSEYYEIPEETAETINKALKSKKNVFVVGTSTCRALESSVTAEGFSKPNRGWTDKFIFPPYDFKITKKLITNFHAPESTLMMLVAAFAGYDFTMKAYKKALKEGYRFLSYGDAMLIL

SEQ ID NO: 68765 - protein, 345 aa, Melioribacter sp.; identical to SEQ ID NO: 67537
  misc_feature (1)..(345): tr|A0A1G1BDF9|A0A1G1BDF9_9BACT S-adenosylmethionine:tRN A ribosyltransferase-isomerase OS=Melioribacter sp. GWF 2_38_21 OX=1801612 GN=queA PE=3 SV=1

SEQ ID NO: 68766 - protein, 343 aa, Melissococcus plutonius
  misc_feature (1)..(343): tr|F3YC30|F3YC30_MELPT S-adenosylmethionine:tRNA ribosy ltransferase-isomerase OS=Melissococcus plutonius (stra in ATCC 35311 / CIP 104052 / LMG 20360 / NCIMB 702443) OX=940190 GN=queA PE=3 SV=1
MLNTEEFDFYLPEELIAQTPLENRESSRLLVLNKKTKEMEDKHFYEIIDELNSGDALVMNDTKVLPARLYGEKKETGGHLEVLLLNNTAGDNWEVLIKPARRAKVGTEITFGDGRLKATVKEELEHGGRIVTFDYNGIFLEIIESLGEMPLPPYIKERLEDPDRYQTVYAKETGSAAAPTAGLHFTEELLEKIEKKGIKLVYLTLHVGLGTFRPVNVAHIEEHKMHSEFYRLTEDAAAQLNEVRQTGGRIVAVGTTSIRTLETIGSKFNGEIHADSGWTDIFIKPGYTFKIVQAFITNFHLPKSTLIMLVSAFSDREFIFSAYTHAVKENYRFFSFGDAMFIH

SEQ ID NO: 68767 - protein, 343 aa, Melissococcus plutonius
  misc_feature (1)..(343): tr|A0A2Z5Y1D1|A0A2Z5Y1D1_9ENTE S-adenosylmethionine:tRN A ribosyltransferase-isomerase OS=Melissococcus plutoni us OX=33970 GN=queA PE=3 SV=1
MLNTEEFDFYLPEELIAQTPLENRESSRLLVLNKKTKEMEDKHFYEIIDELNSGDALVMNDTKVLPARLYGEKKETGGHLEVLLLNNTAEDNWEVLIKPARRAKVGTEITFGDGRLKATVKEELEHGGRIVTFDYNGIFLEIIESLGEMPLPPYIKERLEDPDRYQTVYAKETGSAAAPTAGLHFTEELLEKIEKKGIKLVYLTLHVGLGTFRPVNVAHIEEHKMHSEFYRLTGDAAAQLNEVRQTGGRIVAVGTTSIRTLETIGSKFNGEIHADSGWTDIFIKPGYTFKIVQAFITNFHLPKSTLIMLVSAFSDREFILSAYTHAVKENYRFFSFGDAMFIH

SEQ ID NO: 68768 - protein, 344 aa, Melissococcus sp.
  misc_feature (1)..(344): tr|A0A374JFP9|A0A374JFP9_9ENTE S-adenosylmethionine:tRN A ribosyltransferase-isomerase OS=Melissococcus sp. OM0 8-11BH OX=2293110 GN=queA PE=3 SV=1
MTLKTSDFDFDLPEELIAQTPLENRAASKLLILDSKTGAIEDTQFPAIIDELNEGDALVMNDTRVLPARLHGEKPDTGGHLEVLLLTNTTGDTWETLIKPAKRAKKGTVISFGNGALKAVVEEELEHGGRMITFSYDGVFLEILESLGEMPLPPYIKERLNDNDRYQTVYAKENGSAAAPTAGLHFTPDVLKKIEDKGVKLVYLTLHVGLGTFRPVSVDDVENHKMHSEFYRLTKDAADTLNEVKEQGGKVVAVGTTSIRTLETIGTKFDGKLQEDNGWTDIFIKPGYEFKIVDAFLTNFHLPMSTLIMLVSAFAGKDNVLNAYEHAVKEKYRFFSFGDAMFVK

SEQ ID NO: 68769 - protein, 361 aa, Melittangium boletus
  misc_feature (1)..(361): tr|A0A250ITJ1|A0A250ITJ1_9DELT S-adenosylmethionine:tRN A ribosyltransferase-isomerase OS=Melittangium boletus DSM 14713 OX=1294270 GN=queA PE=3 SV=1
MSSLLSDYDFALPEAQIAQTPLATRDASRLLVVSRASGAWTHRHFAELPGLLREGDLLVVNDARVIPARLLGSKADTGGRVELLVVRPASSTLTSHALGGDAEALEWICLGQASKGLKPGARLSFSGGLAAEVLEALGGGEYRVRFLAAPGTSLAEVLNQAGRLPLPPYITRAPEAADAERYQTVYARASGAVAAPTAGLHFTDAIFQALAARGIQRVEVTLDVGPGTFLPVREENLEKHRMHPERYFVPEATARAVNAAKAEGRRVVAVGTTVVRTLESAWDAAAGSLREGPGETEIFIRPGFDFRAVDVLLTNFHLPRSTLVVLVSALLGRERTLAAYREAVAAGYRFFSYGDAMLVTE

SEQ ID NO: 68770 - protein, 349 aa, Meridianimaribacter sp.
  misc_feature (1)..(349): tr|A0A4Q9RMY1|A0A4Q9RMY1_9FLAO S-adenosylmethionine:tRN A ribosyltransferase-isomerase OS=Meridianimaribacter s p. CL38 OX=2213021 GN=queA PE=3 SV=1
MKLSHFNFKLPEELLADRPSDIRDEARLMVLNRKEQTIEHKLFKDVIDYFDEGDVMILNNTKVFPARLYGNKEKTGARIEVFLLRELNEEQRLWDVLVDPARKIRIGNKLYFGDDDTLVAEVIDNTTSRGRTLRFLYDGSYKEFRNKLTELGETPLPKYIKRDVEPEDEERYQTIFAKNEGAVAAPTAGLHFSKHLLKRLEIKGVELPEITLHVGLGTFNPVEVEDLSKHKMDSEEIFIGPDAVETINKGISTKKRVCAVGTTSMRAIESSVSSSGTLNEFSGWTNKFIFPPYDFSIANCMITNFHTPKSTLLMMVSAFAGHDFMKKAYEEAVKEKYRFYTYGDAMLIL

SEQ ID NO: 68771 - protein, 367 aa, Merismopedia glauca
  misc_feature (1)..(367): tr|A0A2T1C8B8|A0A2T1C8B8_9CYAN S-adenosylmethionine:tRN A ribosyltransferase-isomerase OS=Merismopedia glauca C CAP 1448/3 OX=1296344 GN=queA PE=3 SV=1
MCDEGERLDYFLTSYDYELPAELIAQTPAVPRDSSRLLVVESLNEPQHSIFKDLPQWLKAGDLLVVNNTKVLPARIYGQKSTGGLVEILLLEEKQHNCWVVLAKRGRRLPIGTQIVFKPIQMGAIPLVDGVAIATLPAVVVGQDEATGGRLLQFTLPPGISLLSVLDGFGEMPLPPYITSKQSQPEQYQTIYAESLGAVAAPTAGLHFTPELLAKLQEHGVKIATVTLHVGVGTFRPVEVEDITTHKMHGEWIEVSAETVEQIQATKSSGGRVIGVGTTVARSLESAAQAGEIRAFAGKTQLFIYPGYQWRVVDGLITNFHLPRSSLMMMVSSLIGRERLLSLYREAIAHRYRFYSFGDAMLILPSG

SEQ ID NO: 68772 - protein, 328 aa, Mesoaciditoga sp.
  misc_feature (1)..(328): tr|A0A2J6WHU8|A0A2J6WHU8_9BACT S-adenosylmethionine:tRN A ribosyltransferase-isomerase OS=Mesoaciditoga sp. OX= 2060323 GN=queA PE=3 SV=1
MKIEDFDYYLPESLIAQSPTNPRDHSKLMVIHKDTGKIDHRIFYNIVDYLNKDDLLILNETKVIRARLIGKKETGANVEVFLLKKVDDKRWQTLVKPGGKIKEGTKIIFKGAEGICVKHLSDGTRYFEFNVGDEELEKIGEIPLPPYIKKPLEDPSRYQTVYARDPGSVAAPTAGLHFTDRLLDEISTKGVKILKVTLDVGLDTFRPIHEKEIEEHKMHTENYRIPEETIEEIKHKKGRVIAVGTTVVRTLESWAKTGQLHGDTSLYIYPPYKFKVVEGLVTNFHLPKSSLIVLVSAFAGRDLVMKAYKMAIENSYRFFSFGDACLFI

SEQ ID NO: 68773 - protein, 363 aa, Mesocricetibacter intestinalis
  misc_feature (1)..(363): tr|A0A4R6VCD1|A0A4R6VCD1_9PAST S-adenosylmethionine:tRN A ribosyltransferase-isomerase OS=Mesocricetibacter int estinalis OX=1521930 GN=queA PE=3 SV=1
MRVSDFYFDLPDELIARYPKPDRKSSRLLHLNGVNGEIAHRTFSDIIDLINPGDLLVFNNTRVIPARMFGHKLSGGKIEVLVERLLSETRCLAHIRASKAPKEGAELCLGEDKLGAGRGIKVKMLGRQGSLFELEVEDNRGGFLQVLQKIGHMPLPPYIDRPDEEADQERYQTVYNKVPGAVAAPTAGLHFDQELLDQLSRKGVNFAFVTLHVGAGTFQPVRVENIEDHHMHSEYAEVPQQTVDAILAAKAAGKRVIAVGTTSVRSLESAALAAQQRHAASLLEPYFSDTSIFIYPGKKFLVTDCLITNFHLPESTLIMLVSAFAGYSNIMRAYQSAVQNRYRFFSYGDAMFIHKNPEVRGLE

SEQ ID NO: 68774 - protein, 349 aa, Mesoflavibacter aestuarii
  misc_feature (1)..(349): tr|A0A2T1NEB6|A0A2T1NEB6_9FLAO S-adenosylmethionine:tRN A ribosyltransferase-isomerase OS=Mesoflavibacter aestu arii OX=1266046 GN=queA PE=3 SV=1
MKLSHFEFNLPDELLAEYPAEHRDESRLMVLNREKQTIEHRQFKDIIEYFDEKDVLLLNDTKVFPARLFGNKEKTGARIEVFLLRELNEEQRLWDVLVDPARKIRIGNKLYFGEDESLVAEVIDNTTSRGRTLRFLYDGSYDAFRKKLTELGETPLPKYIKRDVQPEDEERYQTIFAKNEGAVAAPTAGLHFSKHLLKRLEIKGVDFAEVTLHVGLGTFNPVEVEDLSKHKMDSEEVFIGPKTVETVNKALKDKRRICAVGTTAMRAVESAVSSSLTLNEIDGWTNKFIFPPYDFSIANCMITNFHTPKSTLLMMVSAFAGHDFIMKAYEEAVKEKYKFYSYGDAMLII

SEQ ID NO: 68775 - protein, 349 aa, Mesoflavibacter sabulilitoris
  misc_feature (1)..(349): tr|A0A2T1N7Z7|A0A2T1N7Z7_9FLAO S-adenosylmethionine:tRN A ribosyltransferase-isomerase OS=Mesoflavibacter sabul ilitoris OX=1520893 GN=queA PE=3 SV=1
MKLSHFNFDLPEELLAEYPAENRDESRLMVLHRDTQKIEHRMFKDLIDYFDEKDVMILNNTKVFPARLFGNKEKTGARIEVFLLRELNEEQRLWDVLVDPARKIRIGNKLYFGDDESLVAEVIDNTTSRGRTLRFLYDGSYQEFRRKLNELGETPLPKYIKREVEPEDEERYQTIFAKEEGAVAAPTAGLHFSKHLLKRLEIKGVDFAEVTLHVGLGTFNPVEVEDLSKHKMDSEELKIGPEAVKIINNAKAEKRRVCAVGTTAMRAIESSVSSSGTLNEIEGWTNKFIFPPYDFSIANSMITNFHTPKSTLLMMISAFAGHDFVKHAYEEAVKEKYKFYSYGDAMLIL

SEQ ID NO: 68776 - protein, 349 aa, Mesoflavibacter sp.
  misc_feature (1)..(349): tr|A0A2T1NSA2|A0A2T1NSA2_9FLAO S-adenosylmethionine:tRN A ribosyltransferase-isomerase OS=Mesoflavibacter sp. H G96 OX=2109944 GN=queA PE=3 SV=1
MKLSHFNFDLPEELLAEYPAENRDESRLMVLHRDTQKIEHRMFKDLIDYFDEKDVMILNNTKVFPARLFGNKEKTGARIEVFLLRELNEEQRLWDVLVDPARKIRIGNKLYFGEDESLVAEVIDNTTSRGRTLRFLYDGSYQEFRQKLKDLGETPLPKYIKREVEPEDEDRYQTIYAKNEGAVAAPTAGLHFSKHLLKRLEIKGVDFAEVTLHVGLGTFNPVEVEDLSKHKMDSEELIIGPEAVNIINNAKAEKRRVCAVGTTAMRAIESSVSSSGTLNEIEGWTNKFIFPPYDFSIANSMITNFHTPKSTLLMMISAFAGHDFVKHAYEEAVKEKYKFYSYGDAMLIL

SEQ ID NO: 68777 - protein, 351 aa, Mesonia algae
  misc_feature (1)..(351): tr|A0A2W7IPS8|A0A2W7IPS8_9FLAO S-adenosylmethionine:tRN A ribosyltransferase-isomerase OS=Mesonia algae OX=2132 48 GN=queA PE=3 SV=1
MGMKLSQFSFELPNELLAEYPSEHRDEARLMVVNRKENTIEHKMFKDLIEYFEPEDVMVLNNTKVFPARLFGNKEKTGARIEVFLLRELNPETRLWDVLVDPARKIRIGNKLYFGDDESLVAEVIDNTTSRGRTLRFLYDGSYEEFRKKLNKLGETPLPKYIKRDVEPEDADRYQTIYAKTEGAVAAPTAGLHFSKHLLKRLEIKGVNFAEVTLHVGLGTFNPVEVEDLSKHKMDSEEAEIALPAVDTINEAIKNKRRICAVGTTVMRSLESSVSSNGTLNEFKGWTNKFIFPPYDFSIANCMITNFHTPKSTLLMMISAFAGHDLMERAYDEAIKEKYKFYSYGDAMLII

SEQ ID NO: 68778 - protein, 351 aa, Mesonia phycicola
  misc_feature (1)..(351): tr|A0A1M6GRB8|A0A1M6GRB8_9FLAO S-adenosylmethionine:tRN A ribosyltransferase-isomerase OS=Mesonia phycicola OX= 579105 GN=queA PE=3 SV=1
MGMKLSQFNFELPNNLLAEYPSEDRDEARLMVLNRKENTIEHKKFKDLINYFEPDDVMVLNNTKVFPARLFGNKEKTGARIEVFLLRELNSETRLWDVLVDPARKIRIGNKLYFGDDESLVAEVIDNTTSRGRTLRFLYDGSYEEFRNKLNELGETPLPKYIKRDVEPEDADRYQTIYAKNEGAVAAPTAGLHFSKHLLKRLEIKGVDLAEVTLHVGLGTFNPVEVEDLSKHKMDSEEAEIEKAATVVINNAIENKRRICAVGTTVMRALESSVSSNGRLNEFKGWTNKFIFPPYDFSIANCMITNFHTPKSTLLMMVSAFAGHDLMERAYKEAIKEEYQFYSYGDAMLII

SEQ ID NO: 68779 - protein, 349 aa, Mesonia sp.
  misc_feature (1)..(349): tr|A0A5C8LNC8|A0A5C8LNC8_9FLAO S-adenosylmethionine:tRN A ribosyltransferase-isomerase OS=Mesonia sp. K4-1 OX=2 602760 GN=queA PE=3 SV=1
MKLSQFSFELPNELLAEYPSEHRDEARLMVVNRKENTIEHKMFKDLIEYFEPEDVMVLNNTKVFPARLFGNKEKTGARIEVFLLRELNPETRLWDVLVDPARKIRIGNKLYFGDDESLVAEVIDNTTSRGRTLRFLYDGSYEEFRKKLNKLGETPLPKYIKRDVEPEDADRYQTIYAKTEGAVAAPTAGLHFSKHLLKRLEIKGVNFAEVTLHVGLGTFNPVEVEDLSKHKMDSEEAEIALPAVDTINEAIKNKRRICAVGTTVMRSLESSVSSNGTLNEFKGWTNKFIFPPYDFSIANCMITNFHTPKSTLLMMISAFAGHDLMERAYDEAIKEKYKFYSYGDAMLII

SEQ ID NO: 68780 - protein, 349 aa, Mesonia sp.
  misc_feature (1)..(349): tr|A0A2W1JVJ6|A0A2W1JVJ6_9FLAO S-adenosylmethionine:tRN A ribosyltransferase-isomerase OS=Mesonia sp. K7 OX=221 8606 GN=queA PE=3 SV=1
MKLSQFNFELPKELLAEYPSEHRDEARLMVVNRKEGTIEHKMFKDLINYFDTDDVMVLNNTKVFPARLFGNKEKTGARIEVFLLRELNPETRLWDVLVDPARKIRIGNKLYFGDDESLVAEVIDNTTSRGRTLRFLYDGSYEDFRKKLTELGETPLPKYIKREVEPEDAERYQTIYAKNEGAVAAPTAGLHFSKHLLKRLEIKGVNLAEVTLHVGLGTFSPVEVEDLSKHKMDSEEAIIDKTATQIVNKAIVEKRKVCAVGTTVMRTLESAVSSNGQLNEFQGWTNKFIFPPYDFSIANCMITNFHTPKSTLLMMISAFAGHDLMEKAYAEAIKEKYKFYSYGDAMLIL

SEQ ID NO: 68781 - protein, 358 aa, Mesorhizobium albiziae
  misc_feature (1)..(358): tr|A0A1I4BY15|A0A1I4BY15_9RHIZ S-adenosylmethionine:tRN A ribosyltransferase-isomerase OS=Mesorhizobium albizia e OX=335020 GN=queA PE=3 SV=1
MRVDLFDFELPEDRIALRPAEPRDAARLLVVKPRQPLADRTVGDLPGLLEPGDVLVFNDTRVIPAQLTGIRQRGEAMANVDATLHMRVAPDRWLAFMRPAKRLAEGDRIRFGHDGNACFLGNLDATVLEKRDAGEVLLGFDLSGAFLDEALHAVGHIPLPPYIASKRPDDARDLTDYQTVYAKDEGAVAAPTAGLHFTEDLFSALDARGIERRFVTLHVGAGTFLPVKADDTADHKMHAEIGHISRETADALNAARAQGRRIVAVGTTSLRLIESAAQGDGAIEPWSGPTSIFITPGYRFKAVDVLMTNFHLPRSTLFMLVSAFAGLETMRDAYRHAIENRYRFYSYGDASLLFRAEE

SEQ ID NO: 68782 - protein, 358 aa, Mesorhizobium albiziae
  misc_feature (1)..(358): tr|A0A5D4H2H2|A0A5D4H2H2_9RHIZ S-adenosylmethionine:tRN A ribosyltransferase-isomerase OS=Mesorhizobium albizia e OX=335020 GN=queA PE=3 SV=1
MRVDLFDFDLPEGHIALRPAEPRDTARLLVVRPGEPLEDRIVRELPGLLKAGDALVFNDTRVIPAQLTGLRRRGDAVAQVDATLHMRVAPDRWKAFMRPAKRLAVGDRIQFGHDDSACLLGTLDATVVEKGDGGEVTIAFDLAGPALDDALREVGHIPLPPYIAGKRPEDERDRSDYQTIYAREEGAVAAPTAGLHFTPELFAALDEAGIERHFVTLHVGAGTFLPVKADDTADHRMHAEIGHVSAATAAALNEVKARGGRIVAVGTTSLRLLESAAAPDGSLAEWSGATDIFITPGYRFRTANVLMTNFHLPRSTLFMLVSAFSGMETMRAAYDHAIADGYRFYSYGDGSLLFRSDD

SEQ ID NO: 68783 - protein, 359 aa, Mesorhizobium alhagi
  misc_feature (1)..(359): tr|H0HVH8|H0HVH8_9RHIZ S-adenosylmethionine:tRNA ribosy ltransferase-isomerase OS=Mesorhizobium alhagi CCNWXJ12 -2 OX=1107882 GN=queA PE=3 SV=1
MRVDLFDFDLPEDRIALRPAEPRDAARLLVVRPGEGVEDRGVVELPALLQPGDVMIFNDTKVIPAQLKGVRRRGDASAQVDATLHMRVAPDRWLAFVRPGKRVAAGDRIHFGHDGNSCFLGALDATVIEKREGGEALLAFDLSGPFLDEALHAVGHIPLPPYIASKRPDDERDRTDYQTIFARDEGAVAAPTAGLHFTPELFAALDARGIERHFVTLHVGAGTFLPVKVDDTADHKMHAESGSVSAQTAAAVNAARARGSRVVSVGTTSLRLLESAARDDGTLTEWSGATSIFITPGYRFRIVDVLMTNFHLPRSTLFMLVSAFSGLETMRAAYAHAIENGYRFYSYGDACLLFRAQNQ

SEQ ID NO: 68784 - protein, 362 aa, Mesorhizobium amorphae
  misc_feature (1)..(362): tr|G6Y9D3|G6Y9D3_9RHIZ S-adenosylmethionine:tRNA ribosy ltransferase-isomerase OS=Mesorhizobium amorphae CCNWGS 0123 OX=1082933 GN=queA PE=3 SV=1
MRVDLFDFELPEERIALRPAEPRDSARMLVVKPGEGLGDRTVRDLPSFLEAGDVLVFNDTKVIPAQLKGIRRRGEAQAQVEATLHMRVAPDRWQAFMRPGKRVAAGDRIHFGHDGNSCFLGQLDATVIEKGEAGEVLLGFDLSGAFLDEALHAVGHIPLPPYIASKRDDDDRDRSDYQTIYAREEGAVAAPTAGLHFTPELFAALDAKGIERRFVTLHVGAGTFLPVKADDTADHKMHAETGSVSQDTAEALNAAKVRGGRIIAVGTTSLRLLESAANPDGMLAAWSGPTDIFITPGYRFRTADMLMTNFHLPRSTLFMLVSAFSGLETMRAAYAHAIDNSYRFYSYGDASLLYRAETSDGR

SEQ ID NO: 68785 - protein, 349 aa, Mesorhizobium amorphae
  misc_feature (1)..(349): tr|A0A2W4YX69|A0A2W4YX69_9RHIZ S-adenosylmethionine:tRN A ribosyltransferase-isomerase OS=Mesorhizobium amorpha e OX=71433 GN=queA PE=3 SV=1
MRVDAFDFELPESLIALRPAEPRATARLLTVGADGALGDRRVGDLPDLLRAGDLLVFNDTKVIPAQLEGLRQRGENAAKVSATLHRRVADDAWEAFLRPGKRVAEGDLLRFGMLEARVEEKSEGGIASLRFDRAGPALDSAIAEVGHVPLPPYIASRRGDDAQDRADYQTVYAREEGAVAAPTAGLHFTEAMFERLAERGIGRAFVTLHVGAGTFLPVKVEDTADHRMHFETGSVSQDAAEAIAKTKRAGGRVLSVGTTSLRILESAVDAEGVVRPWAGSTDIFITPGYRFRTADMLFTNFHLPRSTLMMLVSAFSGLDAMRAAYAHAIARGYRFYSYGDASLLERSDP

SEQ ID NO: 68786 - protein, 359 aa, Mesorhizobium australicum
  misc_feature (1)..(359): tr|A0A1X7PBN2|A0A1X7PBN2_9RHIZ S-adenosylmethionine:tRN A ribosyltransferase-isomerase OS=Mesorhizobium austral icum OX=536018 GN=queA PE=3 SV=1
MKVDLFDFDLPEDRIALRPAVPRDSAKLLVVRPGEALADRVVRDLPGLLRPGDALVFNDTKVIPAQLSGLRRRGEASARVDATLHMRVGPDAWRAFLRPAKRVTVGDRIAFGHTENICLMGALDATVEEKGEGGEVLLRFDFSGAALDEALHTVGHIPLPPYIASKRPEDERDRADYQTIYADEEGAVAAPTAGLHFTPDLFAALDAAGIERHFVTLHVGAGTFLPVKADDTADHKMHAEVGRVSTATASALNAVKARGGRIVCVGTTSLRLLESAAGEDGRLSAWTGPTDIFITPGYHFRFVDVLMTNFHLPRSTLFMLVSAFSGLETMRAAYAHAIAGGYRFYSYGDAGLLFRAGLR

SEQ ID NO: 68787 - protein, 361 aa, Mesorhizobium australicum
  misc_feature (1)..(361): tr|L0KQQ1|L0KQQ1_MESAW S-adenosylmethionine:tRNA ribosy ltransferase-isomerase OS=Mesorhizobium australicum (st rain HAMBI 3006 / LMG 24608 / WSM2073) OX=754035 GN=que A PE=3 SV=1
MRVDLFDFDLPEERIALRPAEPRDSAKMLVVKPGKGLEDRTVGDLPSLLRAGDVLVFNDTKVIPAQLKGIRRRGEAQSQVEATLHMRMAPDRWLAFMRPGKRIAAGDRIHFGHDGNSCFLGQLDATVIEKGEGGEALLGFDLSGPFLDEALHAVGHIPLPPYIASKRDDDERDRADYQTIYAREEGAVAAPTAGLHFTPALFAALDAKGVERRFVTLHVGAGTFLPVKADDTADHKMHAEIGSVSQATADALNAAKARGGRVIAVGTTSLRLLESAAREDGTLAPWSGPTDIFITPGYRFRTADMLMTNFHLPRSTLFMLVSAFSGLDTMRAAYAHAIESGYRFYSYGDASLLFREENDGR

SEQ ID NO: 68788 - protein, 362 aa, Mesorhizobium ciceri
  misc_feature (1)..(362): tr|A0A143N9H6|A0A143N9H6_9RHIZ S-adenosylmethionine:tRN A ribosyltransferase-isomerase OS=Mesorhizobium ciceri OX=39645 GN=queA PE=3 SV=1
MRVDVFDFDLPEERIALRPAQPRDSAKMLLVKPGEGLEDRTVGDLPSLLRAGDVLVFNDTKVIPAQLKGIRRRGEATAQVEATLHMRMAPDRWLAFMRPGKRIAAGDRIHFGHDGNSCFLGQLDATVIEKGEGGEALLGFDLSGPFLDEALHAVGHIPLPPYIASKRDDDERDRADYQTIYASEEGAVAAPTAGLHFTPELFAALDAKGVERRFVTLHVGAGTFLPVKADDTADHKMHAETGSVSEATADALNAARARGGRIVAVGTTSLRLLESAAREDGTLAAWSGPTDIFITPGYCFRTADMLMTNFHLPRSTLFMLVSAFSGLDTMRAAYAHAIENRYRFYSYGDASLLFRAETSDGR

SEQ ID NO: 68789 - protein, 362 aa, Mesorhizobium ciceri
  misc_feature (1)..(362): tr|E8TB05|E8TB05_MESCW S-adenosylmethionine:tRNA ribosy ltransferase-isomerase OS=Mesorhizobium ciceri biovar b iserrulae (strain HAMBI 2942 / LMG 23838 / WSM1271) OX= 765698 GN=queA PE=3 SV=1
MRVDLFDFELPEERIALRPAQPRDSAKMLLVKPGEELEDRTVGDLPSLLSAGDVLVFNDTKVIPAQLKGIRRRGEATAQVEATLHMRMAPDRWLAFMRPGKRIAAGDRIHFGHDGNSCFLGQLDATVIEKGEGGEALLGFDLSGPFLDEALHAVGHIPLPPYIASKRDDDERDRADYQTIYASEEGAVAAPTAGLHFTPELFAALDAKGVERRFVTLHVGAGTFLPVKADDTADHKMHAETGSVSEATADALNAARARGGRIVAVGTTSLRLLESAAREDGTLAAWSGPTDIFITPGYRFRTADMLMTNFHLPRSTLFMLVSAFSGLDTMRAAYAHAIANRYRFYSYGDASLLFRAETSDGR

SEQ ID NO: 68790 - protein, 370 aa, Mesorhizobium delmotii
  misc_feature (1)..(370): tr|A0A2P9A9U8|A0A2P9A9U8_9RHIZ S-adenosylmethionine:tRN A ribosyltransferase-isomerase OS=Mesorhizobium delmoti i OX=1631247 GN=queA PE=3 SV=1
MRVDLFDFDLPEERIALRPAEPRDSAKMLVVRPGEGLEDRTVHELPSLLESGDVLVFNDTKVIPAQLKGIRRRGEAAAQVEATLHMRVAPDRWLAFMRPGKRIAVGDRIHFGHDANSCFLGQLDATVIAKGEAGEALLGFDLSGPFLDEALHAVGHIPLPPYIASKRDDDERDRKDYQTIYAREEGAVAAPTAGLHFTPELFAALDAKGVERRFVTLHVGAGTFLPVKVDDTADHKMHAEIGSVSPETAEALNAAKARDGRIIAVGTTSLRLLESATREDGTLAGWSGPTDIFITPGYRFKAADMLMTNFHLPRSTLFMLVSAFCGLETMRAAYAHAIETRYRFYSYGDASLLFKEDNDGRAPGIEQGIQ

SEQ ID NO: 68791 - protein, 380 aa, Mesorhizobium delmotii
  misc_feature (1)..(380): tr|A0A2P9AIJ5|A0A2P9AIJ5_9RHIZ S-adenosylmethionine:tRN A ribosyltransferase-isomerase OS=Mesorhizobium delmoti i OX=1631247 GN=BQ8482_180188 PE=3 SV=1
MIAADRPDRRSAKLFVVEAGGTMSDLPRAVLATLFDPGDLVVANDAATLPASLHGTHVPSDEAIEIRLAGWLSLPDPTRFVAIAFGAGDHRTRTEDRLPPPPLSPGDRLRLGPLEAVVERLLDHPRLLELRFPGNRAAVLAGLAQHGRPIQYAHVAEPLALWDVWTKIAAGPVAFEAPSAGFALDWRTLQAWRRRGVGFATVTHAAGVSSTGDPALDLRLPFDEPYRIPERTAAQVARAKLRGGRIIAIGTSVVRALEAAANPAGNVRAGNAIATGRIARDTRLHVVDAILTGIHQPGESHFELLRAFADDALLAKASAAFTAYRYRAHEFGDSMLLNRQPLLLSREQNRAGVLETKRRCAARWISGLSNCPDTEARAKV

SEQ ID NO: 68792 - protein, 358 aa, Mesorhizobium ephedrae
  misc_feature (1)..(358): tr|A0A2P7SPK8|A0A2P7SPK8_9RHIZ S-adenosylmethionine:tRN A ribosyltransferase-isomerase OS=Mesorhizobium ephedra e OX=2116701 GN=queA PE=3 SV=1
MKVDLFDFELPEDRIALRPAVPRDSAKLLVVRPDSGLEDRTVRDLPDLLKAGDALVFNDTKVIPAQLRGIRRRGDNQAHVEATLHMRVAPDRWLAFLRPAKRVAQGDRISFGHDGNTCFLGALDATVVEKRGAGEALLAFDLSGPVLDEALHQVGHIPLPPYIASKRDDDARDLVDYQTVYAREEGAVAAPTAGLHFTPKLFAALDAAGIERHFVTLHVGAGTFLPVKAEDTADHRMHAERGEVSADTAAALNAARARGGRVVAVGTTSLRLLESAADEAGIVQPWSGETSIFITPGYRFRAVEVLMTNFHLPRSTLFMLVSAFSGLDTMRAAYRHAIENGYRFYSYGDAGLLFRREP

SEQ ID NO: 68793 - protein, 361 aa, Mesorhizobium erdmanii
  misc_feature (1)..(361): tr|A0A4Q1V233|A0A4Q1V233_9RHIZ S-adenosylmethionine:tRN A ribosyltransferase-isomerase OS=Mesorhizobium erdmani i OX=1777866 GN=queA PE=3 SV=1
MRVDLFDFELPEERIALRPAEPRDSAKMLVVKSGEALDDRKVGDLPSLLRAGDVLVFNDTKVIPAQLKGIRRRGEAQAQVEATLHMRVAPDRWLAFMRPGKRIAAGDRIHFGHDGNSCFLGQLDATVIEKGEGGEALLGFDLSGPFLDEALHAVGHIPLPPYIASKRDDDERDRADYQTIYAREEGAVAAPTAGLHFTPELFAALDAKGVERHFVTLHVGAGTFLPVKADDTADHKMHAEIGSVSRETADALNAAKARGGRIIAVGTTSLRLLESAAREDGRVPAWSGPTDIFITPGYRFRTADMLMTNFHLPRSTLFMLVSAFCGLDTMRAAYAHAIANRYRFYSYGDASLLYRAEMSDG

SEQ ID NO: 68794 - protein, 362 aa, Mesorhizobium hawassense
  misc_feature (1)..(362): tr|A0A330HNL2|A0A330HNL2_9RHIZ S-adenosylmethionine:tRN A ribosyltransferase-isomerase OS=Mesorhizobium hawasse nse OX=1209954 GN=queA PE=3 SV=1
MRVDLFDFDLPEERIALRPAEPRDSARLLVVKPGETLEDRIVGDLPSLLREGDVLVFNDTKVIPAQLKGFRKRGEAVAQVEATLHMRVAPDRWQAFMRPGKRIAAGDRIHFGHDGNSCFLGQLDATVLEKGEAGEALLGFDLSGPFLDEALHAVGHIPLPPYIASKRDDDERDRADYQTIYAREEGAVAAPTAGLHFTPELFAALDAKGVERRFVTLHVGAGTFLPVKVDDTADHKMHAETGSVSAETAAALNAAKARGGRIICVGTTSLRLLESAARETGAVEAWSGPTDIFITPGYRFRTADMLMTNFHLPRSTLFMLVSAFSGLETMRLAYAHAIDNRYRFYSYGDASLLYRAETSDGR

SEQ ID NO: 68795 - protein, 361 aa, Mesorhizobium helmanticense
  misc_feature (1)..(361): tr|A0A2T4J217|A0A2T4J217_9RHIZ S-adenosylmethionine:tRN A ribosyltransferase-isomerase OS=Mesorhizobium helmant icense OX=1776423 GN=queA PE=3 SV=1
MRVDLFDFELPEERIALRPAEPRDSARMLVVRPDEGLEDRTVRDLPSLLKRGDVLVFNDTKVIPAQLKGIRRRGEAVAQVEATLHMRTAPDRWLAFMRPGKRVAAGDRIHFGHDGNSCFLGQLDATVIEKGDGGEVLLGFDLSGPFLDEALHAVGHIPLPPYIASKRDDDERDRGDYQTIYAREEGAVAAPTAGLHFTPELFVALDAKGIERRFVTLHVGAGTFLPVKADDTADHKMHAETGSVSPETAEALNAAKARGGRIIAVGTTSLRLLESAASPDGRLAAWSGPTDIFITPGYRFKTADMLMTNFHLPRSTLFMLVSAFSGLETMRAAYAHAIETGYRFYSYGDASLLFREENDGR

SEQ ID NO: 68796 - protein, 361 aa, Mesorhizobium huakuii
  misc_feature (1)..(361): tr|A0A068D5J3|A0A068D5J3_9RHIZ S-adenosylmethionine:tRN A ribosyltransferase-isomerase OS=Mesorhizobium huakuii 7653R OX=763057 GN=queA PE=3 SV=1
MRVDLFDFDLPEERIALRPTEPRDSAKMLVVRPGEALDDRTVGHLPSLLRAGDVLVFNDTKVIPAQLKGIRRRGDAQAQVEATLHMRVAPDRWLAFMRPGKRIAAGDRIHFGHDGNSCFLGQLDATVIEKGEGGEALLGFDLSGPFLDEALHTVGHIPLPPYIASKRDDDERDRADYQTIYAREEGAVAAPTAGLHFTPELFAALDAKGVERHFVTLHVGAGTFLPVKADDTADHKMHAEIGSVSRETANALNAAKARGGRIIAVGTTSLRLLESAAREDDTVPAWSGPTDIFITPGYRFRTADMLMTNFHLPRSTLFMLVSAFSGLDTMRAAYAHAIANRYRFYSYGDASLLYRAEMSDG

SEQ ID NO: 68797 - protein, 361 aa, Mesorhizobium japonicum
  misc_feature (1)..(361): sp|Q98M55|QUEA_RHILO S-adenosylmethionine:tRNA ribosylt ransferase-isomerase OS=Mesorhizobium japonicum (strain LMG 29417 / CECT 9101 / MAFF 303099) OX=266835 GN=queA PE=3 SV=1
MRVDLFDFELPEERIALRPAEPRDSAKMLVVKSGEALDDRKVGDLPSLLRAGDVLVFNDTKVIPAQLKGIRRRGEAQAQVEATLHMRVAPDRWLAFMRPGKRIAAGDRIHFGHDGNSCFLGQLDATVIEKGEGGEALLGFDLSGPFLDEALHAVGHIPLPPYIASKRDDDERDRADYQTIYAREEGAVAAPTAGLHFTPELFAALDAKGVERHFVTLHVGAGTFLPVKADDTADHKMHAEIGSVSRETADALNAAKARGGRIIAVGTTSLRLLESAAREDGTVPAWSGPTDIFITPGYRFRTADMLMTNFHLPRSTLFMLVSAFSGLDTMGAAYAHAIANRYRFYSYGDASLLYRAEMSDG

SEQ ID NO: 68798 - protein, 361 aa, Mesorhizobium japonicum; identical to SEQ ID NO: 68793
  misc_feature (1)..(361): tr|A0A3M9X4L4|A0A3M9X4L4_9RHIZ S-adenosylmethionine:tRN A ribosyltransferase-isomerase OS=Mesorhizobium japonic um OX=2066070 GN=queA PE=3 SV=1

SEQ ID NO: 68799 - protein, 361 aa, Mesorhizobium jarvisii
  misc_feature (1)..(361): tr|A0A3A5K5R9|A0A3A5K5R9_9RHIZ S-adenosylmethionine:tRN A ribosyltransferase-isomerase OS=Mesorhizobium jarvisi i OX=1777867 GN=queA PE=3 SV=1
MRVDLFDFDLPEERIALRPTEPRDSAKMLVVRQGEALDDRTVGDLPSLLRAGDVLVFNDTKVIPAQLKGIRRRGDAQAQVEATLHMRVAPDRWLAFMRPGKRIAAGDRIHFGHDGNSCFLGQLDATVIEKGEGGEALLGFDLSGPFLDEALHTVGHIPLPPYIASKRDDDERDRADYQTIYAREEGAVAAPTAGLHFTPELFAALDAKGVERHFVTLHVGAGTFLPVKADDTADHKMHAEIGSVSRETANALNAAKARGGRIIAVGTTSLRLLESAAREDDTVPAWSGPTDIFITPGYRFRTADMLMTNFHLPRSTLFMLVSAFSGLDTMRAAYAHAIANRYRFYSYGDASLLYRPEMSDG

SEQ ID NO: 68800 - protein, 362 aa, Mesorhizobium kowhaii
  misc_feature (1)..(362): tr|A0A2W7C1F8|A0A2W7C1F8_9RHIZ S-adenosylmethionine:tRN A ribosyltransferase-isomerase OS=Mesorhizobium kowhaii OX=1300272 GN=queA PE=3 SV=1
MRVDLFDFDLPEERIALRPAESRDSARMLVVKPGEGLDDRTVGDLPSLLRAGDVLVFNDTKVIPAQLKGIRRRGEAQAQVEATLHMRMAPDRWLAFMRPGKRIAAGDRIHFGHDGNSCFLGQLDATVIEKGEGGEALLGFDLSGPFLDEALHAVGHIPLPPYIASKRDDDERDRADYQTIYAREEGAVAAPTAGLHFTPELFAAIDAKGVERHFVTLHVGAGTFLPVKADDTADHKMHAETGSVSKATADALNAVRARGGRIIAVGTTSLRLLESAARADGTLAAWSGPTDIFITPGYRFRTADMLMTNFHLPRSTLFMLVSAFSGLDTMRAAYAHAIETRYRFYSYGDASLLYRAEMSDGR

SEQ ID NO: 68801 - protein, 371 aa, Mesorhizobium mediterraneum
  misc_feature (1)..(371): tr|A0A271KZR6|A0A271KZR6_9RHIZ S-adenosylmethionine:tRN A ribosyltransferase-isomerase OS=Mesorhizobium mediter raneum OX=43617 GN=queA PE=3 SV=1
MRVDLFDFELPEKRIALRPAEPRDSAKMLVVRPGEGLENRTVRELPTLLEAGDVLVFNDTKVIPAQLKGIRRRGEAAAQVEATLHMRVAPDRWLAFMRPGKRIAVGDRIHFGHDTNSCFLGQLDATVIEKGEAGEALLGFDLSGPFLDEALHAVGHIPLPPYIASKRDDDERDRSDYQTIYAREEGAVAAPTAGLHFTPELFAALDAKGVERRFVTLHVGAGTFLPVKVDDTADHKMHAEIGSVSPETAEALNAAKARGGRIIAVGTTSLRLLESAAREDGRLAAWSGPTDIFITPGYRFKAADMLMTNFHLPRSTLFMLVSAFCGLETMRAAYAHAIENRYRFYSYGDASLLFKEENDGRASGIHKEFND

SEQ ID NO: 68802 - protein, 361 aa, Mesorhizobium metallidurans
  misc_feature (1)..(361): tr|M5F5A9|M5F5A9_9RHIZ S-adenosylmethionine:tRNA ribosy ltransferase-isomerase OS=Mesorhizobium metallidurans S TM 2683 OX=1297569 GN=queA PE=3 SV=1
MKVELFDFELPEERIALRPAEPRDSAGMLVVRPGKGLEDRTVRDLPSLLKRGDVLVFNDTKVIPAQLKGIRRRGEAAAQVEATLHMRTAPDRWLAFMRPGKRVAAGDRIHFGLDGNSCFLGQFDATVIEKGEGGEVLLGFDLSGPFLDEALHAVGHIPLPPYIASKRDDDERDRSDYQTIYAREEGAVAAPTAGLHFTPELFAALDAKGIERRFVTLHVGAGTFLPVKVDDTADHKMHAEIGSVAQETAEALNAAKARGGRLVAVGTTSLRLLESAAGPDGRLAAWSGPTDIFITPGYLFKTADMLMTNFHLPRSTLFMLVSAFCGLQTMRAAYAHAIENRYRFYSYGDASLLFKEENDGR

SEQ ID NO: 68803 - protein, 370 aa, Mesorhizobium muleiense
  misc_feature (1)..(370): tr|A0A1G8TKJ8|A0A1G8TKJ8_9RHIZ S-adenosylmethionine:tRN A ribosyltransferase-isomerase OS=Mesorhizobium muleien se OX=1004279 GN=queA PE=3 SV=1
MRVDLFDFDLPEERIALRPAEPRDSAKMLVVRPGEGLEDRTVRELPSLLETGDVLVFNDTKVIPAQLKGIRRRGEAAAQIEATLHMRVAPDRWLAFMRPGKRIAAGDRIHFGHDANSCFLGQLDATVIEKGEAGEALLGFDLSGAFLDEALHAVGHIPLPPYIASKRDDDERDRSDYQTIYAREEGAVAAPTAGLHFTPELFAALDAKGVERRFVTLHVGAGTFLPVKVDDTADHKMHAEIGSVSPETARALNAAKARGGRIIAVGTTSLRLLESAARKDGMLAGWSGPTDIFITPGYRFKAADMLMTNFHLPRSTLFMLVSAFCGLETMRAAYAHAIENRYRFYSYGDASLLLKQENDGRAPGIEQGIQ

SEQ ID NO: 68804 - protein, 358 aa, Mesorhizobium muleiense
  misc_feature (1)..(358): tr|A0A1G9AML3|A0A1G9AML3_9RHIZ S-adenosylmethionine:tRN A ribosyltransferase-isomerase OS=Mesorhizobium muleien se OX=1004279 GN=SAMN05428953_113144 PE=3 SV=1
MIAADHPDRRSARLLVVMADGAMTDLPRADLAKLFEPDDLVVANDAATLPASLRGTHVPSSEAIEIRLAGWLSLADPTRFVAIAFGAGDHRTRTEDRLPPRPLSPGNRLRLGPLEAVVERLLDHPRLLELRFLGNRAAVLAGLAQHGRPIQYAHVPEPLALWDVWTKIAARPVAFEAPSAGFALDWRTLQSWRRHDVGFATLTHATGVSSTGDRALDSRLPFDEPYRIPEHTAVKVARAKLRGSRIIAVGTSVVRALEAAANPDGSVRAKNGIATGRVARETPLRVVDAILTGVHQPGESHFELLRAFADDALLAKASAAFAAHRYRTHEFGDSMLLNRQLLDRSHEPNRARDAASTL

SEQ ID NO: 68805 - protein, 363 aa, Mesorhizobium oceanicum
  misc_feature (1)..(363): tr|A0A1L3SRY3|A0A1L3SRY3_9RHIZ S-adenosylmethionine:tRN A ribosyltransferase-isomerase OS=Mesorhizobium oceanic um OX=1670800 GN=queA PE=3 SV=1
MKVNLFDFELPDERIALRPAEPRDAARLLLVRPGEGLSDGVVRDLPALLRPEDALVFNDTKVIPAQLRGLRRRGQAVAQVDATLHMRVAPDRWKAFLRPGKRVAAGDRISFGHGGNACLAGSLDATVIEKGEAGEALLAFDITGPVLDEALHTVGHIPLPPYIASKRPDDERDRTDYQTIYAREEGAVAAPTAGLHFTPALFGELDARGVERHFVTLHVGAGTFLPVKAEDTADHRMHAEIGHVSAETADALNAVRARGGRVVCVGTTSLRLLESAAGEDGRLSAWSGATDIFITPGYRFRAVDGLMTNFHLPRSTLFMLVSALSGLETMREAYRHAINTGYRFYSYGDASLLWRAEGGLQDQ

SEQ ID NO: 68806 - protein, 362 aa, Mesorhizobium opportunistum
  misc_feature (1)..(362): tr|F7Y775|F7Y775_MESOW S-adenosylmethionine:tRNA ribosy ltransferase-isomerase OS=Mesorhizobium opportunistum ( strain LMG 24607 / HAMBI 3007 / WSM2075) OX=536019 GN=q ueA PE=3 SV=1
MRVDLFDFDLPEERIALRPAEPRDSAGMLVVRPGETLDDRRVGDLPSLLRAGDVLVFNDTKVIPAQLKGIRRRGEAQAQVEATLHMRMAPDRWLAFMRPGKRVAAGDRIHFGHDGNSCFLGQLDATVIEKGEGGEALLGFDLSGPFLDEALHAVGHIPLPPYIASKRDDDERDRADYQTIYAREEGAVAAPTAGLHFTPELFAALDAKGVERRFVTLHVGAGTFLPVKADDTADHKMHAEIGSVSAATAEALNAAKARGGRIIAVGTTSLRLLESAARDDGTLAAWSGPTDIFITPGYRFRTADMLMTNFHLPRSTLFMLVSAFSGLETMRAAYAHAIAERYRFYSYGDASLLYRTETSDGR

SEQ ID NO: 68807 - protein, 360 aa, Mesorhizobium plurifarium
  misc_feature (1)..(360): tr|A0A2T3EM46|A0A2T3EM46_MESPL S-adenosylmethionine:tRN A ribosyltransferase-isomerase OS=Mesorhizobium plurifa rium OX=69974 GN=queA PE=3 SV=1
MRVDLFDFDLPEDSIALRPASPRDSARMLVVRPGGEPVLEDRGVLDLPSFLRPGDALVFNDTKVIPAQLEGVRYRGEDISTPVSLTLHMRVAPDRWKAFARPARRLKPGDRISFGHGGNACLLGSLEAVVEEKGDAGEVTLRFDLSGPSLDEAIMAVGHIPLPPYIASKRADDARDRTDYQTVYAREEGAVAAPTAGLHFTDRLFAKLDENGIERHFVTLHVGAGTFLPVKADDTDDHVMHEEIGHVDATTAAKLNAVRERGGRVVCVGTTSLRLIESAAAEDGNIRPWSGPTGIFITPGYRFRAVDMLMTNFHLPKSTLFMLVSAFAGLETMRAAYAHAIATGYRFYSYGDSSLLFRKD

SEQ ID NO: 68808 - protein, 362 aa, Mesorhizobium plurifarium
  misc_feature (1)..(362): tr|A0A090F605|A0A090F605_MESPL S-adenosylmethionine:tRN A ribosyltransferase-isomerase OS=Mesorhizobium plurifa rium OX=69974 GN=queA PE=3 SV=1
MRVDLFDFDLPEERIALRPAEPRHSARLLIVKPGEPLQDRIVSDLPSLLRQGDVLVFNDTKVIPAQLKGMRKRGEAVAQVEATLHMRVAPDRWQAFMRPGKRIAAGDRIHFGHDQNSCFLGQLDATVLEKGEAGEALLGFDLSGPFLDEALHAVGHIPLPPYIASKRDDDERDRADYQTIYAREEGAVAAPTAGLHFTPELFAALDAKGIERRFVTLHVGAGTFLPVKADDTANHKMHAETGSVSPETAAALNAARARGGRIICVGTTSLRLLESAARDDGRIEPWSGPTDIFITPGYRFRTADMLMTNFHLPRSTLFMLVSAFSGLETMRSAYAHAIENRYRFYSYGDASLLYRAETSDGR

SEQ ID NO: 68809 - protein, 343 aa, Mesorhizobium prunaredense
  misc_feature (1)..(343): tr|A0A1R3V2J4|A0A1R3V2J4_9RHIZ S-adenosylmethionine:tRN A ribosyltransferase-isomerase OS=Mesorhizobium prunare dense OX=1631249 GN=BQ8794_140246 PE=3 SV=1
MIAADHPDRRSARLLVVMADGAMTDLPRAELAKLFEPGDLVVANDAATLPASLHGTHVPSSKAIEIRLAGWLSLADPTRFVGFAFGAGDHRTRTEDRLPPPPLSPGNRLRLGPLEAVVERLLDHPRLLELRFLGNRAAVLAGLAQHGRPIQYAHVPEPLALWDVWTKIAARPVAFEAPSAGFALDWRTLQSWRRHDLGFATLTHATGISSTGDRALDSRLPFDEPYRIPEHTAAKVARAKLRRSRIIAVGTSVVRALEAAANPDGSVRAGKGIATGRVARDTPLRVVDAILTGVHQPGESHFELLRAFADDALLAKASAAFAAHRYRTHEFGDSMLLNRQPLD

SEQ ID NO: 68810 - protein, 370 aa, Mesorhizobium prunaredense
  misc_feature (1)..(370): tr|A0A1R3VJB6|A0A1R3VJB6_9RHIZ S-adenosylmethionine:tRN A ribosyltransferase-isomerase OS=Mesorhizobium prunare dense OX=1631249 GN=queA PE=3 SV=1
MRVDLFDFDLPEERIALRPAEPRDSAKMLVVRPGEGLEDRTVRELPSLLETGDVLVFNDTKVLPAQLKGIRRRGEAAAQIEATLHMRVAPDRWLAFMRPGKRIAAGDRIHFGHDANSCFLGQLDATVIEKGEAGEALLGFDLSGLFLDEALHAVGHIPLPPYIASKRDDDERDRSDYQTIYAREEGAVAAPTAGLHFTPELFAALDAKGVERRFVTLHVGAGTFLPVKVDDTADHKMHAEIGSVSPETAKALNAAKARGGRIIAVGTTSLRLLESAAREDGTLAGWSGPTDIFITPGYRFKAADMLMTNFHLPRSTLFMLVSAFCGLETMRAAYAHAIENRYRFYSYGDASLLFKQENDGRAPGIEQGIQ

SEQ ID NO: 68811 - protein, 362 aa, Mesorhizobium qingshengii
  misc_feature (1)..(362): tr|A0A1G5V5W3|A0A1G5V5W3_9RHIZ S-adenosylmethionine:tRN A ribosyltransferase-isomerase OS=Mesorhizobium qingshe ngii OX=1165689 GN=queA PE=3 SV=1
MRVDLFDFDLPEERIALRPAEPRDCARMLVVKPGERLDDRTVGDLPSLLRTGDVLVFNDTKVIPAQLKGFRRRGEAVAQVEATLHMRMAPDRWLAFMRPGKRIAAGDRIHFGHDGNSCFLGQLDATVIEKGEGGEALLGFDLSGPFLDEALHTVGHIPLPPYIASKRDDDERDRADYQTIYAREEGAVAAPTAGLHFTPELFAALDAKGIERRFVTLHVGAGTFLPVKADDTADHKMHAETGSVSEATAVALNVAKARGGRIIAVGTTSLRLLESAAREDGTLAAWSGPTDIFITPGYRFRTADMLMTNFHLPRSTLFMLVSAFSGLDTMRAAYAHAIENRYRFYSYGDASLLYRAETSDGR

SEQ ID NO: 68812 - protein, 361 aa, Mesorhizobium sanjuanii
  misc_feature (1)..(361): tr|A0A2A6FGP4|A0A2A6FGP4_9RHIZ S-adenosylmethionine:tRN A ribosyltransferase-isomerase OS=Mesorhizobium sanjuan ii OX=2037900 GN=queA PE=3 SV=1
MRVDLFDFELPEERIALRPAEPRDSARMLVVRPGEGLENRTVRDLPSLLKRGDVLVFNDTKVIPAQLKGIRRRGEAVAQVEATLHMRTAPDRWLAFMRPGKRVAAGDRIHFGHDGNSCFLGQLDATVIEKGDGGEVLLGFDLSGPFLDDALHAVGHIPLPPYIASKREDDERDRSDYQTIYAREEGAVAAPTAGLHFTPELFAALDAKGIERRFVTLHVGAGTFLPVKADDTADHKMHAETGSVSPETAESLNAAKARGGRIIAVGTTSLRLLESAATPDGRLAAWAGPTDIFITPGYRFKTADMLMTNFHLPRSTLFMLVSAFSGLETMRAAYAHAIETRYRFYSYGDASLLFREENDGR

SEQ ID NO: 68813 - protein, 358 aa, Mesorhizobium soli
  misc_feature (1)..(358): tr|A0A2P7SBL9|A0A2P7SBL9_9RHIZ S-adenosylmethionine:tRN A ribosyltransferase-isomerase OS=Mesorhizobium soli OX =1295366 GN=queA PE=3 SV=1
MRVDLFDFDLPEERIALRPAEPRDCAKLLLVHPGEPLEDKRVGDLPSLLEPGDVLVFNDTKVIPAQLKGIRQRGEAVAHVDATLHMRVGPDRWKAFVRPGKRVAEGDRIQFGHSAEACMLGGLDATVVEKGEAGEVLLAFDLSGPLLDEALHAVGHIPLPPYIASKRPDDERDRKDYQTVYAREEGAVAAPTAGLHFTPELFAALDARGIERRFVTLHVGAGTFLPVKADDTADHKMHAEIGYVSEETAAAINAARAEGRRVVAVGTTSLRLLESAAAPDGTMTAWSGATDIFITPGYKFRAVDMLMTNFHLPRSTLFMLVSAFSGLETMREAYRHAIETGYRFYSYGDASLLFRTDK

SEQ ID NO: 68814 - protein, 362 aa, Mesorhizobium sp.
  misc_feature (1)..(362): tr|A0A503Q7M1|A0A503Q7M1_9RHIZ S-adenosylmethionine:tRN A ribosyltransferase-isomerase OS=Mesorhizobium sp. B2- 4-6 OX=2589943 GN=queA PE=3 SV=1
MRVDLFDFDLPEERIALRPAEPRDSARLLVVKTGETPQDRLVGELPSLLREGDVLVFNDTKVIPAQLRGMRKRGEAVAQVEATLHMRVAPDRWQAFMRPGKRIAAGDRIHFGHDGNSCFLGQLDATVLEKGEAGEALLGFDLSGPFLDEALHAVGHIPLPPYIASKRDDDERDRADYQTIYAREEGAVAAPTAGLHFTPELFTALDAKGIERRFVTLHVGAGTFLPVKADDTADHKMHAETGSVSPETAAALNAAKARGGRIVCVGTTSLRLLESAARSDGRIEPWSGTTDIFITPGYRFRTVDMLMTNFHLPRSTLFMLVSAFSGLETMRSAYAHAIENRYRFYSYGDASLLFRAETSDGR

SEQ ID NO: 68815 - protein, 362 aa, Mesorhizobium sp.; identical to SEQ ID NO: 68788
  misc_feature (1)..(362): tr|A0A3S2F0K2|A0A3S2F0K2_9RHIZ S-adenosylmethionine:tRN A ribosyltransferase-isomerase OS=Mesorhizobium sp. M7A .F.Ca.CA.002.03.2.1 OX=2496680 GN=queA PE=3 SV=1

SEQ ID NO: 68816 - protein, 345 aa, Mesorhizobium tamadayense
  misc_feature (1)..(345): tr|A0A3P3F6L8|A0A3P3F6L8_9RHIZ S-adenosylmethionine:tRN A ribosyltransferase-isomerase OS=Mesorhizobium tamaday ense OX=425306 GN=EH240_27760 PE=3 SV=1
MAAADRRDRHVARLLVVEQDGTMRDLPRAELAGLLDPGDLVVANDAATLPASLDGVHIRSSEAVEIRLAAWLSFPDPRRFVGITFGAGDHRTRTEDRLPPPLLSSGDLLRLGPLEAIVERVLDHPRLLELRVFGSRGAVLAGLAQHGRPIQYAHVPEPLALWDVWTKIAIEPVAFEAPSAGFALDWSTLQTWHRRDVGFATLTHAAGISSTGDPVLDTRLPFDEPYCIPERTAALVAEAKRRGSRIIAIGTTVVRALESAANPDGSVCTGNGIATGRIERGTPLRLVDAILTGVHQPGESHFELLRAFADDALLTNASALLAAHRYRAHEFGDSILLNRQPLLLG

SEQ ID NO: 68817 - protein, 362 aa, Mesorhizobium tamadayense
  misc_feature (1)..(362): tr|A0A3P3FYB3|A0A3P3FYB3_9RHIZ S-adenosylmethionine:tRN A ribosyltransferase-isomerase OS=Mesorhizobium tamaday ense OX=425306 GN=queA PE=3 SV=1
MRVDLFDFDLPEERIALRPAEPRDSARLLVVRPGQGLKDRIVRDLPSLLRKGDVLVFNDTKVIPAQLKGIRRRGEAMAQVEATLHMRVAPDRWRAFMRPGKRIAAGDRIHFGHDQNSCFLGQLDATVIEKGEAGEVLLGFDLSGPFLDEAMHAVGHVPLPPYIASKRDDDERDRSDYQTIYAREEGAVAAPTAGLHFTPEMFAALDAKGIERRFVTLHVGAGTFLPVKADDTAEHKMHAETGSVSRETADALNAAKARGGRIISVGTTSLRLLESAAREDGSIEAWSGPTDIFITPGYRFRTADILMTNFHLPRSTLFMLVSAFSGLETMRSAYAHAIESRYRFYSYGDSSLLFRAETSDGR

SEQ ID NO: 68818 - protein, 344 aa, Mesorhizobium temperatum
  misc_feature (1)..(344): tr|A0A271LC91|A0A271LC91_9RHIZ S-adenosylmethionine:tRN A ribosyltransferase-isomerase OS=Mesorhizobium tempera tum OX=241416 GN=CIT26_31945 PE=3 SV=1
MIAADRPDRPSARLFVVEADGAMHDLPRAVLATLFDPGDLVVGNDAATLPASLHGTHVPSDEAIEIRLAGWLSLLDPTRLVAIAFGAGDHRTRTEDRLPPPPLSPGDRLRLGPLEAVVERLLDHPRLLELHFPGNRTVVLAGLARHGRPIQYAHVPEPLALWDVWTKIAAGPVAFEAPSAGFALDWRTLQAWRRRGVGFATVTHAAGVSSTGDPALDLRLPFDEPYRIPERTAAQVARAKLRGGRIIAIGTSVVRALEAAANPDGSVRAENAIATGRIARDMRLHVVDAILTGVHQPGESHFELLRAFADDALLAKASAAFTAYRYRAHEFGDSMLLNRQPLHL

SEQ ID NO: 68819 - protein, 364 aa, Mesorhizobium temperatum
  misc_feature (1)..(364): tr|A0A271LPJ6|A0A271LPJ6_9RHIZ S-adenosylmethionine:tRN A ribosyltransferase-isomerase OS=Mesorhizobium tempera tum OX=241416 GN=queA PE=3 SV=1
MRVDLFDFDLPEERIALRPAEPRDSSKMLVVRPGEGLEDRTVRELPSLLETGDVLVFNDTKVIPAQLKGIRRRGEAAAQVEATLHMRVAPDRWLAFMRPGKRIAVGDRIHFGHDANSCFLGQLDATVIEKGEAGEALLGFDLSGPSLDEALHAVGHIPLPPYIASKRDDDERDRSDYQTIYAREEGAVAAPTAGLHFTPELFAALDAKGVERRFVTLHVGAGTFLPVKVDDTADHKMHAEIGSVSPETAEALNAAKARGGRIIAVGTTSLRLLESATREDGTLAGWSGPTDIFITPGYRFKAADMLMTNFHLPRSTLFMLVSAFCGLETMRAAYAHAIENRYRFYSYGDASLLFKEENDGRAPV

SEQ ID NO: 68820 - protein, 361 aa, Mesorhizobium tianshanense
  misc_feature (1)..(361): tr|A0A562PEC1|A0A562PEC1_9RHIZ S-adenosylmethionine:tRN A ribosyltransferase-isomerase OS=Mesorhizobium tiansha nense OX=39844 GN=queA PE=3 SV=1
MRVDLFDFELPEERIALRPAEPRDSAKMLVVRPGEGLEDRTVRELPSLLEAGDVLVFNDTKVIPAQLKGIRRRGEAAAQVEATLHMRVAPDRWLAFMRPGKRIAAGDRIHFGHDANSCFLGQLDATVIEKGDGGEALLGFDLSGPFLDEALHAVGHIPLPPYIASKRDDDERDRSDYQTIYAREEGAVAAPTAGLHYTPELFAALDAKGVERRFVTLHVGAGTFLPVKVDDTADHKMHAEIGSVSPETAAALNAAKARGGRIVAVGTTSLRLLENAAREDGILAGWSGPTDIFITPGYRFKAIDMLMTNFHLPRSTLFMLVSAFCGLETMRAAYAHAIENRYRFYSYGDATLLFKEENDGR

SEQ ID NO: 68821 - protein, 362 aa, Mesorhizobium waimense
  misc_feature (1)..(362): tr|A0A3A5KJQ2|A0A3A5KJQ2_9RHIZ S-adenosylmethionine:tRN A ribosyltransferase-isomerase OS=Mesorhizobium waimens e OX=1300307 GN=queA PE=3 SV=1
MRVDLFDFDLPEERIALRPAEPRDSARMLVVKPDQGLDDRTVRDLPSFLEAGDVLVFNDTKVIPAQLRGIRRRGEAQAQVEATLHMRVAPDRWQAFMRPGKRIAAGDRIHFGHDGNSCFLGQLDATVIEKGDAGEVLLGFDLSGAFLDEALHAVGHIPLPPYIASKRDDDERDRSDYQTIYAREEGAVAAPTAGLHFTPELFAALDAKGIERRFVTLHVGAGTFLPVKADDTADHKMHAETGSVSQDTAEALNAAKARGGRIIAVGTTSLRLLESAAREDGTLAAWSGPTDIFITPGYRFRTADMLMTNFHLPRSTLFMLVSAFCGLETMRAAYAHAIDNSYRFYSYGDASLLYRAETSDGR

SEQ ID NO: 68822 - protein, 370 aa, Mesorhizobium wenxiniae
  misc_feature (1)..(370): tr|A0A271KDI1|A0A271KDI1_9RHIZ S-adenosylmethionine:tRN A ribosyltransferase-isomerase OS=Mesorhizobium wenxini ae OX=2014805 GN=queA PE=3 SV=1
MRVDLFDFDLPEERIALRPAEPRDSAKMLVVRPGEGREDRTVRELPSLLESGDVLVFNDTKVIPAQLKGIRRRGEAVAQVEATLHMRVAPDRWLAFMRPGKRIAAGDRVHFGHDANSCFLGQLDATVIEKGEAGEALLGFDLSGPFLDEALHAVGHIPLPPYIASKRDDDERDRNDYQTIYAREEGAVAAPTAGLHFTPELFAALDAKGVERRFVTLHVGAGTFLPVKVDDTADHKMHAEIGSVSPETAEALNAAKARGGHIIAVGTTSLRLLESAAREDGTLGGWSGPTDIFITPGYRFKAADMLMTNFHLPRSTLFMLVSALCGLKTMRAAYAHAIENSYRFYSYGDASLLFKEENDGRALGIEQGIQ

SEQ ID NO: 68823 - protein, 344 aa, Mesorhizobium wenxiniae
  misc_feature (1)..(344): tr|A0A271KGX5|A0A271KGX5_9RHIZ S-adenosylmethionine:tRN A ribosyltransferase-isomerase OS=Mesorhizobium wenxini ae OX=2014805 GN=CIT31_13070 PE=3 SV=1
MIAADRPDRRSARLFVIEADGTMRDLPRAGLAMLFDPGDLVVGNDAATLPASLHGTHVPSEKAIEIRLAGWLSLPDPTRFVAIAFGAGDHRTRTEDRLPPPPLSPGDRLRLGPLEAVVERLLDHPRLLELRFQGNRAAVLAGLAQHGRPIQYAHVPEPLALWDVWTKIAAGPVAFEAPSAGFALDWRTLQAWRRRGVGFATVTHAAGVSSTGDPALDLRLPFDEPYRIPERTAAQVARAKLRGGRIIAIGTSVVRALEAAANPDGNVRAENAIATGRIARDTRLHVVDAILTGVHQPGESHFELLRAFADDALLAKASAAFTAYRYRTHEFGDSMLLNRQPLHL

SEQ ID NO: 68824 - protein, 350 aa, Mesosutterella multiformis
  misc_feature (1)..(350): tr|A0A388S9S0|A0A388S9S0_9BURK S-adenosylmethionine:tRN A ribosyltransferase-isomerase OS=Mesosutterella multif ormis OX=2259133 GN=queA PE=3 SV=1
MTEQYLSDFDFDLPEELIAQFPLEQRDNCRLLHVVPEGGYEDLLFHDIKKLLRPGDLLVMNNTFVIKARLRGHKATGGAVEALIERVTGEKSAIAMMRASKSPKAGTEVIFENHEGEKLPVKVGEREGEFFELEFPDAVLPLLDKFGSTPLPPYIERDANAKDESTYQTVYAKIPGAVAAPTAGLHFTRELLDELKAEGIDEAYVTLHVGAGTFQPVREEKLSEHKMHSEWYSVSPEVAAKVNETKAKGGRIVAVGTTSLRTLEAAAVAPGRIQSGARDTTLFVTPGYKFNTIDALITNFHLPKSTLVMLVSAIAGRERILDAYRHAIENKYRFFSYGDAMFLENAPQAK

SEQ ID NO: 68825 - protein, 336 aa, Mesotoga infera
  misc_feature (1)..(336): tr|A0A101GYM9|A0A101GYM9_9BACT S-adenosylmethionine:tRN A ribosyltransferase-isomerase OS=Mesotoga infera OX=12 36046 GN=queA PE=3 SV=1
MKVSEFDYDLPEELIAQEPAVPRDSSRLLVVDRKSGVLEHRVFAEIVEFLRPGDVVVLNNSRVIPARLLGMKETGGKVEAVLIERVGRGLWKAIVRPGSKIKPGNELLFSGISCSVVEHCEDSGRILDFHGASDEEIKESGLLAIPPYIQTYPENPESYQTVYSRPEGSVAAPTAGLHFTESLLETLTGKGVAVEFITLHVGIGTFRPVKSELIEEHKMHGEYYTVSSEAAETINKAKADKRRIIAVGTTTVRTLESIAARHGSVVSDSGQTNIFIYPPYDFKIVDSLVTNFHLPKSTLLMLVSAFAGRELILSAYREAISRRYRFFSFGDACLLL

SEQ ID NO: 68826 - protein, 336 aa, Mesotoga prima
  misc_feature (1)..(336): tr|I2F3K0|I2F3K0_9BACT S-adenosylmethionine:tRNA ribosy ltransferase-isomerase OS=Mesotoga prima MesG1.Ag.4.2 O X=660470 GN=queA PE=3 SV=1
MKVSDYDFELPEELIAQKPAIPRDSSRLLVIDRETYSFEHRVFAEIEDFLHPGDVLVLNNSRVIPARLLGKKETGAKVEAVLTEKLGGGLWKAIVRPGSKIKPGNVLLFNKISCKVIEHCDDSSRILDFGSVTDEDVKKAGLLAIPPYVKYYPDNPESYQTVYSRPEGSVAAPTAGLHFTDTLLERLRKKDVDVQFITLHVGIGTFRPVKSETVDGHKMHNEFFSVSSEVAERLERARTEKRRIVAVGTTTVRTLESIVARHGCIVGDSGHTDIFIYPPYTFKATDSLITNFHLPRSTLLMLVSAFAGRELILSAYREAILKRYRFFSFGDACLIL

SEQ ID NO: 68827 - protein, 336 aa, Mesotoga sp.
  misc_feature (1)..(336): tr|A0A421CKN0|A0A421CKN0_9BACT S-adenosylmethionine:tRN A ribosyltransferase-isomerase OS=Mesotoga sp. H07pep.5 .4 OX=1463664 GN=queA PE=3 SV=1
MKVSDYDFELPEELIAQKPAIPRDSSRLLVIDRETYSFEHRVFAEIEDFLHPGDVLVLNNSRVIPARLLGRKETGAKVEAVLTEKLGGGLWKAIVRPGSKIKLGNVLLFNKISCKVIEHCDDSSRILDFGSVTDEDVKKAGLLAIPPYVKYYPDDPESYQTVYSRLEGSVAAPTAGLHFTDTLLERLRKKDVDVQFITLHVGIGTFRPVKSETIDGHKMHNEFFSVSSEVAERLERARKEKRRIVAVGTTTVRTLESIIARHGSIVGDSGHTDIFIYPPYTFKAIDSLITNFHLPRSTLLMLVSAFAGRELILSAYREAIIKKYRFFSFGDACLIL

SEQ ID NO: 68828 - protein, 336 aa, Mesotoga sp.
  misc_feature (1)..(336): tr|A0A2W1B4D0|A0A2W1B4D0_9BACT S-adenosylmethionine:tRN A ribosyltransferase-isomerase OS=Mesotoga sp. TolDC OX =1389250 GN=queA PE=3 SV=1
MKVSEFDYDLPEELIAQEPAVPRDSSRLLVVDRKSGALEHRVFAEIVEFLRPGDVVVLNNSRVIPARLLGMKETGAKVEAVLIERLDRGLWKAIVRPGSKIKPGNELLFSGISCRVVEHCEDSGRILDFHGASDEEIKESGLLAIPPYIQTYPENPESYQTVYSRPEGSVAAPTAGLHFTESLLETLAGKGVAVEFITLHVGIGTFRPVKSELIEEHKMHGEYFTVSSEAAETINKAKADNRRIIAVGTTTVRTLESIAARHGSVVSDSGQTDIFIYPPYDFKIVDSLVTNFHLPKSTLLMLVSAFAGRELILSAYREAISRRYRFFSFGDACLLL

SEQ ID NO: 68829 - protein, 356 aa, Metakosakonia sp.
  misc_feature (1)..(356): tr|A0A348DIR8|A0A348DIR8_9ENTR S-adenosylmethionine:tRN A ribosyltransferase-isomerase OS=Metakosakonia sp. MRY 16-398 OX=2487150 GN=queA PE=3 SV=1
MRVADFSFELPESLIAHYPQPERSSCRLLSLDGPTGALAHGTFTDLLDKLNPGDLLVFNNTRVIPARLFGRKASGGKIEVLVERMLDDKRILAHIRASKAPKPGAELLLGDDESIHATMVARHDALFEVEFNDERPVLDILNAIGHMPLPPYIDRPDEDADRELYQTVYSQKPGAVAAPTAGLHFDEPLLARLREKGIEMAFVTLHVGAGTFQPVRVDSIEDHIMHSEYAEVPQEVVDAVLAAKARGNRVIAVGTTSVRSLESAAQAAKNALIAPFFGDTQIFIFPGYQYQVIDALVTNFHLPESTLIMLVSAFAGYKHTMHAYQEAVAHKYRFFSYGDAMFITYNPQAINERPGE

SEQ ID NO: 68830 - protein, 344 aa, Metallibacterium scheffleri
  misc_feature (1)..(344): tr|A0A4S3KKK6|A0A4S3KKK6_9GAMM S-adenosylmethionine:tRN A ribosyltransferase-isomerase OS=Metallibacterium sche ffleri OX=993689 GN=queA PE=3 SV=1
MKKSDFHYELPAELIAQAPLPERSASRMLIVDAADAAWRDARICDLPEQLRAGDLLVFNDTRVLPARLHARKQTGGVAEILIERISGSHEVRAQLGVSKKPREGAVLTLADGSAVRVLGREGAFFHLRFEVDEPLENLLQRLGQMPLPPYITRAPDAADAERYQTVYARHAGAVAAPTAGLHFDAPLLQALRARGVQTGFVTLHVGAGTFQPLRSEQVEDHHMHSEWINVGAALVEQIRRTREAGGRVLAVGTTVVRALESAAPGGALAPYAGETSIFILPGYRFTQIDGLLTNFHLPESTLLMLVSALAGRELMLAAYRHAVDARYRFFSYGDAMLIWPRAAG

SEQ ID NO: 68831 - protein, 343 aa, Unknown
  misc_feature (1)..(343): tr|A0A1X7MKY7|A0A1X7MKY7_9GAMM S-adenosylmethionine:tRN A ribosyltransferase-isomerase OS=methanotrophic bacter ial endosymbiont of Bathymodiolus sp. OX=280772 GN=queA PE=3 SV=1
MKKSDFYYDLPDELIAQQPLPERSASRLLCLDKETDAIEDRHFNELLALLHKDDLLVLNNTKVIPARLFGHKQSGGKVEILIERVLNDREVLVHMRSSKSPKAGALIELDEGFQCLVLGRVDDLFHLQFLGDQNLEAILQRIGHMPLPPYIERADDKNDQTRYQSVFAKQSSAVAAPTASLHFDTAMMAKIQAKGIAITFVTLHVASGTFRPVKVENLQEHVMHKEYFEVPEQTVEAVAQAKKRGGRVIAIGTTAMRSLESASRNGRLESECGDTDLFITPGYQFKTVDAMLTNFHLPESTLLMLVSAFAGYERIKKVYQHAIAEKYRFFSYGDAMFIQRYPG

SEQ ID NO: 68832 - protein, 351 aa, Methylacidimicrobium cyclopophantes
  misc_feature (1)..(351): tr|A0A5E6ME59|A0A5E6ME59_9BACT S-adenosylmethionine:tRN A ribosyltransferase-isomerase OS=Methylacidimicrobium cyclopophantes OX=1041766 GN=queA PE=3 SV=1
MLAEGPPSSSSFDRSLPELAPYSFVLPEERIALAPSPDRAEARLLLLDRRSRSIAHYRIRDLPALLDPGDLLVLNDSRVIPALFPCAEPRLSLLLLEEQEPLLWRALVEPARKAPLGRSLLFVADLGKAEEERLTAEVVGVRSRGERLLRFSRPFRLERFGLPPLPPYIRKRRGRASDSSFSDSERYQTVFARQPGSVAAPTAGLHLTPELLARLPHAFVTLHVGPGTFRPIGPAEWRSGRLHPERFSIPSGFAEAAAASRRLVAVGTTVARVLETAPDLCAQNGTTDLFLRPPCAFRRTGALLTNFHLPRSSLFLLVSAFAGLELIHEAYREAIASGYRFYSYGDAMLIL

SEQ ID NO: 68833 - protein, 357 aa, Methylacidimicrobium tartarophylax
  misc_feature (1)..(357): tr|A0A5E6MC33|A0A5E6MC33_9BACT S-adenosylmethionine:tRN A ribosyltransferase-isomerase OS=Methylacidimicrobium tartarophylax OX=1041768 GN=queA PE=3 SV=1
MSHTVHAGGGAVGRGTLIDRSVPDLAPYSFVLPEERIALAPTSDRAEARLMLLDRRSRSISHHRIRDLPTLLDPDDLLILNDSRVIPAYLPCREPQVSFLLLEEPEPLLWKALAEPARKASLGRSLLFVSHPGTADEERLTAEVVEVGSRGERLLRFSHPFLLERFGSPPLPPYIRKRRKHASVTPSFDLERYQTVFARRPGSVAAPTAGLHFTPGLLARLPHAFVTLHVGPGTFRPIGPEEWRTGRLHPERLAVPPGLAEAAQAARRLVAVGTTVARVLESVPDLRERSGTTDLFLRPPYSFQRTGALLTNFHLPRSSLFLLVSAFAGLDLLHEAYREAVACGYRFYSYGDAMLIL

SEQ ID NO: 68834 - protein, 334 aa, Methylacidiphilum fumariolicum
  misc_feature (1)..(334): tr|A0A5F0I2G3|A0A5F0I2G3_9BACT S-adenosylmethionine:tRN A ribosyltransferase-isomerase OS=Methylacidiphilum fum ariolicum OX=591154 GN=A7K73_07020 PE=3 SV=1
MEEYSFSLPKELIALDPTPQRDHCKLMVVDRKTGRFYHCQFADLPQFLSKEDLLVLNNSKVLPAFFKSMDEKTTFLFVEALTPYQWKVMASPSKHVKSDSIVWLKKSQKDGYCELEAKIVSKLSDGYYILEFDKEPNLESLGLPPLPPYIRKLRRKNNRPEIDQQDMEYYQTVFAQRPGSIAAPTAGLHFSKGLLSKFKTAFITLHIGPGTFRPLTPKQLKTAKLEPEYFIIDANLKKMYKEGQRIVAIGTTVVRVLETIKNLEPQEGWTDLFIFPPFQFQRTGALITNFHLPKSSLFLLTCAFAGTDLLKAAYEEAIKKGYRFYSYGDAMLIL

SEQ ID NO: 68835 - protein, 334 aa, Methylacidiphilum fumariolicum; identical to SEQ ID NO: 68834
  misc_feature (1)..(334): tr|I0JZH3|I0JZH3_METFB S-adenosylmethionine:tRNA ribosy ltransferase-isomerase OS=Methylacidiphilum fumariolicu m (strain SolV) OX=1156937 GN=queA PE=3 SV=1

SEQ ID NO: 68836 - protein, 337 aa, Methylacidiphilum infernorum
  misc_feature (1)..(337): tr|B3DWS3|B3DWS3_METI4 S-adenosylmethionine:tRNA ribosy ltransferase-isomerase OS=Methylacidiphilum infernorum (isolate V4) OX=481448 GN=queA PE=3 SV=1
MNFIDHYSFDLPSELIALDPLPSRDGCKLMVVDRKTQRFYHHRFYELALFLSKEDLLVLNNSKVIPAFFQSADEKTTFLFVQSLDPLHWKVMASPGKHLKMGSIIPIKCPTQNPNSPITARLSSKLQSAYYVLEFDEEPKLEWLGLPPLPPYIRKLRKKKNRVEIEQKDREYYQTVFAQHPGSIAAPTAGLHFSKEMLEQFSTAFITLHVGPGTFRPLSTEQLATGRLEAEYYSIDSSLKEKYKPGRRIVAVGTTVVRVLETIKNLEPQQGWTDLFIFPPFTFKRTNALITNFHLPRSSLFLLTCAFAGTELLKKAYAEAIQKSYRFYSYGDAMLII

SEQ ID NO: 68837 - protein, 334 aa, Methylacidiphilum kamchatkense
  misc_feature (1)..(334): tr|A0A0C1USB3|A0A0C1USB3_9BACT S-adenosylmethionine:tRN A ribosyltransferase-isomerase OS=Methylacidiphilum kam chatkense Kam1 OX=1202785 GN=kam1_682 PE=3 SV=1
MEEYSFSLPKELIALDPTPQRDHCKLMVVDRKTGCFYHCQFSDLPQFLSKEDLLVLNNSKVLPAFFKSMDEKTTFLFVEALAPYQWKVMASPSKHVKSGSIVWLKRSQKDGYCELQAKIVSKLSDGYYILEFDKAPNLESLGLPPLPPYIRKLRKKNNRPEIEQQDMEYYQTVFAQCPGSIAAPTAGLHFSKELLSKFKTAFITLHIGPGTFRPLTAEQLKRAKLEPEYFIIDANLKKMYKEGQRIVAIGTTVVRVLETIKNLEPQEGWTDLFIFPPFQFQRTGALITNFHLPKSSLFLLTCAFAGTNLLKAAYEEAIKKGYRFYSYGDAMLIL

SEQ ID NO: 68838 - protein, 334 aa, Methylacidiphilum sp.
  misc_feature (1)..(334): tr|A0A4Y8P683|A0A4Y8P683_9BACT S-adenosylmethionine:tRN A ribosyltransferase-isomerase OS=Methylacidiphilum sp. Yel OX=1847730 GN=A7Q09_02695 PE=3 SV=1
MEEYSFSLPKELIALDPTPQRDHCKLMVVDRKTGRFYHCQFSDLPQFLSKEDLLVLNNSKVLPAFFKSMDEKTTFLFVEALTPYQWKVMASPSKHLKNGLIVWLKKSQKDGYCELEAKIVSKLSGGYYILEFDKEPNLESLGLPPLPPYIRKLRRKNNRPEIEQQDMEYYQTVFAQCPGSIAAPTAGLHFSKGLLSKFKTAFITLHIGPGTFRPLTSEQLKTAKLEPEYFIINANLKKMYKEGQRIVAIGTTVVRVLETIKNLEPQEGWTDLFIFPPFQFQRTGALITNFHLPKSSLFLLTCAFAGTDLLKAAYEEAIKKGYRFYSYGDAMLIL

SEQ ID NO: 68839 - protein, 337 aa, Methylacidiphilum sp.
  misc_feature (1)..(337): tr|A0A4Y8PGD9|A0A4Y8PGD9_9BACT S-adenosylmethionine:tRN A ribosyltransferase-isomerase OS=Methylacidiphilum sp. Phi OX=1847729 GN=A7Q10_04965 PE=3 SV=1
MDWLDNYSFDLPPELIALDPLIQREACKLMVVDRKAKRFYHHSFSELSLFLSKEDLLVLNNSKVIPALFKSADEKVSFLFINALDPFRWKVMASPGKYLKKDSIINLKSAGQTNPCDVPVIIKDKLPGGYYILEFEKEINLESLGLPPLPPYIRKLRKKKKRAEIEQKDREYYQTVFAKQLGSIAAPTAGLHFSKEMLENFSTAFITLHVGPATFRPLSVEQLSSGRLEPEYYSIDGSLKEQFRPGRRVVAVGTTVVRVLETIKDFEPQSGWTDLFIFPPFSFKNTHAMITNFHLPKSSLFLLTCAFAGTDLLKEAYKEAIQKGYRFYSYGDAMLII

SEQ ID NO: 68840 - protein, 348 aa, Methylarcula marina
  misc_feature (1)..(348): tr|A0A422QSS0|A0A422QSS0_9RHOB S-adenosylmethionine:tRN A ribosyltransferase-isomerase OS=Methylarcula marina O X=72022 GN=queA PE=3 SV=1
MKLSDFDFDLPEHLIATRPARPRSSARLLLAEGQGIVDRHVYDLPQILRPGDLLVLNDTKVIPARLTGTRTRQTGQGEAVAKIEVTLLEPAADGWQALAKPLRKLREGEVIRFGEALSAEVAAITDGGLRLRFDAEGDAFDAALAQVGAMPLPPYIASLRAPDEQDRKDYQTVWAARQGAVAAPTASLHFDTPLLEALEARGVEFVHVTLHVGAGTFLPVKVENVATHRMHAEWGEVSEEAATRINAAKEQGRRVIPVGTTALRLIESAATEEARIQPFAGTTEIFIYPGYHFRVSDGLMTNFHLPKSTLLMLVSALMGMDKIQRIYAHAVAEEYRFFSYGDASLLLP

SEQ ID NO: 68841 - protein, 355 aa, Methylibium petroleiphilum
  misc_feature (1)..(355): tr|A2SMA0|A2SMA0_METPP S-adenosylmethionine:tRNA ribosy ltransferase-isomerase OS=Methylibium petroleiphilum (s train ATCC BAA-1232 / LMG 22953 / PM1) OX=420662 GN=que A PE=3 SV=1
MSDAPAHPLTVADFDFALPPELIAQHPAPERSGSRLLDGRGDAPLDRRFRELPSLLSPGDLLVFNDTRVIKARLYGRKASGGGVEALVERVLPGTHEVWAHLRASKSPRPGSRVHFAGRDGGSTAFDAEVLGRCGPDGSLFHLRLPGDPFALLERHGHVPLPPYIEHGDDADDERRYQTVFARAPGAVAAPTAALHFDAEVLAALEAQGVARASVTLHVGAGTFQPVRVEQLAEHRMHSEWFELPGATVDAIARTRAAGGRVVAVGTTTLRALESAALGGELQAGARETDIFITPGFTFRVVDRLLTNFHLPRSTLMMLVSAFAGHERIRTLYTHAIRERYRFFSYGDAMLLQRR

SEQ ID NO: 68842 - protein, 356 aa, Methylibium sp.
  misc_feature (1)..(356): tr|A0A0Q7DE98|A0A0Q7DE98_9BURK S-adenosylmethionine:tRN A ribosyltransferase-isomerase OS=Methylibium sp. Root1 272 OX=1736441 GN=queA PE=3 SV=1
MSAAPAHPFTVADFDFALPPELIAQHPAAERSGSRLLDGRGDVPLDRRFRELPSLLAPGDLLVFNDTRVIKARLYGRKASGGGVEALVERVLPGTHEVWAHLRASKSPRPGSRVHFAGRDGDTIAFEAEVLGRCGPDGSLFHLLLPGEPFALLERHGHVPLPPYIEHGDDADDERRYQTVFARSPGAVAAPTAALHFDADVLAALEAQGVARASVTLHVGAGTFQPVRVEHLTEHRMHSEWFELPQATVDAIARTRAAGGRVVAVGTTTLRALESAARGDRGLQAGARDTDIFITPGFAFRVVDRLLTNFHLPRSTLMMLVSAFAGHAHIRALYAHAIRERYRFFSYGDAMLLDRR

SEQ ID NO: 68843 - protein, 355 aa, Methylibium sp.
  misc_feature (1)..(355): tr|A0A4P6HAX0|A0A4P6HAX0_9BURK S-adenosylmethionine:tRN A ribosyltransferase-isomerase OS=Methylibium sp. Pch-M OX=2082386 GN=queA PE=3 SV=1
MSDAPAHPFTVADFDFALPPELIAQHPAPERSGSRLLDGRGAAPLDRRFRELPSLLSPGDLLVFNDTRVIKARLFGRKASGGGVEALVERVLPGTHEVWAHLRASKSPRPGSRVHFAGRDGGSTAFDAEVLGRCGPDGSLFHLHLPGDPFALLERHGHVPLPPYIEHGDDADDERRYQTVFARAPGAVAAPTAALHFDAEVLAALEAQGVARASVTLHVGAGTFQPVRVEQLSEHRMHSEWFELPEATVDAIARTRAAGGRVVAVGTTTLRALESAALGGELQAGARETDIFITPGFTFRVVDRLLTNFHLPRSTLMMLVSAFAGHERIRALYTHAIRERYRFFSYGDAMLLQRR

SEQ ID NO: 68844 - protein, 344 aa, Methylobacillus flagellatus
  misc_feature (1)..(344): tr|Q1H494|Q1H494_METFK S-adenosylmethionine:tRNA ribosy ltransferase-isomerase OS=Methylobacillus flagellatus ( strain KT / ATCC 51484 / DSM 6875) OX=265072 GN=queA PE =3 SV=1
MTMRTNDFDFFLPDELIAQFPAKERRGSRLLHLDGNTGQVNDRLFLDLPDLVEPGDLFIFNDTRVIKARLHGEKLSGGKIEVLVERVLGPFEALAHIRASRAPKPGSILRIADAFEAEMLGRQDDLFHLRILGDLPLLDLLEQHGSLPLPPYITHDAESTDEERYQTVYAREPGAVAAPTAGLHFDNAMLDGLKRLGVNIAYVTLHVGAGTFQPVRVDNISEHKMHSELYSVPQHTVDMIHQTRATGGKVTAVGTTALRALESAAQPGTLQAGQGETDIFITPGYRFQVVERLLTNFHLPKSTLLMLVSAFAGVEHIRNAYAHAVTARYRFFSYGDAMLIERQD

SEQ ID NO: 68845 - protein, 342 aa, Methylobacillus rhizosphaerae
  misc_feature (1)..(342): tr|A0A239A164|A0A239A164_9PROT S-adenosylmethionine:tRN A ribosyltransferase-isomerase OS=Methylobacillus rhizo sphaerae OX=551994 GN=queA PE=3 SV=1
MRTTDFDFFLPDDLIAQFPARERRGSRLLHLDGKTGTTKDHLFLDLPSLVRPGDLFIFNDTRVIKARLHGEKSSGGKVELLVERILGPFEALAHIRSSRSPKPGSLLRIAGAIEAEVTGRQDDLFQIRFLGTTPLLDLLEQYGALPLPPYITHAAEETDEERYQTVYAREPGAIAAPTAGLHFDADMLESLRTLGVNIAYVTLHVGAGTFQPVRVDDIHDHKMHSELYSVPQATVDLIQQTRTNGGTVTAVGTTALRALESAARNGTLAAGSGDTDIFITPGYRFQVVERLLTNFHLPKSTLMMLVSAFAGVEHIRHAYAHAVAERYRFFSYGDAMLLERCD

SEQ ID NO: 68846 - protein, 349 aa, Methylobacillus sp.
  misc_feature (1)..(349): tr|A0A1A9NJR8|A0A1A9NJR8_9PROT S-adenosylmethionine:tRN A ribosyltransferase-isomerase OS=Methylobacillus sp. M M3 OX=1848039 GN=queA PE=3 SV=1
MRTSDFDFELPSELIAQFPAAKRSGSRLLCLDGNSGALHDRMFGELPSLLAAGDLLVFNDTRVIKARLNGRKESGGKVEVLVERMLDAHRALAHVRASHAPKPGGRLILAEAIEVEVLSRQDDLYELKFPGETPLAELLERYGKLPLPPYITHAADSDDDERYQTVYARNPGAVAAPTAGLHFDEDVMQTLAECGIEKAFVTLHVGAGTFQPIRVEDVAEHKMHSEWYEIPQATVDSIARTRQRGGKVIAVGTTAMRALESAARQGEMAVGGGDTDIFITPGYRFRVVDRLLTNFHLPRTTLLMLVSAFGGMAHIREAYRHAVQERYRFFSYGDAMLIDRQNLPEVAGE

SEQ ID NO: 68847 - protein, 340 aa, Methylobacter sp.
  misc_feature (1)..(340): tr|A0A522WZ75|A0A522WZ75_9GAMM S-adenosylmethionine:tRN A ribosyltransferase-isomerase OS=Methylobacter sp. OX= 2051955 GN=queA PE=3 SV=1
MKKSDFVYHLPEALIAQKPLTERDASRLLCMDRHGGRIVDRQFTDFIDLIDERDLLVFNNTKVIPARLFGKKQSGGKVEILIERIVNDHRAIAHVRSSKSAKAGALIELDQGYCCEVLGRAEDLFQLEFKGDSNIFSILEQIGHIPLPPYITREDDESDLARYQTVFAKEAGAVAAPTAGLHFDQIMMDKLKAKGVQTAFVTLHVGSGTFQPVRVEDLSEHLMHKEYFAVLPETVATVQLARARGGRVIAIGTTAVRALESASKSGRLEACFGDTDLFITPGYQFKSVDAMLTNFHLSESTLLMLVSAFAGYESIMNAYSHAIDQSYRFFSYGDAMFLSD

SEQ ID NO: 68848 - protein, 340 aa, Methylobacter sp.
  misc_feature (1)..(340): tr|A0A2S5QWJ1|A0A2S5QWJ1_9GAMM S-adenosylmethionine:tRN A ribosyltransferase-isomerase OS=Methylobacter sp. OX= 2051955 GN=queA PE=3 SV=1
MKKSDFYYDLPDALIAQHPLAERTASRLLCLNRDSGVLADKQFSDFIDLLKPDDLLVFNDTRVIPARLWGNKASGGKVEILIERIIDEHHALAHVRASKAPKAGAVIQLPEGLACTVEGRENDLFQLMFDGGQTVLEVLMQIGHIPLPPYITRDDDAADFSRYQTVFAKTAGAVAAPTAGLHFDQALLDSIQAKGVRSAFVTLHVGSGTFQPVRVENLAEHVMHKEHFSVPPETVAAIAQTRAKSGRVIAIGTTAVRALESAARTGPFAATLGDTRLFITPGYTFKVVDALLTNFHLPESTLLMLVSAFAGYRPVMDAYQHAINQGYRFFSYGDAMFLYR

SEQ ID NO: 68849 - protein, 339 aa, Methylobacter tundripaludum
  misc_feature (1)..(339): tr|A0A2S6HF22|A0A2S6HF22_9GAMM S-adenosylmethionine:tRN A ribosyltransferase-isomerase OS=Methylobacter tundrip aludum OX=173365 GN=queA PE=3 SV=1
MKKSDFNYQLPEALIAQKPLAERDASRLLCMDRNIGGIVDRQFTDFIDLINERDLLVFNDTKVIPARLFGTKQSGGKVEILIERILDEHHAIAHVRASKSSKAGTLIELEKGYCCEVLGRADDLFQLEFKGDNSLLSILEQIGHIPLPPYITREDDQSDLTRYQTVFAREAGAVAAPTAGLHFDQAMMEKLKAKGVQSVFVTLHVGSGTFQPVRVEDLSEHLMHKEYFVVLPETVAAVQQARARGGRVIAIGTTAVRALESASKSGLLEAGFGDTDLFITPGYQFRSVDAMLTNFHLPESTLLMLVSAFAGYEHIMNAYSHAIDQSYRFFSYGDAMFLG

SEQ ID NO: 68850 - protein, 339 aa, Methylobacter tundripaludum
  misc_feature (1)..(339): tr|A0A2S6GW35|A0A2S6GW35_9GAMM S-adenosylmethionine:tRN A ribosyltransferase-isomerase OS=Methylobacter tundrip aludum OX=173365 GN=queA PE=3 SV=1
MKKSDFNYQLPEALIAQKPLAERDASRLLCMDRHTGRITDRQFTDLIDLIDERDLLVFNDTKVIPARLFGKKQSGGKVEILIERILDDHCAIAHVRASKAAKASTLIELDGGYCCEVLGRSDDLFQLEFKGEHSLLYILEQIGHIPLPPYITRADDESDLTRYQTVFAREAGAVAAPTAGLHFDQAMMGKLKAKGVLSAFVTLHVGSGTFQPVRVEDLSEHLMHKEYFAVLPETVAAVQQARARGGRVIAIGTTAVRALESASQSGRLEAGFGDTDLFITPGYQFKSVDAMLTNFHLPESTLLMLVSAFAGYASIMSAYSHAIDQSYRFFSYGDAMFLA

SEQ ID NO: 68851 - protein, 391 aa, Methylobacterium aquaticum
  misc_feature (1)..(391): tr|A0A0C6EW66|A0A0C6EW66_9RHIZ S-adenosylmethionine:tRN A ribosyltransferase-isomerase OS=Methylobacterium aqua ticum OX=270351 GN=queA PE=3 SV=1
MGRRRPARHPPARERPCPIDPAAESWLKGAMRVDLFDFDLPEDSIALRPAVPRDGARLMLLHPGSPPEDRIVRDLPGLLRPGDVLVFNDTRVIPARLRGLRHRDGGTVRLEAMLHLREAPDRWRAFARPAKRLKVGDRVSFGAAGEGEACGLTRLDATIVERGEGGETTFAFDLAGPALDEAVAALGELPLPPYIAAKRPTDAQDAADYQTVYAREPGAVAAPTAGLHFTPELLAACDAAGLAQVRVTLHVGAGTFLPVKADDTDAHRMHAEIGEITPDAAEALNRARATGGRIVAVGTTALRLLESAAGPDGTIRPWTGATDIFITPGYRFRAVDGLMTNFHLPRSTLFMLVSAFAGLEPMRAAYAAAIERGYRFYSYGDSSLLFRAETR

SEQ ID NO: 68852 - protein, 362 aa, Methylobacterium aquaticum
  misc_feature (1)..(362): tr|A0A0J6T5J1|A0A0J6T5J1_9RHIZ S-adenosylmethionine:tRN A ribosyltransferase-isomerase OS=Methylobacterium aqua ticum OX=270351 GN=queA PE=3 SV=1
MRVDLFDFDLPEDRIALRPAVPRDGARLMLLHPGAPPEDRVVRDLPGLLRPGDVLVFNDTRVIPARLRGLRHRPDGQPVRLEAMLHLRESPDRWRAFARPAKRLRVGDRVSFGAAGEGETCALTRLDATIVTRGEGGETTFAFDLAGPALDEAVAALGELPLPPYIAAKRPTDAQDAADYQTVYARAPGAVAAPTAGLHFTPELLAACTAAGLTQLRVTLHVGAGTFLPVKADDTDAHRMHAEIGEITPEAAEALNRARFSGGRIVAVGTTALRLLESAAEPDGTIRPWTGATDIFITPGYRFRAVDVLMTNFHLPRSTLFMLVSAFAGLEPMRAAYAAAIARGYRFYSYGDGSLLFRAETR

SEQ ID NO: 68853 - protein, 354 aa, Methylobacterium brachiatum
  misc_feature (1)..(354): tr|A0A1I3GZK9|A0A1I3GZK9_9RHIZ S-adenosylmethionine:tRN A ribosyltransferase-isomerase OS=Methylobacterium brac hiatum OX=269660 GN=queA PE=3 SV=1
MRVDLFDFDLPESCIALRPAEPRDAGRLLVVRPGDALADCSVRDLPGALRAGDALVFNDTRVIPARLIGVRTRPGAPGQRTEVMLHLREAPARWRAFARPAKRLTAGDALQFGDLRATVFEKGEAGEIVLDFDRAGAALDAQIALEGALPLPPYIAGKRPTDARDTTDYQTVYARHPGAVAAPTAGLHFSDDLLAAIDAAGLQRHHVTLHVGAGTFLPVKADDTEGHRMHAEIGILDAETAAALNAVRAAGGRIVAVGTTALRLLESAASPAGTLSAFSGPTDIFITPGYRFRAVDALVTNFHLPRSTLFMLVSAFSGLDTMRAAYAHAIRSGYRFYSYGDASLLFPGPRADMP

SEQ ID NO: 68854 - protein, 354 aa, Methylobacterium brachiatum
  misc_feature (1)..(354): tr|A0A3G2V8R4|A0A3G2V8R4_9RHIZ S-adenosylmethionine:tRN A ribosyltransferase-isomerase OS=Methylobacterium brac hiatum OX=269660 GN=queA PE=3 SV=1
MRVDLFDFDLPESCIALRPAEPRDAGRLLVVRPGETLADCSVRDLPGALRAGDALVFNDTRVIPARLIGVRTRPGAPGQRTEVMLHLREAPARWRAFARPAKRLTVGDALQFGDLRATVVEKGEAGEIVLDFDRAGPDLDAQIAREGALPLPPYIAGKRPTDARDTTDYQTVYARHPGAVAAPTAGLHFSDDLLAAIDAAGLQRHHVTLHVGAGTFLPVKADDTEGHRMHAEIGILDAETAAALNAVRAARGRIVAVGTTALRLLESAASPAGTLSAFSGPTDIFITPGYRFRAVDALVTNFHLPRSTLFMLVSAFSGLDTMRAAYAHAIRSGYRFYSYGDASLLFPGPRADMP

SEQ ID NO: 68855 - protein, 362 aa, Methylobacterium currus
  misc_feature (1)..(362): tr|A0A2R4WTD2|A0A2R4WTD2_9RHIZ S-adenosylmethionine:tRN A ribosyltransferase-isomerase OS=Methylobacterium curr us OX=2051553 GN=queA PE=3 SV=1
MRVDLFDFDLPEDRIALRPAVPRDGARLMLLHPGAPPEDRVVRDLPGLLRPGDVLVFNDTRVIPARLRGLRHRPDGPTVRLEAMLHLRESADRWRAFARPAKRLRVGDRVSFGEAGEGETCALTRLDATIVERGEGGETTFAFDLAGPALDEAVAALGELPLPPYIAAKRPTDAQDAADYQTVYAREPGAVAAPTAGLHFTPALLDACAAAGLAQVRVTLHVGAGTFLPVKADDTDAHRMHAEIGEITPQAAEALNRARAAGGRLVAVGTTALRLLESAAAPDGTIRPWTGATDIFITPGYRFRAVDVLMTNFHLPRSTLFMLVSAFAGLEPMRAAYAAAIARGYRFYSYGDSSLLFRAETR

SEQ ID NO: 68856 - protein, 367 aa, Methylobacterium dankookense
  misc_feature (1)..(367): tr|A0A564G2H4|A0A564G2H4_9RHIZ S-adenosylmethionine:tRN A ribosyltransferase-isomerase OS=Methylobacterium dank ookense OX=560405 GN=queA PE=3 SV=1
MRVDLFDFDLPEASIALRPAEPRGSARLLVVEPGGTLADRHVADLPGLLRPGDALVFNDTRVIPARLNGVRTRPGAPGQRCEAMLHLREAADSWRAFARPAKRLAPGDRIRFGAEGEGTACELARLDATVAEKGEGGEILLRFDLSGPVLDEAIAALGTLPLPPYIAGKRAVDARDAADYQTVYAREPGAVAAPTAGLHVTDDLLAALDAAGTTRHHVTLHVGAGTFLPVKADDTADHRMHAEVGHLDAATAEALNAARARGGRIVAVGTTALRLLESAADEAGRLHPFAGPTRIFITPGHRFRAVDALMTNFHLPRSTLFMLVAAFSGLETMRTAYAHAIATGYRFYSYGDSSLLFPAEPGPTGPR

SEQ ID NO: 68857 - protein, 362 aa, Methylobacterium gnaphalii
  misc_feature (1)..(362): tr|A0A512JIZ0|A0A512JIZ0_9RHIZ S-adenosylmethionine:tRN A ribosyltransferase-isomerase OS=Methylobacterium gnap halii OX=1010610 GN=queA PE=3 SV=1
MRVDLFDFDLPETSIALRPASPRDAGRLLVVRPGEPFVDRAVRDLAGQLRPGDALVFNDTRVIPARLTGVRRRPGAPGQRVEAMLHMREAPDCWRAFARPAKRIAPGDRLSFGSDEGASSTCELGRLDATLESKGEGGEVTLRFDLSGPALDDAIAAQGALPLPPYIAGKRPTDARDATDYQTIYAREPGAVAAPTAGLHFSEAILAKLDAAGIARHTVTLHVGAGTFLPVKADDTADHRMHAEIGTLSANTAEALNRTRAASGRVVAVGTTALRLLESAADENGRLHAFAGATDIFITPGYRFRAVDALMTNFHLPRSTLFMLVSAFSGLDTMRAAYAHAIASGYRFYSYGDSSLLFPEAR

SEQ ID NO: 68858 - protein, 361 aa, Methylobacterium gossipiicola
  misc_feature (1)..(361): tr|A0A1I2TDI0|A0A1I2TDI0_9RHIZ S-adenosylmethionine:tRN A ribosyltransferase-isomerase OS=Methylobacterium goss ipiicola OX=582675 GN=queA PE=3 SV=1
MRVDLFDFELPEASIALRPPTPRDAGRLLVVRPGEALDDRAVRDLPGLLRPGDALVFNDTRVIPARLKGVRHRPGAPGLRMEAMLHLREAPDTWRAFARPAKRLAPGDRIVFGRQGAGEPCDLGGLDATLVEKGEAGEITLAFDLSGPDLDAAIAATGDLPLPPYIAGKRPTDARDTTDYQTVYADAPGAVAAPTAGLHFSEALLADLDAAGIQRHRVTLHVGAGTFLPVKADDTDDHRMHAEIGHLSGETADALNRVRAAGGRVVAVGTTALRLLESAADAEGRLHPFSGPTEIFITPGTPIRAVDALMTNFHLPRSTLFMLVSAFSGLETMRAAYAHAIEHGYRFYSYGDSSLLFPAGR

SEQ ID NO: 68859 - protein, 362 aa, Methylobacterium haplocladii
  misc_feature (1)..(362): tr|A0A512IR97|A0A512IR97_9RHIZ S-adenosylmethionine:tRN A ribosyltransferase-isomerase OS=Methylobacterium hapl ocladii OX=1176176 GN=queA PE=3 SV=1
MRVDLFDFDLPEALIALRPASPRDAGRLLVVQPGEPFADRGVRDLAGLLRAGDALVFNDTRVIPARLNGVRHRPGAPGQRVEAMLHLREAPDRWRAFARPGKRLAPGDLLRFGSDGGASETCELGRLDATVASKGEGGEITLRFDLSGPALDEAIAAQGALPLPPYIAGKRPADARDATDYQTIYAREPGAVAAPTAGLHFSEAMLADLDAAGIRRHAVTLHVGAGTFLPVKAEDTDAHRMHAEIGVLSGETAHALNRIRAEGGRIVAVGTTALRLLESAADADGTIRPFAGPTEIFITPGYRFRAVDALMTNFHLPRSTLFMLVSAFSGLETMRAAYAHAIGEGYRFYSYGDSSLLFPATV

SEQ ID NO: 68860 - protein, 361 aa, Methylobacterium indicum
  misc_feature (1)..(361): tr|A0A0J6TG64|A0A0J6TG64_9RHIZ S-adenosylmethionine:tRN A ribosyltransferase-isomerase OS=Methylobacterium indi cum OX=1775910 GN=queA PE=3 SV=1
MRVDLFDFDLPEDSIALRPAVPRDGARLMLLHPGSLPEDRIVRDLPGLLRPGDVLVFNDTRVIPARLRGLRHRDGTTVRLEAMLHLREAPNRWRAFARPAKRLKVGDRVSFGAAGEGEACALTRLDATIVERGEGGETTFAFDLSGPALDEAVAALGELPLPPYIAAKRPTDAQDTADYQTVYAREPGAVAAPTAGLHFTPDLLAACNAAGLGQVRVTLHVGAGTFLPVKADDTDAHRMHAEIGEITPDAAEALNRARATGGRIVAVGTTALRLLESAAESDGTIRPWTGATDIFITPGYRFRAVDVLMTNFHLPRSTLFMLVSAFAGLEPMRAAYAAAIERGYRFYSYGDSSLLFRAETR

SEQ ID NO: 68861 - protein, 361 aa, Methylobacterium indicum
  misc_feature (1)..(361): tr|A0A147FQU3|A0A147FQU3_9RHIZ S-adenosylmethionine:tRN A ribosyltransferase-isomerase OS=Methylobacterium indi cum OX=1775910 GN=queA PE=3 SV=1
MRVDLFDFDLPEDSIALRPAVPRDGARLMLLHPGSLPEDRIVRDLPGLLRPGDVLVFNDTRVIPARLRGLRHRDGTTVRLEAMLHLREAPDRWRAFARPAKRLKVGDRVSFGAAGEGEACALTRLDATIVERGEGGETTFAFDLSGPALDEAVAALGELPLPPYIAAKRPTDAQDAADYQTVYAREPGAVAAPTAGLHFTPDLLAACKAAGLQQVRVTLHVGAGTFLPVKADDTDAHRMHAEIGEITPDAAEALNRARATGGRIVAVGTTALRLLESAAESDGTIRPWTGATDIFITPGYRFRAVDVLMTNFHLPRSTLFMLVSAFAGLEPMRAAYAAAIERGYRFYSYGDSSLLFRAETR

SEQ ID NO: 68862 - protein, 354 aa, Methylobacterium mesophilicum
  misc_feature (1)..(354): tr|M7Z9X0|M7Z9X0_9RHIZ S-adenosylmethionine:tRNA ribosy ltransferase-isomerase OS=Methylobacterium mesophilicum SR1.6/6 OX=908290 GN=queA PE=3 SV=1
MRVDLFDFDLPETSIALRPAEPRDAGRLLVVRPGSPPTDRNVRDLPGALRAGDVLVFNDTRVIPARLNGVRTRPGAPGQRTEVMLHLREAPARWRAFARPAKRLSVADVLRFGGLTAVVVEKAEAGEVVLDFDRAGAALDAAIAAEGALPLPPYIAGKRPTDARDATDYQTVYARRPGAVAAPTAGLHFSEALLAAIDAAGLRRHHVTLHVGAGTFLPVKADDTDGHRMHAEVGILDAETAEALNAARASGGRIVAVGTTALRLLESAASPDGRLSAFSGATDIFITPGYRFRAVDALVTNFHLPRSTLFMLVSAFSGLETMRDAYEHAIRSGYRFYSYGDASLLFPGPGADAP

SEQ ID NO: 68863 - protein, 364 aa, Methylobacterium nodulans
  misc_feature (1)..(364): tr|B8IE73|B8IE73_METNO S-adenosylmethionine:tRNA ribosy ltransferase-isomerase OS=Methylobacterium nodulans (st rain LMG 21967 / CNCM I-2342 / ORS 2060) OX=460265 GN=q ueA PE=3 SV=1
MARMRVDLFDFDLPEALIALRPAVPRDSARLMRVRPGEPPADAQVRDLPDLLRPGDCLVFNDTKVIPARLRGLRARPDGTVVRVEAMLHHREAADCWRAFARPAKRLREGDRIRFGAGQEGAACDLGHLDATVVARGEGGEITLAFDLAGAVLDEAVVRLGELPLPPYIAGRRPADARDAADYQTVYARAPGAVAAPTAGLHFTPDLLARLDAAGIGQARVTLHVGAGTFLPVKAEDTADHRMHAETGEITPETAAALNRVRAAGGRIVAVGTTALRLVESAAAPDGTLRPFAGETDIFITPGYRFRAVDVLMTNFHLPRSTLFMLVSAFAGLDTMREAYAAAIARGYRFYSYGDSSLLFRAGT

SEQ ID NO: 68864 - protein, 354 aa, Methylobacterium organophilum
  misc_feature (1)..(354): tr|A0A2U1F5Y6|A0A2U1F5Y6_METOR S-adenosylmethionine:tRN A ribosyltransferase-isomerase OS=Methylobacterium orga nophilum OX=410 GN=queA PE=3 SV=1
MRVDLFDFELPETSIALRPAEPRDAGRMLVVRPGAPLVDRTVRDLPDALRAGDALVFNDTRVIPARLNGVRTRPGAPGQRTEVMLHLREAPDRWRAFARPAKRLTVGDALRFGDLTATVLEKAEAGEIVLAFDRAGPELDAAIAAEGALPLPPYIAGKRATDARDATDYQTVYARNPGAVAAPTAGLHFSDALLADLDAAGLQRHHVTLHVGAGTFLPVKAEDTDGHRMHAEIGILDAATADALNAARAAGGRIVAVGTTALRLLESAARPDGTLAPFSGPTEIFITPGYRFRAVDALVTNFHLPRSTLFMLVSAFSGLETMRAAYAHAIGAGYRFYSYGDASLLFPGPRADTP

SEQ ID NO: 68865 - protein, 354 aa, Methylobacterium oryzae
  misc_feature (1)..(354): tr|A0A089PZH1|A0A089PZH1_9RHIZ S-adenosylmethionine:tRN A ribosyltransferase-isomerase OS=Methylobacterium oryz ae CBMB20 OX=693986 GN=queA PE=3 SV=1
MRVDLFDFDLPETSIALRPAEPRDAGRLLVVHPGLPPADRTVRDLPGALRAGDALVFNDTKVIPARLNGVRTRPGAPGQRTEVLLHLREAPDRWRAFARPAKRLAPGDALRFGALGANVIEKAEAGEIVLAFDRSGPELDAAIAAEGALPLPPYIAGKRATDTRDTTDYQTVYARHPGAVAAPTAGLHFSEALLSDLDAAGLRRHHVTLHVGAGTFLPVKAEDTDAHRMHAEIGILDAATADALNAARAAGGRIVAVGTTALRLLESAAGPDGTLAPFSGPTEIFITPGYRFRAVDALVTNFHLPRSTLFMLVSAFSGLETMRAAYAHAIEAGYRFYSYGDASLLFPGPRADIP

SEQ ID NO: 68866 - protein, 364 aa, Methylobacterium oxalidis
  misc_feature (1)..(364): tr|A0A512JA81|A0A512JA81_9RHIZ S-adenosylmethionine:tRN A ribosyltransferase-isomerase OS=Methylobacterium oxal idis OX=944322 GN=queA PE=3 SV=1
MRVDLFDFELPEERIALRPAEPRDAGRLLVVRPGGVPPLEDRRVRDLPGLLRPGDALVFNDTRVIPARLAALRTRPGAAGLRAEVMLHLREAPDRWRAFARPGKRLAVGDVLRFGDHREGAPCELGGLAAQLVAKGEGGEIVLRFDLSGPVLDERIAALGTLPLPPYIAGKRPADARDATDYQTVYAREPGAVAAPTAGLHFSEDLLAVLDAAGLSRHTVTLHVGAGTFLPVKADDTADHRMHAEIGHLDADTAEALNAVRARGGRIVAVGTTALRLLESAADAEGRLRPFSGPTEIFITPGVPVRAVDALMTNFHLPRSTLFMLVSAFSGLETMRTAYAHAIRTGYRFYSYGDSSLLFPADPR

SEQ ID NO: 68867 - protein, 354 aa, Methylobacterium phyllostachyos
  misc_feature (1)..(354): tr|A0A1G9VCQ0|A0A1G9VCQ0_9RHIZ S-adenosylmethionine:tRN A ribosyltransferase-isomerase OS=Methylobacterium phyl lostachyos OX=582672 GN=queA PE=3 SV=1
MRVDLFDFDLPETSIALRPAEPRDAGRLLVVRPGAALADRTVRDLPAALREGDALVFNDTRVIPARLHGIRMRPGAPGQRAEAMLHLREGPARWRAFARPAKRLAVGDTLRFGELTAIVAGKGEAGEIVLDFDRAGPELDAAIAAEGALPLPPYIAGKRATDARDVTDYQTIYARHPGAVAAPTAGLHFSEALLADLDAAGLQRHHVTLHVGAGTFLPVKAEDTDGHRMHAEIGILDATTADALNAARAAGGRIVAVGTTALRLLESAASADGTLSAFSGPTDIFITPGYRFRAVDALVTNFHLPRSTLFMLVSAFSGLETMRAAYAHAIRTGYRFYSYGDASLIFPGPRADLP

SEQ ID NO: 68868 - protein, 362 aa, Methylobacterium platani
  misc_feature (1)..(362): tr|A0A179S140|A0A179S140_9RHIZ S-adenosylmethionine:tRN A ribosyltransferase-isomerase OS=Methylobacterium plat ani OX=427683 GN=queA PE=3 SV=1
MRVDLFDFDLPEESIALRPAVPRDGARLMLLYPDRPPEDRVVRDLPGLLRPGDVLVFNDTRVIPARLRGLRHRSDGQPVRLEAMLHLRESPDRWRAFARPAKRLRVGDRVSFGEAGEGEACALTRLDATIVERGEGGETTFAFDLAGPALDEAVAALGELPLPPYIAAKRPTDARDAADYQTVYAREPGAVAAPTAGLHFTPELLDACNAAGLPQVRVTLHVGAGTFLPVKADDTDAHRMHAEIGEITPQAAEALNRARAAGGRIVAVGTTALRLLESAATPDGTIAPWTGATDIFITPGYRFRAVDVLMTNFHLPRSTLFMLVSAFAGLEPMRAAYAAAIARGYRFYSYGDSSLLFRAETR

SEQ ID NO: 68869 - protein, 354 aa, Methylobacterium pseudosasicola
  misc_feature (1)..(354): tr|A0A1I4JQ76|A0A1I4JQ76_9RHIZ S-adenosylmethionine:tRN A ribosyltransferase-isomerase OS=Methylobacterium pseu dosasicola OX=582667 GN=queA PE=3 SV=1
MRVDLFDFELPESCIALRPAEPRDGGRLLVVRPGEALADRTVRDLPGALRAGDALVFNDTKVIPARLNGVRTRPGAPGQRTEVLLHLREAPARWRAFARPAKRLSVGDALQFGELRATVFAKGEAGEITLDFDRASPELDAQIALEGALPLPPYIAGKRATDARDATDYQTIYARHPGAVAAPTAGLHFSDDLLTALDAAGLQRHHVTLHVGAGTFLPVKADDTEGHRMHAEIGILDAETAAALNAVRASGGRIVAVGTTALRLLESAARPDGTLSAFSGPTDIFITPGYRFRAIDALVTNFHLPRSTLFMLVSAFSGLDTMRAAYAHAIRSGYRFYSYGDASLLFPGPRADIS

SEQ ID NO: 68870 - protein, 354 aa, Methylobacterium radiotolerans
  misc_feature (1)..(354): sp|B1M584|QUEA_METRJ S-adenosylmethionine:tRNA ribosylt ransferase-isomerase OS=Methylobacterium radiotolerans (strain ATCC 27329 / DSM 1819 / JCM 2831 / NBRC 15690 / NCIMB 10815 / 0-1) OX=426355 GN=queA PE=3 SV=1
MRVDLFDFELPETSIALRPAEPRDAGRMLVVRPGAPLVDRTVRDLPDALRAGDALVFNDTRVIPARLNGVRTRPGAPGQRTEVMLHLREAPDRWRAFARPAKRLTAGDALRFGDLTATVLEKAEAGEIVLAFDRAGPELDAAIAAEGALPLPPYIAGKRATDARDATDYQTVYARNPGAVAAPTAGLHFSDALLADLDAAGLQRHHVTLHVGAGTFLPVKAEDTDGHRMHAEIGILDAATADALNAARAAGGRIVAVGTTALRLLESAARPDGTLAPFSGPTEIFITPGYRFRAVDALVTNFHLPRSTLFMLVSAFSGLETMRAAYAHAIGAGYRFYSYGDASLLFPGPRADTP

SEQ ID NO: 68871 - protein, 354 aa, Methylobacterium radiotolerans; identical to SEQ ID NO: 68870
  misc_feature (1)..(354): tr|A0A3S3CCS7|A0A3S3CCS7_9RHIZ S-adenosylmethionine:tRN A ribosyltransferase-isomerase OS=Methylobacterium radi otolerans OX=31998 GN=queA PE=3 SV=1

SEQ ID NO: 68872 - protein, 356 aa, Methylobacterium sp.
  misc_feature (1)..(356): tr|A0A0Q5YQA8|A0A0Q5YQA8_9RHIZ S-adenosylmethionine:tRN A ribosyltransferase-isomerase OS=Methylobacterium sp. Leaf399 OX=1736364 GN=queA PE=3 SV=1
MRVDLFDFDLPEASIALRPPEPRDAGRLLVVRPGAPPEDRVVRDLASLLSPRDALVFNDTRVIPARLHGIRHRENAAGLRMEAMLHLREAPDRWRAFARPGKRLAVGDRLVLGADASEPLTARIVEKGEGGEVVLRFEASGPDLDAAIALAGTLPLPPYIAGKRPADARDAVDYQTVYAREPGAVAAPTAGLHFSQSLLAAIDAAGIARHSVTLHVGAGTFLPVKAEDTADHRMHAEIGVLDAATAEALNAVRAGGGRVVAVGTTALRLLESAADAEGVLHAFSGPTDIFITPGTPIRAVDALMTNFHLPRSTLFMLVSAFSGLETMRAAYAHAIAGGYRFYSYGDSSLLFPAAPR

SEQ ID NO: 68873 - protein, 362 aa, Methylobacterium sp.
  misc_feature (1)..(362): tr|A0A4Z0NFC9|A0A4Z0NFC9_9RHIZ S-adenosylmethionine:tRN A ribosyltransferase-isomerase OS=Methylobacterium sp. 6HR-1 OX=1141884 GN=queA PE=3 SV=1
MRVDLFDFDLPEDRIALRPAVPRDASRLMLLHPGSPPEDRIVRELPGLLRPGDVLVFNDTRVIPARLHGLRHRPEGGAVRIESMLHLRESPDRWRAFARPAKRLRVGDRVSFGQAGEGGTCALTRLDATVVARGEGGETTFAFDLAGPALDEAVAALGELPLPPYIAAKRPTDAQDAADYQTVYAREPGAVAAPTAGLHFTPELLRACAAAGLAQVRVTLHVGAGTFLPVKADDTDGHRMHAEVGEIAPEAAEALNRARANGGRIVAVGTTALRLLESAADPDGTIRPWTGATDIFITPGYRFRTVDVLMTNFHLPRSTLFMLVSAFAGLEPMRAAYAAAIARGYRFYSYGDASLLFRAETR

SEQ ID NO: 68874 - protein, 148 aa, Methylobacterium tarhaniae
  misc_feature (1)..(148): tr|A0A0J6UN76|A0A0J6UN76_9RHIZ S-adenosylmethionine:tRN A ribosyltransferase-isomerase (Fragment) OS=Methylobac terium tarhaniae OX=1187852 GN=VQ03_30485 PE=3 SV=1
MRVDLFDFDLPEDRIALRPAVPRDGARLLLLHAGSPPEDRIVRDLPGLLRPGDVLVFNDTRVIPARLRGLRHRDGGTVRLEAMLHLREAPDRWRAFARPAKRLKVGDRVTFGQAGEGETCALTRLDDRGVEAGGRGGGGGTRLLYTSP

SEQ ID NO: 68875 - protein, 362 aa, Methylobacterium variabile
  misc_feature (1)..(362): tr|A0A0J6SU10|A0A0J6SU10_9RHIZ S-adenosylmethionine:tRN A ribosyltransferase-isomerase OS=Methylobacterium vari abile OX=298794 GN=queA PE=3 SV=1
MRVDLFDFDLPEDRIALRPAVPRDAGRLMLLRPGEPPEDRVVRDLPGLLLPGDVLVFNDTRVIPARLHGLRHRPEGGAVRIEAMLHLRESADRWRAFARPAKRLRVGDRVSFGQAGEGGTCALTRLDATVAERGEGGETTFAFDLSGPALDEAVAALGELPLPPYIAAKRPTDAQDAADYQTVFAREPGAVAAPTAGLHFTPDLLAACAAAGLSEVRVTLHVGAGTFLPVKADDTDEHRMHAEVGEITRAAADALNRARAAGGRIVAVGTTALRLLESAAAPDGTIQPWTGATDIFITPGYRFRAVDALMTNFHLPRSTLFMLVSAFAGLEPMRAAYAAAIERGYRFYSYGDASLLFRAETR

SEQ ID NO: 68876 - protein, 238 aa, Methylobrevis pamukkalensis
  misc_feature (1)..(238): tr|A0A1E3H547|A0A1E3H547_9RHIZ S-adenosylmethionine:tRN A ribosyltransferase-isomerase OS=Methylobrevis pamukka lensis OX=1439726 GN=queA PE=3 SV=1
MTARGEAGEVEFRFDRSGPDLDLGLVEVGHIPLPPYIAARRPEDDDDRRDYQTVYAREEGAVAAPTAGLHFTPELLDALAAKGVGSAFVTLHVGAGTFLPVKVDDTAAHKMHAEIGVVAPEVADRLNAVRAAGGRVVSVGTTSLRLLESAAGADGVIRPFAGPTDIFITPGYRFRAVDLLMTNFHLPRSTLFMLVSAFCGLDTMRAAYAHAIASGYRFYSYGDASLLHPAPDARLKTR

SEQ ID NO: 68877 - protein, 344 aa, Methylocaldum marinum
  misc_feature (1)..(344): tr|A0A250L3A9|A0A250L3A9_9GAMM S-adenosylmethionine:tRN A ribosyltransferase-isomerase OS=Methylocaldum marinum OX=1432792 GN=queA PE=3 SV=1
MRKSDFFFELPEHLIAQYPLPERSASRMLCLDGTTGRIDDRMFIELPELVRPGDILVFNDTKVMPARLFGRKASGGRVEILIERVLDSNSCLAHVRASKAPKTGTELLLDGGFRCVVMGRKDDLFLLMVLDGRTVDEVLNAVGHIPLPPYIDRPDSVSDWERYQTVFAKASGAVAAPTAGLHFDEAMLERLAEKGVEQAFVTLHVGSGTFQPLRVDELAQHRMHSELCEVSPAVVAKINEIRQRGGRVIAVGTTVVRALEAASLEGTLMPNKAETNLFIRPGFQFRCVDAMVTNFHLPESTLLVLVCAFAGYSEVLTAYRHAVERSYRFFSYGDAMFVTRKPYS

SEQ ID NO: 68878 - protein, 344 aa, Methylocaldum sp.
  misc_feature (1)..(344): tr|A0A4R7AB62|A0A4R7AB62_9GAMM S-adenosylmethionine:tRN A ribosyltransferase-isomerase OS=Methylocaldum sp. 091 7 OX=2485163 GN=queA PE=3 SV=1
MRKSDFFFELPEDLIAQYPLPERSASRLLCLDGTTGEIDDRMFIELPELLRAGDLLVFNDTKVMPARLFGRKASGGRVEVLIERVLGPSMGLAHVRASKAPKAGTEILLEGGFRCSVQGRQDDLFLLMLLDGRTVDEVLSAVGHIPLPPYIDRPDSVSDWERYQTVFAKASGAVAAPTAGLHFDEAMLERLAAKGIERAFVTLHVGSGTFQPLRVDELDQHKMHSELCEVGSDVVEKVNEVRQRGGRVIAVGTTVVRTLESASLKGSLTSYKGETNLFIRPGFHFRCVDAMVTNFHLPESTLLTLVCAFAGCSEVLAAYRHAVERKYRFFSYGDAMFVTHKPHA

SEQ ID NO: 68879 - protein, 355 aa, Methylocapsa palsarum
  misc_feature (1)..(355): tr|A0A1I4C4U8|A0A1I4C4U8_9RHIZ S-adenosylmethionine:tRN A ribosyltransferase-isomerase OS=Methylocapsa palsarum OX=1612308 GN=queA PE=3 SV=1
MRVDLFDFDLPADRIAVRPAEPRDHARLLVVRPGESDPFDDGAILDLPGLLRPGDVLVVNDTRVIPARLQGVRTRGADRARIEATLHKREGEARWRAFVRPAKKLKQGEIVRFSDAPGLAAAVAEKGEAGEVLLAFDLSGAALDAAIERIGQMPLPPYIAARRPADGRDALDYQTLFAQRAGAVAAPTAGLHFTPGLVAALKARGLLIQTVTLHVGAGTFLPVKADETGDHKMHAEWGEVSAATADALNRARASGGRIVAVGTTSLRILESAAGDDGVIAPFADDTSIFITPGYVFKAVGALLTNFHLPRSTLFMLVSAFCGLETMQAAYSHAIASDYRFYSYGDACLLFPAQSA

SEQ ID NO: 68880 - protein, 361 aa, Methyloceanibacter caenitepidi
  misc_feature (1)..(361): tr|A0A0A8K343|A0A0A8K343_9RHIZ S-adenosylmethionine:tRN A ribosyltransferase-isomerase OS=Methyloceanibacter ca enitepidi OX=1384459 GN=queA PE=3 SV=1
MRTDLFDFELPDGLIALRPVHPRDAARLLVVHPGDPDVLADKVMAELPLLLEPGDALVFNDTRVIPAALQGVRTRGYATAQISANLIEKLDDHRWNALAKPGKRLEPGDRIQFGKDNDACALGSLTATVEAKGEDGLVTLAFDLSGPALHDAIEAEGAMPLPPYIAARRAPDDQDRTDYQTTFAREEGAVAAPTAGLHFTPKLLQTLEELGVVIYFVTLHVGAGTFLPVRAEDTDDHHMHAEYGEVSTETAFALNAVKSRGNRIVAVGTTSLRLLEAASDEFGTLKPFHGETDIFIVPGYRLRFVDRLLTNFHLPKSTLFMLVSAFSGLETMKRAYEHAIAEGYRFYSYGDACLLTPKDQA

SEQ ID NO: 68881 - protein, 361 aa, Methyloceanibacter methanicus
  misc_feature (1)..(361): tr|A0A1E3VZN0|A0A1E3VZN0_9RHIZ S-adenosylmethionine:tRN A ribosyltransferase-isomerase OS=Methyloceanibacter me thanicus OX=1774968 GN=queA PE=3 SV=1
MRTDLFDFELPDGLIALRPVHPRDAARLLVVCPDEPERLADKVMADLPLLLDPGDALVFNDTRVIPAALRGVRARGYATAQVSATLIEKLDDHRWRALAKPGKRLEQGDRIRFGEHGGACASGSLDATVVAKGEEGVVTLAFDLSGPALHDAIETQGAMPLPPYIAARRAPDKQDRTDYQTAFAREEGAVAAPTAGLHFTPKLIQTLDELGITAHFVTLHVGPGTFLPVRVEDTADHRMHSEYGEISTETAFALNAVKSRGNKVVAVGTTSLRLLESASDEFGTLKPFRGKTDIFITPGYRFRYVDRLLTNFHLPRSTLFMLVAAFSGLETMQQAYAHAIDQAYRFYSYGDACLLSPKDSA

SEQ ID NO: 68882 - protein, 361 aa, Methyloceanibacter stevinii
  misc_feature (1)..(361): tr|A0A1E3VKL4|A0A1E3VKL4_9RHIZ S-adenosylmethionine:tRN A ribosyltransferase-isomerase OS=Methyloceanibacter st evinii OX=1774970 GN=queA PE=3 SV=1
MRTDLFDFELPDGLIALRPVHPRDAARLLVVHPGDPDILADKVMADLPLLLEPGDALVFNDTRVIPAALQGVRTRGYATAQISANLIEKLDDHRWNALAKPGKRLEPGDRIQFGKDSNACADGSLIATVEAKGQEGMVTLAFDLSGPALHDAIEAQGAMPLPPYIAARRAPDDQDRTDYQTTFAREEGAVAAPTAGLHFTRKLLQTLDELGIVIYFVTLHVGPGTFLPVRAEDTDDHRMHAEYGEVSTETAFALNAVKSRGNKVVAVGTTSLRLLESASDEFATLKPFHGETDIFITPGYRLRFVDRLLTNFHLPKSTLFMLVSAFSGLETMKLAYGHAISEGYRFYSYGDACLLTPKDPV

SEQ ID NO: 68883 - protein, 363 aa, Methyloceanibacter superfactus
  misc_feature (1)..(363): tr|A0A1E3VIW1|A0A1E3VIW1_9RHIZ S-adenosylmethionine:tRN A ribosyltransferase-isomerase OS=Methyloceanibacter su perfactus OX=1774969 GN=queA PE=3 SV=1
MRTELFDFDLPESLIALRPASPRDAARLLVVDPHGTEQLADRMMTDLPGLIAPGDALVFNDTRVIPAALKGTRTRGDAMAQVSVNLTERLDDSRWLALARPAKRLEPGDRIQFGDSHNVCALGSLDATVAARGPDGEVTLAFDLSGAALHDAIETMGAMPLPPYIAARRAADDRDRSDYQTTSRARRAPWPRPPRGCHFTASLMQALEGRGVTCHFVTLHVGPGTFLPVRAEDTEAHKMHAEHGVVSTQVALALNAIKARGNRIVAVGTTSLRLLESAADEFGTLKPFSGETDIFITPGYRFRFVDRLLTNFHLPRSTLFMLVAAFSGLDTMKRAYAHAVAERYRFYSYGDACLLDRARHADD

SEQ ID NO: 68884 - protein, 361 aa, Methylocella silvestris
  misc_feature (1)..(361): tr|A0A2J7TLI0|A0A2J7TLI0_METSI S-adenosylmethionine:tRN A ribosyltransferase-isomerase OS=Methylocella silvestr is OX=199596 GN=queA PE=3 SV=1
MRVDQFDFDLPDASIALRPALPRDSARLLVVRPGGSSPATPDDRLIRDLPELLARGDVLVVNDTRVIPARLDGFRARGEALARIEATLHKRESGDLWRAFLRPAKKLRAGETIVFALGDEKLAARVIEKGEGGEVLLGFEVAGAELDRALDRVGHMPLPPYISSKRVTDESDAADYQTLFADRPGAVAAPTASLHFTPALLAALVAKGVQIARVTLHVGAGTFLPVKAEDTDDHRMHAEWGEVSAETAGVLNAARRAGRRIVAAGTTSLRILESAASPDGALMAFSGDTSIFITPGYSFRAVDLLLTNFHLPRSTLFMLVCAFSGLQTMRDAYQHAIEAGYRFYSYGDACLLHPAAPRGAA

SEQ ID NO: 68885 - protein, 361 aa, Methylocella silvestris
  misc_feature (1)..(361): sp|B8EIV1|QUEA_METSB S-adenosylmethionine:tRNA ribosylt ransferase-isomerase OS=Methylocella silvestris (strain DSM 15510 / CIP 108128 / LMG 27833 / NCIMB 13906 / BL2 ) OX=395965 GN=queA PE=3 SV=1
MRVDQFDFDLPDASIALRPAHPRDAARLLVVRPGRLSPAALDDRFIRDLPELLAAGDVLVVNDTRVIPARLDGFRARGEALARIEATLHKREGGDLWRAFLRPAKKLRAGETILFSSGDAKLAARVVEKGEDGEVLLGFELSGAELDLALERVGRMPLPPYISSKRGADESDAADYQTLFADRPGAVAAPTASLHFTPALLAALVAKGVQIERVTLHVGAGTFLPVKAEDTDDHRMHAEWGEVSAETAGALNAARRAGRRVVAAGTTSLRILESAAGPDGAVAAFSGDTSIFITPGYSFKAVDLLLTNFHLPRSTLFMLVCAFSGLQTMRDAYNHAIAAGYRFYSYGDACLLYPAAPRGAA

SEQ ID NO: 68886 - protein, 364 aa, Methylocella tundrae
  misc_feature (1)..(364): tr|A0A4V6IMI6|A0A4V6IMI6_METTU S-adenosylmethionine:tRN A ribosyltransferase-isomerase OS=Methylocella tundrae OX=227605 GN=queA PE=3 SV=1
MRVDLFDFELPDSSIALRPAHPRDAARMLVVRSEAPSAPALEDRIIRDLPDLLSPGDILVVNDTRVIPARLQGRRVRGEAEARIEATLHKREGASLWRAFVRPAKKLKAGEMITFEAAGAGSLEAEVVEKGEEGEVLLGFAASGSDLDAALDRIGQMPLPPYISGKRPADESDADDYQTLFARRSGAVAAPTASLHFTPALIAALSARDIMIEKVTLHVGAGTFLPVKAADTEDHRMHAEWGEVSAQTAKTLNDARRGGRRIVAAGTTSLRILESAAKDNGAVAAFSGDTSIFITPGYRFRAVDVLLTNFHLPRSTLFMLVCAFCGLETMQRAYAHAIAHGYRFYSYGDACLLFPAAANKAGDL

SEQ ID NO: 68887 - protein, 354 aa, Methylococcaceae bacterium
  misc_feature (1)..(354): tr|A0A1Z9UEE9|A0A1Z9UEE9_9GAMM S-adenosylmethionine:tRN A ribosyltransferase-isomerase OS=Methylococcaceae bact erium TMED282 OX=1986758 GN=queA PE=3 SV=1
  misc_feature (77)..(77): Xaa can be any naturally occurring amino acid
  misc_feature (88)..(88): Xaa can be any naturally occurring amino acid
  misc_feature (220)..(221): Xaa can be any naturally occurring amino acid
MGFLLDLADFDYSLPKHLIAQEPLIIRRDAKLLALSEKKDTPSHFKVADLFSFFKPDDLLVLNDTRVINARLKTNKXTGGRIEILIEXVLSEKVALVHMRSSRAPKIGSCITLFGNVNISVITRFEELFQIEIITSHTFEELLNTHGKLPLPPYIEREPNDNDVSRYQTIYSRVPGAIAAPTAGLHIDQLLIDQLTASGIQIAYVTLHVGAGTFRPVKSXXIKEHKMHSERVVVSAATVAAVNKTREKGGRVIGVGTTVMRALETAARASGSIEVYDGETDLFITPGFEFQVIDALMTNFHLPRSTLLMLVCAFSGFERVMNAYRIAVENNYRFFSYGDAMWLERKVPKRSGGI

SEQ ID NO: 68888 - protein, 344 aa, Methylococcaceae bacterium
  misc_feature (1)..(344): tr|A0A4Q5L5Y2|A0A4Q5L5Y2_9GAMM S-adenosylmethionine:tRN A ribosyltransferase-isomerase OS=Methylococcaceae bact erium FWC3 OX=2516328 GN=queA PE=3 SV=1
MRRSDLLYELPKHLIAQEPLPERSASRLLVLDGATGNVQDRMFRGVPGLLRPEDLLVFNDTRVIRARLFGRKPTGGQVEVLVERILSDQRALAMIRASKIPRSEFTILLDGGHSAKVVAREDQRFILEFAAGRTVSEVLDAIGHIPLPPYIERADQPADATRYQTVYGCRPGAIAAPTAGLHFDQDVLRTLTEAGVQQGFVTLHVGSGTFQPLRVDDLNDHPMHSEECEVDEHLVGQVRATRERGGRVVAVGTTVVRSLETAARDGDLRAFRGATDLLIQPGFPFRCVDALITNFHLPESTLLALVCALAGYHETMSAYRHAVDARYRFFSYGDAMFVTPKIRR

SEQ ID NO: 68889 - protein, 338 aa, Methylococcales bacterium
  misc_feature (1)..(338): tr|A0A418RSG7|A0A418RSG7_9GAMM S-adenosylmethionine:tRN A ribosyltransferase-isomerase OS=Methylococcales bacte rium OX=2304002 GN=queA PE=3 SV=1
MKKSDFNYLLPDALIAQKPLAERDSSRLLCMDRDTGVITDRCFTDFISLLNERDLLVFNDTKVIPARLYGKKQSGGRIEILIERILDDQHATAHIKASKAPKPGTIIELDEGYQCEVLGREDDLFRLVFIDIKILDLLDKIGHIPLPPYITRADDESDLTRYQTVFAKQLGAVAAPTAGLHFDLALMDKIKALKVSTAFVTLHVGSGTFQPVRVENLAEHVMHKEYYAVTQATVDAVNAAKARGGRVIAIGTTAVRALESASKTGQLVAGFGDTNLFITPGYTFKSVDALLTNFHLPESTLLMLVSAFAGYQPIMAAYRHAIEQSYRFFSYGDAMFLS

SEQ ID NO: 68890 - protein, 339 aa, Methylococcales bacterium
  misc_feature (1)..(339): tr|A0A418RJU5|A0A418RJU5_9GAMM S-adenosylmethionine:tRN A ribosyltransferase-isomerase OS=Methylococcales bacte rium OX=2304002 GN=queA PE=3 SV=1
MKKSDFNYLLPDNLIAQKPLAERDASRLLCMNKNSGQITDRQFTNFIDLINDRDLLVFNDTKVIPARLYGRKQSGGKIEILIERLLDDHRALAHVKASKSPKAGALIELDQDYHCTVQGRADDLFILEFTDISLMKLLDLIGHIPLPPYITRADDVSDLTRYQTVFAKEAGAVAAPTAGLHFNDALMTKIKALNIQTAFVTLHVGSGTFQPVRAENLADHVMHKEYFAVPQATVDAVEQTRERGGRVIAIGTTAVRALESASTSGQLISGFGDTDLFITPGYTFKSVDALLTNFHLPESTLLMLISAFAGYDEIRNAYQHAIKESYRFFSYGDAMFLSN

SEQ ID NO: 68891 - protein, 347 aa, Methylococcus capsulatus
  misc_feature (1)..(347): sp|Q60AZ8|QUEA_METCA S-adenosylmethionine:tRNA ribosylt ransferase-isomerase OS=Methylococcus capsulatus (strai n ATCC 33009 / NCIMB 11132 / Bath) OX=243233 GN=queA PE =3 SV=1
MLKSEFHYDLPQNLIAQSPLPERSASRLLCLDGATGALEDKSFRDIEKLLRPGDLLVFNDTRVLPARLFGRKETGGAVEILLERLLGERLMLAHVRASKAPRPGTWLALEAEHRVRVVERDGDLFLLELAGEEPLQTVLEQIGHMPLPPYITRPDTSADLERYQTVYATRPGAVAAPTAGLHFDTELLGRLRGAGIDMARVTLHVGAGTFQPVRTENLEDHRMHAEYCEVGPEVVKAVERARGRGGRVVAVGTTSMRSLETAASGGSLRTFSGETRLFIKPGFRFNCVDALVTNFHLPESTLLVLVCAFAGHRETLAAYRHAIAQAYRFFSYGDAMFVTPNEPAANR

SEQ ID NO: 68892 - protein, 346 aa, Methylococcus sp.
  misc_feature (1)..(346): tr|A0A3N9UUH1|A0A3N9UUH1_9GAMM S-adenosylmethionine:tRN A ribosyltransferase-isomerase OS=Methylococcus sp. OX= 39769 GN=queA PE=3 SV=1
MLKSDFFYELPEDLIAQAPLGERGASRLLCLDQDSQLADRGFADLPDLLRPGDLLVLNDTRVMPARLYGRKSSGGRIEILIERAISPSLALAHVRASKSPKPGTMLLLDGGHACQVEERRDDLFLLQFPEGQTVEEVLSAVGHIPLPPYIDRPDEAGDRERYQTVYARTAGAVAAPTAGLHFDEDMLKTLADQGVGHAFVTLHVGSGTFLPVRVENLDEHRMHAEICDVPESTVARIRETRERGGRVVAVGTTVVRSLESAALAGELLPFQGETRLFIQPGFQYRCVDAMITNFHLPESTLLALVCAFAGYQPVMAAYRHAVEQRYRFFSYGDAMFLLRNTTGGRS

SEQ ID NO: 68893 - protein, 343 aa, Methylococcus sp.
  misc_feature (1)..(343): tr|A0A432RL06|A0A432RL06_9GAMM S-adenosylmethionine:tRN A ribosyltransferase-isomerase OS=Methylococcus sp. OX= 39769 GN=queA PE=3 SV=1
MLYKSDYHYKLPEHLIAQVPLGSRTASRMLTLDGCTGELRDCYFVDLLDLLRSGDLLVLNNTRVISARLYGQKPTGGRVELLVERLLDERRILAHTRSSKAVKPGTVIEVAGGGTFECIERQAALAVFEFLGTEPLSDLLERVGHIPLPPYIQRPDGGEDRLRYQTVYAARPGAVAAPTAGLHFDEKMISQLGSRGISTAHVTLHVGSGTFQPVRVEKLSDHRMHSEFCEIDQSVVEMVNQTRSEGGRVIAVGTTTTRVLEAASLEGRLKPFRGETNLFITPGFRFSCVDGLLTNFHLPESTLLTLVCAFAGYESVMSAYRHAVKEEYRFFSYGDAMFVKPPD

SEQ ID NO: 68894 - protein, 339 aa, Methylocucumis oryzae
  misc_feature (1)..(339): tr|A0A0F3IIB3|A0A0F3IIB3_9GAMM S-adenosylmethionine:tRN A ribosyltransferase-isomerase OS=Methylocucumis oryzae OX=1632867 GN=queA PE=3 SV=1
MKTNDFNYFLPPELIAQQPLPERAQSRLLCMGRQSGCLTDTLFREFIDLVNERDLLVFNDTKVIPARLYGRKASGGKVEMLIERVIDDQHALTHIKASKAPKSGSFIELEQNLSCEVLARQDDLFYVHFHTQQSVYELLNTIGHIPLPPYIQREDTDFDSQRYQTVFAKNLGAVAAPTAGLHFDDKLLNQLEAKGVSKAFVTLHVGSGTFQPVRVTQIAEHRMHKEYYVVSDDTVALVNQTRANGGRVIAIGTTSVRALESASVSGTLQAGMGDTELFITPGYQFKVVDGLLTNFHLPESTLLMLVSAFASFETVKAAYQHAITERYRFFSYGDAMFIS

SEQ ID NO: 68895 - protein, 353 aa, Methylocystaceae bacterium
  misc_feature (1)..(353): tr|A0A5C9DEB9|A0A5C9DEB9_9RHIZ S-adenosylmethionine:tRN A ribosyltransferase-isomerase OS=Methylocystaceae bact erium OX=2052174 GN=queA PE=3 SV=1
MRVDLFDFNLPQDSIALRPADPRDSARMLVALCGGSFEDRIVRDLPNFLRPGDALVVNDSRVIHARLSGRRSRGALSANVEATLIERLDASRWRALMRPAKKLAIGDRICFMGHGRAIDAHVEAKGEDGEITLVFELQGPALDIAIEQAGVMPLPPYIAGKRSADARDESDYQTIFAREAGAVAAPTAGLHFTPQLLAAIEARGVRLYRVTLHVGAGTFLPVKAEDTDLHRMHEEFARLDAETAQALNDVRAGGGRIVAVGTTALRVLESAADDAGRFAPYAARTRIFITPGYRFRAVDMLLTNFHLPRSTLFMLVAAFAGLERMKAAYAHAIKSGYRFYSYGDACVLQRSET

SEQ ID NO: 68896 - protein, 353 aa, Methylocystaceae bacterium
  misc_feature (1)..(353): tr|A0A4P5SNF9|A0A4P5SNF9_9RHIZ S-adenosylmethionine:tRN A ribosyltransferase-isomerase OS=Methylocystaceae bact erium OX=2052174 GN=queA PE=3 SV=1
MLVDQFNFDLPEDRIALRPMRPRDAARMLIVSPNNQFLDKQVSDLPFMLRPGDALVINNTKVIHARLKGERFRNGVKAAIEATLIEKLNEQSWIALIKPAKKLQVGDIVKFYSDRISIEAKVENKEDGGQVTLIFDHTSNDLDKIIELIGAPPLPPYIAGKRPADKQDELDYQTYFASKPGAIAAPTAGLHFTKELINKLLQSDIKIFSITLHVGAGTFVPVKVEDTKDHIMQREFAYIDKETANQLNRVKNDGGRIVAVGTTALRVLESASNENGYISSYSDFTDIFITPGYKFKFTDLLLTNFHLPKSTLFMLVSAFSGLSTMHLAYSYAIKNKYRFYSYGDACLLTREQI

SEQ ID NO: 68897 - protein, 359 aa, Methylocystis bryophila
  misc_feature (1)..(359): tr|A0A1W6MSP8|A0A1W6MSP8_9RHIZ S-adenosylmethionine:tRN A ribosyltransferase-isomerase OS=Methylocystis bryophi la OX=655015 GN=queA PE=3 SV=1
MRVDLFDFDLPAESIALRPADPRDSARMLVLPAGEDRLEDRHVRDLPHLLRPGDALVVNDARVIRARLHGYRHREGTKAQIEATLIEQRSPSSWQAMARPAKKLAVGDRLSFGWTPTECPSANPSLEAEVEARGEAGEVTLAFDRSGSALEEAIQACGSIPLPPYIATRRAPDLRDESDYQTLFAAQPGAVAAPTAGLHFTPELLRSVEAAKISLHRLTLQVGAGTFLPVRAQDTRDHVMHAEYCSLSKETAEALNEIKGRGGRIVAVGTTALRCLESAACASGRLEPFQAKTDIFITPGYRFRVVDALMTNFHLPRSTLFMLVCAFGGLDRLKAAYAHAVRQGYRFYSYGDATLLFRT

SEQ ID NO: 68898 - protein, 345 aa, Methylocystis heyeri
  misc_feature (1)..(345): tr|A0A4S4MEP8|A0A4S4MEP8_9RHIZ S-adenosylmethionine:tRN A ribosyltransferase-isomerase OS=Methylocystis heyeri OX=391905 GN=queA PE=3 SV=1
MLVVPPGAAPFEDRIVRDLPSFLRPGDALVINDTRVVRARLSGFRLRGENKARVEVTLIERLGGNCWRAMAKPAKKLGLGEQVCFVKDQAKGVNPPLEGEGRREAAGWAGALKAIVEERGDNGEVTLRFDLSGELLDQAIEDLGAMPLPPYIAGKRAVDASDDSDYQTLFAREAGAVAAPTAGLHFTPELLSAIEAAGARIHNVTLHVGAGTFLPVKAEDTADHQMHYEHAVLSAETAAALNEIRTRGGRIFAVGTTALRCLESAADENGELKAYSARTNIFITPGYKFRAVDVLLTNFHLPRSTLFMLVCAFCGVDRMKAAYAHAIAQGYRFYSYGDASLLYRA

SEQ ID NO: 68899 - protein, 353 aa, Methylocystis hirsuta
  misc_feature (1)..(353): tr|A0A3M9XUC4|A0A3M9XUC4_9RHIZ S-adenosylmethionine:tRN A ribosyltransferase-isomerase OS=Methylocystis hirsuta OX=369798 GN=queA PE=3 SV=1
MRVDLFDFELPAERIALRPANPRDRARMLVVPAKEGFEDRRVLDLPNYLRDGDALVVNDSRVIHARLSGRRFRGALSANVEATLIERLDASRWRALMRPAKKLAIGDRISFMGHGGAIDARVEAKGDEGEITLAFELHGPALDIAIEQAGVMPLPPYIAGKRSADARDESDYQTIFAREAGAVAAPTAGLHFTPQLLAAIEARGVRLYSVTLHVGAGTFLPVKAEDTDLHRMHEEFARLDAETAQALNDARAGGGRIVAVGTTALRVLESAADETGRLAPYAARTRIFITPGYRFRAVDMLLTNFHLPRSTLFMLVAAFAGLERMKAAYAHAIESGYRFYSYGDACLLQRCEK

SEQ ID NO: 68900 - protein, 353 aa, Methylocystis rosea
  misc_feature (1)..(353): tr|A0A3G8M6A9|A0A3G8M6A9_9RHIZ S-adenosylmethionine:tRN A ribosyltransferase-isomerase OS=Methylocystis rosea O X=173366 GN=queA PE=3 SV=1
MRVDLFDFNLPQDRIALRPADPRDGARLLVVPANGSFHDRIVRDLPDYLRPGDALVVNDSRVIHARLSGRRCRGALSANVEATLIERLDASRWRALMRPAKKLAIGDRICFMGHGGAIDARVEAKGDEGEITLAFELNGPVLDMAIEQAGVMPLPPYIAGKRSADARDESDYQTIFAREAGAVAAPTAGLHFTPQLLAAIEARGVRLHRVTLHVGAGTFLPVKAEDTDLHRMHEEFARLDAETAQALNNVRAGGGRIVAVGTTALRVLESAADDAGRLAPYAARTRIFITPGYRFRAVDMLLTNFHLPRSTLFMLVAAFAGLERMKAAYAHAIESGYRFYSYGDACLLQRSET

SEQ ID NO: 68901 - protein, 378 aa, Methylocystis sp.
  misc_feature (1)..(378): tr|A0A2P5NIN5|A0A2P5NIN5_9RHIZ S-adenosylmethionine:tRN A ribosyltransferase-isomerase OS=Methylocystis sp. OX= 1911079 GN=queA PE=3 SV=1
MRVDLFDFELPQDRIALRPVEPRDSARMLVVPPAGAFEDRIVRELTDFLRPGDALVVNDTRVIHARLSGKRMRGELSAGVEATLIERLDASRWRALMRPAKKLAIGDEVRFTRHCERSEAIESQGDEAGLLRRSAPRNDGDNLLAHVDAKGEDGEITLRFDLAGPALDEAIEAAGDMPLPPYIAGKRAADAKDEADYQTVYAREAGAVAAPTAGLHFTPQLLSAIEAKGVALHRVTLHVGAGTFLPMKAEDTKDHKMHEEFARIDPATAQALNEARAKGGRIVAVGTTALRTLESAAQPDGVILPYAARTGIFITPGYKFRATDMLITNFHLPKSTLFMLVSAFCGLERMKSAYAHAVANSYRFYSYGDASLLYRSEP

SEQ ID NO: 68902 - protein, 353 aa, Methylocystis sp.
  misc_feature (1)..(353): tr|J7Q5G2|J7Q5G2_METSZ S-adenosylmethionine:tRNA ribosy ltransferase-isomerase OS=Methylocystis sp. (strain SC2 ) OX=187303 GN=queA PE=3 SV=1
MRVDLFDFNLPQDRIALRPADPRDSARMLVVPSGGPFEDRIIRDLPDCLRAGDALVVNDSRVIHARLSGRRLRGALSANVEATLIERLDASRWRALMRPAKKLAIGDRISFTGHGGEIDARVEAKGDDGEIALAFELHGPALDEAIEQSGAMPLPPYIAGKRSADARDESDYQTIFAREAGAVAAPTAGLHFTPQLLAAIEARGVRLYRVTLHVGAGTFLPVKAEDTDLHRMHEEYARLDAETAQALNVARAGGGRIVAVGTTALRVLESAADDAGRLAPYAARTRIFITPGYRFRAVDMLLTNFHLPRSTLFMLVAAFAGLERMKSAYVHAIESGYRFYSYGDACLLQRRDA

SEQ ID NO: 68903 - protein, 340 aa, Methyloglobulus morosus
  misc_feature (1)..(340): tr|V5DVW7|V5DVW7_9GAMM S-adenosylmethionine:tRNA ribosy ltransferase-isomerase OS=Methyloglobulus morosus KoM1 OX=1116472 GN=queA PE=3 SV=1
MKKSDFAYELPEELVAQNPLTERHASRLLCLNKQTGQLADKQFTDFVDLIDERDLLVFNDTKVIPARLFGTKVTGGKVEILIERLCDDNHAIAHVRASKSSKEGAIIKLDGGFSCKVQGRAGDLFRVEFTGDTPLLEILGQIGHIPLPPYITRADDESDVSRYQSVFAKHLGAVAAPTASLHFDLEMMEKIKAKSVATAFVTLHVGSGTFQPVRVEDLSQHLMHKEYFRVPQETVQAVKEAKVRGGRVVAIGTTAVRALESASQNGRLESGFGDTDLFITPGYRFKSVDAMLTNFHLPESTLLMLVAAFAGYQPVMNAYQHAIGQSYRFFSYGDAMYLSD

SEQ ID NO: 68904 - protein, 361 aa, Methyloligella halotolerans
  misc_feature (1)..(361): tr|A0A1E2S2Z2|A0A1E2S2Z2_9RHIZ S-adenosylmethionine:tRN A ribosyltransferase-isomerase OS=Methyloligella haloto lerans OX=1177755 GN=queA PE=3 SV=1
MRTDLFHFELPEELIALRPVSPRDSARLLAVDGATGSLRDCSVRNLPYLLEPGDALVFNDTRVIPAELRGIRRRDDAVASVTVNLTERAGDSRWHGFARPAKRLREGDRIGFGGEGDVCLAGRLDATVEARGEGGAVTLAFDLTGPALDEAIARHGAMPLPPYIASKRPAEESDRQDYQTIYAAKEGAVAAPTAGLHFTDALMDALDARRIARHWLTLHVGPGTFLPVKAEDTDDHVMHSETGMIDRATADALNGVKARGGKIVAVGTTAMRLLESAADEEGVLHPFNGATDIFITPGYRFRYVDRMMTNFHLPRSTLFMLVSAFSGLEVMRRAYAHAIAQGYRFYSYGDACLLSPGDERS

SEQ ID NO: 68905 - protein, 351 aa, Methylomagnum ishizawai
  misc_feature (1)..(351): tr|A0A1Y6D593|A0A1Y6D593_9GAMM S-adenosylmethionine:tRN A ribosyltransferase-isomerase OS=Methylomagnum ishizaw ai OX=1760988 GN=queA PE=3 SV=1
MPITPKLCPMLKSDFHYDLPERLIAQTPLPERAASRLLCLDGPSGRLEDRHFAALPDLLAAGDLLVLNDTRVIPARLFGHKASGGRVEVLIERVLDVRLALAHVRASKAPKPGGAIHLEGGYACRVRGRREDLFELEFPEGPGIEAVLAAVGHMPLPPYIARADRDEDRERYQTVFSRTPGAVAAPTAGLHFDAGTLERLAARGVESAFVTLHVGSGTFQPLRVDDLDRHRMHFEFCEVSPATVDKIRAARAGGGRVVAVGTTVVRTLETAALGGELAPYRGETDLFIRPGFHFRCVDALVTNFHLPESTLLTLVCAFAGRAEVLAAYRHAVAEEYRFFSYGDAMFVTRRP

SEQ ID NO: 68906 - protein, 341 aa, Methylomicrobium album
  misc_feature (1)..(341): tr|H8GM12|H8GM12_METAL S-adenosylmethionine:tRNA ribosy ltransferase-isomerase OS=Methylomicrobium album BG8 OX =686340 GN=queA PE=3 SV=1
MKKSDFFYHLPENLIAQHPLPERQASRLLCMRTPDWRIEDRKFTDFIDLVDVKDLLVFNDTRVIPARLFGRKSTGGQIEILIERIRDAHRAVAHVRASKAPKPGAAIVLDRGHQCRVVGRAGDLFELEFDSAAPLPEILEQIGHVPLPPYIDRADEREDLSRYQTVFAKRPGAVAAPTAGLHFDREMMERIAAKGVSTAFVTLHVGSGTFQPVRVENLADHVMHQEFFSVPAETVEAVRQARERGGRVVAIGTTSVRALESASRSGRLEAGWGDTDLFIMPGYRFHVVDALLTNFHLPESTLLMLVSAFAGYETTMKAYRHAIDHSYRFFSYGDAMFLASG

SEQ ID NO: 68907 - protein, 364 aa, Methylomicrobium alcaliphilum
  misc_feature (1)..(364): tr|G4SXC1|G4SXC1_META2 S-adenosylmethionine:tRNA ribosy ltransferase-isomerase OS=Methylomicrobium alcaliphilum (strain DSM 19304 / NCIMB 14124 / VKM B-2133 / 20Z) OX =1091494 GN=queA PE=3 SV=1
MNFFQLSNVFLSVIIRNNLVLSRAMKKSDFNYHLPEHLIAQYPLADRVSSRLLCLDGANGNLRDRQFSDFIDLVEPDDLLVFNDTKVIPARLFGQKQTGGKVEILIERIVDRYEAIAHVRASKSPKAGTIIELDRDYRCEVWGREDDLFRLRFDGDAGVLDILESIGHIPLPPYIDRADDAVDLERYQTVFAKEAGAVAAPTAGLHFSQAILDRLEAKGVHKTFVTLHVGSGTFQPVRVEDLSQHLMHKEYYAVSPETVQAVEQVKARGGRVIAIGTTAVRALESASKTGRLEPGLGDTDLFITPGYRFVSVDVLLTNFHLPESTLLMLVSAFAGYDNIMKAYRHAIEQEYRFFSYGDAMLLMR

SEQ ID NO: 68908 - protein, 340 aa, Methylomicrobium buryatense
  misc_feature (1)..(340): tr|A0A4P9UNK2|A0A4P9UNK2_9GAMM S-adenosylmethionine:tRN A ribosyltransferase-isomerase OS=Methylomicrobium bury atense OX=95641 GN=queA PE=3 SV=1
MKKSDFNYHLPEHLIAQYPLPDRVSSRLLCLDGANGNLRDKRFSDFIDLVEADDLLVFNDTKVIPARLFGQKQTGGKVEILIERIVDRHEAIAHVRASKSPKAGTIIDLDRDYRCVVQGREDDLFRLRFDGDAGVLDILESIGHIPLPPYIDRADDAVDLERYQTVFAKEAGAVAAPTAGLHFSQAILDQLDAKGVPKTFVTLHVGSGTFQPVRAEDLSQHLMHKEYYAVSPETVQAVEQAKSRGGRVIAIGTTAVRALESASRSGRLEPGFGDTDLFITPGYRFVSVDVLLTNFHLPESTLLMLVSAFAGYDNIMKAYRHAIEQEYRFFSYGDAMFLTR

SEQ ID NO: 68909 - protein, 340 aa, Methylomicrobium kenyense
  misc_feature (1)..(340): tr|A0A543VFC1|A0A543VFC1_9GAMM S-adenosylmethionine:tRN A ribosyltransferase-isomerase OS=Methylomicrobium keny ense OX=269709 GN=queA PE=3 SV=1
MKKSDFNYQLPEHLIAQRPLPDRISSRLLCLDGANGNLLDRQFSDFIELVEPDDLLVFNDTKVIPARLFGRKQTGGKVEVLIERIVDRHEAIAHVRASKSPKAGTIIELDRSYRCEVRGREDDLFRLRFDGDADVFDILEDIGHIPLPPYIDRADDAIDLERYQTVFAKQAGAVAAPTAGLHFSQAILDRLEAKGVQKTFVTLHVGSGTFQPVRVEDLSQHLMHKEYYAVSPETVQAAEQAKARGGRVIAIGTTAVRALESASRSGRLEPGFGDTDLFITPGYRFMSVDVLLTNFHLPESTLLMLVSAFAGYDNIMKAYRHAVEQEYRFFSYGDAMFLTR

SEQ ID NO: 68910 - protein, 339 aa, Methylomonas denitrificans
  misc_feature (1)..(339): tr|A0A126T8A9|A0A126T8A9_9GAMM S-adenosylmethionine:tRN A ribosyltransferase-isomerase OS=Methylomonas denitrif icans OX=1538553 GN=queA PE=3 SV=1
MKKSDFNYQLPEQLIAQYPLPERSASRLLRLNRQSAAIADCQFADFVDMISSNDLLVFNNTKVMPARLFAQKSSGGKVEILIERIEDAHTALAHVKASKSPKTDALLTLENGAVCRVIGRHNDLFRLGFETEAGLMGLLDEVGHIPLPPYISRTDEASDLDRYQTVFAEQLGAVAAPTAGLHFDQAMLDRLDQKGVARSFVTLHVGSGTFRPVRVEDLSEHVMHKESYSVSQACVDAVNQARARGGRVVAIGTTAVRALESASRSGVLQAGFGDTDLFITPGYSFKSVDALLTNFHLPESTLLMLVSAFAGYDAVMKAYRHAIEQRYRFFSYGDAMLVI

SEQ ID NO: 68911 - protein, 339 aa, Methylomonas koyamae
  misc_feature (1)..(339): tr|A0A177NJ08|A0A177NJ08_9GAMM S-adenosylmethionine:tRN A ribosyltransferase-isomerase OS=Methylomonas koyamae OX=702114 GN=queA PE=3 SV=1
MKKSDFNYRLPEELIAQYPLPERSASRMLHLDKLSGAVSDRQFTDLLELLSADDVLVFNDTKVIPARLFGRKSSGGKVEILIERIENPQQALAHIRASKSPKPGSLIELENGCCLEVLGREADLFRLSLPGANGLLELLAEVGHIPLPPYIDRNDEHSDLERYQTVFADRAGAVAAPTAGLHFDQAILENLDRKGVKRTFVTLHVGSGTFRPVRVDDLSQHTMHKEFYSVGQNAVDAVEAARARGGRVVAIGTTAVRALESASAGGHLAAGIGDTDLFITPGYKFKSVDALFTNFHLPESTLLMLVSAFAGYDAVMAAYRHAIEQRYRFFSYGDAMLIS

SEQ ID NO: 68912 - protein, 339 aa, Methylomonas koyamae
  misc_feature (1)..(339): tr|A0A291IJ53|A0A291IJ53_9GAMM S-adenosylmethionine:tRN A ribosyltransferase-isomerase OS=Methylomonas koyamae OX=702114 GN=queA PE=3 SV=1
MKKSDFNYRLPDKLIAQYPLPERSASRMLHLDKLSGAVIDRQFIDLLELLSADDLLVFNDTKVIPARLFGHKSSGGRVEILIERIENPQQALAHIRASKSPKPGSLIELENGCCLEVLGREADLFRLSLPGANGLLELLAEVGHIPLPPYINRNDEHSDLERYQTVFADRAGAVAAPTAGLHFDQAILENLDRKGVKRTFVTLHVGSGTFRPVRVDDLSQHTMHKEFYSVGLNAVDAVEAARARGGRVVAIGTTAVRALESASAGGHLAAGIGDTDLFITPGYKFKSVDALFTNFHLPESTLLMLVSAFAGYDAVMAAYRHAIEQRYRFFSYGDAMLIT

SEQ ID NO: 68913 - protein, 339 aa, Methylomonas lenta
  misc_feature (1)..(339): tr|A0A177NIK4|A0A177NIK4_9GAMM S-adenosylmethionine:tRN A ribosyltransferase-isomerase OS=Methylomonas lenta OX =980561 GN=queA PE=3 SV=1
MKKSDFNYHLPPELIAQKPLAQRSASRLLQLNKQTGELSDGQFSQFIDLLQPDDLLVFNDTKVIPARLFASKTSGGKVEILIERIEDPHQALAHVRASKTPKTDALLQLENGVFCRVLGREEDLFRLRFETELTLLEVLASIGHMPLPPYIDRADDISDLDRYQTVFAKQAGAVAAPTAGLHFDEYTLKLLEQKGIQSSFVTLHVGSGTFQPVRVEELTQHVMHKEYFDVSAACVEAVRQTKARGGRVVAIGTTAVRALESASANGELQAGCGDTQLFITPGYTFKTVDAMLTNFHLPESTLLMLISAFAGYDSVMKAYQHAIEQRYRFFSYGDAMAII

SEQ ID NO: 68914 - protein, 339 aa, Methylomonas methanica
  misc_feature (1)..(339): tr|A0A177MNA7|A0A177MNA7_METMH S-adenosylmethionine:tRN A ribosyltransferase-isomerase OS=Methylomonas methanic a OX=421 GN=queA PE=3 SV=1
MKKSDFNYQLPEQLIAQYPLPERSASRLLRLDRQSAAIADCQFADFVDMIGSNDLLVFNNTKVMPARLFAHKSSGGKVEMLIERIEDTHTALAHVKASKSPKTDALLTLENGAICRVIGRYNDLFRLRFETEAGLLKLLDEVGHIPLPPYISRTDEASDLDRYQTVFAEQIGAVAAPTAGLHFDHAILDRLDQKGVARSFVTLHVGSGTFRPVRVEDLSEHVMHKESYSVSQTCVDAVVQARARGGRVVAIGTTAVRALESASRSGLLQAGFGDTDLFITPGYSFKTVDALLTNFHLPESTLLMLVSAFAGYDSVMNAYRHAIDQRYRFFSYGDAMLVI

SEQ ID NO: 68915 - protein, 339 aa, Methylomonas methanica
  misc_feature (1)..(339): tr|G0A492|G0A492_METMM S-adenosylmethionine:tRNA ribosy ltransferase-isomerase OS=Methylomonas methanica (strai n MC09) OX=857087 GN=queA PE=3 SV=1
MKKSDFYYQLPPDLIAQKPLAQRNASRLLQLNRQTGALRDSRFTDFIGMLNQDDLLVFNDTKVIPARLYAHKDTGGKVEILIERIEDQSRVLAHIKASKSPKADSRLHLQNGTVCNVLGREDDLFRLQFDADIDVLALLAEIGHMPLPPYIDRPDDIEDLDRYQTVFAKQAGAVAAPTAGLHFDAETLRMLDSKGIQRCFVTLHVGSGTFQPVRVDDLSQHVMHKEFFQVSESCVDAVRQAKARGGRVVAIGTTAVRALESASATGGLLAGCGDTRLFITPGYAFKTVDALLTNFHLPESTLLMLISAFAGYDAVMQAYLHAIEQRYRFFSYGDAMAIF

SEQ ID NO: 68916 - protein, 339 aa, Methylomonas sp.
  misc_feature (1)..(339): tr|A0A2P5NDN0|A0A2P5NDN0_METSP S-adenosylmethionine:tRN A ribosyltransferase-isomerase OS=Methylomonas sp. OX=4 18 GN=queA PE=3 SV=1
MKKTDFYYDLPPELIAQKPLPERSASRMLRLNRATGQVVDDVFESLADALQPSDLLVFNDTKVMPARLFARKHTGGHVEILIERIEPNGRALAHLKASKSTRPGTELVLENGETCRVVEREGDLFRLQFDPSKPLLALLEAVGHIPLPPYIERADDEDDAERYQTVFASQVGAVAAPTASLHFDDAMLQRIADRGIASVFVTLHVGSGTFQPVRVDDLSQHVMHQEFYDVPQTCVDAVERTRKAGGRVIAIGTTAVRALESASIHGGLQTCSGDTRLFITPGYTFNTVDGLLTNFHLPESTLLMLISAFAGYDPVMAAYRHAIERRYRFFSYGDAMLIL

SEQ ID NO: 68917 - protein, 339 aa, Methylomonas sp.
  misc_feature (1)..(339): tr|A0A172U7S2|A0A172U7S2_9GAMM S-adenosylmethionine:tRN A ribosyltransferase-isomerase OS=Methylomonas sp. DH-1 OX=1727196 GN=queA PE=3 SV=1
MKKSDFNYRLPNELIAQYPLPERSASRMLHLDKLSGAVSDRQFTDLLELLSADDLLVFNDTKVIPARLFGRKSSGGKVEILIERIENPQQALAHIRASKSPKSGSLIELENGRCLEVLGREADLFRLSLPGANGLLELLAEVGHIPLPPYIDRNDEHSDLERYQTVFADRAGAVAAPTAGLHFDQAILENLDRKGVKRTFVTLHVGSGTFRPVRVDDLSQHTMHKEFYSVGQNAVDAVEAARTRGGRVVAIGTTAVRALESATAGGQLTAGIGDTDLFITPGYKFKSVDALFTNFHLPESTLLMLVSAFAGYDAVMAAYRHAIEQRYRFFSYGDAMLIT

SEQ ID NO: 68918 - protein, 339 aa, Methylomusa anaerophila
  misc_feature (1)..(339): tr|A0A348AP66|A0A348AP66_9FIRM S-adenosylmethionine:tRN A ribosyltransferase-isomerase OS=Methylomusa anaerophi la OX=1930071 GN=queA PE=3 SV=1
MLLSDFDYYLPEELIAQYPIEPRNHSRLLVVHRQSGLMEHQHFYNLQQYLQPGDTLVFNDTRVIPARLIGEKADTGSKVEVFLLNRNSGDQWECLVKPGKRARPGAIIEFGNLLRCEVIAGTDFGGRIVRFSYDGIFEEILDFLGETPLPPYIKETLHDKERYQTVYAKEKGSAAAPTAGLHFTSDMMTKLKEAGINLAFVTLHVGLGTFRPVSVADISQHSMHREYYSVSEETARIVNKTKAAGNRVIAVGTTAVRTLETAGKDGVLAAQSGWTNIFIYPGYRFRIIDALVTNFHLPKSTLLMLVSAFANRELILSAYAEAVAERYRFFSFGDAMLII

SEQ ID NO: 68919 - protein, 347 aa, Methylophaga aminisulfidivorans
  misc_feature (1)..(347): tr|F5SVT7|F5SVT7_9GAMM S-adenosylmethionine:tRNA ribosy ltransferase-isomerase OS=Methylophaga aminisulfidivora ns MP OX=1026882 GN=queA PE=3 SV=1
MKTSDFQFDLPEELIAQYPSENRTSSRLLFLDGNNGQRQDLQFTDLLSLLNPTDLLVFNNTKVIPARLFGVKDSGGKVEVLIERVLDESRVLAHIRSSKSPTAGRHLQLEGALDVEVLVRHDALFELKFHGIESVIDALEAYGRLPLPPYIEREVDKEDLDRYQTVYARNVGAVAAPTAGLHFDEALLNRIREAGIETAELTLHVGAGTFQPVRVDDVRSHQMHKEVIDVSEQVAEQVKATRARGGRVIAVGTTSVRALESASANGEISAYQGETDIFIYPGYQFKSVDAMVTNFHLSESTLLMLVSAFAGKQHIMDAYQHAIQQRYRFFSYGDAMFITRNNNEVVG

SEQ ID NO: 68920 - protein, 343 aa, Methylophaga frappieri
  misc_feature (1)..(343): tr|I1YF01|I1YF01_METFJ S-adenosylmethionine:tRNA ribosy ltransferase-isomerase OS=Methylophaga frappieri (strai n ATCC BAA-2434 / DSM 25690 / JAM7) OX=754477 GN=queA P E=3 SV=1
MQRNDFQFDLPEELIAQYPSEDRTASRLLELDGNTGAFRDHVFSDLTSLLTADDLLVFNNTKVIPARLLGEKETGGKVEVLVERLMDDQRVLAHVRSSKSPGVGRRLRLEGAVEAEVIGRRENLFELRFLSETSLIGLLESYGRLPLPPYIEREVDKADLARYQTVYAKHAGAVAAPTAGLHFDDALLQAVKAFGVQTAEVTLHVGAGTFQPVRADDIRDHQMHSEYIEVEQPVCEAVNAARKRGGRVIAVGTTSVRALESASKQGQIEPFRGDTDIFIYPGYRFRSVDAMITNFHLSESTLLMLVSAFAGRDNIMAAYQHAIAQRYRFFSYGDAMFIRRKDT

SEQ ID NO: 68921 - protein, 345 aa, Methylophaga lonarensis
  misc_feature (1)..(345): tr|M7PQ32|M7PQ32_9GAMM S-adenosylmethionine:tRNA ribosy ltransferase-isomerase OS=Methylophaga lonarensis MPL O X=1286106 GN=queA PE=3 SV=1
MKTSDFKFDLPDELIAQYPCSERGASRLLCLDGDSGSLSDRMFADLPSLLTKDDLLVFNNTRVIPARLLGHKDSGGKVEVLIERIIDDQRALAHVRSSKSPAPGRRLKLEQALDVEVLGRQDALFELQFLNVSSVLAALEQHGRMPLPPYIEREVDAADLHRYQTVYAREAGAVAAPTAGLHFDEKLLAQIDAMGIERAEVTLHVGAGTFQPVRVENITEHQMHSEWLEVTETVCQQVRAARASGGRVIAVGTTSVRALESASLSGQIEPYQGETDIFIYPGYRFRSVDAMVTNFHLSESTLLMLVSAFAGRDHILGAYQHAVAERYRFFSYGDAMFITRNSSAC

SEQ ID NO: 68922 - protein, 343 aa, Methylophaga muralis
  misc_feature (1)..(343): tr|A0A1E3GQY6|A0A1E3GQY6_9GAMM S-adenosylmethionine:tRN A ribosyltransferase-isomerase OS=Methylophaga muralis OX=291169 GN=queA PE=3 SV=1
MQRTDFQFELPPELIAQYPSKHRTASRLLTLDGNSGELADRQFSDFLDLLKPNDLLVFNNTKVIPARLLGEKETGGKIEVLVERVLDDKRVLAHIRSSKSPGAGRILILENELRAEVLGRQDALFELKFDIAGDVIEALEQYGRLPLPPYIEREVDKSDLDRYQTVYAKQIGAVAAPTAGLHFDNELMQRIRDSDIDMTEVTLHVGAGTFQPVRVEDIRTHQMHSERIEVSETVCEKVRQTREKGGRVIAVGTTSVRALESASRSGEIAAYSGETDIFIYPGYQFRSVDAMVTNFHLSESTLLMLVSAFAGRDHIMSAYHHAIEQRYRFFSYGDAMFITRKTA

SEQ ID NO: 68923 - protein, 343 aa, Methylophaga nitratireducenticrescens
  misc_feature (1)..(343): tr|I1XIV3|I1XIV3_METNJ S-adenosylmethionine:tRNA ribosy ltransferase-isomerase OS=Methylophaga nitratireducenti crescens OX=754476 GN=queA PE=3 SV=1
MQRTDFQFELPPELIAQYPSKHRTASRLLNLDGNSGALMDRQFSDFLDLLKPNDLLVFNNTKVIPARLLGEKETGGKIEVLVERVLDDKRVLAHIRSSKSPGTGRILLLESELRVEVLGRHNALFELRFDIESDVIEALEQYGRLPLPPYIEREVDKRDLERYQTVYAKQVGAVAAPTAGLHFDNELMQRIRDSGVDMTEVTLHVGAGTFQPVRVEDIRTHQMHSERIEVSETVCEKVRQTREKGGRVIAIGTTSVRALESASRSGEIEAYSGETDIFIYPGYQFRSVDAMVTNFHLSESTLLMLVSAFAGRDHIMSAYQHAIKQRYRFFSYGDAMFITRKTA

SEQ ID NO: 68924 - protein, 343 aa, Methylophaga sp.
  misc_feature (1)..(343): tr|A0A2D9KYT9|A0A2D9KYT9_9GAMM S-adenosylmethionine:tRN A ribosyltransferase-isomerase OS=Methylophaga sp. OX=2 024840 GN=queA PE=3 SV=1
MQRTDFQFELPPELIAQYPSKHRTASRLLTLDGNSGELADRLFSDFLDLLKPNDLLVFNNTKVIPARLLGEKETGGKIEVLVERVLDDKRVLAHIRSSKSPGEGRILILETELRVEVLGRQDALFELKFDIAGDVIEALEQYGRLPLPPYIEREVDKNDLDRYQTVYAKQIGAVAAPTAGLHFDNELMQRIRDSGIDMTEVTLHVGAGTFQPVRVEDIRTHQMHSERIEVSETVCEKVRQTRKKGGRVIAIGTTSVRALESASRSGEIESYSGETDIFIYPGYQFRSVDAMVTNFHLSESTLLMLVSAFAGRDHIMTAYHHAIEQRYRFFSYGDAMFITRKTA

SEQ ID NO: 68925 - protein, 346 aa, Methylophaga sp.
  misc_feature (1)..(346): tr|A0A1Y5DMY7|A0A1Y5DMY7_9GAMM S-adenosylmethionine:tRN A ribosyltransferase-isomerase OS=Methylophaga sp. 41_1 2_T18 OX=1856284 GN=queA PE=3 SV=1
MQRTDFQFEIPPELIAQFPSKHRTESRLLSLEGATGNLSDQQFVDLPTFLQKDDLLVFNNTKVIPARLKGKKESGGKVEVLVERVLDQHRVLAHVRSSKSPGAGVHLLLEDKLDAEVLGRHDALFEIYFHVDDVVAALEEHGRLPLPPYIERDVAKDDLDRYQTVYAQHIGAVAAPTAGLHFDQAMLDTIAEMGIDSAQVTLHVGAGTFQPVRVDDIKTHHMHSERIEVTAEVCEKIKATRARGGRVIAVGTTSVRALESASRNGCIIPYSGETDIFIYPGYQFKSVDAMITNFHLSESTLLMLVSAFAGRDNVMNAYQHAITNKYRFFSYGDAMFITRKLNDNVG

SEQ ID NO: 68926 - protein, 347 aa, Methylophaga sulfidovorans
  misc_feature (1)..(347): tr|A0A1I3VLJ0|A0A1I3VLJ0_9GAMM S-adenosylmethionine:tRN A ribosyltransferase-isomerase OS=Methylophaga sulfidov orans OX=45496 GN=queA PE=3 SV=1
MKTSDFQFDLPEELIAQYPSENRTSSRLLFLDGNSGQRQDLQFTDLLSLLNPKDLLVFNNTKVIPARLFGVKDSGGKVEVLIERVLDETRVLAHIRSSKSPAAGRHLQLEGVLDAEVLGRHDALFELKFHGIDSIIDALDEYGRLPLPPYIEREVDKEDLDRYQTVYARNVGAVAAPTAGLHFDEALLNRIREAGIETAELTLHVGAGTFQPVRVDDVRSHQMHKEVIDVSEQVAKQVKATRARGGRVIAVGTTSVRALESASANGEIAAYQGETDIFIYPGYQFKSVDAMVTNFHLSESTLLMLVSAFAGKQHIMDAYQYAIQQRYRFFSYGDAMFITRNNNEVVG

SEQ ID NO: 68927 - protein, 347 aa, Methylophaga thiooxydans
  misc_feature (1)..(347): tr|C0N7P6|C0N7P6_9GAMM S-adenosylmethionine:tRNA ribosy ltransferase-isomerase OS=Methylophaga thiooxydans DMS0 10 OX=637616 GN=queA PE=3 SV=1
MKTSDFRFDLPEELIAQYPSTDRTASRLLALDGNTGQVQDLNFTDLLNQLDSKDLLVFNNTKVIPARLLGHKETGGKVEVLVERVLDHERVLAHVRSSKSPSQGRRLQLEGSLEVEVLARHDALFELRFLNTDSVVDALESYGRMPLPPYIERDVDKADLERYQTVYAQHVGAVAAPTAGLHFDQALLAQIKEMGIETAELTLHVGAGTFQPVRVDDIRSHQMHSEVIEVSEQVCQQVKAARARGGRVIAVGTTSVRALESASQSGEISPFEGETDIFIYPGYQFKSVDAMVTNFHLSESTLLMLVSAFASRSHILNAYQHAVEQRYRFFSYGDAMFITRNTDDING

SEQ ID NO: 68928 - protein, 347 aa, Methylophaga thiooxydans
  misc_feature (1)..(347): tr|A0A0A0BH89|A0A0A0BH89_9GAMM S-adenosylmethionine:tRN A ribosyltransferase-isomerase OS=Methylophaga thiooxyd ans OX=392484 GN=queA PE=3 SV=1
MKTSDFRFDLPEELIAQYPSTDRTASRLLALDGNTGQVQDLKFTDLLHQLDSKDLLVFNNTKVIPARLLGHKETGGKVEVLVERVLDHERVLAHVRSSKSPSQGRRLQLEGSLEVEVLARHDALFELRFLNTDSVVDALESYGRMPLPPYIERDVDKADLERYQTVYAQHVGAVAAPTAGLHFDQALLAQIKEMGIETAELTLHVGAGTFQPVRVDDIRSHQMHSEVIEVSEQVCQQVKAARARGGRVIAIGTTSVRALESASQSGEISPFEGETNIFIYPGYQFKSVDAMVTNFHLSESTLLMLVSAFASRSHILNAYQHAVEQRYRFFSYGDAMFITRNTDDING

SEQ ID NO: 68929 - protein, 343 aa, Methylophilaceae bacterium
  misc_feature (1)..(343): tr|Y0KF22|Y0KF22_9PROT S-adenosylmethionine:tRNA ribosy ltransferase-isomerase OS=Methylophilaceae bacterium 11 OX=1101195 GN=queA PE=3 SV=1
MRTQEFDFYLPSELIAQFPAEKRNGSRLLHVDGNSGQLVDGTFAHLTDWLSPHDLVIFNDTRVIKARLFGQKSTGGAVEIMIERVLNDHEALAHVRASRAPKPGARLLLENAIEVEVTARQDDLFLLKFHHASSIFNLLDQYGHLPLPPYITHAAESEDETRYQTVYAKHAGAVAAPTAGLHFDETMLSNIQAMGVRIAYVTLHVGAGTFQPVKVDEISAHKMHSEHYHIPEETVALIQSTRQNGGRILAVGTTALRALESAAQHGPLTAGSGETNIFITPGYSFNVVDRLLTNFHLPKSTLMMLVSAFAGYTHIMSAYEHAIRQQYRFFSYGDAMLIERATL

SEQ ID NO: 68930 - protein, 341 aa, Methylophilaceae bacterium
  misc_feature (1)..(341): tr|A0A3D0W6B8|A0A3D0W6B8_9PROT S-adenosylmethionine:tRN A ribosyltransferase-isomerase OS=Methylophilaceae bact erium OX=2030816 GN=queA PE=3 SV=1
MRIEEFDFELPEKLIAQTPLDKRDASRLLVLDKNTKSFADKKFTDFVDLLHPNDLLIFNDTRVIKARLFGTKITGGKAEIMIERIVNNNHALAHLKTSKKILNDTIFEINKDVLVQVIKKEGDLFYIRFHSNLPAYDILEKYGHIPLPPYIERSANLSDEKRYQTIYAKELGAVAAPTAGLHFTDEIFKALDNKKIKYTFLTLHVGAGTFKPVRDQDLDHHQMHSESYNVPEKTIQMILDAKSNNGRIIAIGTTVLRALESKFSDENIQTGFKETSIFIKPGYAFKIVDALLTNFHLPKSTLFILVSAFSGSDTMRKLYQHAIKHEYRFFSYGDATFIERS

SEQ ID NO: 68931 - protein, 344 aa, Methylophilales bacterium
  misc_feature (1)..(344): tr|A0A0H4JAM6|A0A0H4JAM6_9PROT S-adenosylmethionine:tRN A ribosyltransferase-isomerase OS=Methylophilales bacte rium MBRS-H7 OX=1623450 GN=queA PE=3 SV=1
MNIEEFNYTLPEELIAQHPTDKRSDSRLLQLNPNTEEIIDNNFTNFLSLINHNDLLVFNDTKVIKARIHGHKKSGGKVEVLIEKIINQNSFVGHIGTSKKINAGLEIMVGNFKLTVKDRDENMFIIETNDDIFNIIDCHGKLPLPPYINRDNEDFDDDRYQTVFAKHDGAIAAPTAGLHFDDQFFLELSKQNLNFSFITLHVGSGTFQPVRNSNITDHKMHSEEFMISQDVYDRIEQTKKNGGRIIAIGTTVLRALESAYAQPKKDSNFQKTNIFIYPGYQFKIVDSLFTNFHLPKSTLIMLVSAFAGHSFTMTAYAHAVKEKYRFFSYGDAMFIEQKLTTEDK

SEQ ID NO: 68932 - protein, 348 aa, Methylophilales bacterium
  misc_feature (1)..(348): tr|A0P811|A0P811_9PROT S-adenosylmethionine:tRNA ribosy ltransferase-isomerase OS=Methylophilales bacterium HTC C2181 OX=383631 GN=queA PE=3 SV=1
MRIEEFNYILPDELIAQSPLKNRGDSRLLVANPVGKKISDSYFKNFTVLLKKNDLVIFNDTRVIKARIFGTKTTGGKVELLIERILNNHTATALIRTSKRIDIGLTIAIDCINSIKVISRNNNLFEIQLLGGSFYDLLEKHGHVPLPPYIERNDEDEDEIRYQTVFAKEAGAVAAPTAGLHFSEQDLRGMDKKGIAMAFITLHVGSGTFQPIKTEDINQHTMHQEIYNIPKSIIKKIAETKAKNGRIVAIGTTVLRALESAYEEDIIKTGYNETDIFIKPGFNFKVVDALFTNFHLPKSTLLMLVSAFAGSKFIKAIYRHAVDNKYRFFSYGDAMFIEQKVKNQDEQV

SEQ ID NO: 68933 - protein, 346 aa, Methylophilus medardicus
  misc_feature (1)..(346): tr|A0A5B8CUL4|A0A5B8CUL4_9PROT S-adenosylmethionine:tRN A ribosyltransferase-isomerase OS=Methylophilus medardi cus OX=2588534 GN=queA PE=3 SV=1
MKTLDFDFYLPPHLIAQHPLPNRSESRLLEVNALTQSIRNHHFREIAAHFEAGDVLVLNDTKVIKARLFGQKATGGHIEVMIDRVLSPQEAYAQIKSSRSPKAGSLLHLSAGYQAEVLGRHADMFHIQLLGEASWYDFLEQYGQLPLPPYIEHTADAADDTRYQTVFAKHAGAVAAPTAGLHFDEALLQALIDKGVHVRYVTLHVGAGTFQPVKVDDIADHHMHSEVYHLPADTIQTILEARANGKRVTAVGTTSLRTLESAAHVGKLFAHHGDTNIFITPGFEFKLVDRLITNFHLPKSTLMMLVSAFGGYDLMREAYAHAIEEAYRFFSYGDAMLITRAPSPKG

SEQ ID NO: 68934 - protein, 346 aa, Methylophilus methylotrophus
  misc_feature (1)..(346): tr|A0A5C7WL48|A0A5C7WL48_METME S-adenosylmethionine:tRN A ribosyltransferase-isomerase OS=Methylophilus methylo trophus OX=17 GN=queA PE=3 SV=1
MRTLDFDFYLPPHLIAQHPLPNRSESRLLEVNAANNTIQDNYFRQIADHFEAGDVLVLNDTKVIKARLFGQKATGGQIEVMIDRVLSSDEAYAQIKSSRSPKAGGLLHLAGDMQAEVLGRVADMFHIRLLGEQSWYDFLEQYGQLPLPPYIEHTADETDDSRYQTVFAKHAGAVAAPTAGLHFDEALLQSLVDKGVHVRYVTLHVGAGTFQPVKVDNIAEHHMHSEVYHLPEETISTILAAQAEGKRVTAVGTTSLRTLESAAHAGKLFAHHGDTDIFITPGFEFKLVDRLITNFHLPKSTLMMLVSAFGGYDLMREAYAHAIAQSYRFFSYGDAMLITRNQSAKR

SEQ ID NO: 68935 - protein, 345 aa, Methylophilus rhizosphaerae
  misc_feature (1)..(345): tr|A0A1G9D5P3|A0A1G9D5P3_9PROT S-adenosylmethionine:tRN A ribosyltransferase-isomerase OS=Methylophilus rhizosp haerae OX=492660 GN=queA PE=3 SV=1
MRTLDFDFYLPPDLIAQHPLPHRSESRLLEVNATNHSIQDSFFRQIGDHFEAGDVLVLNDTKVIKARLFGQKATGGQIEVMIDRVLNAQEAYAQIKSSRSPKAGGLLHLPGDYQAEVLGRHMDMFHIRLLGNESWYDFLERYGQLPLPPYIEHTADTTDSTRYQTVFARHEGAVAAPTAGLHFDEALLQSLIAKGVQVHYVTLHVGAGTFQPVKVDNIAEHHMHSEVYHLPEQTIDAILEARANGKRVTAVGTTSLRTLESAAHAGKLFAHHGETDIFITPGFEFKLVDRLITNFHLPKSTLMMLVSAFGGYDLMRQAYAHAIKQSYRFFSYGDAMLITRAVSKK

SEQ ID NO: 68936 - protein, 346 aa, Methylophilus sp.
  misc_feature (1)..(346): tr|A0A3D5D151|A0A3D5D151_9PROT S-adenosylmethionine:tRN A ribosyltransferase-isomerase OS=Methylophilus sp. OX= 29541 GN=queA PE=3 SV=1
MKTLDFDFYLPAHLIAQHPLPNRSESRLLEVNAIQQTIQDSYFRQIADHFEAGDVLVLNDTKVIKARLFGQKATGGQIEVMIDRVLSEQEAYAQIKSSRSPKAGSLLHLSGDYQAEVLGRHADMFHIRLLGNESWYDFLEQYGQLPLPPYIEHKADAADDTRYQTVFAKHAGAVAAPTAGLHFDEALLQALINKGVHVRYVTLHVGAGTFQPVKVDNIAEHHMHSEVYHLPEETISTILNARASGKRVTAVGTTSLRTLESAAHVGKLFAHHGDTNIFITPGFEFKLVDRLITNFHLPKSTLMMLVSAFGGYDLMRKAYAHAIDQSYRFFSYGDAMLITRVQSAKS

SEQ ID NO: 68937 - protein, 348 aa, Methylophilus sp.
  misc_feature (1)..(348): tr|A0A0Q6B9I7|A0A0Q6B9I7_9PROT S-adenosylmethionine:tRN A ribosyltransferase-isomerase OS=Methylophilus sp. Lea f416 OX=1736373 GN=queA PE=3 SV=1
MRTLDFDFHLPQHLIAQHPLPNRTQSRLLEVDAIANTIRDNFFRQISDYFEAGDVLVLNDTKVIKARLFGQKATGGNIEVMIDRVLNTQEAYAQIKASRSPKAGSLLHLANGYQAEVLGRHADMFHIRLLGNESWYDFLEQHGQLPLPPYIEHAADTADDTRYQTVFAKHEGAVAAPTAGLHFDDEMLSALSNKGVHVCYVTLHVGAGTFQPVKVENIAEHHMHSEIYHLPEETIAAILQAREAGKRVTAVGTTSLRTLESAARADKLFAHHGETDIFITPGFEFQLVDRLITNFHLPKSTLMMLVSAFGGYDLLRRAYTHAIQESYRFFSYGDAMLITRAPHNKKKR

SEQ ID NO: 68938 - protein, 369 aa, Methylopila sp.
  misc_feature (1)..(369): tr|A0A2H6BFI6|A0A2H6BFI6_9RHIZ S-adenosylmethionine:tRN A ribosyltransferase-isomerase OS=Methylopila sp. Yamag uchi OX=1437817 GN=queA PE=3 SV=1
MDVSLFDFDLPEELIALRPASPRDSARLLVVRPGGTPELEDRLISDLPDLLAPGDALVVNATRVIPARLRAVRLRGESAARVELLLHQRVDGARWKAFARPAKKLLPGERVVVGSEGGACLLRELAATVEARGEGGEVTLAFDLSGPDLDLAIARAGEMPLPPYIEGKRATDARDGEDYQTLFAREPGAVAAPTAGLHFTPRLVEALDRRGVSRHETVLHVGAGTFLPVKVEDTDDHRMHFENGVLEAETAAALNAARAAGGRLVAVGTTSTRLLESAVGLDGRLSAFDGATDIFITPGVPFRAVDALLTNFHLPRSTLMMLIAAFAGLDVVKRAYAHAIAERYRFYSYGDACLFFNSSPAAINSGGEL

SEQ ID NO: 68939 - protein, 343 aa, Methyloprofundus sedimenti
  misc_feature (1)..(343): tr|A0A1V8M670|A0A1V8M670_9GAMM S-adenosylmethionine:tRN A ribosyltransferase-isomerase OS=Methyloprofundus sedi menti OX=1420851 GN=queA PE=3 SV=1
MKKSDFYYELPDELIAQQPLPERSASRLLYLHKDSDAIEDKQFIDLLALLNKDDLLVLNNTKVIPARLFGHKQSGGKVEILLERVLNEREVLAHMRSSKSPKAGALIELDAGFQCQVLGRVDDLFHLQFKGEQLLADILDRIGHMPLPPYIERADNISDQTRYQTVFAQQSGAVAAPTAGLHFDAAMMAKIQAKGIAIAFVTLHVASGTFRPVKVENLADHVMHKEYFEVPEQTVVAVEKAKKRGGRVIAIGTTAMRSLESASRSGQLASACGDTDLFITPGYQFKTVDAMLTNFHLPESTLLMLVSAFAGYERIKKVYQHAIAAKYRFFSYGDAMFIQRASL

SEQ ID NO: 68940 - protein, 368 aa, Methylorubrum extorquens
  misc_feature (1)..(368): tr|H1KMJ4|H1KMJ4_METEX S-adenosylmethionine:tRNA ribosy ltransferase-isomerase OS=Methylorubrum extorquens DSM 13060 OX=882800 GN=queA PE=3 SV=1
MRVDLFDFELPEAAIALRPASPRDASRLLVVRPGDPLADRGVRDLPALLSPGDALVFNDTRVIPARLSGIRHRAGGSGQRCEAMLHLREAPDRWRAFARPAKRLAPGDRIRFGSEGASEVCALSGLDATVEERGEGGEILLRFDLSGPALDEAIAGLGALPLPPYIAGKRATDAQDTTDYQTVYAREPGAVAAPTAGLHFSDALLAGIDAAGIERVHVTLHVGAGTFLPVKADDTDAHRMHAEIGILDAATAARLNAVRARGNRVVAVGTTALRLLESAADPDGTIRPFSGATDIFITPGYRFRAVDALVTNFHLPRSTLFMLVSAFAGLDTMRAAYAHAIQSGYRFYSYGDASLLFPEGAPVSESIT

SEQ ID NO: 68941 - protein, 368 aa, Methylorubrum extorquens
  misc_feature (1)..(368): sp|A9VX03|QUEA_METEP S-adenosylmethionine:tRNA ribosylt ransferase-isomerase OS=Methylorubrum extorquens (strai n PA1) OX=419610 GN=queA PE=3 SV=1
MRVDLFDFELPEAAIALRPASPRDASRLLVVRPGDPLADRGVRDLPALLSPGDALVFNDTRVIPARLSGIRHRAGGSGQRCEAMLHLREAPDRWRAFARPAKRLAPGDRIRFGSEGASEVCALSGLDATVEERGEGGEILLRFDLSGPALDEAIAGLGALPLPPYIAGKRPTDAQDTTDYQTVYAREPGAVAAPTAGLHFSDALLAGIDAAGIERVHVTLHVGAGTFLPVKADDTEAHRMHAEIGILDAATAARLNAVRARGNRVVAVGTTALRLLESAADPDGTIRPFSGATDIFITPGYRFRAVDALVTNFHLPRSTLFMLVSAFAGLDTMRAAYAHAIQSGYRFYSYGDASLLFPEGAPVSESIT

SEQ ID NO: 68942 - protein, 366 aa, Methylorubrum populi
  misc_feature (1)..(366): tr|A0A177J0M7|A0A177J0M7_9RHIZ S-adenosylmethionine:tRN A ribosyltransferase-isomerase OS=Methylorubrum populi OX=223967 GN=queA PE=3 SV=1
MRVDLFDFELPEAAIALRPASPRDASRLLVVRPGETLADRGVRDLPALLNPGDALVFNDTRVIPARLSGIRHRAGGTGQRCEAMLHLREAPDRWRAFARPAKRLAPGDRIRFGGEGANQGASEVCVLSGLDATVEERGEGGEILLRFDLAGPALDEAIAGLGALPLPPYIAGKRATDARDTTDYQTVYAREPGAVAAPTAGLHFSDALLDGIDAAGIERIHVTLHVGAGTFLPVKADDTEAHRMHAEIGILDTATAERLNAVRARGNRIVAVGTTALRLLESATDPDGTVRPFSGATDIFITPGYRFRAVDALVTNFHLPRSTLFMLVSAFSGLDTMRAAYAHAIASGYRFYSYGDASLLFPERAP

SEQ ID NO: 68943 - protein, 366 aa, Methylorubrum populi; identical to SEQ ID NO: 68942
  misc_feature (1)..(366): sp|B1ZIL2|QUEA_METPB S-adenosylmethionine:tRNA ribosylt ransferase-isomerase OS=Methylorubrum populi (strain AT CC BAA-705 / NCIMB 13946 / BJ001) OX=441620 GN=queA PE= 3 SV=1

SEQ ID NO: 68944 - protein, 388 aa, Methylorubrum salsuginis
  misc_feature (1)..(388): tr|A0A1I4D1P3|A0A1I4D1P3_9RHIZ S-adenosylmethionine:tRN A ribosyltransferase-isomerase OS=Methylorubrum salsugi nis OX=414703 GN=queA PE=3 SV=1
MRLAPDRGNPHLPPGPIRGKARFMRVDLFDFDLPEALIALRPASPRDASRLLVVRPGETPLDRGVRDLPGLLSPGDVLVFNDTRVIPARLAGIRHRPGGTGQRCEAMLHLREAPDCWRAFARPAKRLTVGDRIRFGPEGEGAGEVCVMTGLEATVEAKGEGGEVSLRFDLAGPALDEAIMTQGALPLPPYIAGKRATDAQDATDYQTVYAREPGAVAAPTAGLHFSDSLLDAIDLAGIGRAHVTLHVGAGTFLPVKADDTADHRMHAEIGTLDAATAERLNATRSNGGRVVAVGTTALRLLESAADPDGTIRPFAGATDIFITPGYRFRAVDALVTNFHLPRSTLFMLVSAFSGLDTMRAAYAHAIAQGYRFYSYGDASLLFPAPPAP

SEQ ID NO: 68945 - protein, 373 aa, Methylorubrum sp.
  misc_feature (1)..(373): tr|A0A4Z0E4L5|A0A4Z0E4L5_9RHIZ S-adenosylmethionine:tRN A ribosyltransferase-isomerase OS=Methylorubrum sp. Q1 OX=2562453 GN=queA PE=3 SV=1
MRVDLFDFELPEAAIALRPASPRDASRLLVVRPGDPLADRGMRDLPALLSPGDALVFNDTRVIPARLSGIRHRAGGSGQRCEAMLHLREAPDRWRAFARPAKRLAPGDRIRFGSEGASPSASEVCALSGLDATVEERGEGGEILLRFDLSGPALDAAIAGLGALPLPPYIAGKRATDAQDTTDYQTVYAREPGAVAAPTAGLHFSDALLAGIDAAGIERVHVTLHVGAGTFLPVKADDTDAHRMHAEIGILDAAAAARLNAVRARGNRVVAVGTTALRLLESAADPDGTIRPFSGATDIFITPGYRFRAVDALVTNFHLPRSTLFMLVSAFAGLDTMRAAYAHAIQSGYRFYSYGDASLLFPEGARFRSPSHE

SEQ ID NO: 68946 - protein, 368 aa, Methylorubrum zatmanii
  misc_feature (1)..(368): tr|A0A1W6RPD8|A0A1W6RPD8_9RHIZ S-adenosylmethionine:tRN A ribosyltransferase-isomerase OS=Methylorubrum zatmani i OX=29429 GN=queA PE=3 SV=1
MRVDLFDFELPEAAIALRPASPRDASRLLVVRPGDPLADRGVRDLPALLSPGDALVFNDTRVIPARLSGIRHRAGGSGQRCEAMLHLREAPDRWRAFARPAKRLAPGDRIRFGSEGASEVCALSGLDATVEERGEGGEILLRFDLSGPALDEAIAGLGALPLPPYIAGKRPTDAQDTTDYQTVYAREPGAVAAPTAGLHFSDALLAGIDAAGIERVHVTLHVGAGTFLPVKADDTDAHRMHAEIGILDAATAARLNAVRARGNRVVAVGTTALRLLESAADTDGTIRPFSGATDIFITPGYRFRAVDALVTNFHLPRSTLFMLVSAFAGLDTMRAAYAHAIQSGYRFYSYGDASLLFPEGAPVSESIT

SEQ ID NO: 68947 - protein, 350 aa, Methylosinus sp.
  misc_feature (1)..(350): tr|A0A177PNV8|A0A177PNV8_9RHIZ S-adenosylmethionine:tRN A ribosyltransferase-isomerase OS=Methylosinus sp. R-45 379 OX=980563 GN=queA PE=3 SV=1
MRVDLFDFELPRDRIALRPAEPRDSARLLVVPPDGAFLERSIRDLTDFLAPGDALVVNDTRVIHARLSGFRARGETRAHIEATLIERVAADRWRALVKPAKKLAIGETVCFGADGALAATALEKGENGEILLGFSLAGAALDEAVEAAGVMPLPPYIAGQRAADARDETDYQTLFAANAGAVAAPTAGLHFTPRLVEELQAKGVSLHRVTLHVGAGTFLPVKVEDTAEHKMHSEWGALDAATAQALNETRARGGRIIAVGTTALRVLESAAREDGTLAEFASDTAIFITPGYRFRAVDALLTNFHLPRSTLFMLVCAFAGLERMRAAYAHAIASGYRFYSYGDACLLLRK

SEQ ID NO: 68948 - protein, 348 aa, Methylosinus sp.
  misc_feature (1)..(348): tr|A0A1A6FQ68|A0A1A6FQ68_9RHIZ S-adenosylmethionine:tRN A ribosyltransferase-isomerase OS=Methylosinus sp. 3S-1 OX=1849840 GN=queA PE=3 SV=1
MRVELFDFELPQEAIALRPASPRDSARLLVVPPDGHFSDRSVSDLPQLLAPGDALVVNDTQVIHARLSGFRARGESRAHIDATLIERVGADRWRALVRPAKKLGVGESVRFAEGLEARVVEKGENGEILFAFSLAGSALDAAVEASGVMPLPPYIAGKRAADARDEADYQTLFAARAGAVAAPTAGLHFTPRLVDALTARGVSLHSVTLHVGAGTFLPVKAEDTAEHRMHAEWGAIDAATADALNETRARGGRIVAVGTTALRVLESAAGADGRISPFADRTAIFITPGYRFRAVDALLTNFHLPRSTLFMLVSAFSGLERMKAAYAHAIGSGYRFYSYGDACLLERS

SEQ ID NO: 68949 - protein, 350 aa, Methylosinus sporium
  misc_feature (1)..(350): tr|A0A549T1H7|A0A549T1H7_METSR S-adenosylmethionine:tRN A ribosyltransferase-isomerase OS=Methylosinus sporium OX=428 GN=queA PE=3 SV=1
MRVDLFDFELPRERIALRPAEPRDSARLLVVPPDGAFLERSIRDLTDFLAPGDALVVNDTRVIHARLSGFRARGETRAHIEATLIERVAADRWRALVKPAKKLALGETVRFGADGALAATALEKGENGEILLGFSLAGAALDEAVEAAGVMPLPPYIAGQRAADARDETDYQTLFAANAGAVAAPTAGLHFTPRLVEMLQAKGVSLHRVTLHVGAGTFLPVKVEDTAEHKMHSEWGHIDAATAQALNETRARGGRIVAVGTTALRVLESAAHADGTLAEFASETAIFITPGYRFRAVDALLTNFHLPRSTLFMLVCAFAGLERMKAAYAHAIASGYRFYSYGDACLLLRK

SEQ ID NO: 68950 - protein, 350 aa, Methylosinus sporium
  misc_feature (1)..(350): tr|A0A2U1SNM6|A0A2U1SNM6_METSR S-adenosylmethionine:tRN A ribosyltransferase-isomerase OS=Methylosinus sporium OX=428 GN=queA PE=3 SV=1
MRVDLFDFELPRDRIALRPAEPRDSARLLVSPPDGDFLDRSIRDLPDFLAPGDALVVNDTRVIHARLSGFRARGETRAHIEATLIERVAANRWRALVKPAKKLAIGETVRFGADGVLAATALEKGESGEILLGFSLAGAALDEAVEAAGVMPLPPYIAGQRAADARDETDYQTLFAANAGAVAAPTAGLHFTPRLVEELQAKGVSLHRVTLHVGAGTFLPVKVEDTAEHKMHSEWGALDAATAQALNETRARGGRVVAVGTTALRVLESAAREDGTLAEFASETAIFITPGYRFRAVDVLLTNFHLPRSTLFMLVCAFAGLERMKAAYAHAIAFGYRFYSYGDACLLLRK

SEQ ID NO: 68951 - protein, 371 aa, Methylosinus trichosporium
  misc_feature (1)..(371): tr|A0A2D2CVI9|A0A2D2CVI9_METTR S-adenosylmethionine:tRN A ribosyltransferase-isomerase OS=Methylosinus trichosp orium OB3b OX=595536 GN=queA PE=3 SV=1
MRSRSLLPLAGEGVALNDSSQSVMRVELFDFELPQEAIALRPASPRDSARLLVVPPDGHFSDRSVSDLPQLLAPGDALVVNDTQVIHARLSGFRARGESRAHIDATLIERVGADRWRALVRPAKKLGVGESVRFAEGLEARVVEKGENGEILFAFSLAGSALDAAVEASGVMPLPPYIAGKRAADARDEADYQTLFAARAGAVAAPTAGLHFTPRLVDALTARGVSLHSVTLHVGAGTFLPVKAEDTAEHRMHAEWGAIDAATADALNETRARGGRIVAVGTTALRVLESAAGADGRISPFADRTAIFITPGYRFRAVDALLTNFHLPRSTLFMLVSAFSGLERMKAAYAHAIGSGYRFYSYGDACLLERS

SEQ ID NO: 68952 - protein, 347 aa, Methylotenera mobilis
  misc_feature (1)..(347): tr|C6WTW9|C6WTW9_METML S-adenosylmethionine:tRNA ribosy ltransferase-isomerase OS=Methylotenera mobilis (strain JLW8 / ATCC BAA-1282 / DSM 17540) OX=583345 GN=queA PE =3 SV=1
MSHMKTQDFDFYLPSSLIAQHPSSERTASRMLYLNSTASKLTDKQFLDFPDFFKAGDLLIFNDTRVIKARLFGNKHSGGNVEVLIERVINQNTAYAHVRASRSPKVGSRITLSDAFDVEVTARHDDLFELRFLSEDSVFELLEQHGALPLPPYITHGATDHDEERYQTVYAKHLGAVAAPTAGLHFNTEILEQLKAKGVNIAYVTLHVGAGTFQPVRVDSVADHKMHSELFHVPTETVALIEATKANGGIVTAIGTTAMRALESAARNGTLAAGEGDTDIFITPGYRFNVVDRLLTNFHLPKSTLLMLVSAFAGTDNIRKAYAHAVAGEYRFFSYGDAMLIEKLPLA

SEQ ID NO: 68953 - protein, 345 aa, Methylotenera mobilis
  misc_feature (1)..(345): tr|A0A351RAF2|A0A351RAF2_9PROT S-adenosylmethionine:tRN A ribosyltransferase-isomerase OS=Methylotenera mobilis OX=359408 GN=queA PE=3 SV=1
MKTQDFDFYLPSSLIAQHPSTERTASRMLYLNSATSELTDKQFLDFPDFFNAGDLLIFNDTRVIKARLFGHKHSGGNVEVLIERVINQNTAYAHVRASRAPKIGSRITLSEAFDVEVTARHDDLFELHFLSDVSVFDLLEQHGALPLPPYITHSATNHDEERYQTVYAKHLGAVAAPTAGLHFSTEILEQLKAKGVNIAYVTLHVGAGTFQPVRVDDVADHKMHSELFHVPQETVALIEATKANGGIVTAIGTTAMRALESAARSGTLAAGEGDTDIFITPGYRFNVVDRLLTNFHLPKSTLLMLVSAFAGTDNIKKAYAHAVDNQYRFFSYGDAMLIEKLDPKL

SEQ ID NO: 68954 - protein, 343 aa, Methylotenera sp.
  misc_feature (1)..(343): tr|A0A1G1B333|A0A1G1B333_9PROT S-adenosylmethionine:tRN A ribosyltransferase-isomerase OS=Methylotenera sp. RIF CSPLOWO2_02_FULL_45_14 OX=1801615 GN=queA PE=3 SV=1
MRTLDFDFYLPEHLIAQHPTSERTASRMLHVNGTNGNLTDEAFSDFTNFLNAGDLLVFNDTRVIKARLFGHKETGGNVEVLIERIINQHVVYAHVRASRSPKVGSRINLANAFDVEVTARHDDLFELHFLSNSTVLELLEAHGALPLPPYITHDATTQDEERYQTVYSKHLGAIAAPTAGLHFDDTMLDKIRQMGVGIAYVTLHVGAGTFQPVRVDNIHDHQMHSELYNIPQATVDIITKTKNQGRKVMAIGTTAMRALESAAANGPLQAGDGETRIFITPGYTFKVVDRLFTNFHLPKSTLLMLVSAFGGVENIKQAYAHAIKRQYRFFSYGDAMLIEKQPD

SEQ ID NO: 68955 - protein, 354 aa, Methylotenera sp.
  misc_feature (1)..(354): tr|A0A2S5R565|A0A2S5R565_9PROT S-adenosylmethionine:tRN A ribosyltransferase-isomerase OS=Methylotenera sp. OX= 2051956 GN=queA PE=3 SV=1
MRTQDFDFYLPEALIAQHPTSSRNASKLLYVDGQSGILSDKLFIDFASLLRAGDLLIFNDTRVIKARLFGTKATGGQVEVLVERVLDSHHVLAHIRASRAPKAGSTLRLADAFDAQIVGRDDDLFHVHFLGDITVLDLLERYGALPLPAYITHDAGVQDDERYQTVYAKHAGAVAAPTAGLHFDETVLRALTAKGVKIAYITLHVGAGTFQPVRVDNIKDHKMHSEIYHISAETVTAINNAKQAGRNIIAVGTTSLRALESAAQKALSESKADALIAAGSGETSIFITPGFDFKIVDKLLTNFHLPKSTLLMLVSAFAGFDAIKQAYAHAIQKEYRFFSYGDAMFLEKSSHIKK

SEQ ID NO: 68956 - protein, 350 aa, Methylotenera versatilis
  misc_feature (1)..(350): tr|D7DLW2|D7DLW2_METV0 S-adenosylmethionine:tRNA ribosy ltransferase-isomerase OS=Methylotenera versatilis (str ain 301) OX=666681 GN=queA PE=3 SV=1
MRTEDFNFYLPDALIAQHPTAERTASRMLHLNSSKGELADNMFINLPEHLQAGDLLVFNDTRVIKARLFGVKHTGGSVEVMIERVINQHTAYAQIRASRAPKVGTRLTLSNAFDVEVTARHDDLFELLFLSETSVLDLLEQHGALPLPPYITHSATSDDEERYQTVFSKHLGAVAAPTAGLHFNDAMLDTLKQKGINIAYVTLHVGAGTFQPVRVDNINEHKMHSELYSISQATIDMINATKTNGAKVTAIGTTALRALESAARVTEFNTNGNLQAGNGDTDIFITPGYQFKVVDRLFTNFHLPKSTLLMLVSAFAGMDNIKKAYEHAINEHYRFFSYGDAMLIEKHPAA

SEQ ID NO: 68957 - protein, 343 aa, Methylothermaceae bacteria
  misc_feature (1)..(343): tr|A0A148N6M8|A0A148N6M8_9GAMM S-adenosylmethionine:tRN A ribosyltransferase-isomerase OS=Methylothermaceae bac teria B42 OX=1798802 GN=queA PE=3 SV=1
MRKSDFNYPLPSRLIAQVPLAERSASRLLVLNGGSGLIEDKKFTDIVDLIDPRDLLVFNDTKVIPARLYGRKQTGGKVEILLERVLANGRAWAQIRASKSPRPGSGIELDKGYRCSVVERNKDLFLLQFEAINDLYCVLQEIGHIPLPPYIDRPDSAQDHQRYQTVFARQPGAVAAPTAGLHFDFHLMARLKKKGVAMTYVTLHVGAGTFQPLRVENLEEHEMHQEWFEIGEGAAAEISQARSRGGRIIAVGTTVVRTLESACQQGELKPGRGATRLFIRPGYPFRCVDAMITNFHLPESTLLMLVCAFAGYEQVMSAYYHAVDKEYRFFSYGDAMYVTRRVV

SEQ ID NO: 68958 - protein, 112 aa, Methyloversatilis sp.
  misc_feature (1)..(112): tr|A0A257X4C0|A0A257X4C0_9PROT S-adenosylmethionine:tRN A ribosyltransferase-isomerase (Fragment) OS=Methylover satilis sp. 12-65-5 OX=1970398 GN=B7Z51_07445 PE=3 SV=1
MLTLSDFDYDLPDDLIAQAPLPERSASRLLVVGPTTLTDSRIRELSRWLAAGDLLVFNDTRVMHARLFGMKDSGGRIEVLIERLTGQHEALAQVRASKTPRAGSRLRMEDAF

SEQ ID NO: 68959 - protein, 354 aa, Methyloversatilis sp.
  misc_feature (1)..(354): tr|A0A1B3LJN8|A0A1B3LJN8_9PROT S-adenosylmethionine:tRN A ribosyltransferase-isomerase OS=Methyloversatilis sp. RAC08 OX=1842540 GN=queA PE=3 SV=1
MPHSVLTLSDFDYDLPDDLIAQAPLPERSASRLLVVGTTSLTDSSIRALPQWLEPDDLLVFNDTRVMHARLYGTKSSGGRIEVLIERLTGEHEALAQVRASKTPRAGSRLRMEDAFDFEVLGRDGEFFRLRSTDAAPLAALLERHGRLPLPPYIERAAADADEQRYQTVYARQTGSVAAPTAGLHFDDALLEAVAARGVRQAHVTLHVGAGTFQPVRTDNLAEHRMHSEQFQLPVDTAQAIADTKASGGRVIAVGTTSLRCLESAAATCAPDPLAACQGDTRLFITPGYDFRVIDGLLTNFHLPKSTLLMLVSALAGQQRVRAAYAHAVAQRYRFFSYGDAMFIPARMKDHDEV

SEQ ID NO: 68960 - protein, 350 aa, Methyloversatilis universalis
  misc_feature (1)..(350): tr|F5R7G0|F5R7G0_METUF S-adenosylmethionine:tRNA ribosy ltransferase-isomerase OS=Methyloversatilis universalis (strain ATCC BAA-1314 / JCM 13912 / FAM5) OX=1000565 G N=queA PE=3 SV=1
MLTLSDFDYTLPDELIAQAPLPERSASRLLVLGERAPTDAHIRDLPQWLNPGDLLVFNDTRVMHARLYGRKDSGGQVEVLVERLTGEREALAQVRASKTPRPGSRLTLEDAFEVEVLGREGEFFMLRSLSDAPLLDLLERHGRLPLPPYIDRAAVEADENRYQTVFARETGSVAAPTAGLHFDEALLAAVEARGVRTARVTLHVGAGTFQPVRVENLAEHHMHSERFQLSADTAQAIADTRAAGGRVIAIGTTSLRCLESAAAACGDGPLTACSGDTRLFITPGYAFRVIDGLLTNFHLPKSTLLMLVSALAGRRRMFDAYAHAIAQRYRFFSYGDAMFIPARMKDDDEV

SEQ ID NO: 68961 - protein, 354 aa, Methylovirgula ligni
  misc_feature (1)..(354): tr|A0A3D9YZL0|A0A3D9YZL0_9RHIZ S-adenosylmethionine:tRN A ribosyltransferase-isomerase OS=Methylovirgula ligni OX=569860 GN=queA PE=3 SV=1
MRVDLFDFDLPPERIALRPIIPRDAARMLVVAPASPEPLQDRTIRDLPDFLRPGDILVVNNTRVIPARLEGVRTRGVNKAKIEVLLHRRVSDDTWRAFAKGAKKLQRGDTIAFQRGDTIVATEVLENFGEGEVMLAFPLGGADLDRAIEALGAMPLPLYIAGKRPADAQDSDDYQSLFAVHRGAVAAPTASLHFTPALKTAIAARGVEIAQITLHVGAGTFLPVKADDTQAHRMHAEWGEIDAETAARLNAARAAGGRIVAVGTTSLRLLESAATAAGKIAPFSDETAIFITPGYRFKAVDLLLTNFHLPRSTLFMLVAAFSGLETMQAAYKHAIASDYRFYSYGDACLLHPAP

SEQ ID NO: 68962 - protein, 343 aa, Methylovirgula sp.
  misc_feature (1)..(343): tr|A0A371WQJ1|A0A371WQJ1_9RHIZ S-adenosylmethionine:tRN A ribosyltransferase-isomerase OS=Methylovirgula sp. 4M -Z18 OX=2293567 GN=DYH55_11325 PE=3 SV=1
MIAADQLERQTAKLLAISADGTTRHLQRTDLAALFRPGDLVVANDAATLPASLHGRHCATNEPIEIRLAGWICAGDPTRFIALAFGAGDCRMRTEDRAPPPPLSAGDRLALGPFIAIVEHLLDHPRLFELRFLGDRRTILAGLAHHGRPIQYAHVAERLVLWDVWTRIATEPFAFEPPSAGFSLNWHTLAAWQRRGVKFATLTHAAGISSTGDPVLDLRLPFDEPYRIPLRTAKAIARAKAAGGRIIAIGTTVVRALESAVETDGSICPGDGIAHGRIGRKTPLRVVDAILTGVHMPGESHFELLRAFADDKVLDRMSAELAKNGYQPHEFGDSVILERHLSA

SEQ ID NO: 68963 - protein, 356 aa, Methylovirgula sp.
  misc_feature (1)..(356): tr|A0A371WUS0|A0A371WUS0_9RHIZ S-adenosylmethionine:tRN A ribosyltransferase-isomerase OS=Methylovirgula sp. 4M -Z18 OX=2293567 GN=queA PE=3 SV=1
MRVDLFDFELPEDRIALRPMVPREAAKLLVVAPDGALSDHHVGDLPDFLRPGDALVVNDTRVLPARLYGIRRRGDAVARIEALLHKREGAHLWRAFVRPAKKLKVGERVQFGEDSNACFLGRLDAQVVEKTEGGEVLFAFDLSGGALDDAIVQAGHMPLPPYIASKRPDDAGDLADYQTMFARETGAVAAPTAGLHFTPELLARVEAKGVAVHRVTLHVGAGTFLPVKVDDTDAHQMHAEFGVVTPEVATALNAARANGARIVTIGTTSLRILESAASAAGEIRPFAGDTSIFITPGYRFRAVDILMTNFHLPRSTLFMLVSAFSGLETMKVAYAHAVANDYRFYSYGDACLLMRA

SEQ ID NO: 68964 - protein, 351 aa, Methylovorus glucosetrophus
  misc_feature (1)..(351): tr|C6X9X7|C6X9X7_METGS S-adenosylmethionine:tRNA ribosy ltransferase-isomerase OS=Methylovorus glucosetrophus ( strain SIP3-4) OX=582744 GN=queA PE=3 SV=1
MRTEDFDFFLPEELIAQFPAAERDGSRLLRLDGNSGAIADHQFRELPQFLNAGDVLIFNDTRVIKARLQGHKESGGSIELLIERPLDTHRALAHIRASRSPKPGSRIFIGDGIPARVIERQDDLFLIEVEHVTPLLDLLDQYGALPLPPYITHAADAEDDERYQTIYARTPGAVAAPTAGLHFNQVMLDRLQAAGIQIAYVTLHVGAGTFQPVRVDDISEHRMHSEIYTVPPATVDLINTARAAGHKITAVGTTALRALESAARSGALVAGSGETDIFITPGYRFQVVERLLTNFHLPKSTLMMLVSAFAGVEHIRAAYAHAIASRYRFFSYGDAMLLERRESINQAPTPG

SEQ ID NO: 68965 - protein, 342 aa, Methylovorus sp.
  misc_feature (1)..(342): tr|A0A1A9T0Q0|A0A1A9T0Q0_9PROT S-adenosylmethionine:tRN A ribosyltransferase-isomerase OS=Methylovorus sp. MM2 OX=1848038 GN=queA PE=3 SV=1
MRTSDFDFVLPEALIAQFPTNERSGSRLLKLDSKTGELSDHMFRELPAFLQAGDLLIFNDTRVIKARLTGQKSTGGAIEVLIERVIDDHRALAHIRASRSPKPGSKVLLAGDIEAEVTERQDDLFMLRFPDNTKILDFLEQYGALPLPPYITHTADNADEERYQTVYAKSLGAVAAPTAGLHFDTAMLEQLKNNGIRIAFVTLHVGAGTFQPVRVDEISEHKMHSELYSIPEETVALIKATQANGGKVTAIGTTALRALESAARTGELIAGVGETDIFITPGYQFQVVERLLTNFHLPKSTLMMLVSAFAGIENIRHAYAHAIAQQYRFFSYGDAMLLDRLD

SEQ ID NO: 68966 - protein, 338 aa, Methylovulum psychrotolerans
  misc_feature (1)..(338): tr|A0A1Z4BVP0|A0A1Z4BVP0_9GAMM S-adenosylmethionine:tRN A ribosyltransferase-isomerase OS=Methylovulum psychrot olerans OX=1704499 GN=queA PE=3 SV=1
MKKSDFYYDLPDALIAQHPLAERTASRLLCMGRGTGELCDRQFNDFIDLIHADDLLVFNDTRVIPARLWGHKASGGKVEILIERLLDEHHAIAHVRASKAPKPGTLVELPEGLACTVTGRDNDLFHLAFPQPILAVLAQIGHIPLPPYITRADDSGDYSRYQTVFAKTAGAVAAPTAGLHFDEALLDKLKAKGVRSAFVTLHVGSGTFQPVRVEDLAAHIMHKEYFSVTEETVTAVAQTRARGGRVVAVGTTAVRALESAARSGSLTASFGDTQLFITPGYTFKVVDALLTNFHLPESTLLMLVSAFAGYQPIMAAYRHAVAEGYRFFSYGDAMFLSR

SEQ ID NO: 68967 - protein, 338 aa, Methylovulum psychrotolerans
  misc_feature (1)..(338): tr|A0A2S5CN02|A0A2S5CN02_9GAMM S-adenosylmethionine:tRN A ribosyltransferase-isomerase OS=Methylovulum psychrot olerans OX=1704499 GN=queA PE=3 SV=1
MKKSDFYYDLPDALIAQHPLAERTASRLLCMGRDTGELCDRQFNDFIDLIHADDLLVFNDTRVIPARLWGHKASGGKVEILIERLLDEHHAIAHVRASKAPKPGTLVELPEGLACTVTGRDNDLFHLAFPQPILAVLAQIGHIPLPPYITRADDSGDYSRYQTVFAKTAGAVAAPTAGLHFDEALLDKLKAKGVRSAFVTLHVGSGTFQPVRVEDLAAHIMHKEYFSVTEETVTAVAQTHARGGRVVAVGTTAVRALESAARSGSLTASFGDTQLFITPGYTFKVVDALLTNFHLPESTLLMLVSAFAGYQPIMAAYRHAVAEGYRFFSYGDAMFLSR

SEQ ID NO: 68968 - protein, 340 aa, Methylovulum sp.
  misc_feature (1)..(340): tr|A0A522DSA3|A0A522DSA3_9GAMM S-adenosylmethionine:tRN A ribosyltransferase-isomerase OS=Methylovulum sp. OX=1 916980 GN=queA PE=3 SV=1
MKKSDFNYLLPDILIAQKPLPERDASRLLHMNRDTGELSDKQFINFINLIDKRDVLVFNDTKVIPARLYGKKQSGGKIEILIERIQDDHHALAHVRASKAPKAGALIELDGGFCCEILGRAGDLFELEFKNVCSLWQLLQQVGHIPLPPYITRADDESDLTRYQTVFARASGAVAAPTAGLHFDLAMLEKIKAKGVETAFVTLHVGSGTFQPVRVENLAEHLMHKEYFAVPPATVAAAHRARARGGRVIAIGTTAVRALESASKSGVLEAGFGDTDLFITPGYQFKSVDAMLTNFHLPESTLLMLVSAFAGYEPVMNAYRYAIAESYRFFSYGDAMFLSD

SEQ ID NO: 68969 - protein, 356 aa, Micavibrio sp.
  misc_feature (1)..(356): tr|A0A1Z8KRB9|A0A1Z8KRB9_9PROT S-adenosylmethionine:tRN A ribosyltransferase-isomerase OS=Micavibrio sp. TMED2 OX=1986633 GN=queA PE=3 SV=1
MDISLFDYPLPARLIADRPAEPRESAKLLDLTSGEPVDRTINDLPDILTPGTILVVNNTRVLPARLTGRRIAADGDGTPGGVIEVTLHQLVSNGDDTIWHVFAKPGKRIRPGDRIRFANDFEALVDAKHENGQVTLRFQMPFDMLRDQLDIHGVMPLPPYIKRDKGGDDQDKQDYQTVFAKREGAVAAPTASLHFTDDLLTRLAARGITTVQVTLHVGAGTFLPVKTEDVTEHQMHEEWGEVTPETADLLNQAKADGRPVIAVGTTALRILETAAAATGSIQPFAGATDLYILPGYRFNFVDRLLTNFHLPRSTLLMLVSALAGRERMLHAYHHAIAHDYRFFSYGDACLLAAMPD

SEQ ID NO: 68970 - protein, 142 aa, Microbacterium sp.
  misc_feature (1)..(142): tr|A0A074TWJ6|A0A074TWJ6_9MICO S-adenosylmethionine:tRN A ribosyltransferase-isomerase (Fragment) OS=Microbacte rium sp. SUBG005 OX=1504156 GN=HR12_18170 PE=3 SV=1
MRVADFSFELPESLIAHYPMPERSSCRLLSLDGPTGALTHGTFTDLLDKLNPGDLLVFNNTRVIPARLFGRKASGGKIEVLVERMLDDKRILAHIRASKAPKPGAELLLGDDESIKATMTARHDALFEVEFNDERTVLDILN

SEQ ID NO: 68971 - protein, 341 aa, Microbacterium sp.
  misc_feature (1)..(341): tr|A0A542GXH2|A0A542GXH2_9BACI S-adenosylmethionine:tRN A ribosyltransferase-isomerase OS=Microbacterium sp. SL BN-1 OX=1489561 GN=queA PE=3 SV=1
MKVEDFDFHLPEELIAQTPLENRSESRLMVLDKEDGSIDHLRFKNIVDLLDEGDCLVLNDTRVLPARLFGQKEETGANIEVLLLKQEEGDQWETLVKPAKRVKVGTEVVFGDGKLKATCVGTKDHGGRIMEFAYEGIFYEVLEELGEMPLPPYIRERLEEQDRYQTVYAKERGSAAAPTAGLHFTEELLEELKQKGVHIAFITLHVGLGTFRPVSVDSIEDHDMHSEFYQISEGTARLLNDVRDKGGRIITVGTTSTRTLETIASKHDRFVEENGWTNIFIYPGYEFKGIDGLITNFHLPKSTLIMLVSAFAGQEHVLEAYETAVQEKYRFFSFGDAMFLK

SEQ ID NO: 68972 - protein, 381 aa, Microbispora bryophytorum
  misc_feature (1)..(381): tr|A0A544XZ81|A0A544XZ81_9ACTN S-adenosylmethionine:tRN A ribosyltransferase-isomerase OS=Microbispora bryophyt orum OX=1460882 GN=FLX07_01720 PE=3 SV=1
MTARNPHTAVPPRTEPPAKTAPGRADGVDATPAGVRPYGAGESFEFALAAPLEAHEPPEARGLRRDEVRLLVSRRDTGEVTGEVTHHVFADLPSLLSPGDLLVVNNSATLPAAVRLDRLAVHFSGRLASGEWLVELRRRTATATEPYSGVAPGEWLPLPGGATLRLPAQETPRLWRAHLDRDVLSYLAVHGVPIRYGHVRRDWPLADYQTVFGVEPGSAEMPSAGRPFTPELVTDLVRRGIGVAPITLHTGVASPEKDEPPYPEWFSVSPWTARLVNITREHGGRVIAVGTTVVRALETAALDAPAPGTVRATSGWTSHVVTPAEGVRAVDGLVTGLHEPRSSHLMMLSSITGTGVLARAYEAALEEGYLWHEFGDSHLIL

SEQ ID NO: 68973 - protein, 350 aa, Microbispora hainanensis
  misc_feature (1)..(350): tr|A0A544Z5H2|A0A544Z5H2_9ACTN S-adenosylmethionine:tRN A ribosyltransferase-isomerase OS=Microbispora hainanen sis OX=568844 GN=FLX08_01015 PE=3 SV=1
MTAPDPAIRPYGAGGSFEFALAAPLEAHEPPEARGLRRDEVRLLVSRRDTGEITHHVFADLPSLLSPGDLLVVNDSATLPAAVRLDRLAVHFSGRLASGEWLVELRRRTGRATEPYSGAAPGEWLPLPGGATLRLLAPETPRLWRARLDRDVLSYLAAHGVPIRYGYVGRDWPLADYQTVFGVEPGSAEMPSAGRPFTPELVTALVSRGIGVAPITLHTGVASPEKDEPPYPEWFSVSERTARLVNITREHGGRVIAVGTTVVRALETAARDASAPDTVRAASGWTSHVVTPEGGVRAVDGLVTGLHEPRSTHLMMLSAITGTRVLTRAYEAALEEGYLWHEFGDSHLIL

SEQ ID NO: 68974 - protein, 350 aa, Microbispora rosea
  misc_feature (1)..(350): tr|A0A1N7G6Y7|A0A1N7G6Y7_9ACTN S-adenosylmethionine:tRN A ribosyltransferase-isomerase OS=Microbispora rosea OX =58117 GN=SAMN05421833_12696 PE=3 SV=1
MTAPDSAIRPHGAKGSFEFALTAPLEAHEPPEARGLRRDEVRLLASRRDTGEITHHVFADLPSLLSPGDLLVVNNSATLPAAVRLDRLAVHFSGRLASGEWLVELRRRTAKATEPYSGAAPGEWLPLPGGATLRLLAQETPRLWRAHLDRDVLSYLAAHGVPIRYGYVGRDWPLAHYQTVFGVEPGSAEMPSAGRPFTPELVTALVSRGIGVAPITLHTGVASPEKDEPPYPEWFSVSPWTARLVNITREHGGRVIAVGTTVVRALETAALDASAPDTVRATSGWTSHVVTPAGGVRAVDGLVTGLHEPRSSHLMMLSAITGTGVLTSSYEAALEEGYLWHEFGDSHLIL

SEQ ID NO: 68975 - protein, 346 aa, Microbispora sp.
  misc_feature (1)..(346): tr|A0A544Y9K0|A0A544Y9K0_9ACTN S-adenosylmethionine:tRN A ribosyltransferase-isomerase OS=Microbispora sp. SCL1 -1 OX=2592812 GN=FLW53_14735 PE=3 SV=1
MTTPDPEIRPYGESFEFALGAALEAHEPPEARGLRRDEVRLLVSRRDTGEITHHVFADLPSLLSPGDLLVVNDSATLPAAVRLDRLAVHFSGRLASGEWLVELRRRTGTATEPYSGAAPGEWLPLPGGATLRLLAPETPRLWRARLDRDVLSYLARHGVPIRYGYVRRDWPLADYQTVFGVEPGSAEMPSAGRPFTPELVTALVSRGIGVAPITLHTGVASPEKDEPPYPEWFAVSERTARLVNITHEHGGRVIAVGTTVVRALETAARDAPDTVRAASGWTSRVVTPEGGVRAVDGMVTGLHEPRSTHLMMLSAITGTGVLARSYEAALEEGYLWHEFGDSHLIL

SEQ ID NO: 68976 - protein, 369 aa, Microbispora sp.
  misc_feature (1)..(369): tr|A0A544Z9I1|A0A544Z9I1_9ACTN S-adenosylmethionine:tRN A ribosyltransferase-isomerase OS=Microbispora sp. KK1- 11 OX=2053005 GN=FLW16_29435 PE=3 SV=1
MTARDPHTAVQARTEPPATTTAPGPAIRPYGAAGSFEFALAAPLEAHEPPEARGLRRDEVRLLVSRRDTGEVSHHVFADLPTLLSPGDLLVVNNSATLPAAVRLDRLAVHFSGRLASGEWLVELRRRTATATEPYSGAAPGEWLPLPGGATLRLLAQETPRLWRAHLDRDVLSYLAAHGVPIRYGYVRRDWPLADYQTVFGVEPGSAEMPSAGRPFTPELVTELVSRGIGVAPITLHTGVASPEKDEPPYPEWFSVSPWTARLVNITREHGGRVIAVGTTVVRALETAALDAPAPGTVRAASGWTSHVVTPAGGVRAVDGLVTGLHEPRSSHLMMLSAITGTGVLARAYEAALEEGYLWHEFGDSHLIL

SEQ ID NO: 68977 - protein, 396 aa, Microbispora tritici
  misc_feature (1)..(396): tr|A0A5D0QIT2|A0A5D0QIT2_9ACTN S-adenosylmethionine:tRN A ribosyltransferase-isomerase OS=Microbispora tritici OX=2604471 GN=FXF59_00480 PE=3 SV=1
MTGAGGRTAAETEGRPDTPLGGGGLADAAPSSDGPADAIGEPARPHASGDSLTFALAAPLEAREPPEARGLRRDEVRLLVSRRDTGEVTHHVFADLPSLLAPGDLLVVNDSATLPAAVRLDRLAVHFSGRLASGDWLVELRRRTATATEPYLGGAPGEWLPLPGGATLRLVERETARLWRARLDRDVLSYLAAHGAPIRYGYVRRDWPLADYQTVFGVEPGSAEMPSAGRPFTPELVTALVSRGIGIAPITLHTGVASPEKDEPPYPEWFSVSARTARLANLTRAHGGRVIAVGTTVVRALETAAVRPPVAEPHRGEAGPDGGGVRALSGWTSHVVTPAGGVRAVDGLITGLHEPRSSHLMMLSAITGTGVLADAYDEALREGYLWHEFGDSHLIL

SEQ ID NO: 68978 - protein, 407 aa, Microbispora triticiradicis
  misc_feature (1)..(407): tr|A0A372P515|A0A372P515_9ACTN S-adenosylmethionine:tRN A ribosyltransferase-isomerase OS=Microbispora triticir adicis OX=2200763 GN=DI270_027665 PE=3 SV=1
MTGAGGRTAAETEGRPDTPLGGGGPADAAPSSDGPADAIGEPARPQAAGDSLTFALAAPLEAREPPEARGLRRDEVRLLVSRRDTGEVTHHVFADLPSLLAPGDLLVVNDSATLPAAVRLDRLAVHFSGRLASGDWLVELRRRTATATEPYLGGAPGEWLPLPGGATLRLVERETARLWRARLDRDVLSYLAAHGAPIRYGYVRRDWPLADYQTVFGVEPGSAEMPSAGRPFTPELVTALVSRGIGIAPITLHTGVASPEKDEPPYPEWFSVSARTARLANLTRAHGGRVIAVGTTVVRALETAAAVRPPVAEPHCAAPHCAAPHWGEAGPDGGGVRALSGWTSHVVTPAGGVRAVDGLITGLHEPRSSHLMMLSAITGAGVLADAYDEALREGYLWHEFGDSHLIL

SEQ ID NO: 68979 - protein, 355 aa, Microbulbifer agarilyticus
  misc_feature (1)..(355): tr|A0A1Q2M6D3|A0A1Q2M6D3_9GAMM S-adenosylmethionine:tRN A ribosyltransferase-isomerase OS=Microbulbifer agarily ticus OX=260552 GN=queA PE=3 SV=1
MQRQDFYFDLPESLIAKAPTAERRGSRLLCLDGTTGALGHRQFAELPDLIAPGDLLVFNDTRVIPARLFGQKASGGKLEILIERVLDEHRALAHIRSSKSPKPGSEIFLEDGSRLSMVARHDALFELEFPAEGVLPVLERQGHMPLPPYIDREDTETDKDRYQTVYSRNAGAVAAPTAGLHFDDEMIQSLRDKGVDTAFVTLHVGAGTFQPVRVDDINTHKMHSEILDVSAEVCDAVKACRARGGKVIAVGTTSVRALESAAVSGQLKPTQGETEIFIYPGYDFRVVDRLITNFHLPESTLLMLVSAFAGYNNAMNAYRQAVAEEYRFFSYGDAMLIERNPAVDPAEVGAGQADD

SEQ ID NO: 68980 - protein, 346 aa, Microbulbifer aggregans
  misc_feature (1)..(346): tr|A0A1C9W848|A0A1C9W848_9GAMM S-adenosylmethionine:tRN A ribosyltransferase-isomerase OS=Microbulbifer aggrega ns OX=1769779 GN=queA PE=3 SV=1
MRRQDFHFDLPDELIARAPASERRGSRLLCLDGPTGAVDHRKFAELPELVQSGDLLVFNDTRVIPARLFGRKESGGKLEILVERVLDEGRVLAHIRSSKSPKPGTRILLEDDSELEMVARHDALFELAFPSEGVLPVLERLGHMPLPPYIDRPDDEADRERYQTVYSREAGAVAAPTAGLHFDDEMLDTLRNMGVETAFVTLHVGAGTFQPVRVDDIHEHQMHSEVLNVPESVCKAVADCRARGGKVIAVGTTSVRALESAAASGELKPTVGETDIFIYPGYQFRVVDRLITNFHLPESTLMMLVSAFAGYEQTMNAYREAVRERYRFFSYGDAMLISRNPNVSAW

SEQ ID NO: 68981 - protein, 346 aa, Microbulbifer donghaiensis
  misc_feature (1)..(346): tr|A0A1M5I2G5|A0A1M5I2G5_9GAMM S-adenosylmethionine:tRN A ribosyltransferase-isomerase OS=Microbulbifer donghai ensis OX=494016 GN=queA PE=3 SV=1
MRRQDFRFDLPDELIARTPAKERRGSRLLCLDGPSGRLEHRQFAELADLVEAGDLLVFNDTRVIPARLFGRKASGGKLEILIERVLDERRALAHIRSSKSPKPGSEVVLEDDTPLQMVARHEALFELEFPQEGVLPVLERLGHMPLPPYIDRPDEDADRERYQTVYSRHAGAVAAPTAGLHFDDAMLAALRDKGVETAFVTLHVGAGTFQPVRVDDIFEHQMHSEVLHVPESVCRAVADCRARGGRVIAVGTTSVRALESAAAGGELVPTVGETDIFIYPGYRFRVVDRLITNFHLPESTLMMLVSAFAGYEQTMNAYREAVREKYRFFSYGDAMLINRNPHVSGW

SEQ ID NO: 68982 - protein, 346 aa, Microbulbifer marinus
  misc_feature (1)..(346): tr|A0A1H4A6Z4|A0A1H4A6Z4_9GAMM S-adenosylmethionine:tRN A ribosyltransferase-isomerase OS=Microbulbifer marinus OX=658218 GN=queA PE=3 SV=1
MRRQDFRFDLPDELIARTPAKERRGSRLLCLDGPSGRLEHRQFAELADLVEPGDLLVFNDTRVIPARLFGRKASGGKLEILIERVLDEHRALAHIRSSKSPKPGTEILLEDDTPLQMMARHEALFELEFPQEGVLPVLERLGHMPLPPYIDRPDEDTDRERYQTVYSRHAGAVAAPTAGLHFDDAMLAALRDKGVETAFVTLHVGAGTFQPVRVDDIFEHKMHSEVLHVPESVCRAVADCRARGGRVIAVGTTSVRALESAAANGELVPTVGETDIFIYPGYQFRVVDRLITNFHLPESTLMMLVSAFAGYEQTMNAYREAVQQKYRFFSYGDAMLITRNPEVSGW

SEQ ID NO: 68983 - protein, 346 aa, Microbulbifer sp.
  misc_feature (1)..(346): tr|A0A0X3U0G1|A0A0X3U0G1_9GAMM S-adenosylmethionine:tRN A ribosyltransferase-isomerase OS=Microbulbifer sp. ZGT 114 OX=1685377 GN=queA PE=3 SV=1
MRRQDFHFDLPDELIARAPARERRGSRLLCLDGPTGAVDHRKFLELPQLVQSGDLLVFNDTRVIPARLFGRKESGGKLEILIERVLDEGRALAHIRSSKSPKPGTRILLEDDTALEMVARHDALFELAFPSEGALPVLERLGHMPLPPYIDRPDDEADRERYQTVYNREAGAVAAPTAGLHFDEEMLDTLRDMGVETAFVTLHVGAGTFQPVRVDDIHEHQMHSEVLNVPESVCRAVADCRARGGKVIAVGTTSVRALESAAASGELKPTVGETDIFIYPGYQFQVVDRLITNFHLPESTLMMLVSAFAGYEQTMNAYREAVRERYRFFSYGDAMLISRNPNVSPW

SEQ ID NO: 68984 - protein, 357 aa, Microbulbifer sp.
  misc_feature (1)..(357): tr|A0A510IN21|A0A510IN21_9GAMM S-adenosylmethionine:tRN A ribosyltransferase-isomerase OS=Microbulbifer sp. GL- 2 OX=2591606 GN=queA PE=3 SV=1
MQRQDFDFHLPDELIARAPTEERRGSRLLCLDGPSGAITHRQFPDILDQVQAGDLIVFNDTRVIPARLFAQKETGGKLEILVERVLNETDIWAHVRSSKSPKPGSSIVLEDGTRIEVTGRKDALFELSFPKEEGVLAILDRLGHMPLPPYIDREDDASDRERYQTVYGRNAGAVAAPTAGLHFDDEMIGALRDKGVEVVFVTLHVGAGTFQPVRVDNIYEHQMHSEVLDVSQEVVDAVAACRARNGSVIAVGTTSVRALESAARGGELQTTVGETDIFIYPGYEFQVVDKLVTNFHLPESTLLMLVSAFAGYQHTMAAYKAAVEERYRFFSYGDAMFITRDPNAKKEEVAPTKGDTQ

SEQ ID NO: 68985 - protein, 346 aa, Microbulbifer thermotolerans
  misc_feature (1)..(346): tr|A0A1I1LDK0|A0A1I1LDK0_9GAMM S-adenosylmethionine:tRN A ribosyltransferase-isomerase OS=Microbulbifer thermot olerans OX=252514 GN=queA PE=3 SV=1
MRRQDFHFELPDELIARAPAAERRGSRLLCLDGPSGAVQHRHFADLADLVDTGDLLVFNDTRVIPARLFGRKATGGRLEILIERVQGERDALAHIRSSKSPKPGSEILLQDGTELRMVSRRGALFELEFPAEGVLPVLERLGHMPLPPYIDRPDEDADRERYQTVYSREAGAVAAPTAGLHFDEAMLETLRHKGVETAFVTLHVGAGTFQPVRVDNIFEHEMHSEVMNVPESVCRAVADCRARGGRVIAVGTTSVRALESAAAGGELKPVVGETDIFIYPGYQFRVVDRLITNFHLPESTLLMLVSAFAGYDQTMNAYREAVQKRYRFFSYGDAMLIDRNPHVSGW

SEQ ID NO: 68986 - protein, 346 aa, Microbulbifer thermotolerans
  misc_feature (1)..(346): tr|A0A143HNI1|A0A143HNI1_9GAMM S-adenosylmethionine:tRN A ribosyltransferase-isomerase OS=Microbulbifer thermot olerans OX=252514 GN=queA PE=3 SV=1
MRRQDFHFELPDELIARAPAAERRGSRLLCLDGPSGAVQHRHFADLADLVDTGDLLVFNDTRVIPARLFGRKATGGRLEILIERVQGERDALAHIRFSKSPKPGSEILLQDGTELRMVSRRGALFELEFPAEGVLPVLERLGHMPLPPYIDRPDEDADRERYQTVYSREAGAVAAPTAGLHFDEAMLETLRHKGVETAFVTLHVGAGTFQPVRVDNIFEHEMHSEVMNVPESVCRAVADCRARGGRVIAVGTTSVRALESAAAGGELKPVVGETDIFIYPGYQFRVVDRLITNFHLPESTLLMLVSAFAGYDQTMNAYREAVQKRYRFFSYGDAMLIDRNPHVSGW

SEQ ID NO: 68987 - protein, 346 aa, Microbulbifer yueqingensis
  misc_feature (1)..(346): tr|A0A1G8WVH6|A0A1G8WVH6_9GAMM S-adenosylmethionine:tRN A ribosyltransferase-isomerase OS=Microbulbifer yueqing ensis OX=658219 GN=queA PE=3 SV=1
MRRQDFHFDLPDELIARTPAKERRGSRLLCLDGPSGRVGHRLFAELPDLVKPGDLLVFNDTRVIPARLYARKETGGRLEILVERVLDERRVLAHVRSSKSPKPGSRLLLEDDTPVEMVARHDALFELEFPAEGVLPLLERLGHMPLPPYIDRPDEASDRERYQTVYSREPGAVAAPTAGLHFDDEMLDTLRDMGVETAFVTLHVGAGTFQPVRVDDIHEHQMHSEVLNVPESVCRAVADCQARGGRVIAVGTTSVRALESAAASGELRPTVGETDIFIFPGYRFRVVDRLITNFHLPESTLMMLVSAFAGYEQTMNAYREAVKERYRFFSYGDAMLIERNPDVQGW

SEQ ID NO: 68988 - protein, 340 aa, Micrococcus lylae; identical to SEQ ID NO: 68458
  misc_feature (1)..(340): tr|A0A378P4J2|A0A378P4J2_9MICC S-adenosylmethionine:tRN A ribosyltransferase-isomerase OS=Micrococcus lylae OX= 1273 GN=queA PE=3 SV=1

SEQ ID NO: 68989 - protein, 386 aa, Microcoleaceae bacterium
  misc_feature (1)..(386): tr|A0A355CMG6|A0A355CMG6_9CYAN S-adenosylmethionine:tRN A ribosyltransferase-isomerase OS=Microcoleaceae bacter ium UBA10368 OX=2055793 GN=queA PE=3 SV=1
MTEIDWSLDGYDYELPPDRIAQNPVVPRDSSRLLAVDSPSSQQHRIFRDLPDLLEPGDLLVLNNTRVLPARLYGHKPNGPAVEILLMEERDRNCWLALVKPGKRLKLGAKIEFDPICHEEAAGPCCCIPQGAVATLTDRLTATVIERDDATGGRLLEFNLPTEMSLIPFLDEYGHVPLPPYIDNSQAAPEQYQTVYADRPGAIAAPTAGLHFTEEVFSRLQQRGIETTFVTLHVGVGTFRPVEVADVTTHRMHGEWVEVSPATVEKIRETQARGGRIIAVGTTAVRALEGAAAATATPIADFPLQPFSGQTNLFIYPGYKWRVVDGMITNFHLPRSTLLMMISAMIGRSRVLDLYREAIAQQYRFYSFGDAMLILPEAYAIEEGID

SEQ ID NO: 68990 - protein, 386 aa, Microcoleaceae bacterium; identical to SEQ ID NO: 68989
  misc_feature (1)..(386): tr|A0A349JEK6|A0A349JEK6_9CYAN S-adenosylmethionine:tRN A ribosyltransferase-isomerase OS=Microcoleaceae bacter ium UBA11344 OX=2055792 GN=queA PE=3 SV=1

SEQ ID NO: 68991 - protein, 443 aa, Microcoleus sp.
  misc_feature (1)..(443): tr|K9WKU9|K9WKU9_9CYAN S-adenosylmethionine:tRNA ribosy ltransferase-isomerase OS=Microcoleus sp. PCC 7113 OX=1 173027 GN=queA PE=3 SV=1
MPPIWDRGLYPILCLVKESPLSKITVDRFVQNTKPMDDAQSQPSDVSNKMAAFLQRDTVTNTRLSQSHPIDGLLSSYDYMLPQERIAQTPLPERDGSRLLVVDSPTHHTHGIFRDLPKLLRPGDLLVLNNTRVIPARLYGYKSTGAPVEVLLLEERSDNCWLALVKPGRRLKPGAKIFFEPQPPGTPSPTTPPLGNGGTPPLPLLSATVLARDEATSGRLLQFDLPPEDSLAALLVQYGQVPLPPYITDTQALPEQYQTVYAQVPGAIAAPTAGLHFTPELLAQCRQQGIQQASVTLHVGIGTFRPVEVEDITHHAMHGEWLEVPQSTVEMIRETKASGGRVIAVGTTVVRALEGAAASGELQPFAGKTELFIYPGYQWRVVDGLITNFHLPRSSLLMLVSALIGRQRLLALYQEAIAQNYRFYSFGDAMLILPDAREPKMIC

SEQ ID NO: 68992 - protein, 379 aa, Microcoleus vaginatus
  misc_feature (1)..(379): tr|F5UEU8|F5UEU8_9CYAN S-adenosylmethionine:tRNA ribosy ltransferase-isomerase OS=Microcoleus vaginatus FGP-2 O X=756067 GN=queA PE=3 SV=1
MTEMDWSLDGYDYELPPSRIAQNPVVPRDSSRLLAVDSPSSHQHRIFRDLPDLLQPGDLLVLNNTRVLPARLYGHKPNGPAVEILLMEERQHNCWLALVKPGKRLKLGAKIEFDPIAPPCEDSTTAPCCCLPDATMPDRRRLTATVIERDDATGGRLLEFDIPTDENLAKFLDEYGHIPLPPYIENSQASAEQYQTVYADRLGAVAAPTAGLHFTEELFSRLEQRGIEKTFVTLHVGVGTFRPVEVADVTAHKMHGEWVEVPAVTVEKIRETQARGGRIIAVGTTAVRALEGAAAARDDFSLQPFCGPTNLFIYPGYKWRVVEGMITNFHLPRSTLMMMISAMIGRPRLLDLYREAIEQQYRFYSFGDAMLILPTAKKD

SEQ ID NO: 68993 - protein, 365 aa, Microcystis aeruginosa; identical to SEQ ID NO: 65234
  misc_feature (1)..(365): tr|A0A552E637|A0A552E637_MICAE S-adenosylmethionine:tRN A ribosyltransferase-isomerase OS=Microcystis aeruginos a Ma_SC_T_19800800_S464 OX=2486257 GN=queA PE=3 SV=1

SEQ ID NO: 68994 - protein, 365 aa, Microcystis aeruginosa
  misc_feature (1)..(365): tr|A0A0F6RJ96|A0A0F6RJ96_MICAE S-adenosylmethionine:tRN A ribosyltransferase-isomerase OS=Microcystis aeruginos a NIES-2549 OX=1641812 GN=queA PE=3 SV=1
MIPDQLLSSYDYHLPPELIAQNPAEPRDSSRLLVVDSPNSHNLAIFRDLPTWLESGDLLVFNDTRVIPARLFGRKTTGAPVEILLLEEQDDHRWLSLVKPGKRFKVGSEVLFYPKTGRTEDEAKLWLAKIIDRDMNTGGRLLEFQRHPGRSFWDMLEEYGHIPFPPYVTESEAEEDRYQTVYADKQGSVAAPTAGLHFTPELFHKLAQKAIDTAYITLHVGVGTFRPVEVENIAEHIMHQEFLEISAETAEKIAQTKARGGRVIAVGTTVARALEGAIKESKSEKLTAFQGKTNLFVYPGYQWRIIDGMITNFHLPKSSLMMLVSALVGRERLLALYQAAIQERFRFYSFGDAMLILPSACSSNR

SEQ ID NO: 68995 - protein, 365 aa, Microcystis flosaquae
  misc_feature (1)..(365): tr|A0A3E0KZJ2|A0A3E0KZJ2_9CHRO S-adenosylmethionine:tRN A ribosyltransferase-isomerase OS=Microcystis flos-aqua e DF17 OX=2060470 GN=queA PE=3 SV=1
MIPDQLLSSYDYHLPPELIAQNPAETRDSSRLLVVDSPNSHNLAIFRDLPTWLESGDLLVFNDTRVIPARLFGRKTTGAPVEILLLEEQDDHRWLSLVKPGKRFKVGSEVLFYPKTGPTEDQEKLWLAKVIDRDLNTGGRLLQFQRHPRRSFWDMLEEYGHIPFPPYVTESEAEEDRYQTVYADKQGSVAAPTAGLHFTPELFHKLAQKGIDTAYITLHVGVGTFRPVEVENITEHLMHQEFLQISAETAEKIAQTKARGGRVIAVGTTVARALEGAIKESKSEKLTAFQGKTNLFVYPGYQWRVIDGMITNFHLPKSSLMMLVSALIGRERLLALYQEAIQEHFRFYSFGDAMLILPSARSSNR

SEQ ID NO: 68996 - protein, 365 aa, Microcystis flosaquae
  misc_feature (1)..(365): tr|A0A552L7T0|A0A552L7T0_9CHRO S-adenosylmethionine:tRN A ribosyltransferase-isomerase OS=Microcystis flos-aqua e Mf_WU_F_19750830_S460 OX=2486237 GN=queA PE=3 SV=1
MIPDQLLSSYDYHLPPELISQNPAEPRDSSRLLVVDSPNSHNLAIFRDLPTWLESGDLLVFNDTRVIPARLFGRKTTGAPVEILLLEEQDDHRWLSLVKPGKRFKVGSEVLFYPKTGRTEDKEKLWLAKIIDRDMNTGGRLLEFQRHPGRSFWDMLEEYGHIPFPPYVTESEAEEDRYQTVYADKQGSVAAPTAGLHFTPELFHKLAQKGIDTAYITLHVGVGTFRPVEVENIAEHIMHQEFLEISAETAEKIAQTKARGGRVIAVGTTVARALEGAIKETKSQKLTAFQGKTNLFVYPGYQWRVIDGMITNFHLPKSSLMMLVSALVGRERLLALYQAAIQERFRFYSFGDAMLILPSACSGNR

SEQ ID NO: 68997 - protein, 365 aa, Microcystis novacekii
  misc_feature (1)..(365): tr|A0A552J3Y2|A0A552J3Y2_9CHRO S-adenosylmethionine:tRN A ribosyltransferase-isomerase OS=Microcystis novacekii Mn_MB_F_20050700_S1D OX=2486266 GN=queA PE=3 SV=1
MIPDQSLSSYDYHLPPELIAQNPAEPRDSSRLLVVDSPNSHHLAIFRDLPAWLEPGDLLVLNDTRVIPARLFGRKTTGAPIEILLLEEQDNYRWLSLVKPGKRFKVGSEVLFYPKTGRTENKEKLWLAKVIDRDLNTSGRLLEFQRHPGRSFWDMLEEYGHIPFPPYVTESEAEEDRYQTVYGNKQGSVAAPTAGLHFTPELFHKLAQKGIDTAYITLHVGVGTFRPVEVENITEHLMHQEFLQISAETAEKIAQTKARGGRIIAVGTTVARALEGAIKETKSEKLTAFQGKTNLFVYPGYQWRVIDGMITNFHLPKSSLMMLVSALIGRERLLALYQEAIQERFRFYSFGDAMLILPSARSINQ

SEQ ID NO: 68998 - protein, 365 aa, Microcystis panniformis
  misc_feature (1)..(365): tr|A0A0K1RVD7|A0A0K1RVD7_9CHRO S-adenosylmethionine:tRN A ribosyltransferase-isomerase OS=Microcystis panniform is FACHB-1757 OX=1638788 GN=queA PE=3 SV=1
MIPDQSLSSYDYHLPPELIAQNPAEPRDSSRLLVVDSPNSYNLAIFRDLPTWLEPGDLLVLNDTRVIPARLFGRKTTGAPIEILLLEEQDDHRWLSLVKPGKRFKVGSEVLFYPKTGRTEDQAKLWLAKVIDRDLNTSGRLLEFQRHPGRSFWDMLEEYGHIPFPPYVTESEAEEDRYQTVYADKQGSVAAPTAGLHFTPELFHKLAQKGIDTAYITLHVGVGTFRPVEVENITEHLMHREFLEISAETAEKIAQTKARGGRVIAVGTTVARALEGAIKETKSDKLTAFQGKTNLFVYPGYQWRVIDGMITNFHLPKSSLMMLVSALVGRERLLALYQAAIQERFRFYSFGDAMLILPSACSSNQ

SEQ ID NO: 68999 - protein, 364 aa, Microcystis panniformis
  misc_feature (1)..(364): tr|A0A552PRN2|A0A552PRN2_9CHRO S-adenosylmethionine:tRN A ribosyltransferase-isomerase OS=Microcystis panniform is Mp_MB_F_20051200_S9 OX=2486223 GN=queA PE=3 SV=1
MIPDQSLSSYDYHLPPELIAQNPAEPRDSSRLLVVDSPNSHNLAIFRDLPAWLEPGDLLVLNDTRVIPARLFGRKTTGAPIEILLLEEQDNYRWLSLVKPGKRFKVGSEVLFYPKTGRTEDKEKLWLAKVIDRDLNTSGRLLEFQRHPGRSFWDMLEEYGHIPFPPYVTESEAEEDRYQTVYADKQGSVAAPTAGLHFTPELFHKLAQKGIDTTYITLHVGVGTFRPVEVENITEHLMHQEFLEISAETAEKIAQTKARGGRVIAVGTTVARALEGAIKETKSDKLTAFQGKTNLFVYPGYQWRVIDGMITNFHLPKSSLMMLVSALVGRERLLALYQAAIQERFRFYSFGDAMLILPSARSSK

SEQ ID NO: 69000 - protein, 365 aa, Microcystis sp.
  misc_feature (1)..(365): tr|A0A2L2XQT1|A0A2L2XQT1_9CHRO S-adenosylmethionine:tRN A ribosyltransferase-isomerase OS=Microcystis sp. 0824 OX=1502726 GN=queA PE=3 SV=1
MIPDQLLSSYDYHLPPELIAQNPAEPRDSSRLLVVDSPNSHNLAIFRDLPTWLESGDLLVFNDTRVIPARLFGRKTTGAPVEILLLEEQDDHRWLSLVKPGKRFKVGSEVLFYPKTGRTEDEAKLWLAKIIDRDMNTGGRLLEFQRHPGRSFWDMLEEYGHIPFPPYVTESEAEEDRYQTVYADKQGSVAAPTAGLHFTPELFHKLAQKGIDTAYITLHVGVGTFRPVEVENIAEHIMHQEFLEISAETAEKIAQTKARGGRVIAVGTTVARALEGAIKESKSEKLTAFQGKTNLFVYPGYQWRVIDGMITNFHLPKSSLMMLVSALIGRERLLALYQAAIQERFRFYSFGDAMLILPSARSSNR

SEQ ID NO: 69001 - protein, 365 aa, Microcystis sp.
  misc_feature (1)..(365): tr|A0A552CAN9|A0A552CAN9_9CHRO S-adenosylmethionine:tRN A ribosyltransferase-isomerase OS=Microcystis sp. Msp_O C_L_20101000_S702 OX=2486218 GN=queA PE=3 SV=1
MIPDQSLSSYDYHLPPELIAQNPAEPRDSSRLLVVDSPNSHNLAIFRDLPTWLEPGDLLVLNDTRVIPARLFGRKTTGAPIEILLLEEQDNYRWLSLVKPGKRFKVGSEVLFYPKTGRTENKEKLWLAKVIDRDMNTSGRLLEFQRHPGRSFWDMLEEYGHIPFPPYVTESEAEEDRYQTVYADKQGSVAAPTAGLHFTPELFHKLAQKGIDTTYITLHVGVGTFRPVEVENITEHLMHREFLEISAETAEKIAQTKARGGRVIAVGTTVARALEGAIKETKSDKVTAFQGKTNLFVYPGYQWRVIDGMITNFHLPKSSLMMLVSALVGRERLLALYQAAIQERFRFYSFGDAMLILPSACSSNR

SEQ ID NO: 69002 - protein, 370 aa, Microcystis viridis
  misc_feature (1)..(370): tr|A0A3G9JKM9|A0A3G9JKM9_MICVR S-adenosylmethionine:tRN A ribosyltransferase-isomerase OS=Microcystis viridis N IES-102 OX=213615 GN=queA PE=3 SV=1
MMTMTMTPDQLLSSYDYHLPPELIAQNPAETRDSSRLLVVDSPNSHNLAIFRDLPTWLESGDLLVFNDTRVIPARLFGRKTTGAPVEILLLEEQDDHRWLSLVKPGKRFKVGSEVLFYPKTGPTEDQEKLWLAKVIDRDLNTGGRLLQFQRHPRRSFWDMLEEYGHIPFPPYVTESEAEEDRYQTVYADKQGSVAAPTAGLHFTPELFHKLAQKGIDTAYITLHVGVGTFRPVEVENITEHLMHQEFLQISAETAEKIAQTKARGGRVIAVGTTVARALEGAIKESKSEKLTAFQGKTNLFVYPGYQWRVIDGMITNFHLPKSSLMMLVSALIGRERLLALYQEAIQEHFRFYSFGDAMLILPSARSSNR

SEQ ID NO: 69003 - protein, 365 aa, Microcystis viridis
  misc_feature (1)..(365): tr|A0A552I958|A0A552I958_MICVR S-adenosylmethionine:tRN A ribosyltransferase-isomerase OS=Microcystis viridis M v_BB_P_19951000_S68D OX=2486270 GN=queA PE=3 SV=1
MIPDQLLSSYDYHLPPELIAQNPAEPRDSSRLLVVDSPNSHNLAIFRDLPTWLESGDLLVFNDTRVIPARLFGRKITGAPVEILLLEEQDDHRWLSLVKPGKRFKVGSEVLFYPKTGPTEDKEKLWLAKVIARDLNTGGRLLEFQPHPGRSFWDILEEYGHIPFPPYVTESEAEEDRYQTVYGNKQGSVAAPTAGLHFTPELFHKLAQKGIDTAYITLHVGVGTFRPVEVENITEHLMHQEFLQISAATAEKIAQTKARGGRIIAVGTTVARALEGAIKESKSDKLTAFQGKTNLFVYPGYQWRVIDGMITNFHLPKSSLMMLVSALIGRERLLALYQEAIQERFRFYSFGDAMLILPSARSINQ

SEQ ID NO: 69004 - protein, 365 aa, Microcystis wesenbergii
  misc_feature (1)..(365): tr|A0A552JYK9|A0A552JYK9_9CHRO S-adenosylmethionine:tRN A ribosyltransferase-isomerase OS=Microcystis wesenberg ii Mw_QC_S_20081001_S30D OX=2486245 GN=queA PE=3 SV=1
MIPDQSLSSYDYHLPPELIAQNPAEPRDSSRLLVVDSPNSHNLAIFRDLPTWLEPGDLLVFNDTRVIPARLFGRKITGAPVEILLLEEQDDHRWLSLVKPGKRFKVGSEVLFYPKTGPTEDEEKFWLAKIIDRDLNTGGRLLEFQRHPGRSFWDMLEEYGHIPFPPYVTESEAEEDRYQTVYGDKQGSVAAPTAGLHFTPELFHKLAQKGIDTAYVTLHVGVGTFRPVEVENITEHIMHQEFLQISAETAEKIAQTKARGGRVIAVGTTVARALEGAIKETKSDKLTAFQGKTNLFVYPGYQWRVIDGMITNFHLPKSSLMMLVSALVGRERLLALYQAAIQERFRFYSFGDAMLILPSARSSNQ

SEQ ID NO: 69005 - protein, 365 aa, Microcystis wesenbergii
  misc_feature (1)..(365): tr|A0A552M9I3|A0A552M9I3_9CHRO S-adenosylmethionine:tRN A ribosyltransferase-isomerase OS=Microcystis wesenberg ii Mw_MB_S_20031200_S109D OX=2486241 GN=queA PE=3 SV=1
MIPDQLLSSYDYHLPPELIAQNPAEPRDSSRLLVVDSPNSHNLAIFRDLPTWLEPGDLLVFNDTRVIPARLFGRKITGAPVEILLLEEQDDHRWLSLVKPGKRFKVGSEVLFYPKTGRTEDKEKLWLAKVIDRDLNTGGRLLEFQPHPGRSFWDILEEYGHIPFPPYVTESGAEEDRYQTVYGNKQGSVAAPTAGLHFTPELFHKLAQKGIDTAYITLHVGVGTFRPVEVENITEHLMHQEFLQISAATAEKIAQTKARGGRIIAVGTTVARALEGAIKESKSDKLTAFQGKTNLFVYPGYQWRVIDGMITNFHLPKSSLMMLVSALIGRERLLALYQEAIQERFRFYSFGDAMLILPSARSINQ

SEQ ID NO: 69006 - protein, 347 aa, Microgenomates group
  misc_feature (1)..(347): tr|A0A0G1L2N0|A0A0G1L2N0_9BACT S-adenosylmethionine:tRN A ribosyltransferase-isomerase OS=Microgenomates group bacterium GW2011_GWC1_44_23 OX=1618523 GN=queA PE=3 SV= 1
MTLTNFNFDLPGDLIGQKAIEPRDSCRLLVVNRQNQSLTHNIFRDLPDILDEKCVLVLNDTKVFPARLYGTKVTGGKIEVLLLKQLSLNSFTCILRGKTKDSQKLIFSDNLSATVLGGEIKFSLSGTELLSALDALGKTPLPPYIHSTESEEKLREQYQTVYAREKGSAAAPTAGLHFTESLLSKLAEKGVQVEKITLHVGLGTFKPVTEEQIASKTLHSESFWLSAETAQRLNQAKKADKKIIAVGTTTCRVLESQARETGKLTAGEGETNLFIQSGFHFNFVDGLITNFHLPGTSLLMLVSAFVSAPNSPITFKIFKDSLVGRAYAEAIKNKYKFFSFGDAMMII

SEQ ID NO: 69007 - protein, 350 aa, Microgenomates group; identical to SEQ ID NO: 64750
  misc_feature (1)..(350): tr|A0A0G1QG49|A0A0G1QG49_9BACT S-adenosylmethionine:tRN A ribosyltransferase-isomerase OS=Microgenomates group bacterium GW2011_GWA1_46_7 OX=1618495 GN=queA PE=3 SV=1

SEQ ID NO: 69008 - protein, 351 aa, Microlunatus phosphovorus
  misc_feature (1)..(351): tr|F5XL99|F5XL99_MICPN S-adenosylmethionine:tRNA ribosy ltransferase-isomerase OS=Microlunatus phosphovorus (st rain ATCC 700054 / DSM 10555 / JCM 9379 / NBRC 101784 / NCIMB 13414 / VKM Ac-1990 / NM-1) OX=1032480 GN
MPTTLTETPSTIFTPPADAFAPAPPEARGGRRDTIRMLVAGPTSIEHARFAELPHYLRPGDVVVINNSATIAGEIDAVGIGGPVVLHLATVLDDGSWVLEVRTAPDARLSVLDAVAGQRFVSGGIALRLIEPYPHPGSSPTGIGNRLWRAASSGDVRAHLAATGRPIAYGYLDQRYPLADYQSVFATVPGSAEMPSAGRPFTTGLVTDLVSRGITVAPITLHTGLSSQEAGEAPQPERFEVPSATARLVNAARAGGGRVVAVGTTVTRALESAVDEGRLVPRRGWTERVVTPSDPPQIVTGLVTGWHDPQASHLLLVEAVAGAELTQRAYDAAVSLGYRWHEFGDSALLLP

SEQ ID NO: 69009 - protein, 363 aa, Microlunatus soli
  misc_feature (1)..(363): tr|A0A1H1M5Z1|A0A1H1M5Z1_9ACTN S-adenosylmethionine:tRN A ribosyltransferase-isomerase OS=Microlunatus soli OX= 630515 GN=SAMN04489812_0016 PE=3 SV=1
MSLLTLTPTTVFPAPAAATAPRPAEERGLRRDEVRMLIARDSSITHARFHDLPAQLDPGDLLVVNDSATIAAECDARIGEDPVVLHVASRLGDHDWAVELRTAPDAARAILDAAVGTEVVLDGDDGVLELVAPYPAPGSSPTGRGTRLWRAAYEGHAPLLDLLDRVGRPIAYGYLDRRYPLSAYQTVFGLRPGSAEMPSASRPFTPELVTRLVAGGVGITPITLHTAVSSQEAGEAPLPEQFTVPSVTARAINTARDAGHRVVAVGTTAARAVESAVEETGAGSVAVPRSGWTDRVITVAEPPRLIDGLISGWHDPQASHLLLVEAVAGAELTQRAYDAAAATGYLWHEFGDSALLLPDRRTG

SEQ ID NO: 69010 - protein, 358 aa, Microlunatus sp.
  misc_feature (1)..(358): tr|A0A516Q058|A0A516Q058_9ACTN S-adenosylmethionine:tRN A ribosyltransferase-isomerase OS=Microlunatus sp. KUDC 0627 OX=2596828 GN=FOE78_13710 PE=3 SV=1
MRALTSVPRTVFPAPSASTAPAPAEARGLARDEVRLLVARPGNIEHTQFRQLPDQLTAGDLLVINTSATVPGEIDAYAADGRPIVLHLATRLDDGSLVVELRTAPDAARAVLDAAPGQELTIGGVRLRLIEPYPRAGSTPTGEGNRLWRARADGDLAGELDRRGRPIAYGYLDRRYPLSAYQSVFASVPGSAEMPSAGRPFSESLITRLVAAGIRFAPITLHTGVSSQEAGEAPQPEWYDVPATTSDQINHTRETGGRVIAVGTTATRAVESAVGPDGTVRSFRGWTDRVISPDAPARVVTGLITGWHDPHASHLLLVESIAGPELTQAAYDAAVEQHYLWHEFGDSALLLPEMASTS

SEQ ID NO: 69011 - protein, 106 aa, Micromonospora ureilytica
  misc_feature (1)..(106): tr|A0A3N9Y7X1|A0A3N9Y7X1_9ACTN S-adenosylmethionine:tRN A ribosyltransferase-isomerase (Fragment) OS=Micromonos pora ureilytica OX=709868 GN=DDE19_00130 PE=3 SV=1
MKLTDLDFSYPEELIATSPVRPSRVMWVEGELEPQEISLQDLLSRIPAGDVLVVNNTRVLKRLVFSGDVEILFLKQINATDWEVLFPSKKFKIGSVLELPLGVQMT

SEQ ID NO: 69012 - protein, 330 aa, Micromonosporaceae bacterium
  misc_feature (1)..(330): tr|A0A3D4WX13|A0A3D4WX13_9ACTN S-adenosylmethionine:tRN A ribosyltransferase-isomerase OS=Micromonosporaceae ba cterium OX=1873464 GN=DGG94_09975 PE=3 SV=1
MTATTFDFTLSPDLEAHEPPEARGLARDQVRMLVGGPDGVAHHHFPELPHLLEPGDVLVVNNSATMPAAVSTVDGQLAVHFSTQLPDGSWVIEPRHYQGTPGERLRLPGGVSAVLKEVYSERLWIADIDVASIPGYLMKYGRPIRYPYVARDWPLSTYHSVFATELGSAEMPSASRPFTEHMVTRLASRGIVIAPITLHTGVASPEAHEKPYPERYSVPANTARLANEAKAAGQRIIAVGTTAVRALETAARPDGMVQASHGWTDLLVTPESGVLVTDGLLTGFHEPRASHLLMLEAIAGSELLSRCYSAAIAEGYLWHEFGDLNLLLAR

SEQ ID NO: 69013 - protein, 415 aa, Microscilla marina
  misc_feature (1)..(415): tr|A1ZDV0|A1ZDV0_9BACT S-adenosylmethionine:tRNA ribosy ltransferase-isomerase OS=Microscilla marina ATCC 23134 OX=313606 GN=queA PE=3 SV=1
MSNQSIDNLPPVYLTDYNYTLPEERIAKSPLMQRDQSKLLVYQSGNIQHQHFYDLPQHLPADTMLVFNNTKVIPARLYFQKPTGALIEVFLLKPEAPHEIAAAMHTGNGCIWHCMIGNKRKWNKGLILEQVLPNGLVLKAELTDSEKQWVRFEWNNSHVSFAEVLAMTGELPLPPYLKRKATQKDADQYQTVYSKFEGAVAAPTAGLHFTPEVISQLQDKGIQTEFLTLHVSAGTFQPVKVENVIEHDMHSEQLVIHKQNIEHLLHHSGNIVAVGTTSMRVLESVYWLGVRLLKENYELLPGTPFQIDKLLPYQWENNDLPTRQEALQAILNYMNRQELGKLWGATEIFIFPRYEFKMCKGLITNYHLPKTTLILLVAAFVGNDWEKIYNEALAKDYRFLSYGDSSLLWCNEASK

SEQ ID NO: 69014 - protein, 350 aa, Microscilla marina
  misc_feature (1)..(350): tr|A1ZRB5|A1ZRB5_9BACT S-adenosylmethionine:tRNA ribosy ltransferase-isomerase OS=Microscilla marina ATCC 23134 OX=313606 GN=queA PE=3 SV=1
MKLSEFKFDFPTDLLALHPTDNRDESRLMVIHRDSGKIEHKVFKDIVDYFDEGDVFVVNDTKVFPARLFGSKEKTGAQIEVFLLRELNQEAHLWDVLVDPARKIRVGNKLFFGNGELVAEVIDNTTSRGRTIRFLTDRSDEEFYQLIDELGETPLPKHIYQQRKTDAHDRERFQTIFAEHVGAVAAPTAGLHFTKQLIKRLELKGIDMTPVTLHIGLGTFRDVDVEDLTKHKADSENFSVPANTTDKVNDALANKKRVCAIGTTVVKALESSVSANSLLKENAGWSDKFIFPPYEFKIPNALVTNFHLPESTLLMTACAFGGYELIMDAYQVAVKEKYRFFSYGDAMLIL

SEQ ID NO: 69015 - protein, 351 aa, Microscillaceae bacterium
  misc_feature (1)..(351): tr|A0A349DW04|A0A349DW04_9BACT S-adenosylmethionine:tRN A ribosyltransferase-isomerase OS=Microscillaceae bacte rium OX=2053581 GN=DCS93_28575 PE=3 SV=1
MQITNNSLIQFELPQHLACPLPTELRNMPRDAVRLLVTTGAGEASHDVFSNFDQYLQAGDVLVVNTSATVASAFAITLPNGKPGRLHLSTQLSDKEWLIEIRAIEGNTTTRWKAGQEGMKFKLPENVTVKLKERFYKNDQLLDLWVAEFDIRQEEEGYRHRYGQPIKYTQLENPFPLSYYQTFFSFHLGSAEMPSAGRGFTESLLRKLVRKGVVLAPITLHTGVSSLEEDEKPYPEYMEINPVTALLINTAKEEGRRVVAVGTTAIRAIESVANAQGQVKAFRGHTDLYIEDTHQMRVADGLLTGFHEPKASHLHMLQSLAGFEHIERAYQQAIEADYYWHQFGDLHLILA

SEQ ID NO: 69016 - protein, 411 aa, Microscillaceae bacterium
  misc_feature (1)..(411): tr|A0A349DVW9|A0A349DVW9_9BACT S-adenosylmethionine:tRN A ribosyltransferase-isomerase OS=Microscillaceae bacte rium OX=2053581 GN=queA PE=3 SV=1
MNPQNTHHLSPVYLRDYDYTLPEERIAKRPLEQRDHSKLLVYKSGNINHQHFYDLPQYLPADTLLAFNDTKVIPARLYFQKPTGAVIEVFLLKPTNPPEIAAAMHKSQECTWQCMIGNKRKWSQDLVLEQTLPGGLILKANLVNRDNNEVAFSWNDAQMSFAEILAIIGELPLPPYLKRKATKKDEDQYQTVYSKFEGAVAAPTAGLHFTEEVIQALEQNGVQTEYLTLHVSAGTFQPVKVDNVLEHEMHSEQIIVRRKNIEQLAQHAHPVVAVGTTSMRVLESIYWLGVRIIKEKYEPQLDRPFQIEKLYPYQWENEALPTRQESMQAILQFMEAQQLEKLWGATEIFIFPGYDFKMCNGLITNYHLPKTTLILLIAAFVGEDWRKIYNEALENDYRFLSYGDSSLLWRS

SEQ ID NO: 69017 - protein, 367 aa, Microvirga aerophila
  misc_feature (1)..(367): tr|A0A512BZC8|A0A512BZC8_9RHIZ S-adenosylmethionine:tRN A ribosyltransferase-isomerase OS=Microvirga aerophila OX=670291 GN=queA PE=3 SV=1
MSQGFMRVDLFDFDLPESSISLRPTEPRDAARMLVVKPDEVPFEDRTVRDLPDLLQPGDVLVLNDTKVIPSRLYGLRVREETAARVEIMLHKREGMDRWRAFARPAKKLNIGDRIRFGEASESTACELVRVDAEVEEKGDGGEVTLRFSFAGPFLDEAIARLGELPLPPYIAGKRATDEKDRADYQTVYARDEGAVAAPTAGLHFTDDLFRRLEERGIGRQFVTLHVGAGTFLPVKADDTAEHRMHAEWGTVTEETARALNEARARGGRVVAVGTTSLRLLESAAEEDGTIAPFSGDTAIFITPGYRFKAVDVLMTNFHLPRSTLFMLVSAFAGLQRMRAAYSHAIEAGYRFYSYGDASLLFRAKPS

SEQ ID NO: 69018 - protein, 358 aa, Microvirga guangxiensis
  misc_feature (1)..(358): tr|A0A1G5AZ46|A0A1G5AZ46_9RHIZ S-adenosylmethionine:tRN A ribosyltransferase-isomerase OS=Microvirga guangxiens is OX=549386 GN=queA PE=3 SV=1
MRVDLFDFELPEQNIALRPAEPRDAARMLVVRPESRLEDRVVRDLPDLLQPGDVLVLNDTKVIPSRLYGLRVREETAARVEIMLHKREGADRWRAFARPAKKLNVGDRIRFGEQADSTACELVRLDAEVIEKGEGGDVALRFSFSGPFLDEAIARLGELPLPPYIAGKRATDEKDRTDYQTVYAKDEGAVAAPTAGLHFTDELFRRLDERGIARHFVTLHVGAGTFLPVKADDTDEHRMHAEWGTITEATAQALNQARARGGRIVAVGTTSLRLLESAAREDGTIAPFSSDTAIFITPGYRFKAVDVLMTNFHLPRSTLFMLVSAFAGLDCMHAAYAHAIETGYRFYSYGDASLLFRR

SEQ ID NO: 69019 - protein, 358 aa, Microvirga lotononidis
  misc_feature (1)..(358): tr|I4YMX7|I4YMX7_9RHIZ S-adenosylmethionine:tRNA ribosy ltransferase-isomerase OS=Microvirga lotononidis OX=864 069 GN=queA PE=3 SV=1
MRVDLFDFDLPETNIALRPVEPRDAARMLVVRPETGLEDRIVRDLPDLLQPGDVLVLNNTKVIPSRLYGLRVREENAARVEIMLHKREGADHWRAFARPAKKLHVGDRIRFGDPSESTACELVRLDAEVVEKGEGGDVALRFSFAGAFLDEAIARLGELPLPPYIAGKRPTDDKDLSDYQTVYAKDEGAVAAPTAGLHFTDGLFRRLDERGVARHFVTLHVGAGTFLPVKADDTDEHRMHAEWGSVSEETARALNEARARGGRIVAVGTTSLRLLESAAREDGSIAPFSGDTAIFITPGYRFKAVDVLMTNFHLPRSTLFMLVSAFAGLDCMRGAYAHAIETGYRFYSYGDASLLFRR

SEQ ID NO: 69020 - protein, 358 aa, Microvirga ossetica
  misc_feature (1)..(358): tr|A0A1B2EKQ3|A0A1B2EKQ3_9RHIZ S-adenosylmethionine:tRN A ribosyltransferase-isomerase OS=Microvirga ossetica O X=1882682 GN=queA PE=3 SV=1
MRVDLFDFELPETSIALRPVEPRDRARMLVVRPGSGLEDRSVHDLPDLLQPGDVLVLNDTKVIPSRLYGLRMREDTAARVEIMLHKRESADRWRAFARPAKKLHVGDRIRFGESSESTACELVRLDAEVEEKGEGGDVALRFSFSGAFLDEAIARLGELPLPPYIAGKRPTDDKDRADYQTVYAKDEGAVAAPTAGLHFTDDLFRRLDERGVSRHFVTLHVGAGTFLPVKADDTAEHRMHAEWGSVSEETARALNAARARGGRIVAVGTTSLRLLESAAREDGTIAPFSGDTAIFITPGYRFKAVDVLMTNFHLPRSTLFMLVSAFAGLERMKAAYAHAVETGYRFYSYGDASLLFRR

SEQ ID NO: 69021 - protein, 358 aa, Microvirga sp.
  misc_feature (1)..(358): tr|A0A2T7U4P1|A0A2T7U4P1_9RHIZ S-adenosylmethionine:tRN A ribosyltransferase-isomerase OS=Microvirga sp. KLBC 8 1 OX=1862707 GN=queA PE=3 SV=1
MRVDLFDFELPEQNIALRPVEPRDSARILVVRPDSGFEDRIVRDLPDLLQPGDVLVLNNTKVIPSRLYGLRVREETAARVEIMLHKREGADRWRAFARPAKKLNVGDRIRFGEESESTACELVRLDAEVLEKAEGGDVALRFSFSGPFLDEAIARLGELPLPPYIAGKRATDEKDRTDYQTVYAKDEGAVAAPTAGLHFTDELFRRLDERGIAHHFVTLHVGAGTFLPVKAEDTTEHRMHAEWGTVTEETARALNEARARGGRIVAVGTTSLRLLESAACEDGTIAPFSGDTAIFITPGYRFKAVDVLMTNFHLPRSTLFMLVSAFAGLERMRTAYQHAIETGYRFYSYGDASLLFRR

SEQ ID NO: 69022 - protein, 358 aa, Microvirga sp.
  misc_feature (1)..(358): tr|A0A086MIW2|A0A086MIW2_9RHIZ S-adenosylmethionine:tRN A ribosyltransferase-isomerase OS=Microvirga sp. BSC39 OX=1549810 GN=queA PE=3 SV=1
MRVDLFDFDLPETSIALRPVEPRDAARMLVVSPEQGLDDRIVRDLPDLLQPGDVLVLNDTKVIPSRLYGLRMREETAARVEIMLHKREGADRWRAFARPAKKLNVGDRIRFGEATESTACELVRLDAEVEEKGEGGDVALRFSFAGAFLDEAIARLGELPLPPYIAGKRPTDDKDRADYQTVYAKDEGAVAAPTAGLHFTEDLFRRLDERGVTRHFVTLHVGAGTFLPVKAEDTAEHRMHAEWGSVSEETARALNEARARGGRIVSVGTTSLRLLESAAREDGTIAPFSGDTAIFITPGYRLKAVDVLMTNFHLPRSTLFMLVSAFAGLDCMRAAYAHAIETGYRFYSYGDASLLFRR

SEQ ID NO: 69023 - protein, 359 aa, Microvirga subterranea
  misc_feature (1)..(359): tr|A0A370HNY0|A0A370HNY0_9RHIZ S-adenosylmethionine:tRN A ribosyltransferase-isomerase OS=Microvirga subterrane a OX=186651 GN=queA PE=3 SV=1
MRVDLFDFDLPESSIALRPVEPRDAARMLVVRPDESPFEDRFVRDLPDLLQPGDVLVLNDTKVIPSRLYGLRVREETAARVEIMLHKRESADSWRAFARPAKKLNVGDRIRFGEAAESTACELVRLDAEVEEKGEGGDVRLRFSFSGPFLDEAIARLGELPLPPYIAGKRPTDDKDLRDYQTVYAKDEGAVAAPTAGLHFTESLFRRLEERGIARHFVTLHVGAGTFLPVKAEDTAEHRMHAEWGTVTEATARALNEARARGGRIVAVGTTSLRLLESAAREDGTIAPFSGDTAIFITPGYRFKAVDVLMTNFHLPRSTLFMLVSAFAGLERMRAAYAHAIETGYRFYSYGDSSLLFRR

SEQ ID NO: 69024 - protein, 358 aa, Microvirga vignae
  misc_feature (1)..(358): tr|A0A0H1RAY9|A0A0H1RAY9_9RHIZ S-adenosylmethionine:tRN A ribosyltransferase-isomerase OS=Microvirga vignae OX= 1225564 GN=queA PE=3 SV=1
MRVDLFDFELPEQNIALRPVEPRDSARMLVVRPGSDFEDGKVRDLPDLLLPGDVLVLNDTKVIPSRLYGLRVREETAARVEIMLHKREGADRWRAFARPAKKLNVGDRIRFGEETESTVCELVRLDAEVIEKGEGGDVALRFSFSGPFLDEAIARLGELPLPPYIAGKRATDEKDRTDYQTVYAKDEGAVAAPTAGLHFTDELFRRLGERGIERHFVTLHVGAGTFLPVKAEDTTEHRMHAEWGTVAEETARALNEARARGGRIVAVGTTSLRLLESAVCEDGTIAPFSGDTAIFITPGYRFKAVDVLMTNFHLPRSTLFMLVSAFAGLERMRAAYTHAIETGYRFYSYGDASLLFRR

SEQ ID NO: 69025 - protein, 342 aa, Microvirgula sp.
  misc_feature (1)..(342): tr|A0A329B960|A0A329B960_9NEIS S-adenosylmethionine:tRN A ribosyltransferase-isomerase OS=Microvirgula sp. AG72 2 OX=2183901 GN=queA PE=3 SV=1
MLLSEFDYDLPERLIAQFPPEQRGNSRLLHVEGDRLSDLRFPDLIGLLAPGDLLVMNDTRVIKARLYGRKASGGAIEALVERVLDDHHALAHVRASKSPKPGTRLLFADRWEAEMVERQGELFLLRFLGDRDVYAILDDAGKLPLPPYIERAAGGDDESRYQTVYARERGAVAAPTAGLHFTDEILAAIRARGIGTATVTLHVGAGTFQPVRVDNIDEHKMHSERFEIPVGTVDAIAACHAAGGRVVAVGTTSMRALEAAAQDGALRAGRGETDIFITPGYRFRVVDRLLTNFHLPKSTLLMLVSAFAGIDTLRGAYRHAVEQEYRFFSYGDAMLLEKETRA

SEQ ID NO: 69026 - protein, 199 aa, Midichloria mitochondrii
  misc_feature (1)..(199): tr|F7XVY7|F7XVY7_MIDMI S-adenosylmethionine:tRNA ribosy ltransferase-isomerase OS=Midichloria mitochondrii (str ain IricVA) OX=696127 GN=midi_00531 PE=3 SV=1
MPLPPYIKRENAHSNDFDSYQTVYSKRYGTFAAPTAGLHFTQNLLEKIAQKGVNIQFLTLHVGLGTFAPIKTQNIEEHKMHTENFILNQSVCEAVNYAKQNGNKVICVGTTTMRVLESVAVNNMVTPQIGETDIFIKPGHKFQIADALITNFHLPKSTLLVLVSAFIGNTNVDKVYQYAIEQKYRFFSYGDACYFSKPT

SEQ ID NO: 69027 - protein, 102 aa, Midichloria mitochondrii
  misc_feature (1)..(102): tr|F7XVY9|F7XVY9_MIDMI S-adenosylmethionine:tRNA ribosy ltransferase-isomerase OS=Midichloria mitochondrii (str ain IricVA) OX=696127 GN=midi_00533 PE=3 SV=1
MNIDEFDFVLPKELIAQFPANPRGSSKLLYFDPHHKIHDQVFDYIVNILNPSDVLVFNDTKVIPSLLKIHSINAKKTNASLNIVHQINDSSWQVMAPSQQIN

SEQ ID NO: 69028 - protein, 348 aa, Minicystis rosea
  misc_feature (1)..(348): tr|A0A1L6LC21|A0A1L6LC21_9DELT S-adenosylmethionine:tRN A ribosyltransferase-isomerase OS=Minicystis rosea OX=8 88845 GN=A7982_04610 PE=3 SV=1
MGGGVVSPATWPREDPLSERLLWIDPRAGTLRDGHVRDLPELLRAGDLLVVNDSATLPASLRGVTGNGAPVEARLAGAGEGDDVFRAVLFGAGDHRTRTEDRAPPPVLFAGDRIAFGPGLAATIARVSPISSRLVDLAFDTKGAALWTALYRQGRPVQYAYVAAPLELWHTQTRYGSRPWSAEMPSAGRPLGWSLILEAIRRGVTIARLTHAAGLSSTGDPLLDAALPLPERFDIPEETVRAIAETRARGGRVIAVGTTVARALEGSAALHDGTVMAGEGVTDLVLDHTSRPRVVDGLLTGMHEPTASHFHLLEAFASPALLRRAHAHAEEIGYLGHEFGDSTLVLPA

SEQ ID NO: 69029 - protein, 373 aa, Minicystis rosea
  misc_feature (1)..(373): tr|A0A1L6KZP0|A0A1L6KZP0_9DELT S-adenosylmethionine:tRN A ribosyltransferase-isomerase OS=Minicystis rosea OX=8 88845 GN=queA PE=3 SV=1
MRRALFDYRLPPELIAAHPPAERDGARLLVLGGGAPEQTEVRAIERFIAPGTLLVVNDTRVIPARLLGHKVGTGGRVEIFLVRRLGEGEVADGDRTLRAERWSALGRSSKPLRRGSRIVVDAVSKQQYPRPPLCVEIISAGNAGMFEVDLFSPADLPIEQAIEACGHVPLPPYVHRKDDAADRERYQTVFARVPGAVAAPTAGLHLTTELLDRLRARGAEIASVTLHVGLGTFQPVTVDDLDDHPMHAEIFAVPAETVAAVARARDRGAPVLAIGTTAVRALESAADPDRPGLVRAMEGETRLLIQPGYRFRVVDQLLTNFHLPESTLLAMVSAFAGRERVLAAYQAAIDARYRFYSYGDAMLILSRADGGAV

SEQ ID NO: 69030 - protein, 345 aa, Minwuia thermotolerans
  misc_feature (1)..(345): tr|A0A2M9G148|A0A2M9G148_9PROT S-adenosylmethionine:tRN A ribosyltransferase-isomerase OS=Minwuia thermotoleran s OX=2056226 GN=queA PE=3 SV=1
MKVDLFDFDLPSDRIALRPAEPRESARLLEVRAAGLGHFRIADLPGLLRPGDMLVVNDTRVIPARLKGRRGEAKVEATLHMRIDGRTWAAFARPAKRLRPGDRIEFGGALSAEVVERRDGGEVVLRFDRADDALFQALHAAGEMPLPPYIASKRPVDVRDFSDYQTVMADRPGAVAAPTAGLHLTEALFTELAARDIAVHRLTLHVGAGTFLPVKADDTADHRMHAEVGEIAATTAEALNRGRAAGGRIVAVGTTSLRLLESAVDAAGDIRAFSGATDIFITPGHRFRTADMLLTNFHLPRSTLFMLVSAFSGLERMKAAYAEAIERDYRFYSYGDACLLHRVEP

SEQ ID NO: 69031 - protein, 351 aa, Mitsuaria sp.
  misc_feature (1)..(351): tr|A0A1A9HRZ6|A0A1A9HRZ6_9BURK S-adenosylmethionine:tRN A ribosyltransferase-isomerase OS=Mitsuaria sp. 7 OX=16 58665 GN=queA PE=3 SV=1
MSRTYSVSDFDFALPPDLIAQHPAAERSASRLLDGRSDPPVDRVFRELPELLNPGDLLVFNDTKVIKARLYGAKASGGAVEALVERVLPGTREVWAHMRASKSPKAGAVVRFADAFDAEVLGRCGPDDGLFHLRLSGDPFELLEQHGHVPLPPYIEHGDSADDVRRYQTVFAREPGAVAAPTAALHFDEALLARLAERGVGTAHVTLHVGAGTFQPVRVESLAEHKMHSEWFQVTPGTVDAIARCRAAGGKVTAVGTTTLRALESAALVGGLQAGARETDIFITPGFDFQVVDRLVTNFHLPKSTLMMLVSAFAGYEPIMALYRHAIEQRYRFFSYGDAMLLERAQERSGD

SEQ ID NO: 69032 - protein, 347 aa, Mitsuaria sp.
  misc_feature (1)..(347): tr|A0A1I6KRC5|A0A1I6KRC5_9BURK S-adenosylmethionine:tRN A ribosyltransferase-isomerase OS=Mitsuaria sp. PDC51 O X=1881035 GN=queA PE=3 SV=1
MSRHFTVSDFDFALPPELIAQHPAAERSASRLLDGRADPPVDRVFRELPELLHPGDLLVFNDTKVIKARLYGAKASGGAVEALVERVLPGTREVWAHMRASKSPKPGAVVRFAEAFDAEVLGRCGPDDGLFHLRLSGDPFELLERHGHVPLPPYIAHDDSADDVRRYQTVFAREPGAVAAPTAALHFDEALLARLAERGIGTAHVTLHVGAGTFQPVRVESLAEHKMHSEWFQVTPETVDAIARCRAAGGKVTAVGTTTLRALESAALGGGLKAGARETDIFITPGFDFQVVDRLVTNFHLPKSTLMMLVSAFAGYEPIMALYRHAIAQRYRFFSYGDAMLLERARG

SEQ ID NO: 69033 - protein, 368 aa, Mitsuokella jalaludinii
  misc_feature (1)..(368): tr|A0A173XH19|A0A173XH19_9FIRM S-adenosylmethionine:tRN A ribosyltransferase-isomerase OS=Mitsuokella jalaludin ii OX=187979 GN=queA PE=3 SV=1
MLLSDFDYDLPEERIAQVPIEPRNASRLMVLDPVEKTIEHRHFYDLKEYLEPGDTLIFNDTRVMPARLIGHRDQTGGKVEVFLLRRLDANHWETLVKPGKKAKPGNVIRFGAELSCTVTEHTDFGGRIVEFHYDGIFEEILDRLGETPLPPYIHEKLEDKERYQTVYNREEGSAAAPTAGLHFTKEQMQELREMGVNLGFVTLHVGLGTFRPVSVDNIEEHEMHKEYYCIPDETAKLIMDTKKAGHRVIAVGTTSIRTLESAATAKNEIAGKSGWTGIFIYPGYDFKIVDAIITNFHLPKSTLIMLISAFAGRSFILSAYKTAVEQKYRFFSFGDAMFLQRPQPLAERAKELKELEELDRQREAEKKE

SEQ ID NO: 69034 - protein, 368 aa, Mitsuokella multacida
  misc_feature (1)..(368): tr|C9KK56|C9KK56_9FIRM S-adenosylmethionine:tRNA ribosy ltransferase-isomerase OS=Mitsuokella multacida DSM 205 44 OX=500635 GN=queA PE=3 SV=1
MLLSDFDYDLPEERIAQVPIEPRNASRLMVLDPVTKEIEHRHFYDLKEFLEPGDTLIFNDTRVMPARLIGHRDQTGGRVEVFLLRRLDANHWETLVKPGKKAKPGNVIRFGDELSCTVTEHTDFGGRIVEFHYDGIFEEILDRLGETPLPPYIHEKLEDKERYQTVYNREEGSAAAPTAGLHFTKEQMQELREMGVNLGFVTLHVGLGTFRPVNVENIEEHEMHKEYYCIPDETAKLIMDTKKAGHRVIAVGTTSIRTLESAATAKNEIAGKSGWTGIFIYPGYDFKIVDAIITNFHLPKSTLIMLISAFAGRNFVLNAYKTAVEMKYRFFSFGDAMFIRRKQPDAERAEELKELEELDRQREAEGKA

SEQ ID NO: 69035 - protein, 366 aa, Mitsuokella multacida
  misc_feature (1)..(366): tr|A0A356UKW3|A0A356UKW3_9FIRM S-adenosylmethionine:tRN A ribosyltransferase-isomerase OS=Mitsuokella multacida OX=52226 GN=queA PE=3 SV=1
MLLSDFDYDLPEERIAQVPIEPRNASRLMVLDPVEKTIEHRHFYDLKEFLEPGDTLIFNDTRVMPARLIGHRDQTGGKVEVFLLRRLDANHWETLVKPGKKAKPGNVIRFGDELSCTVTEHTDFGGRIVEFHYDGIFEEILDRLGETPLPPYIHEKLEDKERYQTVYNREEGSAAAPTAGLHFTKEQMQELREMGVNLGFVTLHVGLGTFRPVNVENIEEHEMHKEYYCIPDETAKLIMDTKKAGHRVIAVGTTSIRTLESAATAKNEIAGKSGWTGIFIYPGYDFKIVDAIITNFHLPKSTLIMLISAFAGRNFVLNAYKTAVEMKYRFFSFGDAMFIRRKQPDAERAEELKELELDILTLSKAP

SEQ ID NO: 69036 - protein, 371 aa, Mitsuokella sp.
  misc_feature (1)..(371): tr|A0A415RA37|A0A415RA37_9FIRM S-adenosylmethionine:tRN A ribosyltransferase-isomerase OS=Mitsuokella sp. AF33- 22 OX=2292047 GN=queA PE=3 SV=1
MLLSDFDYDLPEERIAQVPIEPRNASRLMVLDPVEKTIEHRHFYDLKEFLVPGDTLIFNDTRVMPARLIGHRDQTGGKVEVFLLRRLDATHWETLVKPGKKAKPGNVIRFSDELSCTVTEHTDFGGRIVEFQFDGIFEEILDRLGETPLPPYIHEKLEDKERYQTVYNREEGSAAAPTAGLHFTKEQMQELRDMGVNLGFVTLHVGLGTFRPVNVDNIEDHEMHKEYYCIPDETAKLIMDTKKAGHRVIAVGTTSIRTLESAATAKNEIAGKSGWTGIFIYPGYGFKIVDALITNFHLPKSTLIMLISAFAGRKFVLQAYKTAVEMKYRFFSFGDAMLVTRKQPDAERNQEVAELEELDRQRQAEAGKDNE

SEQ ID NO: 69037 - protein, 347 aa, Mitsuokella sp.
  misc_feature (1)..(347): tr|U2TAU5|U2TAU5_9FIRM S-adenosylmethionine:tRNA ribosy ltransferase-isomerase OS=Mitsuokella sp. oral taxon 13 1 str. W9106 OX=1321781 GN=queA PE=3 SV=1
MQLSEFDYDLPEERIAQTPIEPRNASRLMVLDPASWQIEHRHFYDLKEYLMPGDTLILNDTRVMPARLVGHRDQTGGKVEVFLLRRLDGNRWESLVKPGKKAKDGTRIRFGAELSCVVKAHTDFGGRIVEFEYEGIFEEILDRLGEMPLPPYIHEKLADKERYQTVYNREEGSAAAPTAGLHFTKEQLKEIRAMGVHIGFVTLHVGLGTFRPVHVDTIEEHEMHSEYYSISDETAQLIMNTKAAGHRVIAVGTTSIRTLESAADAKHGISGKTGWTNIFIYPGYDFKIVDAIITNFHLPKSTLIMLISAFAGRELVLHAYKMAVEMKYRFFSFGDAMLIRSKAANPQ

SEQ ID NO: 69038 - protein, 356 aa, Mixta gaviniae
  misc_feature (1)..(356): tr|A0A1X1DSM8|A0A1X1DSM8_9GAMM S-adenosylmethionine:tRN A ribosyltransferase-isomerase OS=Mixta gaviniae OX=665 914 GN=queA PE=3 SV=1
MRVADFSFELPESLIAHYPQPQRSGCRLLSLNGPDGALSHGVFTDVLDKLNPGDLLVFNNTRVIPARVYGRKASGGKIEMLVERMLDDKRVLAHVRASKAPKPGAALLFGDDESVRATMVARHDALFEIVFDDARGVLDILNAIGHMPLPPYIDRPDEEADRELYQTVYSQKPGAVAAPTAGLHFDEPLLAALREKGVEMAFVTLHVGAGTFQPVRVDSIEDHIMHSEYAEVPQEVVDAVLACKARGNRVVAVGTTSVRSLESAAQAAQDALIAPFFDDTQIFIYPGYHYQVIDALITNFHLPESTLIMLVSAFAGYRHTMNAYHAAVAEQYRFFSYGDAMFITRNPQAPDEKVGA

SEQ ID NO: 69039 - protein, 356 aa, Mixta sp.
  misc_feature (1)..(356): tr|A0A506V7I3|A0A506V7I3_9GAMM S-adenosylmethionine:tRN A ribosyltransferase-isomerase OS=Mixta sp. BIT-26 OX=2 562439 GN=queA PE=3 SV=1
MRVADFSFALPESLIAHYPQPQRSGCRLLSLNGPDGALSHGVFTDVLDKLNPGDLLVFNNTRVIPARVYGRKASGGKIEMLVERMLDDKRVLAHVRASKAPKPGAELLFGDDESVRATMVARHGALFEIEFADARSVLDILNAIGHMPLPPYIDRPDEEADRELYQTVYSAKPGAVAAPTAGLHFDEPLLAALREKGVEMAFVTLHVGAGTFQPVRVDSIEDHIMHSEYAEVPQEVVDAVLACKARGNRVVAVGTTSVRSLESAAQAAGDALIAPFFDDTQIFIYPGYRYQLIDALITNFHLPESTLIMLVSAFAGYRHTMNAYREAVAQQYRFFSYGDAMFITRNPQAPDEKVGA

SEQ ID NO: 69040 - protein, 356 aa, Mixta theicola
  misc_feature (1)..(356): tr|A0A2K1QC64|A0A2K1QC64_9GAMM S-adenosylmethionine:tRN A ribosyltransferase-isomerase OS=Mixta theicola OX=145 8355 GN=queA PE=3 SV=1
MRVADFSFELPESLIAHYPQPQRSGCRLLSLNGPDGALSHGVFTDVLDKLNPGDLLVFNNTRVIPARVYGRKASGGKIEMLVERMLDDKRVLAHVRASKAPKPGAELLFGDDESVRATMVARHDALFEIEFDDARSVLDILNAIGHMPLPPYIDRPDEEADRELYQTVYSQKPGAVAAPTAGLHFDEPLLAALREKGVEMAFVTLHVGAGTFQPVRVDSIEDHIMHSEYAEVPQEVVDAVLACKARGNRVVAVGTTSVRSLESAAQAAQNTLIAPFFDDTQIFIYPGYRYQVIDALITNFHLPESTLIMLVSAFAGYRHTMSAYHEAVAEQYRFFSYGDAMFITRNPQAPDEKVGV

SEQ ID NO: 69041 - protein, 355 aa, Mizugakiibacter sediminis
  misc_feature (1)..(355): tr|A0A0K8QRE9|A0A0K8QRE9_9GAMM S-adenosylmethionine:tRN A ribosyltransferase-isomerase OS=Mizugakiibacter sedim inis OX=1475481 GN=queA PE=3 SV=1
MKKSDFHYDLPAELIAQAPLPERSASRLLVLDAAARAWQDRTMRELPQLLRPGDLLVFNDTRVLPARLHGRKESGGAVEILIERVTGAREARAQLGVSKKPRPGGRILLGDGSVVTVLGRDGEFFLLRFEGEEPLERLLLRLGRMPLPPYIAREADAADAERYQTVFAREPGAVAAPTAGLHFDAPLLDALRARGIESGYVTLHVGAGTFQPVRVERIEDHVMHREWLNVGAELVEKVRRTRARGGRVVAVGTTVVRALESASRGGELRPFAGETAIFIFPGYRIRSIDGLITNFHLPESTLLMLVSALAGRELILDAYRHAVEQRYRFFSYGDAMLIWPGDGKGETGSGKGGGA

SEQ ID NO: 69042 - protein, 345 aa, Mobilisporobacter senegalensis
  misc_feature (1)..(345): tr|A0A3N1XQ04|A0A3N1XQ04_9FIRM S-adenosylmethionine:tRN A ribosyltransferase-isomerase OS=Mobilisporobacter sen egalensis OX=1329262 GN=queA PE=3 SV=1
MKKKDFDFYLPEELIAQDPLLDRSSSRLLILDKETGRTEHKIFKDIIDYIRPGDCLVLNNTKVIPARLIGSKEDTGASVELLLLKRNEGDIWETLVKPGKKAKKGAKLVFGEGLLRAEVVDIVEEGNRLVKFHYEGIFEEILDKLGQMPLPPYITHTLKDKNRYQTVYAKYEGSAAAPTAGLHFTNELLDGIRAKGIAIANVTLHVGLGTFRPVKEEDILAHHMHSEFYQIDSEAADIINNTKKNGGRIICVGTTSCRTIESAGDENGMLKACSGNTEIFIYPGYKFKILDALITNFHLPESTLIMLVSALAGRENVLNAYKIAVEEKYRFFSFGDAMFITDLEK

SEQ ID NO: 69043 - protein, 345 aa, Modestobacter marinus
  misc_feature (1)..(345): tr|I4EXT6|I4EXT6_9ACTN S-adenosylmethionine:tRNA ribosy ltransferase-isomerase OS=Modestobacter marinus OX=4776 41 GN=MODMU_2770 PE=3 SV=1
MTAPFTLPPGSEATAPPERRGLARDGVTLLAARPGAVTPHRFRDLPDLLAPGDVVVVNTSPTAPARLDAVRGDGTATPVHVATPLDDGGWVVEVRRPDNSGPDLGVEPGSVLLLPGGVELRLVAPFPVPGSRLWRAAADPAVTPAAHLARYGTPIRYGHLARAVPLAALQNVYATPVGPQEMGSAEMASAGRPFTDRLLVRLVARGITVLPLLLHTGVSSPELHEPPAPERFAVPAATARVVTGTRAAGGRVVAVGTTVTRALESATGEDGVTRPASGWTDLVLSADRPARVVGGLVTGLHAPEASHLQLLAAVAGVDLVDRAYRSAVAAHLLWHEFGDSMLFLP

SEQ ID NO: 69044 - protein, 361 aa, Moellerella wisconsensis
  misc_feature (1)..(361): tr|A0A0H2QC11|A0A0H2QC11_9GAMM S-adenosylmethionine:tRN A ribosyltransferase-isomerase OS=Moellerella wisconsen sis OX=158849 GN=queA PE=3 SV=1
MRVSDFTFELPEGLIAHYPQSQRSACRLLSLDGTTGQLTHGIFTDVLEKLEPGDLLVFNNTRVIPARLFGRKASGGKIEVLVERMLDDNRVLAHVRASKAPKEGAELLLGDDESVKATMLARHGALFELRFDDSRDILTILNQIGHMPLPPYIDRPDEEADKELYQTVYSQRPGAVAAPTAGLHFDEPLLAALREKGIEMAFVTLHVGAGTFQPVRVDTIEDHIMHSEYAEISQDVVDAVLACKARGNRVVAVGTTSVRSLESAAQASKEQLIAPFFDDTQIFIYPGYNYQVVDALITNFHLPESTLIMLVSAFAGYQNTMRAYREAVEQQYRFFSYGDAMFITRNLQAPAEQVGQLDVSE

SEQ ID NO: 69045 - protein, 361 aa, Moellerella wisconsensis; identical to SEQ ID NO: 69044
  misc_feature (1)..(361): tr|A0A0N0ZAK1|A0A0N0ZAK1_9GAMM S-adenosylmethionine:tRN A ribosyltransferase-isomerase OS=Moellerella wisconsen sis ATCC 35017 OX=1354267 GN=queA PE=3 SV=1

SEQ ID NO: 69046 - protein, 349 aa, Mogibacterium diversum
  misc_feature (1)..(349): tr|A0A2S0L346|A0A2S0L346_9FIRM S-adenosylmethionine:tRN A ribosyltransferase-isomerase OS=Mogibacterium diversu m OX=114527 GN=queA PE=3 SV=1
MRLEDFDYELPRELIAQTPSLKRDECRLMVLDRAKNTIEHRHFYDILEYLHEGDCLVVNDSRVIPARLYGIKEKTGAHIELLLIKRLEGDKWESLVKPGKRLKEGDTVVLDENKLFKANILGFKDKENGTRIIEFEYEGIFMERLEEIGSMPLPPYIERDAENDDKERYQTVYSKVDGSVAAPTAGLHFTDELLEKVREKGVEIAYVTLHVGIGTFRPVKVDNIEDHKMHFEEYTIAPETAETINRAIREGRRVISVGTTSTRTLESAAKQVDGVWQIESGHSSTGIFIYPGYKYKVVDGLITNFHLPKSTLIMLVSALYDREHIIAAYEEAVRERYKFFSYGDAMFIK

SEQ ID NO: 69047 - protein, 349 aa, Mogibacterium pumilum
  misc_feature (1)..(349): tr|A0A223ASJ2|A0A223ASJ2_9FIRM S-adenosylmethionine:tRN A ribosyltransferase-isomerase OS=Mogibacterium pumilum OX=86332 GN=queA PE=3 SV=1
MRLEDFDYELPKELIAQTPSLKRDECRLMVLDRTENSIKHKHFYDILDYLHEGDCLVVNDSRVIPARLYGTKEKTGAHIELLLIKRLNGDKWESLAKPGKRLKEGDTVILDENRLFKAHILGFKDEENGTRIIEFEYKGIFMERLEEIGSMPLPPYIERDAGNDDKERYQTVYSKVDGSVAAPTAGLHFTDELLEQLRAKGVEIAYVTLHVGIGTFRPVKVDNIEDHKMHFEEYTIEPETADTVNRAIREGRRVISVGTTSTRTLESAAKQVDGVWQIESGHSNTGIFIYPGYKYKVVDALITNFHLPKSTLIMLVSALYDREHILEAYEEAVRERYKFFSYGDAMFIK

SEQ ID NO: 69048 - protein, 349 aa, Mogibacterium sp.
  misc_feature (1)..(349): tr|J5WAG8|J5WAG8_9FIRM S-adenosylmethionine:tRNA ribosy ltransferase-isomerase OS=Mogibacterium sp. CM50 OX=936 375 GN=queA PE=3 SV=1
MKLEDFDYNLPKELIAQAPSLKRDECRLMVLNRAADTIEHKHFYDILDYLHEGDCLVVNDSRVIPARLYGTKEKTGAHIEFLLIKRLEGDKWESLVKPGKRLKEGDTVILDDNKLFKAHILGFKDEGNGTRIIEFEYEGIFMERLEEIGSMPLPPYIERRAVDDDKERYQTVYSKIDGSVAAPTAGLHFTDELLEKVKVKGIEVASVTLHVGIGTFRPVKVENVEDHKMHFEEYTINSETAETINRAIRDGRRIISVGTTSTRTLESAAKQVDGVWQIESGHRSTGIFIYPGYEYKVVDGLITNFHLPKSTLIMLVSALYDREHILKAYEEAVRENYKFFSYGDAMFIR

SEQ ID NO: 69049 - protein, 349 aa, Mogibacterium timidum
  misc_feature (1)..(349): tr|X8INV3|X8INV3_9FIRM S-adenosylmethionine:tRNA ribosy ltransferase-isomerase OS=Mogibacterium timidum ATCC 33 093 OX=1401079 GN=queA PE=3 SV=1
MKLEDFDYNLPKELIAQAPSLKRDECRLMVLNRAADTIEHKHFYDILDYLHEGDCLVVNDSRVIPARLYGTKEKTGAHIEFLLIKRLEGDKWESLVKPGKRLKEGDTVILDDNKLFKAHILGFKDEGNGTRIIEFEYEGIFMERLEEIGSMPLPPYIERRAVDDDKERYQTVYSKIDGSVAAPTAGLHFTDELLEKVKVKGIEVASVTLHVGIGTFRPVKVENVEDHKMHFEEYTINSETAETINRAIRDGRRIISVGTTSTRTLESAAKQVDGVWQIESGHRSTGIFIYPGYEYKVVDGLITNFHLPKSTLIMLVSALYDREHILKAYEEAVGENYKFFSYGDAMFIR

SEQ ID NO: 69050 - protein, 351 aa, Moheibacter sediminis
  misc_feature (1)..(351): tr|A0A1W1ZD44|A0A1W1ZD44_9FLAO S-adenosylmethionine:tRN A ribosyltransferase-isomerase OS=Moheibacter sediminis OX=1434700 GN=queA PE=3 SV=1
MKMKTSDFNFKLPEELLAEHPSEQRDEARLMVLNRKNETIEHRLFKDIVDYFDEGDVMIMNNTKVFPARLMGNKEKTGAKIEVFLLRELDAETRLWDVLVDPARKIRIGNKLFFGDDDSLVAEVVDNTTSRGRTLRFLFDGSYEEFRQALEDLGETPLPKYIQREVVPEDAERYQTIYAKHEGAVAAPTAGLHFSKHLLKRLEIKGVDFAELTLHVGLGTFAPVEVEDLSKHKMESEQVIIPEETAIRVNEAIDAKKRVCAVGTTSMRAIESSVSANGHLNPFDSWTNKFIHPPYDFGVANCMITNFHTPKSTLIMMVSAFTGHDFLMKAYKEAVKEGYKFYSYGDAMLII

SEQ ID NO: 69051 - protein, 348 aa, Monaibacterium marinum
  misc_feature (1)..(348): tr|A0A2C9CT71|A0A2C9CT71_9RHOB S-adenosylmethionine:tRN A ribosyltransferase-isomerase OS=Monaibacterium marinu m OX=1690039 GN=queA PE=3 SV=1
MKLSDFDFDLPEHLIALRPVRPRPASRMLLAQGAQTQDRHVSDLPEILQPGDLMVFNDTKVIPARLFGTRSRVSAHGSGVAKVEATLLERTTPDTWSALARPGRKLAVGDVMQFENLSAEIVAKGQDGRVTLRFDQAGADLDAAIALAGQMPLPPYIAARRPADEADREDYQTVFADKLGAVAAPTASLHFDDDLLARLAARGVENTRVTLHVGAGTFLPVTVDDVSDHKMHSEWGEVSVEAAETIAKAKAEGRRVIPVGTTALRLIEAASASGTIAPWLGDTDIFITPGYQFRTASGLMTNFHLPRSTLMMLVSAMMGVDRIKEIYAHAIADEYRFYSYGDSSLLLP

SEQ ID NO: 69052 - protein, 409 aa, Mongoliibacter ruber
  misc_feature (1)..(409): tr|A0A2T0WVF8|A0A2T0WVF8_9BACT S-adenosylmethionine:tRN A ribosyltransferase-isomerase OS=Mongoliibacter ruber OX=1750599 GN=queA PE=3 SV=1
MTLLKSIQNIRLTDYEYTLPDEKIAKFPLEKRDESKLLHYDGSKGISHHAFRELPQLIPEGSMMVFNNTKVIPARMIFQRETGARIEIFLLKPILPSTVINEVMINTQMVTWECMIGNLKKWKTGETLKGAIEIQGQLIELKATLTDRENRLVQFDWSGNLVPFVSLVEASGEVPLPPYLNRKATPEDKPRYQTVYSKKEGAVAAPTAGLHFTENVFDQLRDKGIKEEYLTLHVSAGTFQPIKSEVISEHNMHSEQVVVSFESITNIAAHDAKIVAVGTTSMRTLESLYWYGVKLLHNQKSEFLIEKLFPYGSFESLPNRTESFSAISEYMQKNDLREITGSTEIFIMPGYNFKVCDGLVTNFHQPSSTLVLLIAAFTNGKWRDIYDTALSQDYRFLSYGDSNLYWKEG

SEQ ID NO: 69053 - protein, 349 aa, Mongoliibacter ruber
  misc_feature (1)..(349): tr|A0A2T0WQU3|A0A2T0WQU3_9BACT S-adenosylmethionine:tRN A ribosyltransferase-isomerase OS=Mongoliibacter ruber OX=1750599 GN=queA PE=3 SV=1
MKLSDFKFDVPKKLISLYPTENRDESRLMVLNRKTGEIEHKVFKDIIDYFGDGDVFVMNDTKVFPARLYGNKEKTGAKIEVFLLRELNQDLRLWDVLVDPARKIRVGNKLYFGDSDLVAEVIDNTTSRGRTIRFLFDGTDEEFYKTIDTLGETPILKEWIDRKVEAEDRERYQTIFARNVGAVAAPTAGLHFTPHLLKRLELKGVEVCPITLHVGLGTFRQVDVEDLTKHKMDSENYDIPEKTVEKVNQALDNKKRVVSVGTTSLKTVESSVTANNKLKASSGWTDKFIIPPYEFKIANTLITNFHLPESTLLMTASAFGGYDLVMRAYQEAIKEKYRFFSYGDAMLIL

SEQ ID NO: 69054 - protein, 341 aa, Monoglobus pectinilyticus
  misc_feature (1)..(341): tr|A0A2K9P110|A0A2K9P110_9FIRM S-adenosylmethionine:tRN A ribosyltransferase-isomerase OS=Monoglobus pectinilyt icus OX=1981510 GN=queA PE=3 SV=1
MTTKDFYYDLPPELIAQHPLKDRAGSRLLVLDKETGKIEHKNFRNIIEYLNPGDCLVMNNTRVIPARLYGVKEDTGGKIEFLLLKRIDLNTWNVILKPGKRARTGARFVFGDGLLKAEVIEVRPDGNRIVRFEYDGVWEELLDKLGEMPLPPYIKEKLEDKERYQTVYSKIEGSAAAPTAGLHFTNELLEDIKDKGVKTAYLTLHVGLGTFRPVSVENVEEHVMHTEHYEVSQEAADIINETRKSGGRIIAVGTTSVRTLETVAEDNGTMKAEIGDTSIFIYPGYKFKVTDSIITNFHLPESTLLMLVSAFAGKENIFEAYEQAVKEKYRFFSFGDAMLLK

SEQ ID NO: 69055 - protein, 393 aa, Moorea bouillonii
  misc_feature (1)..(393): tr|A0A1U7N0M1|A0A1U7N0M1_9CYAN S-adenosylmethionine:tRN A ribosyltransferase-isomerase OS=Moorea bouillonii PNG OX=568701 GN=queA PE=3 SV=1
MTGIDKQTSKHQIDQLVSSYDYELPEEQIAQTPLSERDGSRLLVVDSPTHHSHHIFRELPELLQPGDLLILNNTRVIPARLYGRKSTGVPVEILLLEERQQQGQQQGQHQSWLALVKPGRRLKPGAEIWFTPSSDLGLKDSTLSKHLTTPLPPLKATVLATDEGTSGRILQFDFPEGVSWETLLEWYGQVPLPPYIQDSQATPDQYQTIYAQKNGAVAAPTAGLHFTNQLMENCRQRGIRLGYITLHVGVGTFRPVEVEDITEHDMHGEWLEVPQSTVEQIQETRATGGRVIAVGTTVVRALEGAVVDGELQPYCGKTNLFIYPGYQWQVVEGLITNFHLPRSSLLMLVSAMVGRERLLTLYQDAIALSYRFYSFGDAMLILPEAKATPLPDF

SEQ ID NO: 69056 - protein, 243 aa, Moorea producens
  misc_feature (1)..(243): tr|F4XV92|F4XV92_9CYAN S-adenosylmethionine:tRNA ribosy ltransferase-isomerase OS=Moorea producens 3L OX=489825 GN=LYNGBM3L_38820 PE=3 SV=1
MEIFTYELPTEFIAQRPIQPPEAAKLLITSPDAEIEETTFASLPQHLGSRDLLVFNDTAPNIRQGSGDYQDKIDDQTIFANKAGSVAVPTASLHFTPELISQLRASGKQVEFVTLQVGSSSSLCIESRQKPSSEQFEVSQETLNRLHRWKEAGGRVIAVGTTVVRALESAVRGMSGQTNLFITPGFRFELVGGVITNFHEPQTTHLLLVEAFLGRKRLEEVYQYALQHRFRFLSYGDGMLITI

SEQ ID NO: 69057 - protein, 398 aa, Moorea producens
  misc_feature (1)..(398): tr|A0A1D8TR30|A0A1D8TR30_9CYAN S-adenosylmethionine:tRN A ribosyltransferase-isomerase OS=Moorea producens PAL- 8-15-08-1 OX=1458985 GN=queA PE=3 SV=1
MTGIDKQTSKHQIDQLVSSYDYELPQEQIAQTPLSERDGSKLLVVDSPTHHSHHIFRELPELLQPGDLLILNNTRVIPARLYGRKSTGVPVEILLLEERPHQELQEGQHQSWLALVKPGRRLKPGAEIWFTPSSDLGLNDSTVSKHLTTPLPPLKATVLATDEATSGRILQFDFPEGVSWETLLELYGQVPLPPYIQDSQATPDQYQTIYAQKNGAVAAPTAGLHFTNQLMENCRQRGIRLGYITLHVGVGTFRPVEVEDITEHDMHGEWLEVPQSTVEQIQETRATGGRVIAVGTTVVRALEGAVVNGELQPYCGKTNLFIYPGYQWQVVEGLITNFHLPRSSLLMLVSAMVGRERLLTLYQDAIALSYRFYSFGDAMLILPEARDVPREQGIGNRE

SEQ ID NO: 69058 - protein, 342 aa, Moorella glycerini
  misc_feature (1)..(342): tr|A0A0C7NIN9|A0A0C7NIN9_9THEO S-adenosylmethionine:tRN A ribosyltransferase-isomerase OS=Moorella glycerini OX =55779 GN=queA PE=3 SV=1
MRLEEFDYDLPPELIAQTPAEPRDASRLLVLHRDRDYLEHRHFYDLPAYLHPGDVLVLNETRVIPARLWGRRAGTGARIEVLLLTQRDRDTWEALVRPGRRVPVGTEIIFGQGELRARAMATTGTGGRVLQFSYREGPLEALLDRLGEMPLPPYIKEKPEDPGRYQTVYARVEGSAAAPTAGLHFTPRLLEQLREQGVKIVNLLLHVGLGTFRPVKVENIEEHQMHAEYYEVTPEAAAAINVARARGGRVVAVGTTVVRTLETVATDDGLIQPGSGWTDIFIYPGYRFKAIDCLITNFHLPKSTLIMLVSAFAGREKILAAYRTAVAEGYRFFSFGDAMLIL

SEQ ID NO: 69059 - protein, 342 aa, Moorella humiferrea
  misc_feature (1)..(342): tr|A0A2T0AY52|A0A2T0AY52_9THEO S-adenosylmethionine:tRN A ribosyltransferase-isomerase OS=Moorella humiferrea O X=676965 GN=queA PE=3 SV=1
MRLEDFDYYLPAELIAQTPVEPRDASRLLVLHREKDMLEHRHFYDLPDYLCDGDVLVLNETRVLPARLWGRRAGTGARIEVLLLTRRTGDIWETLVRPARRVPVGTEIIFGRGELKGRVISVGKEGERLLEFAYEEGPFEALLERLGEMPLPPYIKEKPENPGRYQTVYARVDGSAAAPTAGLHFTPRLMERLQEKGIKLAYLLLHVGLGTFRPVKVENIEEHRMHAEYYEVTPETAAAINEARCRGGRVVAVGTTVVRTLETVATSEGVIRPGKGWTDIFIYPGYTFKAVDCLITNFHLPKSTLIMLVSAFAGREKILAAYKEAVAAGYRFFSFGDAMLIL

SEQ ID NO: 69060 - protein, 342 aa, Moorella mulderi
  misc_feature (1)..(342): tr|A0A151AXH8|A0A151AXH8_9THEO S-adenosylmethionine:tRN A ribosyltransferase-isomerase OS=Moorella mulderi DSM 14980 OX=1122241 GN=queA PE=3 SV=1
MRLEEFDYDLPPELIAQTPAEPRDASRLLVLHRDRDYLEHRHFYDLPAYLRPGDVLVLNETRVIPARLWGRRAGTGARIEVLLLTRRDRDTWEALVRPGRRVPVGTEIIFGQGELRARAMATTGAGGRVLQFSYREGPFEALLDRLGEMPLPPYIKEKPEDPGRYQTVYARVEGSAAAPTAGLHFTPRLLEQLREQGVKIVYLLLHVGLGTFRPVKVENIEEHQMHAEYYEVTPEAAAAINAARARGGRIVGVGTTVVRTLETVATETGLIQPGSGWTDIFIYPGYRFKAIDCLITNFHLPKSTLIMLVSAFAGREKILAAYRTAVAEGYRFFSFGDAMLIL

SEQ ID NO: 69061 - protein, 341 aa, Moorella sp.
  misc_feature (1)..(341): tr|A0A124FDP3|A0A124FDP3_9THEO S-adenosylmethionine:tRN A ribosyltransferase-isomerase OS=Moorella sp. 60_41 OX =1635264 GN=queA PE=3 SV=1
MRVEEFDYYLPPELIAQEPVEPRDSSRLLVLHRADGCLEHRRFYDLPQYLEKGDVLVLNDTRVIPARLFGRKAGTGGRVEVLLLKPLGGDRWETLVRPGRRVPPGTRLVFGTGELEARVLSVTEEGGRVLEFAYQESWEDLLATLGRVPLPPYIRRELADPERYQTVYARYPGSAASPTAGLHFTPRLLEEIKAKGVQVVSVLLHVGLGTFRPVKEETVEEHRMHAEYFVVSPKTAEVVNRAREGSGRVVAVGTTVVRTLETVATPEGRISPGEGYTDLFIYPGYSFKAVDCLITNFHLPRSTLLMLVSAFAGREKILQAYRVAVEEGYRFFSFGDAMLIL

SEQ ID NO: 69062 - protein, 346 aa, Moorella sp.
  misc_feature (1)..(346): tr|A0A4P6BMV5|A0A4P6BMV5_9THEO S-adenosylmethionine:tRN A ribosyltransferase-isomerase OS=Moorella sp. E306M OX =2572683 GN=queA PE=3 SV=1
MKGVLRLEEFDYDLPPELIAQTPVEPRDASRLLVLNRERGYLEHRHFYDLPDYLKEGDVLVLNETRVIPARLWGRRAGTGARIEVLLLTRRDRDTWEALVRPGRRVPVGTEIIFGQGELKARATATTSAGGRLLQFFYQEGPFETLLDRLGAMPLPPYIKEKPEDPGRYQTVYARVEGSVAAPTAGLHFTPRLLEQLRGQGVQIVYLLLHVGLGTFRPVKVQNIEEHHMHAEYYEVTPEAAAAINAARARGGRIVAVGTTVVRTLETVATEEGLIQPGNGWTDIFIYPGYRFKAVDCLITNFHLPKSTLIMLVSAFAGREKILAAYRTAVAEGYRFFSFGDAMLIL

SEQ ID NO: 69063 - protein, 342 aa, Moorella thermoacetica
  misc_feature (1)..(342): sp|Q2RHU2|QUEA_MOOTA S-adenosylmethionine:tRNA ribosylt ransferase-isomerase OS=Moorella thermoacetica (strain ATCC 39073 / JCM 9320) OX=264732 GN=queA PE=3 SV=1
MRIEEFDYELPPGQIAQQPVEPRDASRLLVLHREGGFLEHRHFYDLPRYLHPGDVLVVNETKVIPARLWGYRAGTGAKIEVLLLTRQEGDTWETLVRPGRRVPVGAELIFGRGELQARVKGVTPAGGRIMEFSYQEGPWEALLERLGEMPLPPYIKEKPADPGRYQTVYAREEGSAAAPTAGLHFTPRLLKELREQGIEIASILLHVGLGTFRPVKVENIQEHVMHAEYYAVTPAAAATINAARARGHRVVAVGTTVVRTLETVATADGVIHAGSGWTDIFIYPGYRFKAIDSLITNFHLPRSTLLMLVSAFAGREKILDAYRVAVREGYRFYSFGDAMLIL

SEQ ID NO: 69064 - protein, 342 aa, Moorella thermoacetica; identical to SEQ ID NO: 69063
  misc_feature (1)..(342): tr|A0A1J5NJ30|A0A1J5NJ30_MOOTH S-adenosylmethionine:tRN A ribosyltransferase-isomerase OS=Moorella thermoacetic a OX=1525 GN=queA PE=3 SV=1

SEQ ID NO: 69065 - protein, 356 aa, Moranella endobia
  misc_feature (1)..(356): tr|F7XY23|F7XY23_MOREP S-adenosylmethionine:tRNA ribosy ltransferase-isomerase OS=Moranella endobia (strain PCI T) OX=903503 GN=queA PE=3 SV=1
MRLDDFLFELPAHLIARYPQRERSACRLLSLDGETGALVHQVFTDLINNLAPGDLLVFNNTRVIPARLFGRKISGGKIEIMVERIINDKQVLAHVRASKVLKVGTTLLLGDDNSIAATMVARHDSLYELRFNDQRDVLTLLDEKGHIPLPPYIDRPDNVADSTRYQTVYSERPGAVAAPTAGLHFDELILAKLRAKGIEMAFVTLHVGAGTFQPVRVNRIEQHRMHSEYVEVPQEVVNAVLACKARAKRVVAVGTTSVRSLESAAAAAGEQVLAPFYGDTSIFIYPGYHFRVIDALITNFHLPKSTLIMLVSAFAGYHHTVAAYREAVAQEYRFFSYGDAMFITRNPTAANIAHMN

SEQ ID NO: 69066 - protein, 375 aa, Moraxella atlantae
  misc_feature (1)..(375): tr|A0A378Q4B3|A0A378Q4B3_9GAMM S-adenosylmethionine:tRN A ribosyltransferase-isomerase OS=Moraxella atlantae OX =34059 GN=queA PE=3 SV=1
MTLPTTSSAPSPTWTLDDFDYILPDALIARHPLAQRSASRLLHVAADGTLHDQHFTDLPALLSAGDLLVLNDTKVMNARLFGQKASGGAVEVLVERILSPDLSHNPPQYRALCHVRASRAPKAGQTLELAEGHIRVTVMGREANLFVLDFAQPIAPLLAAYGSLPIPPYFERMAEAEDDTRYQTVFHDPNKTASVAAPTASLHFDEALLQQLADQGVQRAFVTLHVGAGTFAPVKTNDISQHQMHSEYAELPADTAALINTTKAAGGRVIAVGTTVTRVLETAYRHTQPTQDQNAPLQLQAWAGDTDIFIYPPYRFGVIDRLITNFHLPKSTLLMLVSALAGRERMLAAYQHAIDAHYRFFSYGDAMLIDQADTQ

SEQ ID NO: 69067 - protein, 376 aa, Moraxella atlantae
  misc_feature (1)..(376): tr|A0A1B8QG01|A0A1B8QG01_9GAMM S-adenosylmethionine:tRN A ribosyltransferase-isomerase OS=Moraxella atlantae OX =34059 GN=queA PE=3 SV=1
MTLPTTSSAPSPTWTLDDFDYILPDALIARHPLAQRSASRLLHVAADGTLHDQHFTDLPTLLSAGDLLILNDTKVMNARLFGQKASGGAVEVLVERILSPDLSHNPPQYRALCHVRASRAPKAGQTLELAEGHIRVTVMGREANLFVLDFAQPIAPLLTAYGSLPIPPYFERMAEAEDDTRYQTVFHDPNKTASVAAPTASLHFDEALLQQLADQGVQRAFVTLHVGAGTFAPVKTNDISQHQMHSEYAELPADTAALINTTKAAGGRVIAVGTTVTRVLETAYRHTQPTQDQNAPLQLQAWAGDTDIFIYPPYRFGVIDRLITNFHLPKSTLLMLVSALAGRERMLAAYQHAIDAHYRFFSYGDAMLIDKVTNQG

SEQ ID NO: 69068 - protein, 349 aa, Moraxella bovis
  misc_feature (1)..(349): tr|A0A378PYA9|A0A378PYA9_MORBO S-adenosylmethionine:tRN A ribosyltransferase-isomerase OS=Moraxella bovis OX=47 6 GN=queA PE=3 SV=1
MNTPLLTADFDYHLPDELIARYPLAVRSGSRLLHVQGDTLADLNFSDLPDLLNKGDLLVLNDTKVMKARLFGVKDTGGAVEVLIERITDHDNHIAHCHVRSSRALKVGQAVSLADEGMTATMCGRAENLFVLQFDAPILADLERYGQMPIPPYFERTADDTDDTRYQTVFHDPAKQASVAAPTASLHFDDETLQKLADKGVEIAFVTLHVGAGTFAPVKADDLTDHIMHAEYAHLPQATADKINATKAQGGQVIAVGTTVTRTLETAHLHRVDGQLAEFSGDTQIFIYPPYEFGVVDRLITNFHLPKSTLLMLVSAFAGTDNIKNAYAHAIHKKYRFFSYGDAMILDRF

SEQ ID NO: 69069 - protein, 349 aa, Moraxella bovis
  misc_feature (1)..(349): tr|A0A2Z4R6N2|A0A2Z4R6N2_MORBO S-adenosylmethionine:tRN A ribosyltransferase-isomerase OS=Moraxella bovis OX=47 6 GN=queA PE=3 SV=1
MNTPLLTADFDYHLPDELIARYPLAVRSGSRLLHVQGDTLADLNFSDLPDLLNKGDLLVLNDTKVMKARLFGVKDTGGAVEVLIERITDHDNHIAHCHVRSSRALKVGQTVSLADEGMTATMCGRAQNLFVLQFDAPILADLERYGQMPIPPYFERTADDTDDTRYQTVFHDPAKQASVAAPTASLHFDDETLQKLANKGVEIAFVTLHVGAGTFAPVKADDLTDHIMHAEYAHLPQATADKINATKAQGGQVIAVGTTVTRTLETAHLYRVGGQLAEFSGDTQIFIYPPYEFGVVDRLITNFHLPKSTLLMLVSAFAGTDNIKNAYAHAIDKKYRFFSYGDAMILDKG

SEQ ID NO: 69070 - protein, 347 aa, Moraxella bovoculi
  misc_feature (1)..(347): tr|A0A0U2B1I4|A0A0U2B1I4_9GAMM S-adenosylmethionine:tRN A ribosyltransferase-isomerase OS=Moraxella bovoculi OX =386891 GN=queA PE=3 SV=1
MPLLTADFDYHLPDELIARYPLAVRSSSRLLHVQGDTLADLDFTDLPDLLNKGDLLVLNDTKVMKARLFGVKDTGGAVEVLIERITDHDNHIAHCHVRSSRALKVGQTVSLADGGMAATMCGRAENLFILQFDAPILADLERYGQIPIPPYFERTADDTDDTRYQTVFHDPAKQASVAAPTASLHFDDETLACLTDKGVEIAFVTLHVGAGTFAPVKADDLTDHIMHAEYAHLPQATADKINTTKAQGGQVIAVGTTVTRTLETAHLHRVDGQLTEFAGDTQIFIYPPYDFGVVDRLITNFHLPKSTLLMLVSAFAGTDNIKHAYAHAIDKKYRFFSYGDAMILDKS

SEQ ID NO: 69071 - protein, 347 aa, Moraxella bovoculi
  misc_feature (1)..(347): tr|A0A066UNF8|A0A066UNF8_9GAMM S-adenosylmethionine:tRN A ribosyltransferase-isomerase OS=Moraxella bovoculi 23 7 OX=743974 GN=queA PE=3 SV=1
MPLLTTDFDYHLPDELIARYPLAVRSSSRLLHVQGDTLSDLNFTDLPDLLNKGDLLVLNDTKVMKARLFGVKDTGGAVEVLIERITDHDNHIAHCHVRSSRALKVGQMVSLADGGMTATMCGRAENLFILQFDAPILANLERYGQMPIPPYFERTADDTDDTRYQTVFHDPAKQASVAAPTASLHFDDETLACLSDKGVEIAFVTLHVGAGTFAPVKADDLTDHIMHAEYAHLPQVTADKINATKAQGGRVIAVGTTVTRTLETAHLYRVDGQLTEFAGDTQIFIYPPYDFGVVDRLITNFHLPKSTLLMLVSAFAGTDNIKHAYAHAIDRKYRFFSYGDAMILDKS

SEQ ID NO: 69072 - protein, 360 aa, Moraxella canis
  misc_feature (1)..(360): tr|A0A1S9ZM65|A0A1S9ZM65_9GAMM S-adenosylmethionine:tRN A ribosyltransferase-isomerase OS=Moraxella canis OX=90 239 GN=queA PE=3 SV=1
MTQQTKPLLLSDYDYHLPESLIARYPLENRTSSRLLHVSDRTCQDLHFGDLIKLLNPGDLLVLNDTKVIKARLHGQKQTGGAVEVLVERILPDEAGAPANQALCHVRSSRSPKAGQVLSLADDQMRATVMGRQDNLFILSFESPILADLDKYGQMPIPPYFERKADEKDDERYQTVFHDPDKSASVAAPTASLHFDEALLTQLRQKGVQIAFVTLHVGSGTFAPVKVDNLTDHIMHAEYAHLPTPTAALINATKVAGGRIVAVGTTVTRTLETAHLHRIDGELVEFSGDTQIFIYPPYEFGVVDCLITNFHLPKSTLLMLVSAFAGTQAIKDAYNHAIEHQYRFFSYGDAMFLERQTSSR

SEQ ID NO: 69073 - protein, 349 aa, Moraxella caprae
  misc_feature (1)..(349): tr|A0A378R2D3|A0A378R2D3_9GAMM S-adenosylmethionine:tRN A ribosyltransferase-isomerase OS=Moraxella caprae OX=9 0240 GN=queA PE=3 SV=1
MNTPLLTADFDYHLPDELIARYPLAVRSSSRLLHVQGDTLADLNFSDLPDLLNKGDLLVLNDTKVMKARLFGVKDTGGAVEVLIERITDHDNHIAHCHVRSSRALKVGQTVSLADGGMTATMCGRAENLFILQFDAPILADLERYGQMPIPPYFERTADDTDDTRYQTVFHDPTKQASVAAPTASLHFDDETLQKLADKGVEIAFVTLHVGAGTFAPVKADDLTDHIMHAEYAHLPQATADKINTTKAQGGQVIAVGTTVTRTLETAHLHRVDGQLAEFAGDTQIFIYPPYDFGVVDRLITNFHLPKSTLLMLVSAFAGADNIKNAYAHAIDKKYRFFSYGDAMILDKG

SEQ ID NO: 69074 - protein, 363 aa, Moraxella catarrhalis
  misc_feature (1)..(363): tr|A0A198XC22|A0A198XC22_MORCA S-adenosylmethionine:tRN A ribosyltransferase-isomerase OS=Moraxella catarrhalis OX=480 GN=queA PE=3 SV=1
MTILSAMTQQTQPVLLSDYDYHLPDDLIARYPLNERTSSRLLHVSKNSCQDLQFTDLPNLLKSGDLLVLNDTKVIKARLHGQKQTGGAVEVLIERILPDEINENLYKALCHVRSSRSPKVGQTLNLANNQMQATVIGRQDNLFILGFRSPILDDLDNYGQMPIPPYFERKADEQDDERYQTVFHNPTKSASVAAPTASLHFDEALLTQLREKGVQIAFVTLHVGSGTFAPVKVDNLADHVMHAEYAHLPASTATLINNTKSAGGRIIAVGTTVTRTLETAHRHRIHGELVEFLGDTQIFIYPPYEFGVVDCLITNFHLPKSTLLMLVSAFAGTQTIKDAYNHAIKNKYRFFSYGDAMFLEKAQ

SEQ ID NO: 69075 - protein, 357 aa, Moraxella catarrhalis
  misc_feature (1)..(357): tr|A0A3A9MJT2|A0A3A9MJT2_MORCA S-adenosylmethionine:tRN A ribosyltransferase-isomerase OS=Moraxella catarrhalis OX=480 GN=queA PE=3 SV=1
MTQQTQPVLLSDYDYHLPDDLIARYPLNERTSSRLLHVSKNSCQDLRFTDLPNLLKSGDLLVLNDTKVIKARLHGQKQTGGAVEVLIERILPDEINNNLYKALCHVRSSRSPKVGQTLNLANNQMQATVIGRQDNLFILGFRSPILADLDNYGQMPIPPYFERKADETDDERYQTVFHNPTKSASVAAPTASLHFDDALLTQLRKKGVQIAFVTLHVGSGTFTPVKVDNLADHVMHAEYAHLPASTATLINNTKSAGGRIIAVGTTVTRTLETAHRHRIHGELVEFLGDTQIFIYPPYEFGVVDCLITNFHLPKSTLLMLVSAFAGTQTIQEAYNHAIKNKYRFFSYGDAMFLEKAQ

SEQ ID NO: 69076 - protein, 362 aa, Moraxella caviae
  misc_feature (1)..(362): tr|A0A1T0A2G5|A0A1T0A2G5_9GAMM S-adenosylmethionine:tRN A ribosyltransferase-isomerase OS=Moraxella caviae OX=3 4060 GN=queA PE=3 SV=1
MNAQTQTPAHTPILLSDYDYELPENLIATHPLDTRSASRLLCVANGALTDCQFADLPKLLNAGDLLVMNDTKVMKARLFGKKETGGAVEVLIERIIDPQKHIAICHIKASRALKAGQSVSLADGNMRATMLERAQNLFVLQFDAPILADLERFGELPIPPYFDRAADTQDDERYQTIFHDPKKTASVAAPTASLHFDDATLNALKDKGVDTAFVTLHVGAGTFAPVKTDDVSQHVMHAEFAHLPQATADKINATKARGGKIIAVGTTVTRVLETAHLHRKDGKLAEFAGDTQIFIYPPYQFGVVDRLITNFHLPKSTLLMLVSAFAGTTTIRHAYQHAIAHQYRFFSYGDAMLLDKCGGEMA

SEQ ID NO: 69077 - protein, 357 aa, Moraxella cuniculi
  misc_feature (1)..(357): tr|A0A1N7FYY0|A0A1N7FYY0_9GAMM S-adenosylmethionine:tRN A ribosyltransferase-isomerase OS=Moraxella cuniculi DS M 21768 OX=1122245 GN=queA PE=3 SV=1
MTQSDQTPLVDDYDYHLPEQLIARTPLAKRSDSRLLHLTQHGYQDRQFTDLPSLLRAGDLLVLNDTKVMKARLHGQKATGGAVEVLVERLLFDVANAPYAALCHVRASRSPKIGQTLKLADNQLSATVIDRKENLFVLAFDVPILPALEQFGQMPIPPYFQRSATSLDDERYQSVFHNPNHTASVAAPTASLHFDDALLQQIKDKGVNIAFVTLNVGAGTFAPVKAAKLSEHIMHAEYAHLPAATAELINQTKAAGGRVIAVGTTVTRVLETAYLQRTCDTLHEFAGDTQIFIYPPYQFGVIDCLITNFHLPKSTLLMLVSAFMGTDTIKAAYAHAIKQEYRFFSYGDAMFLERATN

SEQ ID NO: 69078 - protein, 357 aa, Moraxella cuniculi
  misc_feature (1)..(357): tr|A0A3S4UVB8|A0A3S4UVB8_9GAMM S-adenosylmethionine:tRN A ribosyltransferase-isomerase OS=Moraxella cuniculi OX =34061 GN=queA PE=3 SV=1
MTQSDQTPLVDDYDYHLPEQLIARTPLAKRSDSRLLHLTQHGYQDRQFTDLPSLLRAGDLLVLNDTKVMKARLYGQKATGGAVEVLVERLLFNVANAPYAALCHVRASRSPKIGQTLKLADNQLSATVIDRKENLFVLAFDVPILPALEQFGQMPIPPYFQRSATSLDDERYQSVFHNPNHTASVAAPTASLHFDDALLQQIKDKGVNIAFVTLNVGAGTFAPVKAAKLSEHIMHAEYAHLPAATAELINQTKAAGGRVIAVGTTVTRVLETAYLQRTCDTLHEFAGDTQIFIYPPYQFGVIDCLITNFHLPKSTLLMLVSAFMGTDTIKAAYAHAIKQEYRFFSYGDAMFLERATN

SEQ ID NO: 69079 - protein, 349 aa, Moraxella equi
  misc_feature (1)..(349): tr|A0A378QM96|A0A378QM96_9GAMM S-adenosylmethionine:tRN A ribosyltransferase-isomerase OS=Moraxella equi OX=604 42 GN=queA PE=3 SV=1
MNTPLLTADFDYHLPDELIARYPLAVRSSSRLLHVQGDTLADLNFSDLPDLLNKGDLLVLNDTKVMKARLFGVKDTGGAVEVLVERITDHGNHIAHCHVRSSRALKVGQAVSLADGGMRAVMCGRAQNLFVLQFDAPILADLERYGQMPIPPYFERMADDTDDTRYQTVFHDPTKQASVAAPTASLHFDDETLQKLANKGVEIAFVTLHVGAGTFAPVKADDLTDHIMHAEYAHLPQTTADKINAIKAQGGQIIAVGTTVTRTLETAHLHRVDGQLVEFAGDTQIFIYPPYDFGVVDRLITNFHLPKSTLLMLVSAFAGTDNIKNAYAHAIHKKYRFFSYGDAMILDKG

SEQ ID NO: 69080 - protein, 349 aa, Moraxella lacunata
  misc_feature (1)..(349): tr|A0A378TVT9|A0A378TVT9_MORLA S-adenosylmethionine:tRN A ribosyltransferase-isomerase OS=Moraxella lacunata OX =477 GN=queA PE=3 SV=1
MKTPLLTADFDYHLPDELIARYPLAVRSSSRLLHVQGDTLADLNFTDLPDLLNKGDLLVLNDTKVMKARLFGVKDTGGAVEVLIERITDHDNHIAHCHVRSSRALKVGQAVSLADGSMRAVMCGRAENLFVLQFDAPILADLERYGQMPIPPYFERMADDTDDTRYQTVFHDPTKQASVAAPTASLHFDDETLQKLADKGVEIAFVTLHVGAGTFAPVKTDDLTDHIMHAEYAHLPQATADKINATKAQGGQVIAVGTTVTRTLETAHLHRVDGQLAEFAGDTQIFIYPPYEFGVMDRLITNFHLPKSTLLMLVSAFAGTDNIKNAYAHAIHKKYRFFSYGDAMILDKG

SEQ ID NO: 69081 - protein, 349 aa, Moraxella lacunata
  misc_feature (1)..(349): tr|A0A378QFB1|A0A378QFB1_MORLA S-adenosylmethionine:tRN A ribosyltransferase-isomerase OS=Moraxella lacunata OX =477 GN=queA PE=3 SV=1
MNTPLLTADFDYHLPDELIARYPLAVRSSSRLLHVQGDTLTDLHFTDLPDLLNKGDLLVLNDTKVMKARLFGVKDTGGAVEVLIERITDHEQNIAHCHVRSSRALKVGQAVSLADGGIRAVMCGRAQNLFILQFDAPILADLENHGHMPIPPYFERTADDTDDARYQTVFYDPAKQASVAAPTASLHFDDDTLQRLTDKGVQMAFITLHVGAGTFAPVKADDLSDHVMHAEYAHLPQATADKINATKAQNGKIIAVGTTVARTLETAHLHRVDGQLTEFCGDTQIFIYPPYEFGVVDRLITNFHLPKSTLLMLVCAFAGTNNIKHAYAHAISEQYRFFSYGDAMILDGA

SEQ ID NO: 69082 - protein, 406 aa, Moraxella lincolnii
  misc_feature (1)..(406): tr|A0A1T0CKF2|A0A1T0CKF2_9GAMM S-adenosylmethionine:tRN A ribosyltransferase-isomerase OS=Moraxella lincolnii O X=90241 GN=queA PE=3 SV=1
MHSPDRHPSVNQPSINNPSVNYLRVNDYDYELSDELIARHPLAQRSASRLLYLPANQQPQDKQFADLPSLLNQGDLVVFNDTKVMKARLFGQKDTGGKIEVLVERIDPILNPAFGNSAFGKNKNTVDATCLQTCLQNKEHHKTYPYLALCHIKASKAPKLEQHIILANGHMQGKVLARQNNLFVVGFTKPVLPDLEQHGELPIPPYFDRRADDGDDQRYQTVFFDPTKMASVAAPTASLHFDDNILNQLNIKGVNTAFVTLHVGAGTFAPVKTNHILSHKMHSEYAELPQMTADLINQVKSNGGQVVAVGTTVTRVLETAFQKTASFDKPTLSAWAGDTDIFIYPSFKFGVVDRLLTNFHLPKSTLLMLVSAFAGKTQIEHAYQHAIQQKYRFFSYGDAMLLDKLT

SEQ ID NO: 69083 - protein, 376 aa, Moraxella macacae
  misc_feature (1)..(376): tr|L2F6A7|L2F6A7_9GAMM S-adenosylmethionine:tRNA ribosy ltransferase-isomerase OS=Moraxella macacae 0408225 OX= 1230338 GN=queA PE=3 SV=1
MQCFSTKQSTTVNHIMKLSDFDYDLPNALIARYPLAERCASKLLYVNSHGDLQDLAFIDLPNLLNPGDLIVFNDTKVMKARLFGQKDTGGAVEILVERILPNDKNHTNTALCHVRSSKSPKINQTLYFANQQVTATMQGRSDNLFVLVFNQPILPVLEQFGTLPIPPYFERPADDNDTDRYQTVFHDPNKLASVAAPTASLHFDAKILTKLTANGVNTAFVTLHVGAGTFAPVKTLDILQHKMHSEYAEISQTTADLINQTKRQGGKIIAVGTTVTRVLETAFQKTASFANPNLSAWTGDTDIFIYPSYKFGVIDRLITNFHLPKSTLLMLVSAFNGTKNIKNAYLHATKNNYRFFSYGDAMILDKQAIYDETLNT

SEQ ID NO: 69084 - protein, 349 aa, Moraxella nonliquefaciens
  misc_feature (1)..(349): tr|A0A1B8QJ48|A0A1B8QJ48_MORNO S-adenosylmethionine:tRN A ribosyltransferase-isomerase OS=Moraxella nonliquefac iens OX=478 GN=queA PE=3 SV=1
MNTPLLTADFDYHLPDELIARYPLAVRSSSRLLHVKGNTLGDRHFSDLPELLNKGDLLVLNDTKVMRARLFGVKDTGGAVEVLIERIIDHEHNIAHCHVRSGRALKIGQTVSLADGNMSATMCGRVQNLFILQFNAPILADLENHGHMPIPPYFERTADDTDDARYQTVFYDPAKQASVAAPTASLHFDDDTLQRLTDKGVQMAFITLHVGAGTFAPVKADDLSDHVMHAEYAHLPQATADKINATKAQNGKIIAVGTTVARTLETAHLHRVDGQLTEFCGDTQIFIYPPYEFGVVDRLITNFHLPKSTLLMLVCAFAGTNNIKHAYAHAISEQYRFFSYGDAMILDGA

SEQ ID NO: 69085 - protein, 349 aa, Moraxella nonliquefaciens
  misc_feature (1)..(349): tr|A0A1B8PN20|A0A1B8PN20_MORNO S-adenosylmethionine:tRN A ribosyltransferase-isomerase OS=Moraxella nonliquefac iens OX=478 GN=queA PE=3 SV=1
MNTPLLTADFDYHLPDELIARYPLAVRSSSRLLHVKGNTLGDRHFSDLPELLNKGDLLVLNDTKVMRARLFGVKDTGGAVEVLIERIIDHEHNIAHCHVRSGRALKIGQTVSLADGNMSATMCGRVQNLFILQFNAPILADLENHGHMPIPPYFERTADDTDDARYQTVFYDPAKQASVAAPTASLHFDDDTLQRLTDKGVQMAFITLHVGAGTFAPVKADDLSDHVMHAEYAHLPQTTADKINATKAQNGKIIAVGTTVARTLETAHLHRVDGQLTEFCGDTQIFIYPPYEFGVVDRLITNFHLPKSTLLMLVCAFAGTNNIKHAYAHAISEQYRFFSYGDAMILDGV

SEQ ID NO: 69086 - protein, 357 aa, Moraxella osloensis
  misc_feature (1)..(357): tr|A0A2K8K0S9|A0A2K8K0S9_9GAMM S-adenosylmethionine:tRN A ribosyltransferase-isomerase OS=Moraxella osloensis O X=34062 GN=queA PE=3 SV=1
MPLTLDDFDYQLPDELIARYPLAVRSASRLLYLPAHGQPKDQQFVDLPELLNSGDLVVFNDTKVMKARLFGQKASGGAVEVLVERILPDDVTMSQKHTALCHVRASRSPKEGQTLSLADGNTHATVMGREDNLFLLEFDQPILPVLEHYGELPIPPYFERHADDNDETRYQTVFHDPAKLASVAAPTASLHFDDNVLAAFKSKGINTAFVTLHVGAGTFAPVKTEDILRHKMHSEYAELPQATADLINQTKARGGQVIAVGTTVTRVLETAFQKTASFENPMLSAWSGDTDIFIYPSFRFGVIDKLITNFHLPKSTLLMLVSAFAGSEPIKQAYQHAIEQRYRFFSYGDAMLLDKVV

SEQ ID NO: 69087 - protein, 357 aa, Moraxella osloensis
  misc_feature (1)..(357): tr|A0A173MVI2|A0A173MVI2_9GAMM S-adenosylmethionine:tRN A ribosyltransferase-isomerase OS=Moraxella osloensis O X=34062 GN=queA PE=3 SV=1
MPLTLDDFDYQLPDELIARYPLAVRSASRLLYLPAHGQPKDQQFVDLPELLNSGDLVVFNDTKVMKARLFGQKASGGAVEVLVERILPDDDTGNQKHTALCHVRASRSPKEGQTLSLADGNIHATVMGREDNLFLLEFDQPILPVLEHYGELPIPPYFERHADDNDETRYQTVFHDPAKLASVAAPTASLHFDDNVLAALKSKGINTAFVTLHVGAGTFAPVKTEDILRHKMHSEYAELPQATADLINQTKARGGQVIAVGTTVTRVLETAFQKTANFENPMLSAWSGDTDIFIYPSFRFGVIDKLITNFHLPKSTLLMLVSAFAGSEPIKQAYQHAIEQRYRFFSYGDAMLLDKVV

SEQ ID NO: 69088 - protein, 347 aa, Moraxella ovis
  misc_feature (1)..(347): tr|A0A378PKC5|A0A378PKC5_9GAMM S-adenosylmethionine:tRN A ribosyltransferase-isomerase OS=Moraxella ovis OX=294 33 GN=queA PE=3 SV=1
MPLLTADFDYHLPDELIARYPLAVRSSSRLLHVQGDTLTDLNFTDLPDLLNKGDLLVLNDTKVMKARLFGVKDTGGSVEVLIERITDHGNHIAHCHVRSSRALKVGQTVSLADGGMTATMYGRAENLFILQFDAPILADLERYGQMPIPPYFERTADDTDDTRYQTVFHDPAKQASVAAPTASLHFDDETLACLTDKGVEIAFVTLHVGAGTFAPVKADDLTDHIMHAEYAHLPQVTADKINTTKAQGGQVIAVGTTVTRTLETAHLHRVDGQLTEFAGDTQIFIYPPYDFGVVDRLITNFHLPKSTLLMLVSAFAGTDNIKHAYAHAIDKKYRFFSYGDAMILDKS

SEQ ID NO: 69089 - protein, 356 aa, Moraxella pluranimalium
  misc_feature (1)..(356): tr|A0A1T0CVC2|A0A1T0CVC2_9GAMM S-adenosylmethionine:tRN A ribosyltransferase-isomerase OS=Moraxella pluranimali um OX=470453 GN=queA PE=3 SV=1
MSHTDQPVLISDYDYDLPEALIARHPLDARSGSRLLHMADGVINDKQFTDLAELLSANDLLVLNDTKVMKARLHGQKATGGAVEVLVERLLPNEDGQAPHRALCHVRSSRSPKAGQMLSLADGKMGATVLGREENLFVLAFDAPILADLDCYGQMPIPPYFERDADEMDDERYQTVFHDPAKTGSVAAPTASLHFDDELLAKLKQKGVKTAFVTLNVGAGTFAPVKADDVRDHIMHSEYAHLPKETAELINQTKANGGRIIAVGTTVTRTLETAYLHRIDDRLVEYAGDTNIFIYPPYRFGVVDCLVTNFHLPKSTLLMLVSAFAGTDHIKQAYQHAIDHGYRFFSYGDAMFLEKV

SEQ ID NO: 69090 - protein, 357 aa, Moraxella porci
  misc_feature (1)..(357): tr|A0A1T0CSD5|A0A1T0CSD5_9GAMM S-adenosylmethionine:tRN A ribosyltransferase-isomerase OS=Moraxella porci DSM 2 5326 OX=573983 GN=queA PE=3 SV=1
MSHTDQPVLISDYDYDLPEALIARHPLDQRSSSRLLYVADGVISDRQFTDLSELLKDGDLLVLNDTKVMKARLHGQKATGGVVEVLVERLLPDEDGHPPHRALCHVRSSRSPKTGQTLSLANNKMHATVLGREENLFILAFDAPILPDLDRYGQMPIPPYFERDADEMDDERYQTVFHDPAKTGSVAAPTASLHFDDDLLDKLKQKGVKTAFVTLNVGAGTFAPVKADDVRDHVMHSEYAHLPKETAELINQTKANGGRIIAVGTTVTRTLETAYLHHKDSKLVEYAGDTNIFIYPPYRFGVVDCLVTNFHLPKSTLLMLVSAFAGIDPIKQAYQHAIDHNYRFFSYGDAMFLEKSI

SEQ ID NO: 69091 - protein, 348 aa, Moraxella sp.
  misc_feature (1)..(348): tr|A0A229GNM1|A0A229GNM1_9GAMM S-adenosylmethionine:tRN A ribosyltransferase-isomerase OS=Moraxella sp. VT-16-1 2 OX=2014877 GN=queA PE=3 SV=1
MPILTSDFDYDLPDELIARYPLATRSASRLLHVKGDKLSDLCFTDLPSLLHQGDLLVLNDTKVMKARLFGKKDTGGAVEVLVERITDHERYIAACHVRSSRALKMGQTVSLADGAMSATMCGRDENLFILQFVNPILADLDKYGQMPIPPYFERTATKTDDERYQTVFCDDAKQASVAAPTASLHFDDKTLQILKDKGVDIAFVTLHVGAGTFAPVKTDDLTDHVMHAEYAHLPQQTADKINAAKANGKKIIAVGTTVARTLETAHLHRVNGLLTEFRGDTQIFIYPPYEFGVVDRLITNFHLPKSTLLMLVSAFAGTDNIKHAYVHAIGQQYRFFSYGDAMLLDKCP

SEQ ID NO: 69092 - protein, 357 aa, Moraxella sp.
  misc_feature (1)..(357): tr|A0A2K0XUA9|A0A2K0XUA9_9GAMM S-adenosylmethionine:tRN A ribosyltransferase-isomerase OS=Moraxella sp. RCAD013 7 OX=1775913 GN=queA PE=3 SV=1
MSHTDQPVLISDYDYDLPEALIARHPLDQRSSSRLLYVADGVISDRQFTDLAELLKDGDLLVLNDTKVMKARLHGQKATGGVVEVLVERLLPDEVGHPPHRALCHVRSSRSPKAGQTLSLADHKMHATVLGREENLFILAFDAPILPDLDRYGQMPIPPYFERDADEMDDERYQTVFHDPAKTGSVAAPTASLHFDDDLLDKLKQKGVKTAFVTLNVGAGTFAPVKADDVRDHVMHSEYAHLPKETAELINQTKANGGRIIAVGTTVTRTLETAYLHHKDGKLIEYAGDTNIFIYPPYRFGVVDCLVTNFHLPKSTLLMLVSAFAGIDSIKKAYQHAIHHNYRFFSYGDAMFLEKSV

SEQ ID NO: 69093 - protein, 345 aa, Moraxellaceae bacterium
  misc_feature (1)..(345): tr|A0A345P7Q8|A0A345P7Q8_9GAMM S-adenosylmethionine:tRN A ribosyltransferase-isomerase OS=Moraxellaceae bacteri um HYN0046 OX=2283318 GN=queA PE=3 SV=1
MQLADFHYFLPDELIARYPLAGRSDSRLLCLSHQGEISDRQIVDLPDLLNTGDLLVLNDTRVIKARLHGLRPSGGAVEVLVERITDTYHGLAHVRASNSPKSGAVLTLAEGQVKATVQGRKDNLYILEFDQPVLEALEQYGALPIPPYFNRPAEESDETRYQTVFHDPEKSASVAAPTAGLHIDEALLERLHVKGIKTAFVTLHVGAGTFQPVRTENIKDHVMHAEWGEVPQETVDAVRATQAQGGKVIAVGTTATRALESAARAHGGSLQAWSGETDIFIYPGYQFAVIDRLMTNFHLPESTLLMLVSALTGRDKIMSAYQHAIAQKYRFFSYGDAMLIDRANT

SEQ ID NO: 69094 - protein, 342 aa, Moraxellaceae bacterium
  misc_feature (1)..(342): tr|A0A2A4UZC8|A0A2A4UZC8_9GAMM S-adenosylmethionine:tRN A ribosyltransferase-isomerase OS=Moraxellaceae bacteri um OX=1889775 GN=queA PE=3 SV=1
MKVSDFHFDLPEELIAHYPAKDRSASRLLHLNSQSGQLDHGVFPDLLNYLRPGDLLIFNNTRVMAARLYGHKPSGGKVELLVERVIDGQLALAMLKSSKPARPGLQFELDTGILVEVVERREALYLIRLVDECDWNAVFERIGHMPLPPYIKRDDEKVDEDRYQTVYSEKLGAVAAPTAGLHFDQAMMSQLKERSIDIGFVTLHVGLGTFLPVRVDSLEEHIMHSEWMELTADLVEKINLTRRQGGRVIAVGTTSVRCLESAAKSGALQAYCGETDIFIYPGYQFQVVDALLTNFHLSQSTLIMLVAAFAGWDNIKHAYETAVEERYRFFSYGDAMFIDGKT

SEQ ID NO: 69095 - protein, 358 aa, Morganella morganii
  misc_feature (1)..(358): tr|M7CIW6|M7CIW6_MORMO S-adenosylmethionine:tRNA ribosy ltransferase-isomerase OS=Morganella morganii SC01 OX=1 239989 GN=queA PE=3 SV=1
MRVADFTFELPDELIARYPQAERSKCRLLSLDGISGELNHGIFTEVLNKLNPGDLLVFNDTRVIPARMFGRKASGGKIEVLVERMLDEHRVLAHVRASKAPKEGAELLLGEDESVKATMVARHDALFEIRFDDERDVLTILNQIGHMPLPPYIDRPDEESDRELYQTVYNDRPGAVAAPTAGLHFDEPLLAALREKGVEMAFVTLHVGAGTFQPVRVDNIEDHIMHSEYAEVPQNVVDAVLACKARGNKVVAVGTTSVRSLESAAKAAQDALIAPFFDDTQIFIYPGYEYQVVDALITNFHLPESTLIMLVSAFAGYQHTMQAYEAAVREHYRFFSYGDAMFITRNPQAKFEKVGHDD

SEQ ID NO: 69096 - protein, 358 aa, Morganella morganii
  misc_feature (1)..(358): tr|A0A2C5T4M8|A0A2C5T4M8_MORMO S-adenosylmethionine:tRN A ribosyltransferase-isomerase OS=Morganella morganii O X=582 GN=queA PE=3 SV=1
MRVADFTFELPDELIARYPQAERSKCRLLSLDGISGELNHGIFTEVLNKLNPGDLLVFNDTRVIPARMFGRKASGGKIEVLVERMLDEHRVLAHVRASKAPKEGAELLLGEDESVKATMVARHDALFEIRFDDERDVLTILNQIGHMPLPPYIDRPDEESDRELYQTVYNDRPGAVAAPTAGLHFDEPLLAALREKGVEMAFVTLHVGAGTFQPVRVDNIEDHIMHSEYAEVPQNVVDAVLACKARGNKVIAVGTTSVRSLESAAKAAQDALIAPFFDDTQIFIYPGYEYQVVDALITNFHLPESTLIMLVSAFAGYQHTMQAYEAAVRERYRFFSYGDAMFITRNPQAKFEKVGHDD

SEQ ID NO: 69097 - protein, 358 aa, Morganella psychrotolerans
  misc_feature (1)..(358): tr|A0A1B8H3U7|A0A1B8H3U7_9GAMM S-adenosylmethionine:tRN A ribosyltransferase-isomerase OS=Morganella psychrotol erans OX=368603 GN=queA PE=3 SV=1
MRVADFTFELPDELIARYPQAERSKCRLLSLDGVSGELNHGIFTDVLNKLNPGDLLVFNDTRVIPARMFGRKASGGKIEVLVERVLDEHSVLAHVRASKAPKPGTELLLGDDESVQATMTARHDALFEIRFDDERDVLTILNQIGHIPLPPYIDRPDEASDRELYQTVYNDRPGAVAAPTAGLHFDEPLLAALREKGVEMAFVTLHVGAGTFQPVRVDKIEEHIMHSEYAEVPQNVVDAVLACKARGNKVVAVGTTSVRSLESAAKASPDALIAPFFDDTQIFIYPGYEYQVVDALITNFHLSESTLIMLVSAFAGYQHTMQAYKAAIQERYRFFSYGDAMFISRNPQAKFEKVGQDD

SEQ ID NO: 69098 - protein, 358 aa, Morganella psychrotolerans
  misc_feature (1)..(358): tr|A0A1B8H194|A0A1B8H194_9GAMM S-adenosylmethionine:tRN A ribosyltransferase-isomerase OS=Morganella psychrotol erans OX=368603 GN=queA PE=3 SV=1
MRVADFTFELPDELIARYPQAERSKCRLLSLDGVSGELNHGIFTDVLDKLNPGDLLVFNDTRVIPARMFGRKASGGKIEVLVERMLDDHRVLAHVRASKAPKPGTELLLGDDESVKATMTVRHDALFEIRFDDERDVLTILNQIGHIPLPPYIDRPDEASDRELYQTVYNDRPGAVAAPTAGLHFDEPLLAALREKGVEMAFVTLHVGAGTFQPVRVDKIEEHIMHSEYAEVPQNVVDAVLACKARGNKVVAVGTTSVRSLESAAKASPDALIAPFFDDTQIFIYPGYEYQVVDALITNFHLPESTLIMLVSAFAGYQHTMQAYDAAIQERYRFFSYGDAMFISRDPQAKFEKVGHDD

SEQ ID NO: 69099 - protein, 358 aa, Morganella sp.
  misc_feature (1)..(358): tr|A0A3D3HWZ2|A0A3D3HWZ2_9GAMM S-adenosylmethionine:tRN A ribosyltransferase-isomerase OS=Morganella sp. (in: B acteria) OX=1912315 GN=queA PE=3 SV=1
MRVADFTFELPDELIARYPQAERSKCRLLSLDGVSGELNHGIFTDVLNKLNPGDLLVFNDTRVIPARMFGRKASGGKIEVLVERMLDDHRVLAHVRASKAPKPGTELLLGDDESVKATMTVRHDALFEIRFDDERDVLTILNQIGHIPLPPYIDRPDEASDRELYQTVYNDRPGAVAAPTAGLHFDEPLLAALREKGVEMAFVTLHVGAGTFQPVRVDKIEEHIMHSEYAEVPQNVVDAVLACKARGNKVVAVGTTSVRSLESAAKASPDALIAPFFDDTQIFIYPGYEYQVVDALITNFHLPESTLIMLVSAFAGYQHTMQAYDAAIQERYRFFSYGDAMFISRDPQAKFEKVGHDD

SEQ ID NO: 69100 - protein, 349 aa, Moritella marina
  misc_feature (1)..(349): tr|A0A5J6WL27|A0A5J6WL27_MORMI tRNA preQ1(34) S-adenosy lmethionine ribosyltransferase-isomerase QueA OS=Morite lla marina ATCC 15381 OX=1202962 GN=queA PE=4 SV=1
MQVSDFNFTLPDELIARYPKADRRSSRLLQLNGNSGELADKQFADILDLVEAGDLMVFNNTRVIPARMYGQKASGGKIEVLVERVISEHSVLAHVRSSKSPKVGARLILEGTVNAEMVARHDALFELKFLDERHVLEVLEDIGHMPLPPYIDRPDEDSDKERYQTVYNEKPGAVAAPTAGLHFDEALLAQLAEKGVNTAFVTLHVGAGTFQPVRVDNILDHHMHSEYAEVSEEVVAKIAETKANGGRVIAVGTTSVRSLESAAQVTMAKGLPLAPFFDDTEIFIYPGYEFQLVDAMVTNFHLPESTLIMLLSAFAGYDHVMPAYQHAIAEKYRFFSYGDAMFVTKQTAD

SEQ ID NO: 69101 - protein, 349 aa, Moritella sp.
  misc_feature (1)..(349): tr|A0A2G2IQV8|A0A2G2IQV8_9GAMM S-adenosylmethionine:tRN A ribosyltransferase-isomerase OS=Moritella sp. OX=7855 6 GN=queA PE=3 SV=1
  misc_feature (87)..(87): Xaa can be any naturally occurring amino acid
  misc_feature (97)..(97): Xaa can be any naturally occurring amino acid
  misc_feature (127)..(127): Xaa can be any naturally occurring amino acid
  misc_feature (189)..(189): Xaa can be any naturally occurring amino acid
  misc_feature (192)..(192): Xaa can be any naturally occurring amino acid
  misc_feature (348)..(349): Xaa can be any naturally occurring amino acid
MQVSDFNFSLPDELIARYPKADRRSSRLLQLNGNSGELVDKQFADILDLVEAGDLMVFNNTRVIPARMYGQKASGGKIEVLVERVIXDHSVLAHVRXSKSPKVGAQLILEGTVKAEMIARHDALFEXKFLDERHVLEILEDIGHMPLPPYIDRPDEDSDKERYQTVYNEKPGAVAAPTAGLHFDEALLXELXEKGVNTAFVTLHVGAGTFQPVRVDNILDHHMHSEYAEVSEEVVAKIAETKANGGRVIAVGTTSVRSLESAAQATMAKGLPLAPFFEDTEIFIYPGYKFQLVDAMITNFHLPESTLIMLLSAFAGYDHVMPAYQHAIAEKYRFFSYGDAMFVTKQTXX

SEQ ID NO: 69102 - protein, 349 aa, Moritella sp.
  misc_feature (1)..(349): tr|A6F9N1|A6F9N1_9GAMM S-adenosylmethionine:tRNA ribosy ltransferase-isomerase OS=Moritella sp. PE36 OX=58051 G N=queA PE=3 SV=1
MQVSDFNFSLPDELIARYPKADRRSSRLLQLNGNSGELVDKQFADILDLVEAGDLMVFNNTRVIPARMYGQKASGGKIEVLVERVISDHSVLAHVRSSKSPKVGAQLILEGTVKAEMIARHDALFELKFLDERHVLEILEDIGHMPLPPYIDRPDEDSDKERYQTVYNEKPGAVAAPTAGLHFDEALLVELAEKDVNTAFVTLHVGAGTFQPVRVDNILDHHMHSEYAEVSEEVVAKIAETKANGGRVIAVGTTSVRSLESAAQATMAKGLPLAPFFEDTEIFIYPGYKFQLVDAMITNFHLPESTLIMLLSAFAGYDHVMPAYQHAIAEKYRFFSYGDAMFVTKQTEK

SEQ ID NO: 69103 - protein, 349 aa, Moritella viscosa
  misc_feature (1)..(349): tr|A0A090IA18|A0A090IA18_9GAMM S-adenosylmethionine:tRN A ribosyltransferase-isomerase OS=Moritella viscosa OX= 80854 GN=queA PE=3 SV=1
MQVSDFNFSLPDELIARYPKADRRSSRLLQLNGNSGELADKQFTDILDLVEAGDLMVFNNTRVIPARMYGQKASGGKIEVLVERVISEHSVLAHVRSSKSPKVGAQLILEGTVNAEMIARHDALFELKFLDERHVLEVLEDIGHMPLPPYIDRPDEDSDKERYQTVYNEKPGAVAAPTAGLHFDEALLAELAKKGVSTAFVTLHVGAGTFQPVRVDNILDHHMHSEYAEVSEEVVTKIAETKASGGRVIAVGTTSVRSLESAAQATMAKGLPLAPFFDDTEIFIYPGYEFQLVDAMVTNFHLPESTLIMLLSAFAGYDHVMSAYQHAIAEKYRFFSYGDAMFVTKQTAV

SEQ ID NO: 69104 - protein, 349 aa, Moritella yayanosii
  misc_feature (1)..(349): tr|A0A330LPK4|A0A330LPK4_9GAMM S-adenosylmethionine:tRN A ribosyltransferase-isomerase OS=Moritella yayanosii O X=69539 GN=queA PE=3 SV=1
MQVSDFNFSLPDELIARYPKADRRSSRLLQLNGNSGELTDKQFVDVLDLVEAGDLMVFNNTRVIPARMYGKKASGGKIEVLVERVIGDHSVLAHVRSSKSPKVGAQLILEGTVKAEMIARHDALFELKFLDERHVLEILEDIGHMPLPPYIDRPDEDSDKERYQTVYNEKPGAVAAPTAGLHFDEALLVELADKGVNIAFVTLHVGAGTFQPVRVDNILDHHMHSEYAEVSADVVAKIAETKANGGRVIAVGTTSVRSLESAAQATMAKGLPLAPFFEDTDIFIYPGYKFQLVDAMITNFHLPESTLIMLLSAFAGYDHVMPAYQHAIAEKYRFFSYGDAMFVTKQTAT

SEQ ID NO: 69105 - protein, 347 aa, Morococcus cerebrosus
  misc_feature (1)..(347): tr|A0A0C1GYS9|A0A0C1GYS9_9NEIS S-adenosylmethionine:tRN A ribosyltransferase-isomerase OS=Morococcus cerebrosus OX=1056807 GN=queA PE=3 SV=1
MDISDFDFTLPDRLIAQHPPEVRGSSRLLVALPDMPLQDRVFGDLPDYIEAGDVLVFNNTKVMKARLFGQKESGGKIEALIERVLDNHTALAHIRSSKSPKPGTKLIFEGDICAVMVERADELFCLRFEGEQTVYELLEQNGHLPLPPYIERAAGADDDTRYQTVYAKHQGAVAAPTAGLHFTDELLGRLKAKGVETAEVTLHVGAGTFQPVRVDKIEEHKMHSEWFDVPPETVAAIEAAHARGNKVWAVGTTSMRALESAARETGRLKAGQGDTDIFITPGYRFRVIDRLITNFHLPKSTLLMLVSAFSSMEHIRSVYRHAVEHEYRFFSYGDAMVLGRREMDIED

SEQ ID NO: 69106 - protein, 349 aa, Motilibacter peucedani
  misc_feature (1)..(349): tr|A0A420XUG1|A0A420XUG1_9ACTN S-adenosylmethionine:tRN A ribosyltransferase-isomerase OS=Motilibacter peucedan i OX=598650 GN=CLV35_0821 PE=3 SV=1
MTAAAPTRTRFVLPPGRLATEPPEWRGRGRDDVRLLVASRYAVVHEHFPSLREYLREGDVLVVNNSVTLPSAVAARDGSGRRFPLHVSTALDDGRWVVEARRPDQSGPDFSLSPGTRLALPGGVELVVDEPFPDAGARPSRLWSAVVSPTVDRARYLERFGSPIVYDYVTGHPPTSYYQNVWASEPGSAEMPSAGRPFTAELLVRLVSRGITVVPITLHCGVSSPELHEPPAPEPFRVSESAAAAVNSARARGGRVVAVGTTVVRALESVASPDGTVHEGAGWTDLVLSAERPARVVDGLVTGLHEPEASHLDLLDAVAGPELVDKAYEALVQGDYLWHEFGDSTLLLP

SEQ ID NO: 69107 - protein, 355 aa, Motilimonas sp.
  misc_feature (1)..(355): tr|A0A418YEM0|A0A418YEM0_9GAMM S-adenosylmethionine:tRN A ribosyltransferase-isomerase OS=Motilimonas sp. PLHSC 7-2 OX=2303987 GN=queA PE=3 SV=1
MKVTDFSFDLPNELIARYPQAERTASRLLSLDGNSGELAHLQFADIEAQLQAGDLLVFNDTRVIPARMFGQKETGGKLEVLVERMLDDKRFLAHVRCSKSPKPGNKLQLEGSVNATMIARHDSLFEIEIDDSRSLLEVLEAVGHMPLPPYIDRPDEDADKERYQTVYNKKPGAVAAPTAGLHFDQALLARLTEKGVEQAFVTLHVGAGTFQPVKVDKVTDHQMHSEYAEVPQDVVDKILATKANGGRVIAVGTTSVRSLESAAQASIRQGKPLAPFMDDTQIFIYPGYQFQLVDAMITNFHLPESTLIMLISAFAGYDNVMKAYQAAITEKYRFFSYGDAMFIRRNEHVTVPSFT

SEQ ID NO: 69108 - protein, 347 aa, Motiliproteus coralliicola
  misc_feature (1)..(347): tr|A0A369WCT9|A0A369WCT9_9GAMM S-adenosylmethionine:tRN A ribosyltransferase-isomerase OS=Motiliproteus coralli icola OX=2283196 GN=queA PE=3 SV=1
MRVDDFHFELPDELIARHPAEQRTGSRLLCVDGDSGELIHRGFADILELVEPGDLLVFNDTRVIPARMFGNKSTGGKIEMLVERVVDAHNALVHIRSSKAPKPGAELLLEGQLEAEVTGRQGALFEVRFKGERSLLSWLDEIGHMPLPPYMDREDHESDRERYQTVYNRVPGAVAAPTAGLHFDEALLQTLRDKGVELGFVTLHVGAGTFQPVKVETVTEHQMHSEYIEVSEQVCEQVRACHARGGRVIGVGTTSVRSLESAAMKHGGELAAYSGETDIFIYPGYEFRVIDCLVTNFHLPQSTLLMLVSAFAGQQHILNAYQEAVAQKYRFYSYGDAMFLTRRRSAG

SEQ ID NO: 69109 - protein, 350 aa, Motiliproteus sp.
  misc_feature (1)..(350): tr|A0A1R1LLP3|A0A1R1LLP3_9GAMM S-adenosylmethionine:tRN A ribosyltransferase-isomerase OS=Motiliproteus sp. MSK 22-1 OX=1897630 GN=queA PE=3 SV=1
MRVKDFHFELPDELIARFPTEERTGSRLLCLEGNSGELQHRQFTDILDLLQPGDLAVFNNTRVIPARLYGCKESGGKVEMLVERVLDEHQVLAHVRASKAPKPGTRLTFEGKLKAEVIGRQDALFVLNFEGERSVLECLEEVGHMPLPPYMAREDQLEDRERYQTVYGCRQGAVAAPTAGLHFDEDLLQSLEAKGIEQAFVTLHVGAGTFQPVRVESIKDHHMHSEYIEVSQQVCDQIAATRARGGRVVAVGTTSVRCLESAARASDTANGCELASFTGDTDIFIYPGYQFQVVDALVTNFHLSESTLLMLVSAFAGSEHIRIAYEEAIKQRYRFFSYGDAMFLTRRDCL

SEQ ID NO: 69110 - protein, 349 aa, Mucilaginibacter auburnensis
  misc_feature (1)..(349): tr|A0A2H9VUN0|A0A2H9VUN0_9SPHI S-adenosylmethionine:tRN A ribosyltransferase-isomerase OS=Mucilaginibacter aubu rnensis OX=1457233 GN=queA PE=3 SV=1
MKLSQFKFNLPESLIAHTPSDQRDEARLMVLHRDSGKIEHKVFKDVLDYFDDQDVMILNNTKVFPARMYGNKEKTGATIEVFLLRELNKELRLWDVLVDPARKIRVGNKLYFGDDDLLIAEVVDNTTSRGRTIRFLFDGTDEEFRRNVEILGETPLPKYIKRKATSEDKERYQTIYAKHEGAVAAPTAGLHFSRELMKRLELKGVEFAEVTLHVGLGTFRPVEVEDLTKHKMDSEQIIIEEKQANIVNRAIERKKRVCAVGTTSMRAIESAVSASKSLKPINDWTSKFIFPPYDFSIANCMITNFHTPESTLLMMIAAFGGYENVMNAYEIAIKEKYRFYSYGDAMLII

SEQ ID NO: 69111 - protein, 349 aa, Mucilaginibacter frigoritolerans
  misc_feature (1)..(349): tr|A0A562UHW4|A0A562UHW4_9SPHI S-adenosylmethionine:tRN A ribosyltransferase-isomerase OS=Mucilaginibacter frig oritolerans OX=652788 GN=queA PE=3 SV=1
MKLSQFKFNLPDSLIAHTPANTRDESRLMVLHRDSGKIEHKIFKDVLDYFDDKDVMILNNTKVFPARMYGNKEKTGATIEVFLLRELNKELRLWDVLVDPARKIRVGNKLYFGDDDLLIAEVVDNTTSRGRTIRFLFDGTDEEFRRNVEILGETPLPKYIKRKATAEDKDRYQTIFAKHEGAVAAPTAGLHFSRELMKRLELKGVEFAEVTLHVGLGTFRPVEVEDLTKHKMDSEQFIIEEKQANIVNRAIERKKRICAVGTTSMRAVESAVSANKTLKAANDWTSKFIFPPYDFSIANSMITNFHTPESTLLMMICAFGGYEHVMNAYEVAVKEKYRFYSYGDAMLII

SEQ ID NO: 69112 - protein, 349 aa, Mucilaginibacter ginsenosidivorans
  misc_feature (1)..(349): tr|A0A5B8V0T6|A0A5B8V0T6_9SPHI S-adenosylmethionine:tRN A ribosyltransferase-isomerase OS=Mucilaginibacter gins enosidivorans OX=398053 GN=queA PE=3 SV=1
MKLSQFKFNLPDSLIAHTPAGTRDEARLMVLHKDSGKIEHKIFRDVLDYFDDKDVMILNNTKVFPARMYGNKEKTGATIEVFLLRELNKELRLWDVLVDPARKIRVGNKLYFGDDDLLIAEVVDNTTSRGRTIRFLFDGTDEEFRRNVEILGETPLPKYIKRKATPEDKERYQTIFAKHEGAVAAPTAGLHFSRELMKRLELKGVEFAEVTLHVGLGTFRPVEVEDLTKHKMDSEQFIIEQKQADIVNRGIEAKKRICAVGTTSMRAIESAVSASKTLKPANDWTSKFIFPPYDFSIANSMITNFHTPESTLLMMVCAFGGYENVMHAYEVAVKEKYRFYSYGDAMLMI

SEQ ID NO: 69113 - protein, 349 aa, Mucilaginibacter ginsenosidivorax
  misc_feature (1)..(349): tr|A0A5B8VU21|A0A5B8VU21_9SPHI S-adenosylmethionine:tRN A ribosyltransferase-isomerase OS=Mucilaginibacter gins enosidivorax OX=862126 GN=queA PE=3 SV=1
MKLSQFKFNLPESLIAHNPSATRDEARLMVLHKDSGKIEHKIFKDVLDYFDDKDVMILNNTKVFPARLYGNKEKTGATIEVFLLRELNKELRLWDVLVDPARKIRVGNKLYFGDDDLLIAEVVDNTTSRGRTIRFLFDGTDEEFRRNVEILGETPLPKYIKRKATAEDKERYQTIFAKHEGAVAAPTAGLHFSRELMKRLELKGVDFAEVTLHVGLGTFRPVEVEDLTKHKMDSEQFIIEQKQADIVNRGIERKARICAVGTTSMRAIESAVSAGKTLKAANDWTSKFIFPPYDFSIANSMITNFHTPESTLLMMVSAFGGYEHVMNAYEVAVKEKYRFYSYGDAMLII

SEQ ID NO: 69114 - protein, 349 aa, Mucilaginibacter gossypii
  misc_feature (1)..(349): tr|A0A1G8EDD6|A0A1G8EDD6_9SPHI S-adenosylmethionine:tRN A ribosyltransferase-isomerase OS=Mucilaginibacter goss ypii OX=551996 GN=queA PE=3 SV=1
MKLSQFKFNLPESLIAHTPSATRDESRLMVLHKDSGKIEHKIFKDVLDYFDDKDVMILNNTKVFPARLYGNKEKTGATIEVFLLRELNKELRLWDVLVDPARKIRVGNKLYFGDDDLLIAEVVDNTTSRGRTIRFLFDGTDEEFRRNVEILGETPLPKYIKRKATAEDKERYQTIFAKHEGAVAAPTAGLHFSRELMKRLELKGVDFAEVTLHVGLGTFRPVEVEDLTKHKMDSEQFIIEQKQADIVNRGIERKARICAVGTTSMRAIESAVSANKTLKAANDWTSKFIFPPYDFSIANSMITNFHTPESTLLMMISAFGGYEHVMNAYEIAVKEKYRFYSYGDAMLII

SEQ ID NO: 69115 - protein, 349 aa, Mucilaginibacter gossypii
  misc_feature (1)..(349): tr|A0A5C1IGX7|A0A5C1IGX7_9SPHI S-adenosylmethionine:tRN A ribosyltransferase-isomerase OS=Mucilaginibacter goss ypii OX=551996 GN=queA PE=3 SV=1
MKLSQFKFNLPESLIAHTPSATRDESRLMVLHKDSGKIEHKIFKDVLDYFHDKDVMILNNTKVFPARLYGNKEKTGATIEVFLLRELNKELRLWDVLVDPARKIRVGNKLYFGDDDLLIAEVVDNTTSRGRTIRFLFDGTDEEFRRNVEILGETPLPKYIKRKATAEDKERYQTIFAKHEGAVAAPTAGLHFSRELMKRLELKGVDFAEVTLHVGLGTFRPVEVEDLTKHKMDSEQFIIEQKQADIVNRGIERKARICAVGTTSMRTIESAVSANKTLKAANDWTSKFIFPPYDFSIANSMITNFHTPESTLLMMIAAFGGYENVMNAYEVAVKEKYRFYSYGDAMLII

SEQ ID NO: 69116 - protein, 349 aa, Mucilaginibacter gossypiicola
  misc_feature (1)..(349): tr|A0A1H8JTZ9|A0A1H8JTZ9_9SPHI S-adenosylmethionine:tRN A ribosyltransferase-isomerase OS=Mucilaginibacter goss ypiicola OX=551995 GN=queA PE=3 SV=1
MKLSQFKFNLPESLIAHTPSATRDESRLMVLHKDSGKIEHKIFKDVLDYFHDKDVMILNNTKVFPARLYGNKEKTGATIEVFLLRELNKELRLWDVLVDPARKIRVGNKLYFGDDDLLIAEVVDNTTSRGRTIRFLFDGTDEEFRRNVEILGETPLPKYIKRKATAEDKERYQTIFAKHEGAVAAPTAGLHFSRELMKRLELKGVDFAEVTLHVGLGTFRPVEVEDLTKHKMDSEQFIIEQKQADIVNRGIERKARICAVGTTSMRTIESAVSANKTLKAANDWTSKFIFPPYDFSIANSMITNFHTPESTLLMMIAAFGGYENVMNAYEIAVKEKYRFYSYGDAMLII

SEQ ID NO: 69117 - protein, 349 aa, Mucilaginibacter gotjawali
  misc_feature (1)..(349): tr|A0A0X8X3V0|A0A0X8X3V0_9SPHI S-adenosylmethionine:tRN A ribosyltransferase-isomerase OS=Mucilaginibacter gotj awali OX=1550579 GN=queA PE=3 SV=1
MKLSQFKFNLPDSLVAHTPANTRDEARLMVLHRETGQIEHKIFKDVLDYFDDKDVMILNNTKVFPARMYGNKEKTGATIEVFLLRELNKELRLWDVLVDPARKIRVGNKLYFGDDDLLIAEVVDNTTSRGRTIRFLFDGTDEEFRRNVEILGETPLPKYIKRKATAEDKERYQTIFAKHEGAVAAPTAGLHFSRELMKRLELKGVEFAEVTLHVGLGTFRPVEVEDLTKHKMDSEQFIIEEKQANIVNRGIELKKRICAVGTTSMRAIESAVSANKTLKPANDWTSKFIFPPYDFSIANSMITNFHTPESTLLMMVCAFGGYEHVMNAYEVAVKEKYRFYSYGDAMLII

SEQ ID NO: 69118 - protein, 349 aa, Mucilaginibacter gracilis
  misc_feature (1)..(349): tr|A0A495J364|A0A495J364_9SPHI S-adenosylmethionine:tRN A ribosyltransferase-isomerase OS=Mucilaginibacter grac ilis OX=423350 GN=queA PE=3 SV=1
MKLSQFKFNLPDSLVAHSPSENRDESRLLVLHRDSGKIEHKIFKDVLNYYDDKDVMIINNTKVFPARLYGNKEKTGATIEVFLLRELNKELRLWDVLVDPARKIRVGNKLYFGDDDLLIAEVVDNTTSRGRTIRFLFDGTDEEFRRNVEILGETPLPKYIKRKATEEDKERYQTIFAKNEGAVAAPTAGLHFSRELMKRLELKGVEFAEVTLHVGLGTFRPVEVEDLTKHKMDSEQFIIEQKQADIVNKAIEDKRRICAVGTTSMRAVESAVSANKTLKSANDWTSKFIFPPYDFSIANSMITNFHTPESTLLMMICAFGGYENVMNAYEIAVKEKYRFYSYGDAMMII

SEQ ID NO: 69119 - protein, 349 aa, Mucilaginibacter lappiensis
  misc_feature (1)..(349): tr|A0A1N7BI10|A0A1N7BI10_9SPHI S-adenosylmethionine:tRN A ribosyltransferase-isomerase OS=Mucilaginibacter lapp iensis OX=354630 GN=queA PE=3 SV=1
MKLSQFKFNLPESLVAHNPSATRDEARLMVLHKDSGKIEHKIFKDVLDYFDDQDVMILNNTKVFPARLYGNKEKTGATIEVFLLRELNKELRLWDVLVDPARKIRVGNKLYFGDDDLLIAEVVDNTTSRGRTIRFLFDGTDEEFRRNVEILGETPLPKYIKRKATAEDKERYQTIFAKHEGAVAAPTAGLHFSRELMKRLELKGVDFAEVTLHVGLGTFRPVEVEDLTKHKMDSEQFIIEQKQADIVNRGIERKKRICAVGTTSMRAIESAVSAGKTLKAANDWTSKFIFPPYDFSIANSMITNFHTPESTLLMMVSAFGGYEYVMNAYEVAVKEKYRFYSYGDAMLII

SEQ ID NO: 69120 - protein, 349 aa, Mucilaginibacter mallensis
  misc_feature (1)..(349): tr|A0A1H1Z587|A0A1H1Z587_9SPHI S-adenosylmethionine:tRN A ribosyltransferase-isomerase OS=Mucilaginibacter mall ensis OX=652787 GN=queA PE=3 SV=1
MKLSQFKFNLPDALIANTPSHARDEARLMVLHKDSGKIEHKIFKDILDYYDDQDVMILNNTKVFPARMYGNKEKTGATIEVFLLRELNKELRLWDVLVDPARKIRVGNKLYFGDDDLLIAEVVDNTTSRGRTIRFLFDGTDEEFRRNVEILGETPLPKYIKRKATAEDKERYQTIFAKHEGAVAAPTAGLHFSRELMKRLELKGIDFAEVTLHVGLGTFRPVEVEDLTKHKMDSEQFIIEQKQADIVNRGIERKKRICAVGTTSMRAIESAVSANKTLKAANDWTSKFIFPPYDFSIANSMVTNFHTPESTLLMMICAFGGYEHVMNAYEVAVKEKYRFYSYGDAMLII

SEQ ID NO: 69121 - protein, 349 aa, Mucilaginibacter oryzae
  misc_feature (1)..(349): tr|A0A316HSV6|A0A316HSV6_9SPHI S-adenosylmethionine:tRN A ribosyltransferase-isomerase OS=Mucilaginibacter oryz ae OX=468058 GN=queA PE=3 SV=1
MKLSQFKFNLPDSLIAHTPSATRDESRLMVLHKDSGKIEHKIFKDVLDYFHDKDVMILNNTKVFPARLYGNKEKTGATIEVFLLRELNKELRLWDVLVDPARKIRVGNKLYFGDDDLLIAEVVDNTTSRGRTIRFLFDGTDEEFRRNVEILGETPLPKYIKRKATAEDKERYQTIFAKHEGAVAAPTAGLHFSRELMKRLELKGVEFAEVTLHVGLGTFRPVEVEDLTKHKMDSEQFIIEQKQADIVNRGIERKARICAVGTTSMRTIESAVSANKTLKAANDWTSKFIFPPYDFSIANSMITNFHTPESTLLMMIAAFGGYENVMNAYEVAVKEKYRFYSYGDAMLII

SEQ ID NO: 69122 - protein, 349 aa, Mucilaginibacter paludis
  misc_feature (1)..(349): tr|H1Y0Z9|H1Y0Z9_9SPHI S-adenosylmethionine:tRNA ribosy ltransferase-isomerase OS=Mucilaginibacter paludis DSM 18603 OX=714943 GN=queA PE=3 SV=1
MKLSQFKFNLPESLVAHSPSENRDESRLLVLHRDSGKIEHKIFKDVLNYFDDKDVMIINNTKVFPARLYGNKEKTGATIEVFLLRELNKELRLWDVLVDPARKIRVGNKLYFGDDDLLIAEVVDNTTSRGRTIRFLFDGTDEEFRRNVEILGETPLPKYIKRKATEEDKERYQTIFAKNEGAVAAPTAGLHFSRELMKRLELKGVEFAEVTLHVGLGTFRTVEVEDLTKHKMDSEQFIIEQKQADIVNRGIENKKRICAVGTTSMRTIESAVSANKTLKAANDWTSKFIFPPYDFSIANSMITNFHTPESTLLMMICAFGGYENVMNAYEVAVKEKYRFYSYGDAMMII

SEQ ID NO: 69123 - protein, 349 aa, Mucilaginibacter pedocola
  misc_feature (1)..(349): tr|A0A1S9P7D2|A0A1S9P7D2_9SPHI S-adenosylmethionine:tRN A ribosyltransferase-isomerase OS=Mucilaginibacter pedo cola OX=1792845 GN=queA PE=3 SV=1
MKLSQFKFNLPDSLIAHTPADKRDESRLMVLHRDSGKIEHKIFKDVLDYFDDKDVMILNNTKVFPARMYGNKEKTGATIEVFLLRELNKELRLWDVLVDPARKIRVGNKLYFGDDDLLIAEVVDNTTSRGRTIRFLFDGTDEEFRRNVEILGETPLPKYIKRKATAEDKERYQTIFAKNEGAVAAPTAGLHFSRELMKRLELKGVEFAEVTLHVGLGTFRPVEVEDLTKHKMDSEQFIIEQKQADIVNKGIERKSRICAVGTTSMRTIESAVSANKTLKAANDWTSKFIFPPYDFSIANSMITNFHTPESTLLMMISAFGGYEHVMNAYEVAVKEKYRFYSYGDAMLII

SEQ ID NO: 69124 - protein, 349 aa, Mucilaginibacter phyllosphaerae
  misc_feature (1)..(349): tr|A0A4Y8A875|A0A4Y8A875_9SPHI S-adenosylmethionine:tRN A ribosyltransferase-isomerase OS=Mucilaginibacter phyl losphaerae OX=1812349 GN=queA PE=3 SV=1
MKLSQFKFNLPESLVAHTPSDTRDESRLMVLHRDSGKIEHKIFKDVLDYFDDKDVMILNNTKVFPARMYGNKEKTGATIEVFLLRELNKELRLWDVLVDPARKIRVGNKLYFGDDDLLIAEVVDNTTSRGRTIRFLFDGTDEEFRRNVEILGETPLPKYIKRKATAEDKERYQTIFAKHEGAVAAPTAGLHFSRELMKRLELKGVEFAEVTLHVGLGTFRPVEVEDLTKHKMDSEQFIIEEKQANIVNRAIERKSRICAVGTTSMRTIESAVSAGKTLKAANDWTSKFIFPPYDFSIANSMITNFHTPESTLLMMVSAFGGYEHVMNAYEIAVKEKYRFYSYGDAMLII

SEQ ID NO: 69125 - protein, 349 aa, Mucilaginibacter pineti
  misc_feature (1)..(349): tr|A0A1G7I2I4|A0A1G7I2I4_9SPHI S-adenosylmethionine:tRN A ribosyltransferase-isomerase OS=Mucilaginibacter pine ti OX=1391627 GN=queA PE=3 SV=1
MKLSQFKFNLPESLIAHNPSATRDEARLMVLHKDSGKIEHKIFKDVLDYFDDQDVMILNNTKVFPARLYGNKEKTGATIEVFLLRELNKELRLWDVLVDPARKIRVGNKLYFGDDDLLIAEVVDNTTSRGRTIRFLFDGTEEEFRRNVEILGETPLPKYIKRKATAEDKERYQTIFAKHEGAVAAPTAGLHFSRELMKRLELKGVDFAEVTLHVGLGTFRPVEVEDLTKHKMDSEQFIIEQKQADIVNRGIERKSRICAVGTTSMRAIESAVSAGKTLKPANDWTSKFIFPPYDFSIANSMITNFHTPESTLLMMVSAFGGYEHVMNAYEVAVKEKYRFYSYGDAMLII

SEQ ID NO: 69126 - protein, 349 aa, Mucilaginibacter polytrichastri
  misc_feature (1)..(349): tr|A0A1Q5ZUQ7|A0A1Q5ZUQ7_9SPHI S-adenosylmethionine:tRN A ribosyltransferase-isomerase OS=Mucilaginibacter poly trichastri OX=1302689 GN=queA PE=3 SV=1
MKLSQFKFNLPESLIAHTPASTRDEARLMVLHRDSGKIEHKIFKDVLDYFDNKDVMILNNTKVFPARMYGNKEKTGATIEVFLLRELNKELRLWDVLVDPARKIRVGNKLYFGEDDLLVAEVVDNTTSRGRTIRFLFDGTDEEFRRNIEILGETPLPKYIKRKATAEDKERYQTIFAKNEGAVAAPTAGLHFSRELMKRLELKGIEFAEVTLHVGLGTFRPVEVEDLTKHKMDSEQFIIEEKQAAIVNRAIESKHRVCAVGTTSMRTIESAVSANKTLKSANDWTSKFIFPPYEFSIANSMITNFHTPESTLLMMVSAFGGYEHIMNAYEVAVKEKYRFYSYGDAMLII

SEQ ID NO: 69127 - protein, 349 aa, Mucilaginibacter psychrotolerans
  misc_feature (1)..(349): tr|A0A4Y8SAG3|A0A4Y8SAG3_9SPHI S-adenosylmethionine:tRN A ribosyltransferase-isomerase OS=Mucilaginibacter psyc hrotolerans OX=1524096 GN=queA PE=3 SV=1
MKLSQFKFNLPESLIAHSPSDIRDQSRLMVLHRDSGKIEHKIFKDILDYFDDKDVMILNNTKVFPARMYGNKEKTGATIEVFLLRELNKELRLWDVLVDPARKIRVGNKLYFGDDDLLIAEVVDNTTSRGRTIRFLFDGTDEEFRRNVEILGETPLPKYIKRKATADDKERYQTIFAKHEGAVAAPTAGLHFSRELMKRLELKGVEFAEVTLHVGLGTFRPVEVEDLTKHKMDSEQFIIEQKQADIVNRGIERKSRICAVGTTSMRTIESAVSANKTLKAANDWTSKFIFPPYEFSIANSMITNFHTPESTLLMMISAFGGYEHVMNAYEVAVKEKYRFYSYGDAMLII

SEQ ID NO: 69128 - protein, 349 aa, Mucilaginibacter rubeus
  misc_feature (1)..(349): tr|A0A364WXI8|A0A364WXI8_9SPHI S-adenosylmethionine:tRN A ribosyltransferase-isomerase OS=Mucilaginibacter rube us OX=2027860 GN=queA PE=3 SV=1
MKLSQFKFNLPESLIAHSPSATRDESRLMVLHKDSGKIEHKIFKDVLDYFDDKDVMILNNTKVFPARLYGNKEKTGATIEVFLLRELNKELRLWDVLVDPARKIRVGNKLYFGDDDLLIAEVVDNTTSRGRTIRFLFDGTDEEFRRNVEILGETPLPKYIKRKATAEDKERYQTIFAKHEGAVAAPTAGLHFSRELMKRLELKGVDFAEVTLHVGLGTFRPVEVEDLTKHKMDSEQFIIEQKQADIVNRGIERKARICAVGTTSMRAIESAVSANKTLKAANDWTSKFIFPPYDFSIANSMITNFHTPESTLLMMISAFGGYEHVMNAYEIAVKEKYRFYSYGDAMLII

SEQ ID NO: 69129 - protein, 349 aa, Mucilaginibacter rubeus
  misc_feature (1)..(349): tr|A0A5C1HUC9|A0A5C1HUC9_9SPHI S-adenosylmethionine:tRN A ribosyltransferase-isomerase OS=Mucilaginibacter rube us OX=2027860 GN=queA PE=3 SV=1
MKLSQFKFNLPESLIAHTPSATRDESRLMVLHKDSGKIEHKIFKDVLDYFHDKDVMILNNTKVFPARLYGNKEKTGATIEVFLLRELNKELRLWDVLVDPARKIRVGNKLYFGDDDLLIAEVVDNTTSRGRTIRFLFDGTDEEFRRNVEILGETPLPKYIKRKATAEDKERYQTIFAKHEGAVAAPTAGLHFSRELMKRLELKGVDFAEVTLHVGLGTFRPVEVEDLTKHKMDSEQFIIEQRQADIVNRGIERKARICAVGTTSMRTIESAVSANKTLKAANDWTSKFIFPPYDFSIANSMITNFHTPESTLLMMIAAFGGYENVMNAYEIAVKEKYRFYSYGDAMLII

SEQ ID NO: 69130 - protein, 349 aa, Mucilaginibacter sp.
  misc_feature (1)..(349): tr|A0A556MLB5|A0A556MLB5_9SPHI S-adenosylmethionine:tRN A ribosyltransferase-isomerase OS=Mucilaginibacter sp. MAH-19 OX=2597670 GN=queA PE=3 SV=1
MKLSQFKFNLPESLIAHSPAATRDESRLMVLHKDSGKIEHKVFKDVLDYFDDKDVMILNNTKVFPARMYGNKEKTGATIEVFLLRELNKELRLWDVLVDPARKIRVGNKLYFGDDDLLIAEVVDNTTSRGRTIRFLFDGTEEEFRRNVEILGETPLPKYIKRKATAEDKERYQTIFAKHEGAVAAPTAGLHFSRELMKRLELKGVEFAEVTLHVGLGTFRPVEVEDLTKHKMDSEQIIIEQKQADIVNRGIERKKRICAVGTTSMRAIESAVSASKTLKSVNDWTSKFIFPPYDFSIANSMITNFHTPESTLLMMVSAFGGYEHIMNAYEVAIKEKYRFYSYGDAMLII

SEQ ID NO: 69131 - protein, 349 aa, Mucilaginibacter sp.
  misc_feature (1)..(349): tr|A0A1C2GPY8|A0A1C2GPY8_9SPHI S-adenosylmethionine:tRN A ribosyltransferase-isomerase OS=Mucilaginibacter sp. PPCGB 2223 OX=1886027 GN=queA PE=3 SV=1
MKLSQFKFNLPDSLIAHSPSDQRDESRLLVLHRDSGKIEHKIFKDVLNYFDDKDVMIINNTKVFPARLYGNKEKTGATIEVFLLRELNKELRLWDVLVDPARKIRVGNKLYFGDDDLLIAEVVDNTTSRGRTIRFLFDGTDEEFRRNVEILGETPLPKYIKRKATEEDKERYQTIFAKNEGAVAAPTAGLHFSRELMKRLELKGVEFAEVTLHVGLGTFRPVEVEDLTKHKMDSEQFIIEQKQADIVNKGIEAKRRICAVGTTSMRAIESAVSANKTLKAANDWTSKFIFPPYDFSIANSMITNFHTPESTLLMMICAFGGYENVMNAYEVAVKEKYRFYSYGDAMLII

SEQ ID NO: 69132 - protein, 349 aa, Mucilaginibacter yixingensis
  misc_feature (1)..(349): tr|A0A2T5J7B0|A0A2T5J7B0_9SPHI S-adenosylmethionine:tRN A ribosyltransferase-isomerase OS=Mucilaginibacter yixi ngensis OX=1295612 GN=queA PE=3 SV=1
MKLSQFKFNLPESLIAHNPADQRDEARLMVLHRDTGKIEHKIFKDVLDYFDDKDVMILNNTKVFPARMYGNKEKTGATIEVFLLRELNKELRLWDVLVDPARKIRVGNKLYFGDDDLLIAEVVDNTTSRGRTIRFLFDGTDEEFRRNIEILGETPLPKYIKRKATAEDKERYQTIFAKHEGAVAAPTAGLHFSRELMKRLELKGVEFAEVTLHVGLGTFRPVEVEDLTKHKMDSEQIIIEQRQADIVNRGIERKKRICAVGTTSMRAIESAVSANKTLKAVNDWTSKFIFPPYDFSIANSMVTNFHTPESTLLMMICAFGGYDEVMNAYEIAVKEKYRFYSYGDAMLII

SEQ ID NO: 69133 - protein, 392 aa, Mucinivorans hirudinis
  misc_feature (1)..(392): tr|A0A060REP4|A0A060REP4_9BACT S-adenosylmethionine:tRN A ribosyltransferase-isomerase OS=Mucinivorans hirudini s OX=1433126 GN=BN938_2793 PE=3 SV=1
MDKVINISEFDYHLPVERIAKFPLDRREESKLLVYKHNIIADSQFLNIRGEIPSDYLLAFNNTKVVRARLIFRKDSGARIEIFCLEPVLDYERAFAAVGQCSWKCIVGNAKKWKEGDVKITHNEITLSAAKISDNQVKFSWNTTHTFGELLAILGKIPIPPYLERDSAEIDNSRYQTTYCKIEGSVAAPTAGLHFTKDILAQFPVQAEVTLHVGAGTFLPVKTENAVEHAMHTEHFSIEVAELEKLVRSAGRIIAVGTTTVRTLESLVVLGERVLTGGNPREQQTVGQWEAYGEEKQSAPAADALGALHQYMVKNQIPNLHCSTQIMITPGYRFRVVAGLITNFHQPKSTLLLLISAVVGDDWHRIYEHAMANGYRFLSYGDSSLLFVESVR

SEQ ID NO: 69134 - protein, 349 aa, Mucinivorans hirudinis
  misc_feature (1)..(349): tr|A0A060RES4|A0A060RES4_9BACT S-adenosylmethionine:tRN A ribosyltransferase-isomerase OS=Mucinivorans hirudini s OX=1433126 GN=queA PE=3 SV=1
MKLSQYRYEFTPDMVAPYPMDNRDESRLMVIDRRTGKIDHKTFKDVLNYFKEGDVMILNNTRVFPARLYGNKEKTGAEIEVFLLRELNEELRLWDVLVDPARKIRIGNKLYFGDDDLVVAEVIDNTTSRGRTLRFLFDGTHEEFRKALYGLGETPLPRWVREKVEPLDEERYQTIFATEEGAVAAPTAGLHFSKHLLKRMEIKGINTAFITLHAGLGGFRTVDVEDLSKHKTDSEQVIITENAANVVNKARCAGRRVCAVGTTVQRAIESSVTTQGMLTPFDGWTNKFIFPPYEFNVANSMITNLHLPESIHLMLVSAFLGYDLTMRAYEIARQEKYRIGTYGDAMLIL

SEQ ID NO: 69135 - protein, 340 aa, Mucispirillum schaedleri
  misc_feature (1)..(340): tr|V2QH17|V2QH17_9BACT S-adenosylmethionine:tRNA ribosy ltransferase-isomerase OS=Mucispirillum schaedleri ASF4 57 OX=1379858 GN=queA PE=3 SV=1
MATKVDKFDYNLPKELIALYPASKRDKCRLMMVDTVNKSITNHIFSDIVNILDDTSFLVVNNTKVRNARLYAKKVTGGLSEIFVTDVIDNTHFKGLVRGKFKTGDKVISEGMYFTLLEKLQDGLWIIQAESDIEKIMYEKGHVPLPPYINRQDTQQDKTDYQTVYAKYTGSSAAPTAGLHFTNELLSALKNKGVEVIEITLDVGLGTFRPVKTEYMEDHEMHYERYYISEDAAERINLLKSKGKKLTAVGSTSVRALETASDDKGIIKAGESSSNIFIMEPYNFKTVDNMITNFHLPKSTLLAMVSVLGGYDLIMQAYHRAVQENYRFFSYGDAMYIKRK

SEQ ID NO: 69136 - protein, 363 aa, Muribacter muris
  misc_feature (1)..(363): tr|A0A0J5P7B9|A0A0J5P7B9_9PAST S-adenosylmethionine:tRN A ribosyltransferase-isomerase OS=Muribacter muris OX=6 7855 GN=queA PE=3 SV=1
MRVADFHFDLPDERIARYPTPERTASRLLYLNGETGEFHDQQFPDLLSHLNAGDLLIFNNTRVIPARLYGRKTSGGKLEVLVERILDDNRCLAHIRSSKSPKVDAEIILGEDKLGEGNGLKAVMLARHDALFELKFEGEMPLIDQLQQAGHMPLPPYIDRPDEEADQERYQTVYNQIPGAVAAPTAGLHFDTELLAQLNAKGIKTAFVTLHVGAGTFQPVRVETIEDHKMHAEYAEVSQAVVDQILTTKAAGKRVICVGTTSVRSIESAAQQAEKQGKLIAPFYSDTSIFLYPGKTFRVVDALITNFHLPESTLIMLVSAFAGYRHCMQAYRHAVDHHYRFFSYGDAMFITKNPHATDDMPSA

SEQ ID NO: 69137 - protein, 363 aa, Muribacter muris
  misc_feature (1)..(363): tr|A0A4Y9K4P1|A0A4Y9K4P1_9PAST S-adenosylmethionine:tRN A ribosyltransferase-isomerase OS=Muribacter muris OX=6 7855 GN=queA PE=3 SV=1
MRVADFHFDLPDERIARYPTPERTNSRLLYLNGETGEFHDQQFPDLLSHLNAGDLLIFNNTRVIPARLYGRKTSGGKLEVLVERILDDNRCLAHIRSSKSPKVDAEIILGEDKLGEGNGLKAVMLARHDALFELKFEGEIPLLDQLQQAGHMPLPPYIDRPDEEADQERYQTVYNQIPGAVAAPTAGLHFDTTLLTQLNAKGIKTAFVTLHVGAGTFQPVRVETIEDHKMHAEYAEVSQAVVDQILATKAAGKRVICVGTTSVRSIESAAQQAEKQGKLIAPFYSDTSIFLYPGKTFRVIDALITNFHLPESTLIMLVSAFAGYRHCMQAYRHAVDHHYRFFSYGDAMFITKNPHATDDMPSA

SEQ ID NO: 69138 - protein, 350 aa, Muribaculaceae bacterium
  misc_feature (1)..(350): tr|A0A4Q0IMX1|A0A4Q0IMX1_9BACT S-adenosylmethionine:tRN A ribosyltransferase-isomerase OS=Muribaculaceae bacter ium Isolate-007 (NCI) OX=2489217 GN=queA PE=3 SV=1
MKLSQFKFKFPEELIATEPTPVRDEARMMVVHKSTGEIEHRIFKEIINYFDDGDVMVFNDTKVFPAKLIGNKEKTGAKIEVFLLRELNEEHKLWDVLVEPARKIRIGNKLYFGDDESMVAEVIDNTTSRGRTLRFLYDGPHEEFKEALYKLGMTPLPPYIKRESLPSDAEDYQCIFAAKEGAVVAPAAGLHFSRELLKRLEIKGVKDAYLTLHSGLGNYRDIDVEDLTKHRMDSEDMVVTQELVDIVNAAKDENRNVCAVGTSVLRGIESAVSMGGHMKTYAGWTNKFIFPPYDFTVANAMVSNFHLPYSTMLMMVCAFGGYDLVMYAYDEAIKEKYRFGAYGDAMLIVD

SEQ ID NO: 69139 - protein, 350 aa, Muribaculaceae bacterium
  misc_feature (1)..(350): tr|A0A3N2NM10|A0A3N2NM10_9BACT S-adenosylmethionine:tRN A ribosyltransferase-isomerase OS=Muribaculaceae bacter ium Isolate-114 (HZI) OX=2486475 GN=queA PE=3 SV=1
MKLSQFKFKLPEELIAQYPAENRDECRMMVVNSKTGEITHHIFKELINYFDEGDVMIFNDTKVFPARLYGNKEKTGACIEVFLLRELNAENKLWDVLVEPARKIRIGNKLYFGDDDSMVAEVIDNTTSRGRTLRFLYDGPHDEFKEALYALGETPLPEYIKRKAEPEDAERYQCIYAEKEGAVMAPAAGLHFSRELLKRLEIKGVERGFLTLHSGRGNFKEIDVEDLTKHRMDSEDTMVDEKLVDIVNVAKDNGHNVCAVGTSVLRALATAVCMNGRLMTYSGWTNKFIFPPYDFTVCNSLISNFHMPLSTMLMMVAAFGGYETVMKAYDVAVKEKYRFGAYGDAMLILR

SEQ ID NO: 69140 - protein, 350 aa, Muribaculum intestinale; identical to SEQ ID NO: 69138
  misc_feature (1)..(350): tr|A0A1B1SA94|A0A1B1SA94_9BACT S-adenosylmethionine:tRN A ribosyltransferase-isomerase OS=Muribaculum intestina le OX=1796646 GN=queA PE=3 SV=1

SEQ ID NO: 69141 - protein, 408 aa, Muribaculum intestinale
  misc_feature (1)..(408): tr|A0A4S1ZT82|A0A4S1ZT82_9BACT S-adenosylmethionine:tRN A ribosyltransferase-isomerase OS=Muribaculum intestina le OX=1796646 GN=E5360_00590 PE=3 SV=1
MAIDPHSLHIADFNYTLPDEQIAKHPLAERDRCRLLVRRGDGEIEEHEFLELPGLLPSDAMLVYNNTRVINARLRFRKGDNGNGSLIEVFCLEPASPSDYAISFASTSGCSWICFVGNSKRWKDGAIRRRLNIGGQEVVLSATRVARDGNASEVRFDWDNPDVTFSQIIESAGEIPIPPYLNRGTEESDSTDYQTVYSRIEGSVAAPTAGLHFTPAVLDAVDRRGIPRRELTLHVGAGTFQPVKSDTVGEHGMHSEFISVPRELIAELVATERRVVAVGTTSVRTLESLYHAGCLVYEGKWQGEVPQWYPYESSHPRLGRREALKALLDYVDGTDASRFIASTRIIIAPGYTYRVVAGMVTNFHQPQSTLLLLVSAFVDGHWREMYDFALARGFRFLSYGDASLLLTE

SEQ ID NO: 69142 - protein, 350 aa, Muribaculum sp.
  misc_feature (1)..(350): tr|A0A4P7W5G4|A0A4P7W5G4_9BACT S-adenosylmethionine:tRN A ribosyltransferase-isomerase OS=Muribaculum sp. H5 OX =2530393 GN=queA PE=3 SV=1
MKLSQFKFRLPDELIAQRPAPERDQSRMMVVNRRTGEIEHKIFKDIIDYFDDGDLFVYNDTMVFPARLYGNKEKTGARIEVFLLRELSAENKLWDVLVEPARKIRIGNKLYFGDDESMVAEVIDNTTSRGRTLRFLYDGPHEEFKKELYKLGTTPLPYYINREPDEEDAERFQTIFARKEGAVIVPGAGLHFSRELLKRLEIKGVNLGFITIHSGLGNYREIDVEDLTKHRMDSEEMEASEELVDLVNATKDGGHRVCAVGTSVLRAVASAVSMGDHMKTYSGWTNKFIFPPYDFSVTDALVSNFHLPYSTMLMMVAAFGGYDLVMDAYKKAVKEGYKFGVYGDAMLIVS

SEQ ID NO: 69143 - protein, 349 aa, Muribaculum sp.
  misc_feature (1)..(349): tr|A0A4S2AVB6|A0A4S2AVB6_9BACT S-adenosylmethionine:tRN A ribosyltransferase-isomerase OS=Muribaculum sp. NM65_ B17 OX=2516961 GN=queA PE=3 SV=1
MKLSQFKFKLPEELIATEPCAVRDESRLMVVNRKTGEIEHHTFKEIINYFGDGDVFILNDTMVFPARLYGNKEKTGAKIEVFLLRELNEENKLWDVLVEPARKIRIGNKLYFGDDESMVAEVIDNTTSRGRTLRFLYDGSHEEFKDALYKLGQTPLPPYIKREPVPTDAERYQCIFAAKEGAVVAPAAGLHFSRELMKRMEIKGIETGFLTVHSGLGNYREIDVEDLTKHRMDSEEMEVTPELVDMVNKAKDDNKQVCAVGTSVLRGIETAVSMGGHMKTFTGWTNKFIFPPYDFTVATSLVSNFHMPYSTMLMMVAAFGGYDLVMHAYEVAVKEKYRFGAYGDAMLIL

SEQ ID NO: 69144 - protein, 349 aa, Muricauda antarctica
  misc_feature (1)..(349): tr|A0A1M6TTW5|A0A1M6TTW5_9FLAO S-adenosylmethionine:tRN A ribosyltransferase-isomerase OS=Muricauda antarctica OX=1055723 GN=queA PE=3 SV=1
MKLSNFNFELPKELLAEYPAENRDESKLMVIHRDSGKIEHRMFKDLIEYFDEGDVMVLNNTKVFPARLFGNKEKTGARIEVFLLRELNQEQRLWDVLVDPARKIRIGNKLYFGDDESLVAEVIDNTTSRGRTLRFLYDGSYTDFRRKLRELGETPLPKYIKRNVEPEDEERYQTIYAKHEGAVAAPTAGLHFSKHLLKRLEIKGIDFAEVTLHVGLGTFNPVEVEDLSKHKMDSEELVIDEKATEIVNRAKVKKKRVCAVGTTVMRGLESAVSSEHTLNTYEGWTNKFIFPPYDFSIANCMVTNFHLPKSTLLMMVSAFAGHDLIKKAYKQAILEGYRFYSYGDAMLIL

SEQ ID NO: 69145 - protein, 349 aa, Muricauda lutaonensis
  misc_feature (1)..(349): tr|A0A0D5YTM6|A0A0D5YTM6_9FLAO S-adenosylmethionine:tRN A ribosyltransferase-isomerase OS=Muricauda lutaonensis OX=516051 GN=queA PE=3 SV=1
MKLSNFNFELPKELLAEYPAENRDESRLMVVHRDSGKIEHKMFKDLIDYFDEGDVMVLNNTKVFPARLYGNKEKTGARIEVFLLRELNEEQRLWDVLVDPARKIRIGNKLYFGEDESLVAEVIDNTTSRGRTLRFLYDGSYMDFRRKLKELGETPLPKYIKREVEPEDELRYQTIYAKHEGAVAAPTAGLHFSKHLLKRLEIKGIDFAEVTLHVGLGTFNPVEVEDLSKHKMDSEELVIDERATEVVNRAKRNKKKVCAVGTTVMRGLESAVSSEHTLNTFEGWTNKFIFPPYEFSIANCMITNFHLPKSTLLMMVSAFMGHDLMKKAYKQAILEQYRFYSYGDAMLIL

SEQ ID NO: 69146 - protein, 349 aa, Muricauda lutimaris
  misc_feature (1)..(349): tr|A0A3A1NCG0|A0A3A1NCG0_9FLAO S-adenosylmethionine:tRN A ribosyltransferase-isomerase OS=Muricauda lutimaris O X=475082 GN=queA PE=3 SV=1
MKLSNFSFELPKELLAEYPAEHRDESKLMVVHRDTGKIEHKMFKDIVDYFDEDDVMVLNNTKVFPARLFGNKEKTGARIEVFLLRELNQEQRLWDVLVDPARKIRIGNKLYFGEDESLVAEVIDNTTSRGRTLRFLYDGSYTDFRRKLRELGETPLPKYIKREVTPEDEERYQTIYAKHEGAVAAPTAGLHFSKHLLKRLEIKGIEFAEVTLHVGLGTFNPVEVEDLSKHKMDSEELVIDEKATEIVNNAKANKRKVCAVGTTVMRGLESAVSSEHTLNTFEGWTNKFIFPPYEFSIANCMITNFHLPKSTLMMMVSAFAGHDLIKKAYKQAILEGYRFYSYGDAMLIL

SEQ ID NO: 69147 - protein, 349 aa, Muricauda olearia
  misc_feature (1)..(349): tr|A0A444VJZ0|A0A444VJZ0_9FLAO S-adenosylmethionine:tRN A ribosyltransferase-isomerase OS=Muricauda olearia OX= 552546 GN=queA PE=3 SV=1
MKLSNFNFELPKELLAEYPAENRDESKLMVVHRDTGKIEHKMFKDLIDYFDEGDVMVLNNTKVFPARLYGNKEKTGARIEVFLLRELNQEQRLWDVLVDPARKIRIGNKLYFGEDESLVAEVIDNTTSRGRTLRFLYDGSYTDFRRKLRELGETPLPKYIKRNVEPEDEERYQTIYAKYEGAVAAPTAGLHFSKHLLKRLEIKGIDFAEVTLHVGLGTFNPVEVEDLSKHKMDSEELVIDEKATEVVNSAKDDKKKVCAVGTTVMRALESAVSSEHTLNTFEGWTNKFIFPPYDFSIANCMITNFHLPKSTLLMMVSAFAGHDLIKKAYKQAILEGYRFYSYGDAMLIL

SEQ ID NO: 69148 - protein, 349 aa, Muricauda pacifica
  misc_feature (1)..(349): tr|A0A2T0MJY3|A0A2T0MJY3_9FLAO S-adenosylmethionine:tRN A ribosyltransferase-isomerase OS=Muricauda pacifica OX =1080225 GN=queA PE=3 SV=1
MKLSNFNFELPKELLAEYPAENRDESKLMVIHRETGKIEHKMFKDLIDYFDEGDVMVLNNTKVFPARLYGNKEKTGARIEVFLLRELNQEQRLWDVLVDPARKIRIGNKLYFGDDESLVAEVIDNTTSRGRTLRFLYDGSYTDFRRKLRELGETPLPKYIKRDVEPEDEERYQTIYAKHEGAVAAPTAGLHFSKHLLKRLEIKGVDFAEVTLHVGLGTFNPVEVEDLSKHKMDSEELVIDEKATEIVNRAKSNKKKVCAVGTTVMRGLESAVSSEHTLNTFEGWTNKFIFPPYDFSIANCMVTNFHLPKSTLLMMISAFVGHDLMKKAYKQAILEQYRFYSYGDAMLII

SEQ ID NO: 69149 - protein, 349 aa, Muricauda ruestringensis
  misc_feature (1)..(349): tr|G2PKZ8|G2PKZ8_MURRD S-adenosylmethionine:tRNA ribosy ltransferase-isomerase OS=Muricauda ruestringensis (str ain DSM 13258 / CIP 107369 / LMG 19739 / B1) OX=886377 GN=queA PE=3 SV=1
MKLSNFNFELPKELLAEYPAEHRDESKLMVVHRDTGKIEHKMFKDLVNYFDEDDVMVLNNTKVFPARLFGNKEKTGARIEVFLLRELNQEQRLWDVLVDPARKIRIGNKLYFGEDESLVAEVIDNTTSRGRTLRFLYDGSYTDFRRKLRELGETPLPKYIKREVTAEDEERYQTIYAKHEGAVAAPTAGLHFSKHLLKRLEIKGIEFAEVTLHVGLGTFNPVEVEDLSKHKMDSEELVIDEKATEIVNNAKANKRKVCAVGTTVMRGLESAVSSEHTLNTHEGWTNKFIFPPYEFSIANCMITNFHLPKSTLLMMVSAFAGHDLIKKAYKQAILEGYRFYSYGDAMLIL

SEQ ID NO: 69150 - protein, 349 aa, Muricauda sp.
  misc_feature (1)..(349): tr|A0A2N0GI38|A0A2N0GI38_9FLAO S-adenosylmethionine:tRN A ribosyltransferase-isomerase OS=Muricauda sp. ES.050 OX=1798204 GN=queA PE=3 SV=1
MKLSNFNFELPKELLAEYPAEHRDESKLMVVHRDTGKIEHKMFKDLVDYFEEDDVMVLNNTKVFPARLFGNKEKTGARIEVFLLRELNQEQRLWDVLVDPARKIRIGNKLYFGEDESLVAEVIDNTTSRGRTLRFLYDGSYTDFRRKLRELGETPLPKYIKREVTPDDEERYQTIYAKHEGAVAAPTAGLHFSKHLLKRLEIKGIEFAEVTLHVGLGTFNPVEVEDLSKHKMDSEELVIDEKATEIVNNAKTHKRKVCAVGTTVMRGLESAVSSEHTLNTHEGWTNKFIFPPYEFSIANCMITNFHLPKSTLLMMVSAFAGHDLIKKAYKQAILEGYRFYSYGDAMLIL

SEQ ID NO: 69151 - protein, 349 aa, Muricauda sp.
  misc_feature (1)..(349): tr|A0A2E3VL02|A0A2E3VL02_9FLAO S-adenosylmethionine:tRN A ribosyltransferase-isomerase OS=Muricauda sp. OX=1921 49 GN=queA PE=3 SV=1
MKLSNFNFELPKELLAEYPAEHRDESKLMVIHRDSGKIEHKMFKDLVDYFDEDDVMVLNNTKVFPARLFGNKEKTGARIEVFLLRELNQEQRLWDVLVDPARKIRIGNKLYFGDDENLVAEVIDNTTSRGRTLRFLYDGSYTDFRRKLRELGETPLPKYIKREVTPDDEERYQTIYAKHEGAVAAPTAGLHFSKHLLKRLEIKGINFAEVTLHVGLGTFNPVEVEDLSKHKMDSEELVIDEKATEIVNTAKSNKRKVCAVGTTVMRGLESAVSSEHTLNTFEGWTNKFIFPPYDFSIANCMITNFHLPKSTLLMMVSAFAGHDLIKKAYKQAILEGYRFYSYGDAMLIL

SEQ ID NO: 69152 - protein, 349 aa, Muricauda taeanensis; identical to SEQ ID NO: 69144
  misc_feature (1)..(349): tr|A0A3A1NR69|A0A3A1NR69_9FLAO S-adenosylmethionine:tRN A ribosyltransferase-isomerase OS=Muricauda taeanensis OX=1005926 GN=queA PE=3 SV=1

SEQ ID NO: 69153 - protein, 349 aa, Muricauda zhangzhouensis
  misc_feature (1)..(349): tr|A0A1H2X9W3|A0A1H2X9W3_9FLAO S-adenosylmethionine:tRN A ribosyltransferase-isomerase OS=Muricauda zhangzhouen sis OX=1073328 GN=queA PE=3 SV=1
MKLSNFNFELPKELLAEHPAEHRDESKLMVIHRDTGKIEHKMFKDLIDYFDEGDVMVLNNTKVFPARLFGNKEKTGARIEVFLLRELNQEQRLWDVLVDPARKIRIGNKLYFGDDESLVAEVIDNTTSRGRTLRFLYDGSYTDFRRKLRELGETPLPKYIKREVTPEDEERYQTIYAKHEGAVAAPTAGLHFSKHLLKRLEIKGIDFAEVTLHVGLGTFNPVEVEDLSKHKMDSEELVIDEKATEVVNNAKDQKRKICAVGTTVMRGLESAVSSEHTLNTFEGWTNKFIFPPYDFSIANCMITNFHLPKSTLLMMVSAFAGHDLIKKAYKQAILEGYRFYSYGDAMLIL

SEQ ID NO: 69154 - protein, 376 aa, Muricomes intestini
  misc_feature (1)..(376): tr|A0A4R3K641|A0A4R3K641_9FIRM S-adenosylmethionine:tRN A ribosyltransferase-isomerase (Fragment) OS=Muricomes intestini OX=1796634 GN=EDD59_1121 PE=3 SV=1
PYAPGIGKIRNRKKSDFLKLTLDKRSLHNRKADFALKTSDFYYDLPQELIAQDPLEDRAGSRLLVLDKKTGKTEHHIFRDIAGYLEPGDCLVINDTKVIPARLIGVKEDTGAKIEVLLLKRKENNVWETLVKPGKKARPGTRISFGDGLLMGEVMDVVDEGNRLIHFKYEGIFEEILDQLGQMPLPPYITHQLKDKDRYNTVYATHEGSAAAPTAGLHFTPELLQKIQDKGVDIARVTLHVGLGTFRPVKVKEVKEHHMHSEFYIIDEEAAEKINRAKETGKRVICVGTTSCRTIEAAADENGYLKACSGWTEIFIYPGYRFKVLDGLITNFHLPESTLIMLVSALADREHVLAAYEEAVKEKYRFFSFGDAMLIV

SEQ ID NO: 69155 - protein, 349 aa, Muriicola sp.
  misc_feature (1)..(349): tr|A0A411E7E2|A0A411E7E2_9FLAO S-adenosylmethionine:tRN A ribosyltransferase-isomerase OS=Muriicola sp. MMS17-S Y002 OX=2507538 GN=queA PE=3 SV=1
MKLSHFNFELPKELLAEYPAEHRDESKLMVVHRETGKIEHKMFKDLIDYFKEDDVMVLNNTKVFPARLFGNKEKTGARIEVFLLRELNEEQRLWDVLVDPARKIRIGNKLYFGEDESLVAEVIDNTTSRGRTLRFLYDGAYIDFRRKLRELGETPLPKYIKRDVEPEDETRYQTIYAKHEGAVAAPTAGLHFSKHLLKRLEIKGIKYAELTLHVGLGTFNPVEVEDLSKHKMDSEELVIDERATEIVNTAKNNKRRICAVGTTAMRGLESAVSSDYMLNTFDGWTNKFIFPPYEFSIANAMVTNFHLPKSTLLMMVSAFMGHDLMKRAYKEAILEGYRFYSYGDAMLII

SEQ ID NO: 69156 - protein, 357 aa, Mycoavidus cysteinexigens
  misc_feature (1)..(357): tr|A0A2Z6EYG6|A0A2Z6EYG6_9BURK S-adenosylmethionine:tRN A ribosyltransferase-isomerase OS=Mycoavidus cysteinexi gens OX=1553431 GN=queA PE=3 SV=1
MYTLSDFDFKLPAELIAQTALANRSASRLLEVDNARAPAHLIDRRFAELPACIAAGDLLVFNDTQVLKARFFGNKASGGKIEVLIERIIGTRTALAQIRASKRPAVGSTLRLADAFEVTIGEPQQADAPASFYTLHFPEDCLSLIERYGRLPLPPYITHAPDATDEARYQTVYAANPGAVAAPTAGLHFDQALLAQLDARGVQRATLTLHVGAGTFQPVRTENLAQHRMHSEWYQISPSLVAAIARTRAAGRRVIAVGTTSLRALEAAAQSSAAQGTDTDLLCAGSGETDIFITPGYRFRVVDQLITNFHLPKSTLLMLVCAFAGFDVIHTAYQYAISQKYRFFSYGDAMFLTHRPC

SEQ ID NO: 69157 - protein, 353 aa, Mycobacterium colombiense
  misc_feature (1)..(353): tr|A0A1A3RHD8|A0A1A3RHD8_9MYCO S-adenosylmethionine:tRN A ribosyltransferase-isomerase OS=Mycobacterium colombi ense OX=339268 GN=A5653_08455 PE=3 SV=1
MTLTAPRTRFHRAPGSDAFEPPEAHGIARDAVKLLVARPDRVTHARFADLGDHLRPGDLLVVNDSETLPAAVDGRRDGQPIAVHFSTRRAERIWVVELRPAGDAAGHLPDVRPGERIDMPGGGVLVIESSYPQPGISGARLWSARIVVEGDVGSYLARHGRPIRYSYVPRPWPLHYYQTVFARRPGSAEMPSAARPFSTELVTDLVSAGIAIAPITLHAGVSSADAGEPPVAEPLHVPAATARLVNFTRETGGRVIAVGTTVTRALESAATADGVVRQVDGWTDLVLGPDRPCRIVDGLVTGWHDAGASHLLLLEAVAGPGLVARAYREAVDHGYLWHEFGDSALLLPGRATT

SEQ ID NO: 69158 - protein, 353 aa, Mycobacterium colombiense
  misc_feature (1)..(353): tr|A0A1A0VWD4|A0A1A0VWD4_9MYCO S-adenosylmethionine:tRN A ribosyltransferase-isomerase OS=Mycobacterium colombi ense OX=339268 GN=A5760_25300 PE=3 SV=1
MTASRTPASPQTHFHRAPTSDATEPPEVRGVARDAVKLLVARPGRVDHARFSDLGDYLRPGDLLVVNDSATLPAAVDGDRAGRPIAIHFSTARAALVWVVELRPAGNAVGHLTDIRPGERIEMPGGGALVIESSYPDPGISGARLWVARVVVEGDAASYLATHGRPIRYSYVPRPWPLHYYQTVFARRPGSAEMPSAARPFSTELVTDLVAAGIAIAPITLHAGVSSADAGEPPVAEPVHVPAATARLVNFTRATGGRVIAVGTTVTRALESAATADGLVRQVEGWTDLVLGPDRPCRVVGGLVTGWHDAGASHLLLLEAVAGPELVARAYREAVEHGYLWHEFGDSALLLPG

SEQ ID NO: 69159 - protein, 351 aa, Mycobacterium decipiens
  misc_feature (1)..(351): tr|A0A1X2LXU3|A0A1X2LXU3_9MYCO S-adenosylmethionine:tRN A ribosyltransferase-isomerase OS=Mycobacterium decipie ns OX=1430326 GN=B8W66_05425 PE=3 SV=1
MTLANRPRPLLHRAATSHATEPPEARGVARDQVRLLVARPDGVDHARFADLGDHLRPGDLLVVNNSATLPAAVDGHRAGYPVTVHFSCARAAKVWVVELRPAENATGYLPNVRVGDRVEMPGGGAVVVASSYPKPGVAGGRLWTARLVVEGDVVGYLARHGRPIRYSYVPHSWPLRYYQTVFARRPGSAEMPSAARPFSTELVTALVADGIAIAPVTLHAGVSSAEPDEPPAAEPFHVPPATARLVNLTRASGGRVIAVGTTVTRALESAANADGAVRQADGWTDLMLGPARLGRVVDGLITGWHDAGASHLLLLEAVAGRQLVATAYREAGGHGYLGHEFGDSALLLPGK

SEQ ID NO: 69160 - protein, 356 aa, Mycobacterium haemophilum
  misc_feature (1)..(356): tr|A0A0I9U390|A0A0I9U390_9MYCO S-adenosylmethionine:tRN A ribosyltransferase-isomerase OS=Mycobacterium haemoph ilum OX=29311 GN=ABH38_11170 PE=3 SV=1
MLAVRPRTHFHRPPNSDATEPPEARGLARDAVRLLVARSSGVSHARFADLGDYLQAGDLLVVNNSATLAAAVDGRRAGNLIAIHFCTALADQLWVVELRPDGNATGHLTDVRPGERIDMPGGGAIVIGSSYPRAGIDGARLWTARVAVEGLGGSVVSYLARYGRPIRYSYVPRQWPLHYYQTVFARHLGSAEMPSAARPFTTELVTALVADGIAIAPITLHAGVSSAQLGEPPVAELYAVGPATARLVNLTHAAGGRVVAVGTTVTRALESAASADGLVQPAVGWTNLVLGAGRPRRVVDGLITGWHEAGASHLMLLEAVAGQDLVATAYREAVEQGYLWHEFGDSALLLPAVGCH

SEQ ID NO: 69161 - protein, 355 aa, Mycobacterium heckeshornense
  misc_feature (1)..(355): tr|A0A2G8BC23|A0A2G8BC23_9MYCO S-adenosylmethionine:tRN A ribosyltransferase-isomerase OS=Mycobacterium heckesh ornense OX=110505 GN=ACT16_05640 PE=3 SV=1
MSRAAPRTQFQRPPGSDATEPPEARGLPRDAVKLLVAQPSGISHVRFADLGNYLRAGDLLVVNNSATLPAAVDARRGGRPITVHFSTARTADVWVVELRPAGTATGHLKDIRPGERIELPAGAALVIGASYPVAGVDGARLWTARVVVEGDDGRVAAYLALYGRPIRYAYVQRHWPLEHYQTVFARHPGSAEMPSAARPFSTTLVTALVAAGVVIAPVTLHAGVSSAEAGEPPAPEWFEVLPSTAHLVNLAHAAGGRVIAVGTTVARALESAAGTDGIVRPARGWTDLVLGPDHRARVVDGLITGWHEAGASHLFLLEAVAGAELVAAAYREAAEHGYLWHEFGDSALLLPEPTT

SEQ ID NO: 69162 - protein, 347 aa, Mycobacterium interjectum
  misc_feature (1)..(347): tr|A0A1X1X505|A0A1X1X505_9MYCO S-adenosylmethionine:tRN A ribosyltransferase-isomerase OS=Mycobacterium interje ctum OX=33895 GN=AWC11_04290 PE=3 SV=1
MRPRTHFRRPPGSDAVEPPEARGVARDAVKLLVARPGRVAHARFADLGDHLRPGDLLVVNNSATLPAAVEGRRAGRPIAVHFSTARGEKAWVVELRPAGDAAGHLGDVRPGERIDLPGGAALIIGSSYPEPEVDGARLWAARVMLEGDVLSYLARHGRPIRYAYVPRPWPLRYYQTVFARRPGSAEMPSAARPFSAELVTTLVSAGIGIAPVTLHAGVSSAEAGEPPTPELFEVPAATARAVNSARAGGGRVIAVGTTVTRALESAAGAAGVVRPALGHTDLVLGPDRPCRVVDGLITGWHDAGASHLLLLEAVAGPDLVALAYREAVSHGYLWHEFGDSALLLPER

SEQ ID NO: 69163 - protein, 352 aa, Mycobacterium noviomagense
  misc_feature (1)..(352): tr|A0A1X0GC48|A0A1X0GC48_9MYCO S-adenosylmethionine:tRN A ribosyltransferase-isomerase OS=Mycobacterium novioma gense OX=459858 GN=BST37_19110 PE=3 SV=1
MNLPSPLTAFQRPPGSDATGPPEARGVARDAVKLLVAQPSGISHARFTDLGDYLRPGDLLVVNNSATLPAAVDGRRRGQPVTVHFSTARTANTWVVEVRPAGTATAHLPDIRPGERIDLPHGAALDVRSSYPVAGVEGARLWTARVAVEGGVPSYLGRHGRPIRYAYVPRQWPLSYYQTVFARRPGSAEMPSAARPFSTELVTALVAAGVVIAPITLHAGVSSAEAGEPPAPEPFEVPAATARLVNLAHAMGRRVIAVGTTVTRALESAADGRGMVIPRVGWTNLVLGPDHPARVVDGLITGWHDAGVSHLLLLEAVAGPDMVAAAYREAVDHGYLWHEFGDSALLFPAPTT

SEQ ID NO: 69164 - protein, 334 aa, Mycobacterium paraense
  misc_feature (1)..(334): tr|A0A1X2AA27|A0A1X2AA27_9MYCO S-adenosylmethionine:tRN A ribosyltransferase-isomerase OS=Mycobacterium paraens e OX=767916 GN=AWB90_13035 PE=3 SV=1
MIAAIEPPEARGLARDAVKLLVARPGRVAHARFADLGDHLRPGDLLVVNNSATLPAAVDGRRAGRPIAVHFSTARAEKAWVVELRPAGDAVGHLTDVRPGERIELPGGAALVIGSSYPEPEVDGARLWTARVVLEGEVGSYLARHGRPIRYAYVPRQWPLRYYQTVFARHPGSAEMPSAARPFSAELVTSLVSSGIAIAPLTLHTGVSSAEAGEPPAPELFEVPAATARMVNSTRAAGGRVIAVGTTATRALESAADAAGVVRHAVGWTELVLGPQRPARVVDGLITGWHDAGASHLLLLEAVAGADLVALAYREAAAHGYLWHEFGDSALLLP

SEQ ID NO: 69165 - protein, 364 aa, Mycobacterium riyadhense
  misc_feature (1)..(364): tr|A0A1X2DFG5|A0A1X2DFG5_9MYCO S-adenosylmethionine:tRN A ribosyltransferase-isomerase OS=Mycobacterium riyadhe nse OX=486698 GN=AWC22_10245 PE=3 SV=1
MHAQTRFQRPPNSDAAEPPEARGVARDDVKLLVARRSGVSHARFGELGDYLHPGDLLVVNNSATLPAAVDGRRDGHPVAIHFSTPRAEKVWVVELRPAVRATGYLPDIRVGERIEMPGGGAIVIESSYPAPGVDGGRLWRARVAVEGDVMSYLARNGRPIRYAYVPQHWPVAYYQTVFARRPGSAEMPSAARPFSAEVVSALVAEGVAIAPITLHTGVSSAEPGEPPAPELFDVPPATARLVNVTRGAGRRVVAVGTTVTRAVESAADGDGVVHPAFGWTDLVLGPDRPCRVVDGLITGWHEAGASHLLLLEAVAGPELVAMAYREAVEHGYLWHEFGDSALLLPERAADVQSAHADSRAPGRE

SEQ ID NO: 69166 - protein, 354 aa, Mycobacterium sp.
  misc_feature (1)..(354): tr|L0J0A9|L0J0A9_9MYCO S-adenosylmethionine:tRNA ribosy ltransferase-isomerase OS=Mycobacterium sp. JS623 OX=21 2767 GN=Mycsm_03385 PE=3 SV=1
MTIAMPRTRFERPPGSDAVEPPEAHGVARDGVKLMVATPDGIAHRRFTDLGEHLEAGDLLVVNNSATLPAAVDGVRHNAPIAVHFSTALDDHTWVVELRPAVDATSHLHDVEPGERVGLPDGAALVVIASYPRSGVVGSRLWTTRLAIEGDVTSYLGRHGRPIRYNYVLRPWPLESYQTVFARRPGSAEIPSAARPFSAELVTSLVAAGIVITPITLHAGVSSAEQGEPPAAEPFEVPPSTARLINTTRASGGRVISVGTTATRAVESAADADGTVQPAAGWTDVVLGPERPPRVVDGLISGWHDAGASHLLLLEAVAGPEVVAAAYREAIAAGYLWHEFGDSALLLPTVPRSR

SEQ ID NO: 69167 - protein, 343 aa, Mycobacterium sp.
  misc_feature (1)..(343): tr|A0A1A2GU55|A0A1A2GU55_9MYCO S-adenosylmethionine:tRN A ribosyltransferase-isomerase OS=Mycobacterium sp. E31 98 OX=1834143 GN=A5673_24280 PE=3 SV=1
MTISTISGAAAIEPPEARGVARDAVKLLVVRPGRVAHARFADLGDHLRPGDLLVVNNSATLPAAVDGRRAGQPIAVHFSTPRADKAWVVELRPASDAVGHLTDVRPGERIDLPGGAALVIGSSYPEPEVDGARLWTARVILEGEVGSYLARHGRPIRYAYVPRQWPLRYYQTVFARHPGSAEMPSAARPFSADLVTALVSAGIAIAPVTLHAGVSSAEAGEPPTPELFEVPAPTARMVNSARAAGGRVIAVGTTVTRALESAAGAAGVVRPAVGWTDLVLGPGRACRVVDGLITGWHEAGASHLLLLEAVAGGDLVALAYREAAAHGYLWHEFGDSALLLPDK

SEQ ID NO: 69168 - protein, 355 aa, Mycobacterium xenopi
  misc_feature (1)..(355): tr|I0RNJ5|I0RNJ5_MYCXE S-adenosylmethionine:tRNA ribosy ltransferase-isomerase OS=Mycobacterium xenopi RIVM7003 67 OX=1150591 GN=MXEN_13151 PE=3 SV=1
MSRAAPITRFQRPPGSDATEPPEARGLARDAVKLLVARPSGISHARFADLGDYVCPGDLLVVNNSATLPAAVDARRDGRPITVHFSTARADDVWVVELRPAGTATGHLSDIRPGERIELPAGGALVVGASYPAAGVAGARLWTARVIVEGDDNRVAAYLALHGRPIRYAYVPRQWPLRDYQTVFARHAGSAEIPSAARPFTTELVTALVAAGVVIAPVTLHAGVSSAEAGEPPAPERFEVSSRTAHLVNLAHATGSRVIAVGTTVTRALESAAGPDGIVRPAEGWTDLVLGPDHRARVVDGLITGWHEAGASHLLLLEAVAGAELVAAAYQEAAEHGYLWHEFGDSALFLPGPTT

SEQ ID NO: 69169 - protein, 77 aa, Mycobacterium xenopi
  misc_feature (1)..(77): tr|X8BKA4|X8BKA4_MYCXE S-adenosylmethionine:tRNA ribosy ltransferase-isomerase OS=Mycobacterium xenopi 4042 OX= 1299334 GN=I553_8230 PE=3 SV=1
MRPAEGWTDLVLGPDHRARVVDGLITGWHEAGASHLLLLEAVAGAELVAAAYQEAAEHGYLWHEFGDSALFLPGPTT

SEQ ID NO: 69170 - protein, 354 aa, Mycolicibacterium moriokaense
  misc_feature (1)..(354): tr|A0A318I036|A0A318I036_9MYCO S-adenosylmethionine:tRN A ribosyltransferase-isomerase OS=Mycolicibacterium mor iokaense OX=39691 GN=C8E89_103319 PE=3 SV=1
MTIAVPQTQFERPPTSDAVEPPEAHGVARDGVKLMVATSGGVVHTRFADLGSHLAPGDLLVVNNSATLAAAVDGFRDGAPIAVHFSAALDDHVWVVELRPATNATAHLPDIEPGERIGLPDGAALVVIASHPRPGVAGSRLWTSRLAIEGDVTSYLARHGRPIRYGYVPQPWPLSSYQTVFATRPGSAEMASAARPFSAQLVTSLVSAGIAIAPITLHAGVSSAEQGEPPAAEPFEVPAATARLVNLTRASGARVIAVGTTATRALESAAGTDATVHPMAGWTDLVLGPDRPPRVVDGLITGWHDAGASHLLLLEAVAGPGLVAAAYRDAIAHGYLWHEFGDSALLLPTAPRSR

SEQ ID NO: 69171 - protein, 361 aa, Mycoplana dimorpha
  misc_feature (1)..(361): tr|A0A2T5B7U6|A0A2T5B7U6_MYCDI S-adenosylmethionine:tRN A ribosyltransferase-isomerase OS=Mycoplana dimorpha OX =28320 GN=queA PE=3 SV=1
MRIDLFDFELPEERIALRPATPREEARLLVVRPGQPDRFADRKVGDLPDFLEPGDALVFNDTRVIPAQLEGIRHREGAGGQQVSATLHMRVAADRWKAFARPGKRIKVGDRISFGHSGRVCLLGTLDATVEEKGENGEVTLRFDFFGPTLDEAIATVGHIPLPPYIASKREDDEADRRDYQTIYAREEGAVAAPTAGLHFTEALFERLDRKGVERHFVTLHVGAGTFLPVKADDTDDHVMHEELGYVSKQTAEALNAVRARGGRIVCVGTTSLRLLESAAREDGTIEPWSGATGIFITPGYRFRTADVLMTNFHLPKSTLFMLVSAFSGLDTMRAAYAHAIDTGYRFYSYGDASLLFRNDQ

SEQ ID NO: 69172 - protein, 340 aa, Mycoplasma sp.
  misc_feature (1)..(340): tr|R7NE78|R7NE78_9MOLU S-adenosylmethionine:tRNA ribosy ltransferase-isomerase OS=Mycoplasma sp. CAG:776 OX=126 2906 GN=queA PE=3 SV=1
MKLTDFDYELPEELIAQTPIQNRDQSKLMILDKSTGELEHQHFYDILNELNSGDVLVLNDTKVIPARLIGEKEETGAVIELLLLKDLGSNIWECLSRPAKRLKVGTIISFSDKLKAEVTQKKDEGIVCVKLIYEGILMEILDELGSMPLPPYIHEKLQDKDRYQTVYAKNIGSAAAPTAGLHFTNELLEKLKNKGVEILFVTLHVGLGTFRPVEVENVLEHHMHSEFYQMTKEVAERLNIAKKENRKIYAVGTTSVRTLETIMHQYHEFRECSGNTEIFIYPGFQFQAIDGLITNFHLPKSTLLMLVSALSSKEYILNAYQEAIKNKYRFFSFGDAMFIR

SEQ ID NO: 69173 - protein, 341 aa, Mycoplasma sp.
  misc_feature (1)..(341): tr|R5M422|R5M422_9MOLU S-adenosylmethionine:tRNA ribosy ltransferase-isomerase OS=Mycoplasma sp. CAG:877 OX=126 2907 GN=queA PE=3 SV=1
MKVEDFDYYLPEKLIAQTPLEKRDTSRLMVLDKTTGKIEHKHFYNIVDYLEEGDTLVLNDTKVLPARLIGEKEETKAVIEILLLKNISGDDWECLVKPARRIKVGTIVTFGSGELKAKCIKEEPEGIRHFTLIYDGILMEILEHLGTMPLPPYIHEKLKDQSRYQTVYAKEIGSAAAPTAGLHFTKELLEQLTKKGVNIAYITLHVGLGTFRPVSVDKVEEHEMHSEYYQMTKETAELLKKTKENNKRIIAVGTTSTRTLETIMTKYNEFTECSGWTNIFIYPGYKFKAIDALITNFHLPKSTLVMLVSALAGRENILNAYKTAVQEEYRFFSFGDAMLIK

SEQ ID NO: 69174 - protein, 349 aa, Myroides guanonis
  misc_feature (1)..(349): tr|A0A1I3SU39|A0A1I3SU39_9FLAO S-adenosylmethionine:tRN A ribosyltransferase-isomerase OS=Myroides guanonis OX= 1150112 GN=queA PE=3 SV=1
MKLSHFNLDIPEKLLAEFPSENRDEARLMVVDRKTQTIEHKLFKDLIDYFDEGDVMVLNNTKVFPARLYGNKEKTGARIEVFLLRELSAEQRLWDVLVDPARKIRIGNKLYFGDDESLVAEVIDNTTSRGRTLRFLYDGSYEEFREKLTELGETPLPKYLNREVVPEDAERYQTIYATEEGAVAAPTAGLHFSKHLLKRLEIKGVDFAEVTLHIGLGTFNPVEVEDLSKHKMDSEEMQITQEACDIVNKAKENKKRVCAVGTTSMRALESTVSSSHTLNPYEGWTNKFIFPPYDFSIANCMITNFHMQKSTLLMMVSAFCGHDLMKKAYAEAIKENYRFYTYGDAMLIL

SEQ ID NO: 69175 - protein, 349 aa, Myroides indicus
  misc_feature (1)..(349): tr|A0A4R7EYN1|A0A4R7EYN1_9FLAO S-adenosylmethionine:tRN A ribosyltransferase-isomerase OS=Myroides indicus OX=1 323422 GN=queA PE=3 SV=1
MKLSNFNFDLPENLLAEFPAENRDESKLMVIDRKTGEIEHKLFKDIVDYFGEGDVMVLNNTKVFPARLYGNKEKTGARIEVFLLRELSEEQRLWDVLVDPARKIRIGNKLYFGDDDSLVAEVIDNTTSRGRTLRFLYDGSYEEFRQKLQELGETPIPKYINREVVPEDAERYQTIYAKEEGAVAAPTAGLHFSKHLMKRLEINGIKFAEVTLHIGLGTFNPVEVEDLSKHKMDSEEIFITQEACDIVNEAKAEKKKVCAIGTTCMRALESSVSSNQTLNPFVGWTNKFIFPPYDFSIANCMVTNFHMPKSTLLMMISAFCGHDLMMKAYKEAVEKGYKFYSYGDAMLIL

SEQ ID NO: 69176 - protein, 349 aa, Myroides marinus
  misc_feature (1)..(349): tr|A0A163XQF8|A0A163XQF8_9FLAO S-adenosylmethionine:tRN A ribosyltransferase-isomerase OS=Myroides marinus OX=7 03342 GN=queA PE=3 SV=1
MKLSNFNFDLPEELLAEFPAENRDEARLMVVDRKTGTIEHKLFKDLIDYFDEGDVMVLNNTKVFPARLYGNKEKTGARIEVFLLRELNAEQRLWDVLVDPARKIRIGNKLYFGDDDSLVAEVIDNTTSRGRTLRFLYDGSYEEFRFKLQELGETPIPKYINREVVPEDAERYQTIYATEEGAVAAPTAGLHFSKHLLKRLEIKGVEFANVTLHIGLGTFNPVEVEDLSKHKMDSEEMFVNQEACDIVNAAKERKNRVCAIGTTSMRALESSVSSSQTLNPFVGWTNKFIFPPYDFSIADCMVTNFHMPKSTLLMMISAFCGHDLMMKAYKEAVEEKYKFYSYGDAMLIL

SEQ ID NO: 69177 - protein, 349 aa, Myroides odoratimimus; identical to SEQ ID NO: 69176
  misc_feature (1)..(349): tr|A0A0E1ZMZ6|A0A0E1ZMZ6_9FLAO S-adenosylmethionine:tRN A ribosyltransferase-isomerase OS=Myroides odoratimimus CCUG 10230 OX=883150 GN=queA PE=3 SV=1

SEQ ID NO: 69178 - protein, 349 aa, Myroides odoratimimus; identical to SEQ ID NO: 69176
  misc_feature (1)..(349): tr|A0A0S7EKH3|A0A0S7EKH3_9FLAO S-adenosylmethionine:tRN A ribosyltransferase-isomerase OS=Myroides odoratimimus OX=76832 GN=queA PE=3 SV=1

SEQ ID NO: 69179 - protein, 349 aa, Myroides odoratus
  misc_feature (1)..(349): tr|A0A378RU54|A0A378RU54_MYROD S-adenosylmethionine:tRN A ribosyltransferase-isomerase OS=Myroides odoratus OX= 256 GN=queA PE=3 SV=1
MKLSNFNFDLPEELLAEFPAENRDEARLMVIDRKTGTIEHKLFKDVVDYFGEGDVMVLNNTKVFPARLYGNKEKTGARIEVFLLRELNEEQRLWDVLVDPARKIRIGNKLYFGEDDSLVAEVIDNTTSRGRTLRFLYDGSYEEFRTKLQELGETPIPKYINREVVPEDAERYQTIYAKEEGAVAAPTAGLHFSKHLMKRLEINGIKFAEITLHIGLGTFNPVEVEDLSKHKMDSEEFVVSQEACDIVNNAKEEKHRVCAVGTTCMRALESSVSSSQTLNPYRGWTNKFIFPPYDFSIADCMITNFHMPKSTLLMMISAFCGHDLMMKAYKEAVEEGYKFYSYGDAMLIL

SEQ ID NO: 69180 - protein, 349 aa, Myroides odoratus; identical to SEQ ID NO: 69179
  misc_feature (1)..(349): tr|H1ZA09|H1ZA09_MYROD S-adenosylmethionine:tRNA ribosy ltransferase-isomerase OS=Myroides odoratus DSM 2801 OX =929704 GN=queA PE=3 SV=1

SEQ ID NO: 69181 - protein, 349 aa, Myroides phaeus
  misc_feature (1)..(349): tr|A0A1G8EZB6|A0A1G8EZB6_9FLAO S-adenosylmethionine:tRN A ribosyltransferase-isomerase OS=Myroides phaeus OX=70 2745 GN=queA PE=3 SV=1
MKLSNFNFDLPTELLAEFPAENRDESRLMVIDRKAGTIDHKEFKDLIDYFDEGDVMVLNNTKVFPARLYGNKEKTGARIEVFLLRELNAEQRLWDVLVDPARKIRIGNKLYFGEDDSLVAEVIDNTTSRGRTLRFLYDGSYEEFRVKLQELGETPIPKYINREVVPEDAERYQTIYATEEGAVAAPTAGLHFSKHLLKRLEIKGIKFAEVTLHIGLGTFNPVEVEDLSKHKMDSEEMFVTQEACDIVNEAKVRKSRVCAVGTTSMRALESSVSSNQTLNPFVGWTNKFIFPPYDFSIADCMVTNFHMPKSTLLMMISAFCGHDLMMKAYKEAVKEKYKFYSYGDAMLIL

SEQ ID NO: 69182 - protein, 349 aa, Myroides profundi; identical to SEQ ID NO: 69176
  misc_feature (1)..(349): tr|A0A0B5RGK2|A0A0B5RGK2_9FLAO S-adenosylmethionine:tRN A ribosyltransferase-isomerase OS=Myroides profundi OX= 480520 GN=queA PE=3 SV=1

SEQ ID NO: 69183 - protein, 343 aa, Myxococcaceae bacterium
  misc_feature (1)..(343): tr|A0A3N5H7E4|A0A3N5H7E4_9DELT S-adenosylmethionine:tRN A ribosyltransferase-isomerase OS=Myxococcaceae bacteri um OX=2484252 GN=EHM78_06055 PE=3 SV=1
MKHALQDAPATVSKQAGRLLHVDLRRGTLVDTRIDSLPELLRPGDLLVVNDAATLPASLPGTARGEPIEVRLAGEEPDGTWRAVVFGAGDWRTPTESRPPPPALAPGDSLRLGPGLQARVTARSDVSTRLLWIRFAASAERFWSALYLHGRPVQYAYEPSPLSLDRVQTPYAARPWASEMPSAGRPLTLELLGRLRSRGVALARLTHAAGLSSTGDAVLDGALPLPERYELPAATVRAVAETRRQRGRVVAVGTTVVRALEGAALSAGGELRPGPGLTDLRIGRGFEPRLVSGLLSGIHARDSSHFELLSAFLPGALELLYTLHAAAGGYRGHEFGDSTLVLG

SEQ ID NO: 69184 - protein, 354 aa, Myxococcaceae bacterium
  misc_feature (1)..(354): tr|A0A521TXX1|A0A521TXX1_9DELT S-adenosylmethionine:tRN A ribosyltransferase-isomerase OS=Myxococcaceae bacteri um OX=2484252 GN=EPO40_24170 PE=3 SV=1
MAPATGPRGDALAERLLVIDPATGRLSDRRIADLPELLREGDLLVLNDAATLPASLMATGPMGEPMELRLAHARDDGAWDVALFGDGDWRTRTEHRPAPPVVGVGEALLLGDDLRALVESVSAVSPRLVTVRFSHSGDAFWRRLYQLGRPVQYAHLHGALALWDVQTPVASRPWAMEMPSAGRPLSWALLERVKSRGVALATVTHAAGLSSIGDEALDAGLPWPERSEVPQATVDAVGRCRARGGRVVAVGTSVVRALEGRAERSTGDGLLEAGSAVTGLVIGEGFRPRVVDGVLSGMHEPGSSHFALLTAFADAALLHASLRFASSRGYLQHEFGDSALVLGVSHGLAPRISA

SEQ ID NO: 69185 - protein, 259 aa, Myxococcales bacterium
  misc_feature (1)..(259): tr|A0A0S8EP46|A0A0S8EP46_9DELT S-adenosylmethionine:tRN A ribosyltransferase-isomerase (Fragment) OS=Myxococcal es bacterium SG8_38_1 OX=1703408 GN=AMJ63_15985 PE=3 SV =1
MRISDLDYDLPEGLIAQEPLVARDSSRLLVVDVEQAEIDARMFSDLPSLLPPSLFVFNDTRVFPARLTGHKASGGKVELLLLRKRAEGENRWLAMGRSSKGLRAGMALSLCEGRIGARIVRALDHGQVEVELHAEGDVDALIEEAGDLPLPPYIRRPAGDADRERYQTVYAKKPGAVAAPTAGLHFTEETLASLRQAGHEIAYVTLHVGPGTFRPVQADHLDDHEMHEEAYEVPATTIAAIHRARAEGRPVVAVGTTVV

SEQ ID NO: 69186 - protein, 362 aa, Myxococcales bacterium
  misc_feature (1)..(362): tr|A0A2E6VWK5|A0A2E6VWK5_9DELT S-adenosylmethionine:tRN A ribosyltransferase-isomerase OS=Myxococcales bacteriu m OX=2026763 GN=queA PE=3 SV=1
MSELLSSYDYHLPKSLIAAHPPEDRIASRLLVLTSDASRPIDAQFARLKEFLQPGDVLVLNDTRVLPARLLGQKEETGGKVEVLLSRPVTLHKWIALIKASKKSKPGTSLVFTGDAGTTLRATVGPAIGDEPGAFEVDFDQDVRAFAEAHGEIPLPPYMQRQADASDKERYQTVFADPNKNFAAAAPTAGLHFDPNHLATLAQRGVEQVKVTLHVGPGTFLPVRDDDISQHQMHAEPWHLSETAAATLNRAKDQGRRVVSVGTTCVRVLESATNEEGRLQSGSGLTKLFLRPGKQFAVVDALLTNFHLPKSTLLMLVSAAVGRDRLLRAYQHAVEQKYRFFSYGDACFFEVSQDNKKPWPKP

SEQ ID NO: 69187 - protein, 362 aa, Myxococcus fulvus
  misc_feature (1)..(362): tr|F8C743|F8C743_MYXFH S-adenosylmethionine:tRNA ribosy ltransferase-isomerase OS=Myxococcus fulvus (strain ATC C BAA-855 / HW-1) OX=483219 GN=queA PE=3 SV=1
MSSRLSDYDFALPESQIAQAPLAERDASRLMTVSRSSGAWSHRRFADLQELLRPGDVLVLNDARVIPARLLGQKAGTGGRVELLVVRPAAQHTLTSAALGEAPESLDWVCLGQASKGLKPGQRVSFAGGLEAEIQEALGGGEYRVRFQAPAGTSLAELLDAAGRLPLPPYISREPDAADAERYQTVYARASGAVAAPTAGLHFTQETLAALEARGIHRALVTLDVGPGTFLPVREDDLDKHHMHPERYTVPESTATAVNAARAEGRRVVAVGTTVVRTLESATDAETGRLRAGPGETTLFIRPGFAFRQVDLLLTNFHLPRSTLVVLVSALLGRERTLEAYAEAVRAGYRFFSYGDAMLVSE

SEQ ID NO: 69188 - protein, 341 aa, Myxococcus fulvus
  misc_feature (1)..(341): tr|A0A511T1V1|A0A511T1V1_MYXFU S-adenosylmethionine:tRN A ribosyltransferase-isomerase OS=Myxococcus fulvus OX= 33 GN=MFU01_23850 PE=3 SV=1
MKPARWPGDHPEEGRLLHVEPRASRFKDAHLADLPSLLREKDLLVVNDAATFPASLLGRTASGERMELRLLSHEPDGTWLAVLFGAGDWRKRTEDRPSPPVLEAGARFTVVGLSARVVEVLPPSPRLLRVAFEDDGAELWSALYQGGRPVQYAHTLAPLSLWHVQTGYGARPWAVEAPSAGLPLTWNLLLALRRRGVRLASLTHAAGLSSTGDAVLDAALPRPERSDIPAVTVAQVEATRAEGGRVVAVGTTVVRALEGRAAMNGGRLVAGESVTDLLLGPGFVPRVVDGLLTGMHEPGTSHHALLQAFAPLSLLGDVAAHAEAKGYLGHEFGDSCLILDT

SEQ ID NO: 69189 - protein, 341 aa, Myxococcus hansupus
  misc_feature (1)..(341): tr|A0A0H4WJY3|A0A0H4WJY3_9DELT S-adenosylmethionine:tRN A ribosyltransferase-isomerase OS=Myxococcus hansupus O X=1297742 GN=A176_000573 PE=3 SV=1
MNPARWPSERPEEGRLLHVEPRARRFQDARVADLPSLLRAGDLLVVNDAGTLPASLPGRTTSGERIELRLLSREPDGTWTVVLFGAGDWRRRTEDRPLPPLVSEGEGLLIGGLKARVVQVLPPSPRLLRVAFDATGAALWSGLYRSGRPVQYAYTEAPLSLWHVQTAYGARPWSAEPPSAGLPLTWSVLLALRRQGVRLASLTHAAGLSSTGDAVLDAALPRPERSDIPEATVEAVLHTRASGGRVVAVGTTVVRALEGRAAQHGGWLVAGDEVTDLLLGPGFVPRMVHGLLTGVHEPGSSHHALLQAFAPLPLLQEVAAHAEARGYLGHEFGDSCLLLDA

SEQ ID NO: 69190 - protein, 362 aa, Myxococcus hansupus
  misc_feature (1)..(362): tr|A0A0H4XBI8|A0A0H4XBI8_9DELT S-adenosylmethionine:tRN A ribosyltransferase-isomerase OS=Myxococcus hansupus O X=1297742 GN=queA PE=3 SV=1
MSSRLSDYDFALPESQIAQAPLAERDASRLMTLSRSSGAWSHRRFSDLQELLRPGDVLVLNDARVIPARLLGQKAGTGGRVELLVVRPAAQHTLTSAALGDAPESLDWICLGQASKGLKPAQRVTFAGGLEGEIQEALGGGEYRVRFHAPKGTSLAALLDEAGRLPLPPYITREPDAADAERYQTVYARASGAVAAPTAGLHFTQDVLAALEARGVHRALVTLDVGPGTFLPVREDDLDRHHMHPERYTVPESTAKAVNAAKADGRRVVAVGTTVVRTLESATDPETGRLREGPGETTLFIRPGFAFRQVDVLLTNFHLPKSTLVVLVSALLGRERTLEAYAEAVREGYRFFSYGDAMLVSE

SEQ ID NO: 69191 - protein, 362 aa, Myxococcus macrosporus
  misc_feature (1)..(362): tr|A0A250JYZ3|A0A250JYZ3_9DELT S-adenosylmethionine:tRN A ribosyltransferase-isomerase OS=Myxococcus macrosporu s DSM 14697 OX=1189310 GN=queA PE=3 SV=1
MSSRLSDYDFALPESQIAQAPLAERDASRLMTVSRSSGAWSHRRFADLQELLRPGDVLVLNDARVIPARLLGQKAGTGGRVELLVVRPAAQHTLTSAALGEAPESLDWVCLGQASKGLKPGQRVSFAGGLEAEIQEALGGGEYRVRFQAPAGTSLAELLDAAGRLPLPPYISREPDATDAERYQTVYARASGAVAAPTAGLHFTQETLAALEARGIHRALVTLDVGPGTFLPVREDDLDKHHMHPERYTVPESTAMAVNAARAEGRRVVAVGTTVVRTLESATDAETGRLRAGPGETTLFIRPGFAFRQVDLLLTNFHLPRSTLVVLVSALLGRERTLEAYAEAVRAGYRFFSYGDAMLVSE

SEQ ID NO: 69192 - protein, 341 aa, Myxococcus macrosporus
  misc_feature (1)..(341): tr|A0A250K3X8|A0A250K3X8_9DELT S-adenosylmethionine:tRN A ribosyltransferase-isomerase OS=Myxococcus macrosporu s DSM 14697 OX=1189310 GN=MYMAC_006058 PE=3 SV=1
MKPARWPADRPDEGRLLHVEPRARRFHDARVADLPSLLRDGDLLVVNDAATLPASLWGRTASGERIELRLLSREPDGTWTVVLFGAGDWRRRTEDRPPPPAVSEGAELMVGGLKARVVAVLPPSPRLLRVAFDATGAALWSGLYRSGRPVQYAYTEAPLSLWHVQTAYGARPWSVEPPSAGLPLTWSVLLALRRRGVRLASLTHAAGLSSTGDAALDAALPRPERSDLPAATVEAVLHTRALGGRVVAVGTTVVRALEGRAAQHGGWLVAGEEVTDLLLGPGFVPRLVHGLLTGVHEPGSSHHALLQAFAPLPLLQEVAAHAEARGYLGHEFGDSCLLLDA

SEQ ID NO: 69193 - protein, 361 aa, Myxococcus sp.
  misc_feature (1)..(361): tr|A0A540X2Z0|A0A540X2Z0_9DELT S-adenosylmethionine:tRN A ribosyltransferase-isomerase OS=Myxococcus sp. AM401 OX=2590453 GN=queA PE=3 SV=1
MSSRLSDYDFELPESQIAQAPLAQRDASRLMLVRRSTGDVSHRQFSDVLELLRPGDLLVLNDARVIPARLLGQKAGTGGRVELLVVRPAASTLTSAALDGAPESLDWLCLGQASKGLKPPQRLTFAGGLEAEVLEVLGGGEYRVRFHARPGASLASLLDAAGRLPLPPYITREPDAADAERYQTVYARASGAVAAPTAGLHFTQDTLDALAAKGVRRALVTLDVGPGTFLPVREEELDKHHMHPERFTVPEATAREVNAARAEGRRVVAVGTTVVRTLESATDPTTGLLREGPGETTLFIRPGFTFRQVDALLTNFHLPRSTLVVLVSALLGRERTLAAYAEAVREGYRFFSYGDAMLVSE

SEQ ID NO: 69194 - protein, 341 aa, Myxococcus sp.
  misc_feature (1)..(341): tr|A0A540WJA8|A0A540WJA8_9DELT S-adenosylmethionine:tRN A ribosyltransferase-isomerase OS=Myxococcus sp. AM401 OX=2590453 GN=FJV41_46330 PE=3 SV=1
MKPARWPVDHPEEGRLLHIEPRGRRFSDARVADLPSLLRDGDLLVVNDAATFPASLLGRTASGERVELRLVSREEDGTWTAVLFGAGDWRKRTEDRPPPPVLPVGTRFTVVGLPVQVVEVLPPSPRLLRVAFDEDGAALWSALYQGGRPVQYAYTVAPLSLWHVQTGYGARPWATEAPSAGLPLTWNVLLALRRRGVRLASLTHAAGLSSTGDAVLDAALPRPERSDIPVATVAQVEATRAAGGRVVAVGTTVVRALEGRAAMNGGRLVAGEAVTDLLLGPGFVPRVVHGLLTGMHEPGSSHHALLQAFAPSLLLKEAAAHAEARGYLGHEFGDSSLVLDA

SEQ ID NO: 69195 - protein, 370 aa, Myxococcus stipitatus
  misc_feature (1)..(370): tr|L7UC36|L7UC36_MYXSD S-adenosylmethionine:tRNA ribosy ltransferase-isomerase OS=Myxococcus stipitatus (strain DSM 14675 / JCM 12634 / Mx s8) OX=1278073 GN=queA PE=3 SV=1
MGAATSASPVSSRLSDYDFELPESQIAQAPLAQRDASRLMHVRRSSGDVSHRRFSDVMELLRPGDLLVLNDARVIPARLLGQKSGTGGRVELLVVRPAASTLTSAALEGAPETLDWLCLGQASKGLKPTQRLTFAGGLEAEVLEVLGGGEYRVRFHAPPGASLAALLDAAGKLPLPPYITREPDAADAERYQTVYARASGAVAAPTAGLHFTQEMLAALEARGVRRVLVTLDVGPGTFLPVREDDLDKHHMHPERFTVPEATAREVNAARAEGRRVVAVGTTVVRTLESATDPTTGRLREGPGETTLFIRPGFTFRQVDALLTNFHLPRSTLVVLVSALLGRERTLAAYAEAVRDGYRFFSYGDAMLVSE

SEQ ID NO: 69196 - protein, 341 aa, Myxococcus stipitatus
  misc_feature (1)..(341): tr|L7UJX9|L7UJX9_MYXSD S-adenosylmethionine:tRNA ribosy ltransferase-isomerase OS=Myxococcus stipitatus (strain DSM 14675 / JCM 12634 / Mx s8) OX=1278073 GN=MYSTI_069 43 PE=3 SV=1
MKPARWPVDQPEEGRLLHVEPREGRLTDARVADLPSLLRDGDLLVVNDAATFPASLLGRTVLGERIELRLLSQEPDGTWLAVLFGAGDWRKRTEDRPTPPAMPAGTRFTVVGLPVRVVEVLPPSPRFLRVAFEEEGAGLWSALYQGGRPVQYAHTLAPLSLWHVQTGYGARPWATEAPSAGLPLTWNLLLTLRRRGVRLASLTHATGLSSTGDEALDALLPRPERSDIPAATVAQVEATRAAGGRVVAVGTTVVRALEGRAAMNGGRLVAGESVTDLLLGPGFVPRVVSGLFTGMHEPGTSHFALLQAFCSRTLLREASAHAEARGYLGHEFGDSCLLLDA

SEQ ID NO: 69197 - protein, 362 aa, Myxococcus virescens
  misc_feature (1)..(362): tr|A0A511HDB9|A0A511HDB9_9DELT S-adenosylmethionine:tRN A ribosyltransferase-isomerase OS=Myxococcus virescens OX=83456 GN=queA PE=3 SV=1
MSSRLSDYDFALPESQIAQAPLAERDASRLMTISRSSGTWSHRRFADLQELLRPGDLLVLNDARVIPARLLGQKAGTGGRVELLVVRPAAQNTLTSAALRAAPESLDWVCLGQASKGLKPGQRVTFASGLEAEIQEALGGGEYRVRFHAPPGASLAALLDAAGRLPLPPYITREPDAADAERYQTVYARASGAVAAPTAGLHFTQESLAALDARGVHRALVTLDVGPGTFLPVREDDLDKHHMHPERYTVPEATAKAINAARAEGRRVVAVGTTVVRTLESATDPETGRLRAGPGETTLFIRPGFAFRQVDLLLTNFHLPRSTLVVLVSALLGRERTLEAYAEAVRAGYRFFSYGDAMLVSE

SEQ ID NO: 69198 - protein, 341 aa, Myxococcus virescens
  misc_feature (1)..(341): tr|A0A511H993|A0A511H993_9DELT S-adenosylmethionine:tRN A ribosyltransferase-isomerase OS=Myxococcus virescens OX=83456 GN=queA PE=3 SV=1
MKPARWPADHPDEGRLLHVEPRARRYRDTRVADLPSLLRAGDLLVVNDAATLPASLVGRTESGERIELRLLSREPDGTWTGVLFGAGDWRRRTEDRPPPPVLAVGAGLVVGGLKARVVAVLPPSPRLLRVAFDETGAALWSGLYRSGRPVQYAYMEAPLSLWHVQTAYGARPWSVEAPSAGLPLSWSVLLTLRKQGVRLASLTHAAGLSSTGDSTLDAALPRPERSDIPAATVEAILHTRASGGRVVAVGTTVVRALEGRAARHGGWLVAGEEVTDLLLGPGFVPRLVHGLLTGVHEPGSSHHALLQAFAPLPLLQEVAAHAEARGYLGHEFGDSCLLLDA

SEQ ID NO: 69199 - protein, 371 aa, Myxococcus xanthus
  misc_feature (1)..(371): tr|A0A4Y6CG72|A0A4Y6CG72_MYXXA S-adenosylmethionine:tRN A ribosyltransferase-isomerase OS=Myxococcus xanthus OX =34 GN=queA PE=3 SV=1
MGAATSATPVSSRLSDYDFALPESQIAQAPLAERDASRLMTISRSSGTWSHRRFADLQELLRPGDLLVLNDARVIPARLLGQKAGTGGRVELLVVRPAAQNTLTSAALGAAPESLDWVCLGQASKGLKPGQRVTFASGLEAEIQEALGGGEYRVRFHAPPGASLAALLDAAGRLPLPPYITREPDAADAERYQTVYARASGAVAAPTAGLHFTQETLAALAARGVHRALVTLDVGPGTFLPVREDDLDKHHMHPERYTVPEVTAKAINAARAEGRRVVAVGTTVVRTLESATDPETGRLRAGPGETTLFIRPGFAFRQVDLLLTNFHLPRSTLVVLVSALLGRERTLEAYAEAVRAGYRFFSYGDAMLVSE

SEQ ID NO: 69200 - protein, 364 aa, Myxococcus xanthus
  misc_feature (1)..(364): tr|Q1CYS4|Q1CYS4_MYXXD S-adenosylmethionine:tRNA ribosy ltransferase-isomerase OS=Myxococcus xanthus (strain DK 1622) OX=246197 GN=MXAN_6324 PE=3 SV=1
MGGVAVGVGALGRPPGGGEAGGRMKPARWPADRPEEGRLLHVEPRARRYRDTRVADLPSLLRAGDLLVVNDAATLPASLVGRTESGERIELRLLSREPDGTWTGVLFGAGDWRRRTEDRPPPPVLAVGAGLVVGGLKALVVAVLPPSPRLLRVAFDATGAALWSGLYRSGRPVQYAYLEAPLSLWHVQTAYGARPWSVEAPSAGLPLTWSVLLTLRKQGVRLASLTHAAGLSSTGDAALDAALPWPERSDIPAATVEAVLHTRASGGRVVAVGTTVVRALEGRAARHGGWLVAGEEVTDLLLGPGFVPRLVHGLFTGVHEPGSRHHALLQAFAPLPLLQEVAAHAEARGYLGHEFGDSCLLLDA

SEQ ID NO: 69201 - protein, 358 aa, Nannocystis exedens
  misc_feature (1)..(358): tr|A0A1I2BCT1|A0A1I2BCT1_9DELT S-adenosylmethionine:tRN A ribosyltransferase-isomerase OS=Nannocystis exedens O X=54 GN=SAMN02745121_04608 PE=3 SV=1
MRPATAPRDDRAGARLLLLDPRTGARADARVRDLPRWLAPGDLLIVNDAATLPASLPARVWRKNHVSQDMSSEDVEVRLTGAGEATWRVALLGAGDWRTPTERRAPPPALQVGDRLVFGAALAAEVVHVSPISPRLCELRFDREGAALWGALYRLGRPVQYAYVSEPLALWSVQTVFAARPWAAEMPSAGRPFDWETLLALRRAGVEIAAVTHAAGLSSVGDPDLDAALPLPERFDVPAATVAAIARARARGGRVIAVGTTVVRALEGNARRFGELRAGSGETDLVLGPGFVPRVVDGVVTGMHGPGESHFELLRAFAGEAALRAAFEHATAAGYLAHEFGDAALIVPGLAPASARAA

SEQ ID NO: 69202 - protein, 347 aa, Nannocystis exedens
  misc_feature (1)..(347): tr|A0A1I2GD86|A0A1I2GD86_9DELT S-adenosylmethionine:tRN A ribosyltransferase-isomerase OS=Nannocystis exedens O X=54 GN=queA PE=3 SV=1
MGPDAYDYVLPPEQIAQTPAARRGDARLLVQRDAGPPVHARARELPRFLDPRALVVVNDSRVVPARLRVLHGARELELLVCDPRPGLGPGQTFRAWVRGAKRLRPGDIVSCGDQIARYLEPDVIDPRARVFVVEAGEWMGALQRRGEVPLPPYIRRPEGPTADDASRYQTIYAAQPGSVAAPTAGLHWEPEVLAQLDVVRVTLHVGPGTFLPLEAEDVREHKVGAERIEVDAAAAGRIAAAKAEGRPVVAIGTTATRALEAVARAGGGTVVPFSGSTDLVIAPGFEFRVVDAIVTNFHLPRSSLLMLVCCLGGRERVLAAYAEAVAAGYRFYSYGDCMLLTRMDGAR

SEQ ID NO: 69203 - protein, 343 aa, Natranaerobius thermophilus
  misc_feature (1)..(343): sp|B2A5L1|QUEA_NATTJ S-adenosylmethionine:tRNA ribosylt ransferase-isomerase OS=Natranaerobius thermophilus (st rain ATCC BAA-1301 / DSM 18059 / JW/NM-WN-LF) OX=457570 GN=queA PE=3 SV=1
MKLEEFNYELPEELIAQKPLANRSKSRLMVVSINSSDVQHNHFEKLPQYVKDGDLFVINNSRVIPARLFGNKKQTGGKLEMVLLHPLEGKDEWEVLVKPGKRAKPGNVFEFGQETLEAEILDITPEGSRRVKFYYQGNFQQVLDQLGQMPLPPYIKEELEDPERYQTVYAKESGSVAAPTAGLHFTPEIISDIKDQGGEVAELTLHVGLGTFRPVETPNIEEHEMHAEYYQLPEETAKKINQAKQRGNRVIAVGTTVVRTLETVKTDDGLVQPGKGWTDIFIYPGYEFKVVDAMLTNFHLPKSTLLMLVSAFAGKDLIMSAYQAAIEERYRFFSFGDAMFIKN

SEQ ID NO: 69204 - protein, 344 aa, Natranaerobius trueperi
  misc_feature (1)..(344): tr|A0A226BZB7|A0A226BZB7_9FIRM S-adenosylmethionine:tRN A ribosyltransferase-isomerase OS=Natranaerobius truepe ri OX=759412 GN=queA PE=3 SV=1
MKLEEFDYNLPEELIAQKPLFNRSDSRLMMVNREFKEIKNESFKNIIDYVQKGDLFIVNNSKVMPARLFGKKKETGGKLEMVLIHPTENEGEWEVLVKPGKRAKPGTIFEFGDGILEAEIKSTTPEGGRIVKFNYQGNFQQILDQLGEMPLPPYIKRQLDDPDRYQTVYAKERGSVAAPTAGLHFTPDLIEKIKEKGGDVIELTLHVGLGTFRPVKVTDIEKHKMHSEYYYLPVESAEKINNAKRNGCRVIAVGTTAVRTLETCKTEEKGKCVKSSKGWTDIFIYPGYEFKVVDSLVTNFHLPKSTLLMLVSAFASNELIMEAYQEAVQEKYRFFSFGDAMFIE

SEQ ID NO: 69205 - protein, 341 aa, Natranaerovirga hydrolytica
  misc_feature (1)..(341): tr|A0A4R1MSF3|A0A4R1MSF3_9FIRM S-adenosylmethionine:tRN A ribosyltransferase-isomerase OS=Natranaerovirga hydro lytica OX=680378 GN=queA PE=3 SV=1
MKLEDFDFVLPEELIAQDPIKERSHSRMLVLDKETGQIEHKVFADIIDQLDPKDCLVLNNTKVMPARLIGEREKTQARIEFLLLNRLEGDEWEVMVKPGKKAKVNERVVFGEGILIAHIKEKLDNGNRLVKFEYEGIFEQVLDELGEMPLPPYITRKLEDKERYQTVYAKHIGSAAAPTAGLHFTNELLEKLKNKGIHIAYITLHVGIGTFRPVKVDNIEEHEMHSEHYWITKEEADKIKKAKENGGRIIPVGTTSCRTLETIMQEYGEIKESKGWTDIFMYPGYEFKIVDGLITNFHLPQSTLIMLVSALAEREKVMKAYQEAINKHYRFYSFGDAMFIK

SEQ ID NO: 69206 - protein, 341 aa, Natranaerovirga pectinivora
  misc_feature (1)..(341): tr|A0A4V2V0B9|A0A4V2V0B9_9FIRM S-adenosylmethionine:tRN A ribosyltransferase-isomerase OS=Natranaerovirga pecti nivora OX=682400 GN=queA PE=3 SV=1
MKVEDFNFELPEELIAQDPIKERTDSRLLVLNKKTGKVDHKIFKDIIECLNPNDCLVLNNTKVIPARLIGIREKTGAKIEFLLLNRQENDQWEVMVKPGKKVVIGERIIFGEGLLIANILEKLENGNRIIQFEYKGIFEQILDELGEMPLPPYISHQLEDKDRYQTVYAKHAGSAAAPTAGLHFTNELLEKIKGKGVEIAYITLHVGIGTFRPVKVDNIEEHDMHSEFYWITEEEASKINNAKAKGGRVIAVGTTSCRTLETVANDNGTINESKGWTDIFIYPGYKYKMVDALITNFHLPESTLIMLVSALAGKENVMGAYQVAIENKYRFYSFGDAMMIL

SEQ ID NO: 69207 - protein, 347 aa, Natribacillus halophilus
  misc_feature (1)..(347): tr|A0A1G8NXX1|A0A1G8NXX1_9BACI S-adenosylmethionine:tRN A ribosyltransferase-isomerase OS=Natribacillus halophi lus OX=549003 GN=queA PE=3 SV=1
MDVNDFDFDLPEELIAQQPLPNRDASRLLVLDRATGDIDHRQFSEIASFLQAGDCLVLNDTRVLPARLFGEKKETGGKVEVLLLNEGEADEWTTLVKPAKRVKAGTEIVFGDGSLTATCIAIGDQGERVLRFAYEGIFLEVLEALGEMPLPPYITEQLEESERYQTVYARNAGSAAAPTAGLHFTTARLDELRAKGVKICYITLHVGLGTFRPVSADRVEDHEMHAEYYEVDRETAEALQETKENGRDIVACGTTSARTLETVMNTYGAFKPTSGWTDIFIYPGYVFRAVDGLITNFHLPKSTLIMLVSAFAGKGAIMRAYQEAIGERYRFFSFGDVMYIRKGVTSV

SEQ ID NO: 69208 - protein, 341 aa, Natronincola ferrireducens
  misc_feature (1)..(341): tr|A0A1G9CY33|A0A1G9CY33_9CLOT S-adenosylmethionine:tRN A ribosyltransferase-isomerase OS=Natronincola ferrired ucens OX=393762 GN=queA PE=3 SV=1
MRTKDFYFDLPQELIAQKPLDKRDQSRLMILDKTTGEITHTFFYNIIDFLKAGDCLVLNNTRVLPARLIGEKEGTGGKIEFLLLKRIKLDTWETLVKPGKKAKIGTTFNFGGGVLKGKVIAIGEEGSRIVEFDYDGIFEDILDQLGKMPLPPYITETLEDNERYQTVYSKNKGSAAAPTAGLHFTEELLEQIEKKGVKIAYITLHVGLGTFRPVKVEDIESHKMHSEYYMISEEAAKIINETKIQGGKVIAVGTTSCRTLESAANATGEMKEGSGWTDIFIYPGYKFKVVDNLITNFHLPESTLIMLVSALAEKNQTMHAYTTAVKEKYRFFSFGDAMFIK

SEQ ID NO: 69209 - protein, 341 aa, Natronincola peptidivorans
  misc_feature (1)..(341): tr|A0A1H9YXE8|A0A1H9YXE8_9CLOT S-adenosylmethionine:tRN A ribosyltransferase-isomerase OS=Natronincola peptidiv orans OX=426128 GN=queA PE=3 SV=1
MKTKDFDFELPEELIAQIPLEKRDESRLMILDKQTGEICHSHFYDIVHHVNEGDCLVLNNTRVLPARLIGEKELTGGKIEFLLLKRIDIDTWETLVKPGKKAKIGSSFQFGNGLLKAVVLDIGDEGSRIIKFLYHGVFEEILDQLGEMPLPPYITAELNDKERYQTVYSTETGSAAAPTAGLHLTDELLQKISRKGVKIAYITLHVGLGTFRPVKVESIEKHKMHAEYYMINKEAAETINDTKKKGGKIIAVGTTSCRTLESAVMTSGEIIESSGWTDIFIYPGYQFKMVDNLITNFHLPESTLIMLVSTLAGKENTLKAYATAVKEKYRFFSFGDAMFIK

SEQ ID NO: 69210 - protein, 400 aa, Natronoflexus pectinivorans
  misc_feature (1)..(400): tr|A0A4R2GKH7|A0A4R2GKH7_9BACT S-adenosylmethionine:tRN A ribosyltransferase-isomerase OS=Natronoflexus pectini vorans OX=682526 GN=queA PE=3 SV=1
MPVPEINISDFNYHLPDERIAKYPLANRDESNLLVYKNLSVNHTNFKNLTEYLPDNTMLVFNNTRVIRARIHFFKSTGAKIEIFCLEPHSPSDAAMAFQQTHEVEWVCLVGNLKKWKGETLSAVANTAVGDVEVSALLTDRINDACIIKFSWKNQHVNFADILEGMGQTPIPPYLNRKSEIIDTERYQTVYSKLNGSVAAPTAGLHFSEAILKKIEEQNHKRLEITLHVGAGTFQPVKSEKISGHAMHTEQFEISCTSIEKLINHNNPVVAVGTTSVRTLESLYYAGVRIINGLPYNKIEQWDGFELPSDASVKCALTSLLNQLKRSNEDSFKASTSIMIAPGYKFKIVHGLITNFHQPKSTLLLLISALIGDNWKEVYEYAMNNDFRFLSYGDSSILIP

SEQ ID NO: 69211 - protein, 361 aa, Natronoflexus pectinivorans
  misc_feature (1)..(361): tr|A0A4R2GPM8|A0A4R2GPM8_9BACT S-adenosylmethionine:tRN A ribosyltransferase-isomerase OS=Natronoflexus pectini vorans OX=682526 GN=queA PE=3 SV=1
MLINVSFNDIVVMKLSKFKYKLPEELIALHPTQNRDESRLMVVHRDTGKIEHKIFKEIIDYFKTDDVFVFNDTKVFPARLYGNKEKTGAEIEVFLLRELNTEQRLWDVLVDPARKIRIGNKLYFGDDDALVAEVIDNTTSRGRTLRFLYDGSHEDFKKTLYSLGETPLPKFIKREVEPEDSERYQTIFARNEGAVAAPTAGLHFSRELLKRLEIKGTHFSYITLHVGLGNFRTVDVEDLTKHKMDSEQILISDEAANIINAGKDRKNKICAVGTTVMRTLETSVSTFGHVKPFEGWTNKFIFPAYDFQVANCMISNFHLPYSTLLMMVAAFGGYDLVMKAYKTAVKEKYRFGTYGDAMLII

SEQ ID NO: 69212 - protein, 349 aa, Natronospirillum operossus
  misc_feature (1)..(349): tr|A0A4Z0W794|A0A4Z0W794_9BACT S-adenosylmethionine:tRN A ribosyltransferase-isomerase OS=Natronospirillum oper ossus OX=2562806 GN=queA PE=3 SV=1
MRVTDFDFELPPELIARYPAEQRTASRLLCLDGPTGQLLHGVFTDIEQLLQPGDLLVMNDTRVIPARLFGHKASGGRVEILIERVLDDRQALAHVRASRAPRPGVSLVLASGVEIAVTGRRENLFELALQEGQSWLDVLHAEGHMPLPPYIDRPDETADAERYQTVYARHEGAVAAPTAGLHFDEDLLQRLRESGVEQTFVTLHVGAGTFQPVKVERVEDHLMHAERIEVNADTVAAVERCRQRGGRVVAVGTTSVRSLESAALSGTLQPFTGESDIFIYPGYRFRVVDALVTNFHLPQSTLLMLVSAFSGYEAIMRAYQAAITERYRFFSYGDAMFLTRKEHQESPHE

SEQ ID NO: 69213 - protein, 336 aa, Nautilia profundicola
  misc_feature (1)..(336): tr|B9LA80|B9LA80_NAUPA S-adenosylmethionine:tRNA ribosy ltransferase-isomerase OS=Nautilia profundicola (strain ATCC BAA-1463 / DSM 18972 / AmH) OX=598659 GN=queA PE= 3 SV=1
MVSSYDYNLPENLIARYPVTPRDSAKLLVYDRKTDRITHTVFRNILDFVGESHFIFNNTKVIKARIFGTKETGGKVELLLNRPYRDGYLVYIRGKVKPGSRLFFDKGLMAEVVELLDDGSRVVKFKVKSEKCKTEKEIDFLQLVKILEEIGHVPLPPYIKREDEKIDEKEYQTVFAKKEGAVAAPTASLHFTDELLNKIDKKSYLTLHVGAGTFKPVDVEDIREHKMHSEFFEIPEDTARVLDGSEEIVAVGTTVTRTVEYYARTGKLSGECDLFLNPLNPPIRVNHLLTNFHLPKSTLIMLVAAFIGRKKTLELYEEAIKNEYRFYSYGDAMLII

SEQ ID NO: 69214 - protein, 337 aa, Nautilia sp.
  misc_feature (1)..(337): tr|A0A432RUN7|A0A432RUN7_9PROT S-adenosylmethionine:tRN A ribosyltransferase-isomerase OS=Nautilia sp. OX=22311 14 GN=queA PE=3 SV=1
MNSPDLLVNSYDYFLPKELIATYPVTPRDSAKLLVYDRKTDKITHTIFRNILDFIGDSHFIFNDTKVVKARIFGKKETGGKIELLLNRPFEDKFLVYIRGKVKIGTELFFDKNLKAIVFQLNDDGSRLVKFYQNDEEIDFIKLVDVLNEIGHIPLPPYINREDESLDENEYQTVFAQKPGAVAAPTASLHFTDELLNQIENKSFLTLHVGAGTFKPVEVENILEHPMHSEFFEIPEDTAKILDNKEIKITAVGTTATRTIEYYAREKRLFGECDLFLHPQNRPIRVNHLLTNFHLPKSTLIMLVSAFIGREKTLELYDIAIKEKYRFYSYGDAMLII

SEQ ID NO: 69215 - protein, 347 aa, Nautilia sp.
  misc_feature (1)..(347): tr|A0A3T0L2R8|A0A3T0L2R8_9PROT S-adenosylmethionine:tRN A ribosyltransferase-isomerase OS=Nautilia sp. PV-1 OX= 2579250 GN=queA PE=3 SV=1
MKSDQLINKDVLVSSYDYNLPENLIARYPVTPRDSAKLLVYNRKTDKITHTVFRNILDFVGESHFIFNNTKVIKARIFGTKETGGKVELLLNRPYKDGYLVYIRGKVKVGTKLFFDKGLMAEVVELLDDGSRVVKFKVKSEKCKTEKEIDFLQLVKILEEIGHVPLPPYIKREDEKIDEKEYQTVFARKVGAVAAPTASLHFTDELLNKIDKKSYLTLHVGAGTFKPVDVEDIREHKMHSEFFEIPEDTARVLDGSEEIVAVGTTVTRTVEYYARTGKLSGECDLFLNPLNPPIRVNHLLTNFHLPKSTLIMLVAAFIGRKKTLELYEEAIKNEYRFYSYGDAMLII

SEQ ID NO: 69216 - protein, 343 aa, Negativibacillus sp.; identical to SEQ ID NO: 63900
  misc_feature (1)..(343): tr|A0A3A8Y478|A0A3A8Y478_9FIRM S-adenosylmethionine:tRN A ribosyltransferase-isomerase OS=Negativibacillus sp. 1xD8-3 OX=2320085 GN=queA PE=3 SV=1

SEQ ID NO: 69217 - protein, 338 aa, Negativicoccus succinicivorans
  misc_feature (1)..(338): tr|W1U0V4|W1U0V4_9FIRM S-adenosylmethionine:tRNA ribosy ltransferase-isomerase OS=Negativicoccus succinicivoran s DORA_17_25 OX=1403945 GN=queA PE=3 SV=1
MNVSEFNYDLPEELIAQTPVEPRDTSRLLTLDRQTGATKQGIFRDILADVRPDDVWVFNNTRVIPARLYGKRPTGGRVEVLLLHPLGEDRWEVLVRPGKKALPGTALTFDAGVTATVEDRTEFGGRVLKFTYDGDFYERLDEIGEMPLPPYIHERLQDRERYQTVYSKTPGSAAAPTAGLHFTPEVMKEIAARGATVCYVTLDVGLGTFRPVSVTQIEAHHMHSETYNVSEETARLINEAKRAGRRIVAVGTTSVRTLEAAGQSGVVKAGRDATELFIYPGYEFKIVDAMVTNFHLPQSTLLMMISAFAGKDHVLAAYREAVAAKYRFFSFGDAMWIR

SEQ ID NO: 69218 - protein, 343 aa, Neisseria animalis
  misc_feature (1)..(343): tr|A0A3N3EFV9|A0A3N3EFV9_NEIAN S-adenosylmethionine:tRN A ribosyltransferase-isomerase OS=Neisseria animalis OX =492 GN=queA PE=3 SV=1
MNISDFDFALPEALIAQHPPEIRGSSRLLAALPDTPLADRNFADITDYIAAGDVLVFNNTKVMKARLFGQKASGGKIEALIERVLDNHTALAHIRSSKSPKPGTELIFENALRAVMTERAGELFCLRFEGTQTVYELLEQYGKLPLPPYIERAADGSDDSRYQTVYAKHQGAVAAPTAGLHFTDELLTALRAKGVQTAEVTLHVGAGTFQPVRVENIAEHKMHSEWFDIPSETVAAIQAAQARGSKIWAVGTTSMRALESAAQTGSLKAGQGDTDIFITPGYRFKVIDRLITNFHLPKSTLLMLVSAFSGMEHIRNVYRHAIEQQYRFFSYGDAMILGRKETE

SEQ ID NO: 69219 - protein, 345 aa, Neisseria animaloris
  misc_feature (1)..(345): tr|A0A3S5BW58|A0A3S5BW58_9NEIS S-adenosylmethionine:tRN A ribosyltransferase-isomerase OS=Neisseria animaloris OX=326522 GN=queA PE=3 SV=1
MHISDFDFELPDELIAQHPPAVRGSSRLLVALPGKQLCDGIFNDLPEYVDAGDVLVFNNTKVMKARLFGQKASGGKIEALIERVLDEHTALAHIRSSKSPKPGTELVFDGGIAATMVERAGELFCLRFGGSQSVYDLLENNGRLPLPPYIERAADDNDDNRYQTVYAKHQGAVAAPTAGLHFTEELLTALRGKGIQTAEVTLHVGAGTFQPVRVENIAEHKMHSEWFDVPSETVEMVEAAHRRGNKVWAVGTTSMRALESAARETGRLKAGRGDTDIFITPGYSFKVVDRLVTNFHLPKSTLLMLVSAFSGTEHIRHVYRHAVEQKYRFFSYGDAMLLGREDDDS

SEQ ID NO: 69220 - protein, 85 aa, Neisseria arctica
  misc_feature (1)..(85): tr|A0A0J0YP56|A0A0J0YP56_9NEIS S-adenosylmethionine:tRN A ribosyltransferase-isomerase (Fragment) OS=Neisseria arctica OX=1470200 GN=PL75_11095 PE=3 SV=1
SVKENGGSVNTVGTTSIRTVETIGSNLDGQMQADSGWTNIFINPGYEWKVVDAFSTNFHLPKSTLVMLVSAFAGRELVLGAYHHA

SEQ ID NO: 69221 - protein, 341 aa, Neisseria arctica
  misc_feature (1)..(341): tr|A0A0J0YS64|A0A0J0YS64_9NEIS S-adenosylmethionine:tRN A ribosyltransferase-isomerase OS=Neisseria arctica OX= 1470200 GN=queA PE=3 SV=1
MHINDFDFDLPDALIAQHPPEVRGSSRLLEAFPGQPLRDLRFADLASLVSAGDVLVFNNTKVMKARLFGQKASGGKIEALVERVIDGHTALAHIRSSKSPKPGTELQFEGGITATMLAREGELFCLRFDGDADIYELLEKNGRLPLPPYIERAADDNDDSRYQTVYAKYQGAVAAPTAGLHFTEALLDGLKNKGVNIGEVTLHVGAGTFQPVRVENIAEHKMHSEWFEVPSETVAAIEAAKAAGKRVWAVGTTSMRALESAARATGCLQAGRGDTDIFITPGYRFNVVDCLVTNFHLPKSTLLMLVSAFSGTEHIRNVYRHAIEQEYRFFSYGDAMVLGRA

SEQ ID NO: 69222 - protein, 474 aa, Neisseria bacilliformis
  misc_feature (1)..(474): tr|F2BE76|F2BE76_9NEIS S-adenosylmethionine:tRNA ribosy ltransferase-isomerase OS=Neisseria bacilliformis ATCC BAA-1200 OX=888742 GN=queA2 PE=3 SV=1
MMVPDFPVQPVNRAAVGAFDAAVGLDGQENARVAVPGFVARAAAMQRQLLRRDDDGFLVRVAHGWFLYFRLRRAASQMVQNGGILLDKPLPVHGRGRLKAAFQTASPPQLRYNRAFSQRLCVPRFFRRLPMLLSDFDFHLPEHLIAQHPPAERGASRLLVALPDGTLRDETFAFLPQLVRAGDLFVFNNTKVVKARLFGQKESGGRIEALIERVLDAHTALAHIRASKSPKPGTVLLFDGGIRAEMTERAGELFTLRFAGEQSVWQILERHGRLPLPPYIARAAAAEDEARYQTVYAKHQGAVAAPTAGLHFTEALLAELEARGARTAEITLHVGAGTFQPVRTENVAEHKMHSEWYDIPAETAEAVAETKALGGRVWAVGTTSVRALESAARATGCLSAGSGDTDIFLTPGCRFNVADCLITNFHLPKSTLLMLVSAFAGTEEIRRIYRHAVEREYRFFSYGDAMVLGRKEAV

SEQ ID NO: 69223 - protein, 342 aa, Neisseria canis
  misc_feature (1)..(342): tr|A0A1X3CVR4|A0A1X3CVR4_9NEIS S-adenosylmethionine:tRN A ribosyltransferase-isomerase OS=Neisseria canis OX=49 3 GN=queA PE=3 SV=1
MHISDFDFELPEQLIAQHPPEERGNSRLLVALSGMPPQDKMFADLPMWLEPGDVLVFNNTKVIKARLFGQKASGGKIEALVERVLDEHRALAHIRASKSPKPGAELWFEGGIKAVMEERQGELFCLRFEGGPNVYELLEQHGHLPLPPYIERAAGANDDSRYQTVYAKEQGAVAAPTAGLHFTEAMLAGLAAKGVEMAEVTLHVGAGTFQPVRVDNIAEHKMHSEWYEVSETTVEKIRQARQAGHRVWSVGTTSMRALESAARSGVLQAGQGDTDIFITPGYRFKVVDRLITNFHLPKSTLLMLVSAFSGTQHIRDIYAHAIREQYRFFSYGDAMILGRAQD

SEQ ID NO: 69224 - protein, 356 aa, Neisseria cinerea
  misc_feature (1)..(356): tr|A0A2X3ZGE2|A0A2X3ZGE2_NEICI S-adenosylmethionine:tRN A ribosyltransferase-isomerase OS=Neisseria cinerea OX= 483 GN=queA PE=3 SV=1
MAAVPNESVTMDISDFDFTLPEKLIAQHPPEVRGSSRLLVALPDMPLQDRVFGDLPDYVGEGDVLVFNNTKVMKARLFGQKDSGGRIEALIERVLDSHTALAHIRSSKSPKPGMGLVFEGGIRAVMVERAGALFCLRFEGGQTVYELLERNGHLPLPPYIERAADADDDSRYQTVYAKYQGAVAAPTAGLHFTEELLRRLKDKGVETAEVTLHVGAGTFQPVRVEKIEEHKMHSEWFEVPSETVAAVEAAKARGNKVWAVGTTSMRALESAARATGYLKDGQGDTDIFITPGYRFNVVDRLVTNFHLPKSTLLMLVSAFSGMGHIRAVYRHAVEREYRFFSYGDAMILGRNEGGGL

SEQ ID NO: 69225 - protein, 356 aa, Neisseria cinerea
  misc_feature (1)..(356): tr|D0W3N4|D0W3N4_NEICI S-adenosylmethionine:tRNA ribosy ltransferase-isomerase OS=Neisseria cinerea ATCC 14685 OX=546262 GN=queA PE=3 SV=1
MAAVPNESVTMDISDFDFTLPEKLIAQHPPEVRGSSRLLVALPDMPLQDRVFGDLPDYVGEGDVLVFNNTKVMKARLFGQKDSGGRIEALIERVLDSHTALAHIRSSKSPKPGMGLVFEGGIRAVMVERAGALFCLRFEGGQTVYELLEQNGHLPLPPYIERAADADDDSRYQTVYAKYQGAVAAPTAGLHFTEELLLRLKGKGVETAEVTLHVGAGTFQPVRVEKIEEHKMHSEWFEVPSETVAAVEAAKARGNKVWAVGTTSMRALESAARETGHLKDGQGDTDIFITPGYRFNVVDRLVTNFHLPKSTLLMLVSAFSGMGHIRAVYRHAVEREYRFFSYGDAMILGRNEGGGL

SEQ ID NO: 69226 - protein, 346 aa, Neisseria dentiae
  misc_feature (1)..(346): tr|A0A1X3D451|A0A1X3D451_9NEIS S-adenosylmethionine:tRN A ribosyltransferase-isomerase OS=Neisseria dentiae OX= 194197 GN=queA PE=3 SV=1
MHISDFDFELPEALIAQQPSAERGGSRLLVALPGMAPADTLFAALPEYLNEGDVLVFNNTKVMKARLFGAKESGGRIEALIERVLDGSSALAHVRASKSPKAGTVLVFDGGIRAVMEAREGELFRLRFEGALSVYDILEQTGRLPLPPYIERAADDGDDERYQTVYAKHQGAVAAPTAGLHFTDALLQTLRNKGVRTAEVTLHVGAGTFQPVRVENIAEHKMHSEWFDVPPETVAAVEAAKQRGGRVWAVGTTSMRALESAARETGRLKAGTGDTDIFITPGYRFNVADRLITNFHLPKSTLLMLVSAFSGTAHIRSIYRHAVEQQYRFFSYGDAMLLGRQEDALS

SEQ ID NO: 69227 - protein, 350 aa, Neisseria dumasiana
  misc_feature (1)..(350): tr|A0A1X3DM04|A0A1X3DM04_9NEIS S-adenosylmethionine:tRN A ribosyltransferase-isomerase OS=Neisseria dumasiana O X=1931275 GN=queA PE=3 SV=1
MHISDFDFELPEALIAQHPPVERGGSRLLVALPDRPVADAVFSALPDYLEAGDVLVFNNTKVMKARLFGTKASGGKIEALIERVLDEHTALAHVRSSKSPKPGSELVFEGGIRAVMEERAGELFRLRFEDSRSVYDILEHVGKLPLPPYIERAADDDDDARYQTVYAKHQGAVAAPTAGLHFTDGLLEAIRAKGVHTAEVTLHVGAGTFQPVRVENIAEHTMHSEWFDVPSETVAAIEAARQRGSKIWAVGTTSMRALESAARETGRLKAGTGDTDIFITPGYRFRVVDRLITNFHLPKSTLLMLVSAFSGTEHIRSIYRHAVGQQYRFFSYGDAMILGCADSSQREAQD

SEQ ID NO: 69228 - protein, 161 aa, Neisseria dumasiana
  misc_feature (1)..(161): tr|A0A1X3D1T7|A0A1X3D1T7_9NEIS S-adenosylmethionine:tRN A ribosyltransferase-isomerase (Fragment) OS=Neisseria dumasiana OX=1931275 GN=BV912_12950 PE=3 SV=1
YIERAAGANDDSRYQTVYAKEQGAVAAPTAGLHFTEAMLAGLAAKGVEMAEVTLHVGAGTFQPVRADHIAEHKMHSEWYEVSETTVEKIRQARQAGRRVWSVGTTSMRALESAARSGVLQAGQGDTDIFITPGYRFKVVDRLITNFHLPKSTLLMLVSAFS

SEQ ID NO: 69229 - protein, 347 aa, Neisseria elongata
  misc_feature (1)..(347): tr|A0A378TVQ0|A0A378TVQ0_NEIEL S-adenosylmethionine:tRN A ribosyltransferase-isomerase OS=Neisseria elongata OX =495 GN=queA PE=3 SV=1
MQLSDFDFDLPEHLIAQQPPAERGASRLLSALPGQPLRDEMFSVLPQLAGRGDVLVFNNTKVMKARLFGQKASGGKIEALIERVLDAHTALAHIRSSKSPKPGTRLLFDGGIGAEMTAREGELFRLHFDGEETVYRLLEQHGRLPLPPYIERAANGDDESRYQTVYAKHQGAVAAPTAGLHFTDTLLAELKAKGVRLAEVTLHVGAGTFQPVRTENIAEHKMHSEWYDVPPETVAAVEAAKAEGTKVWAVGTTSMRALESAARETGRLKAGRGDTDIFITPGYRFRVADRLITNFHLPKSTLLMLVSAFSGIEEIRAVYRHAVAKEYRFFSYGDAMLLGRKDDAESL

SEQ ID NO: 69230 - protein, 347 aa, Neisseria elongata
  misc_feature (1)..(347): tr|D4DMZ9|D4DMZ9_NEIEG S-adenosylmethionine:tRNA ribosy ltransferase-isomerase OS=Neisseria elongata subsp. gly colytica ATCC 29315 OX=546263 GN=queA PE=3 SV=1
MQLSDFDFDLPEHLIAQQPPAERGASRLLSALPGESLRDEMFSVLPQLAGRGDVLVFNNTKVMKARLFGQKTSGGKIEALIERVLDAHTALAHIRSSKSPKPGTRLLFDGGIGAEMTAREGELFRLHFDGEETVYRLLEQHGQLPLPPYIERAADGDDESRYQTVYAKHQGAVAAPTAGLHFTDTLLAELKAKGVRLAEVTLHVGAGTFQPVRTENIAEHKMHSEWYDVPPETVAAVEAAKAEGAKVWAVGTTSMRALESAARETGRLKAGRGDTDIFITPGYRFRVADRLITNFHLPKSTLLMLVSAFSGIEEIRAVYRHAVAKEYRFFSYGDAMVLGRKDDAEPL

SEQ ID NO: 69231 - protein, 363 aa, Neisseria flavescens
  misc_feature (1)..(363): tr|A0A154UD70|A0A154UD70_NEIFL S-adenosylmethionine:tRN A ribosyltransferase-isomerase OS=Neisseria flavescens OX=484 GN=queA PE=3 SV=1
MPSENQLCAYNGACFFKVCATMDISDFDFELPEKLIAQHPPEVRGSSRLLVALPILPIEDQYFGDLPDYVAPGDVLVFNNTKVMKARLFGQKASGGKIEALIERVLDAHTALAHIRSSKSPKPGTELIFEGDIRAVMMERAEELFCLKFEGEQTVYELLEQNGHLPLPPYIERAADDEDDSRYQTVYAKYQGAVAAPTAGLHFTDELLGRLKAKGVETAEVTLHVGAGTFQPVRVDKIEEHKMHSEWFDVPAETVATVEAAKARGNKVWAVGTTSMRALESAARETGRLKAGRGDTDIFITPGYRFNVADRLITNFHLPKSTLLMLVSAFSGMEHIRSVYRHAVEQEYRFFSYGDAMILGKVE

SEQ ID NO: 69232 - protein, 363 aa, Neisseria flavescens
  misc_feature (1)..(363): tr|C5TKI4|C5TKI4_NEIFL S-adenosylmethionine:tRNA ribosy ltransferase-isomerase OS=Neisseria flavescens SK114 OX =596320 GN=queA PE=3 SV=1
MPSENQLYAYNGACFFKVCTTMDISDFDFELPEKLIAQHPPEVRGSSRLLVALPTLPIEDKHFGDLPDYVAPGDVLVFNNTKVMKARLFGQKASGGKIEALIERVLDTHTALAHIRSSKSPKPGTELIFEGDIRAVMMERAEELFCLKFEGEQTVYELLEQNGHLPLPPYIERAADDEDDSRYQTVYAKYQGAVAAPTAGLHFTDELLGRLKAKGVETAEVTLHVGAGTFQPVRVDKIEEHKMHSEWFDVPAETVAAVEAAKARGNKVWAVGTTSMRALESAARETGRLKAGRGDTDIFITPGYRFNVADRLITNFHLPKSTLLMLVSAFSGMEHIRSVYRYAVEQEYRFFSYGDAMILGKAE

SEQ ID NO: 69233 - protein, 346 aa, Neisseria gonorrhoeae
  misc_feature (1)..(346): sp|Q5FAH3|QUEA_NEIG1 S-adenosylmethionine:tRNA ribosylt ransferase-isomerase OS=Neisseria gonorrhoeae (strain A TCC 700825 / FA 1090) OX=242231 GN=queA PE=3 SV=1
MDISDFDFTLPEHLIAQHPPEVRGSSRLLVALSDMPLQDRVFGDLPDYVEAGDVLVFNNTKVMKARLFGQKDSGGRIEALIERVLDNHTALAHIRSSKSPKPGMGLVFEGGIRAVMVGREGELFCLRFEGGQTVYELLEQNGHLPLPPYIERAADADDDSRYQTVYAKYQGAVAAPTAGLHFTEELLRRLKDKGAVTAEVTLHVGAGTFQPVRVDKIEEHKMHSEWFEVPSETVAAVEAAKARGNKAWAVGTTSMRALESAARATGYLKDGQGDTDIFITPGYRFNVVDRLVTNFHLPKSTLLMLVGAFSGMGHIRAVYRHAIEREYRFFSYGDAMVLGRNEGGGL

SEQ ID NO: 69234 - protein, 346 aa, Neisseria gonorrhoeae
  misc_feature (1)..(346): tr|A0A1D3GS63|A0A1D3GS63_NEIGO S-adenosylmethionine:tRN A ribosyltransferase-isomerase OS=Neisseria gonorrhoeae OX=485 GN=queA PE=3 SV=1
MDISDFDFTLPEHLIAQHPPEVRGSSRLLVALPDMPLQDRVFGDLPDYVEAGDVLVFNNTKVMKARLFGQKDSGGRIEALIERVLDNHTALAHIRSSKSPKPGMGLVFEGGIRAVMVGREGELFCLRFEGGQTVYELLEQNGHLPLPPYIERAADADDDSRYQTVYAKYQGAVAAPTAGLHFTEELLRRLKDKGAVTAEVTLHVGAGTFQPVRVDKIEEHKMHSEWFEVPSETVAAVEAAKARGNKAWAVGTTSMRALESAARATGYLKDGQGDTDIFITPGYRFNVVDRLVTNFHLPKSTLLMLVGAFSGMGHIRAVYRHAIEREYRFFSYGDAMVLGRNEGGGL

SEQ ID NO: 69235 - protein, 346 aa, Neisseria iguanae
  misc_feature (1)..(346): tr|A0A2P7TY66|A0A2P7TY66_9NEIS S-adenosylmethionine:tRN A ribosyltransferase-isomerase OS=Neisseria iguanae OX= 90242 GN=queA PE=3 SV=1
MDISDFDFDLPEKLIAQHPPKVRGSSRLLAALPDMPVKDVHFADLPDYVERGDVLVFNNTKVIKARLFGKKASGGKIEALIERVLDGHTALAHVRSSKSPKPGTELVFEGGIKAVMVERQEELFCLRFEGRQTVYELLEQNGHLPLPPYIERTADSEDDSRYQTVYAKHQGAVAAPTAGLHFTDELLAALKAKGVEMAEVTLHVGAGTFQPVRVDNIADHKMHREWFDVPSETVAVIEAVKARGNRVWSVGTTSMRALESAARETGRLKAGQGDTDIFITPGYRFNVVDRLITNFHLPKSTLLMLVSALSGIQRIRDIYRHAVMQEYRFFSYGDAMILGHVENVED

SEQ ID NO: 69236 - protein, 346 aa, Neisseria lactamica
  misc_feature (1)..(346): tr|E4ZF69|E4ZF69_NEIL0 S-adenosylmethionine:tRNA ribosy ltransferase-isomerase OS=Neisseria lactamica (strain 0 20-06) OX=489653 GN=queA PE=3 SV=1
MDISDFDFTLPEKLIAQHPPEVRGSSRLLVALPDMPLQDRVFGDLPDYVGEGDVLVFNNTKVMKARLFGQKDSGGRIEALIERVLDNHTALAHIRSSKSPKPGMGLVFEGGIRAVMVGREGELFCLCFEGGQTVYELLEQNGHLPLPPYIERAADADDDSRYQTVYAKYQGAVAAPTAGLHFTEELLRRLKDKGAVTAEVTLHVGAGTFQPVRVEKIEEHKMHSEWFEVPSETVAAVEAAKARGNKVWAVGTTSMRALESAARATGRLKAGQGDTDIFITPGYRFNVADRLVTNFHLPKSTLLMLVSAFSGMGHIRAAYRYAVEHEYRFFSYGDAMILGRNEGVVR

SEQ ID NO: 69237 - protein, 356 aa, Neisseria lactamica
  misc_feature (1)..(356): tr|D0WDG7|D0WDG7_NEILA S-adenosylmethionine:tRNA ribosy ltransferase-isomerase OS=Neisseria lactamica ATCC 2397 0 OX=546265 GN=queA PE=3 SV=1
MAACPNESVAMDISDFDFTLPEKLIAQHPPEVRGSSRLLVALPDMSLQDRVFGDLPDYVEAGDVLVFNNTKVMKARLFGQKDSGGRIEALIERVLDNHTALAHIRSSKSPKPGMGLVFEGGIRAVMVGREGELFCLRFEGGQTVYELLEQNGHLPLPPYIERAADADDDSRYQTVYAKYQGAVAAPTAGLHFTEELLRRLKDKGAVTAEVTLHVGAGTFQPVRVEKIEEHKMHSEWFEVPSETVTAVEAAKARGNKVWAVGTTSMRALESAARATGRLKAGQGDTDIFITPGYRFNVVDRLVTNFHLPKSTLLMLVSAFSGMGHIRAAYRYAVEREYRFFSYGDAMILGRNEGGGL

SEQ ID NO: 69238 - protein, 343 aa, Neisseria macacae
  misc_feature (1)..(343): tr|F9F0C2|F9F0C2_9NEIS S-adenosylmethionine:tRNA ribosy ltransferase-isomerase OS=Neisseria macacae ATCC 33926 OX=997348 GN=queA2 PE=3 SV=1
MDISDFDFTLPDRLIAQHPPEVRGSSRLLVALPDISLQDRVFGDLPDYIEAGDVLVFNNTKVMKARLFGQKESGGKIEALIERVLDNHTALAHIRSSKSPKTGTKLIFEGDICAVMVERADELFCLRFEGGQTVYELLEQNGHLPLPPYIERAAGADDDTRYQTVYAKHQGAVAAPTAGLHFTDELLGRLKAKGVETAEVTLHVGAGTFQPVRVDKIEEHKMHSEWFDVPPETVAAIEAAHARGNKVWAVGTTSMRALESAARETGRLKAGQGDTDIFITPGYRFRVIDRLITNFHLPKSTLLMLVSAFSGMEHIRAVYRHAVEHEYCFFSYGDAMVLGRSEP

SEQ ID NO: 69239 - protein, 346 aa, Neisseria meningitidis
  misc_feature (1)..(346): sp|Q9JXW4|QUEA_NEIMB S-adenosylmethionine:tRNA ribosylt ransferase-isomerase OS=Neisseria meningitidis serogrou p B (strain MC58) OX=122586 GN=queA PE=3 SV=1
MDISDFDFTLPEKLIAQHPPEVRGSSRLLVALPDMPLQDRVFGDLPDYVEAGDVLVFNNTKVMKARLFGQKDSGGRIEALIERVLDNHTALAHIRSSKSPKPGMGLVFEGGIRAVTVGREGELFCLRFEGGETVYELLEQNGHLPLPPYIERAADADDDSRYQTVYAKYQGAVAAPTAGLHFTEELLHRLKDKGAVTAEVTLHVGAGTFQPVRVDKIEEHKMHSEWFEVPSETAAAVEAAKARGNKVWAVGTTSMRALESAARATGRLKAGQGDTDIFITPGYRFNVVDRLVTNFHLPKSTLLMLVSAFSGMGHIRAAYRHAVEREYRFFSYGDAMVLGRNEGVVR

SEQ ID NO: 69240 - protein, 346 aa, Neisseria meningitidis
  misc_feature (1)..(346): sp|A9M1H2|QUEA_NEIM0 S-adenosylmethionine:tRNA ribosylt ransferase-isomerase OS=Neisseria meningitidis serogrou p C (strain 053442) OX=374833 GN=queA PE=3 SV=1
MDISDFDFTLPEKLIAQHPPEVRGSSRLLVALPDMPLQDRVFGDLPDYVEAGDVLVFNNTKVMKARLFGQKDSGGRIEALIERVLDSHTALAHIRSSKSPKPGMGLVFEGGIRAVMVGREGELFCLRFEGGETVYELLEQNGHLPLPPYIERAADADDDSRYQTVYAKYQGAVAAPTAGLHFTEELLRRLKDKGAVTAEVTLHVGAGTFQPVRVDKIEEHKMHSEWFEVPSETAAAVEAAKARGNKVWAVGTTSMRALESAARATGRLKAGQGDTDIFITPGYRFNVVDRLVTNFHLPKSTLLMLVSAFSGMGHIRAAYRHAVEREYRFFSYGDAMVLGRNEGVVR

SEQ ID NO: 69241 - protein, 347 aa, Neisseria mucosa
  misc_feature (1)..(347): tr|A0A2R4AWZ2|A0A2R4AWZ2_NEIMU S-adenosylmethionine:tRN A ribosyltransferase-isomerase OS=Neisseria mucosa OX=4 88 GN=queA PE=3 SV=1
MDISDFDFTLPDRLIAQHPPEVRGSSRLLVALPDMPLQDRVFGDLPDYIEAGDVLVFNNTKVMKARLFGQKESGGKIEALIERVLDNHTALAHIRSSKSPKPGTKLIFEGDICAVMVERADELFCLRFEGEQTVYELLEQNGHLPLPPYIERAAGADDDKRYQTVYAKHQGAVAAPTAGLHFTDELLGRLKAKGVETAEVTLHVGAGTFQPVRVDKIEEHKMHSEWFDVPPETVAAIEAAHAHGNKVWAVGTTSMRALESAARETGRLKAGQGDTDIFITPGYRFRVIDRLITNFHLPKSTLLMLVSAFSGMEHIRSVYRHAVEHEYRFFSYGDAMVLGRRETDIED

SEQ ID NO: 69242 - protein, 347 aa, Neisseria mucosa
  misc_feature (1)..(347): tr|D2ZYW1|D2ZYW1_NEIMU S-adenosylmethionine:tRNA ribosy ltransferase-isomerase OS=Neisseria mucosa ATCC 25996 O X=546266 GN=queA PE=3 SV=1
MDISDFDFTLPDQLIAQHPPEVRGSSRLLVALPDMPLQDRAFGNLPDYIEAGDVLVFNNTKVMKARLFGQKESGGKIEALIERVLDNHTALAHIRSSKSPKPGTKLIFEGDICAVMVERADELFCLRFEGEQTVYELLEQNGHLPLPPYIERAAGADDDKRYQTVYAKHQGAVAAPTAGLHFTDELLGRLKTKGVETAEVTLHVGAGTFQPVRVDKIEEHKMHSEWFDVPPETVAAIEAAHARGNKVWAVGTTSMRALESAARETGRLKAGQGDTDIFITPGYRFRVIDRLITNFHLPKSTLLMLVSAFSGMEHIRTVYRHAVEHEYRFFSYGDAMVLGRSETDIAD

SEQ ID NO: 69243 - protein, 342 aa, Neisseria perflava
  misc_feature (1)..(342): tr|A0A2I1QWV5|A0A2I1QWV5_NEIPE S-adenosylmethionine:tRN A ribosyltransferase-isomerase OS=Neisseria perflava OX =33053 GN=queA PE=3 SV=1
MDISDFDFELPEKLIAQHPPEVRGSSRLLVALPTLPIEDQYFGDLPDYVAPGDVLVFNNTKVMKARLFGQKASGGKIEALIERVLDAHTALAHIRSSKSPKPGTELIFEGDICAVMMERAEELFCLKFEGEQTVYELLEQNGHLPLPPYIERAADDEDDSRYQTVYAKYQGAVAAPTAGLHFTDELLGRLKAKGVETAEVTLHVGAGTFQPVRVDKIEEHKMHSEWFDVPAETVAAVEAAKARGNKVWAVGTTSMRALESAARETGRLKTGRGDTDIFITPGYRFNVADRLITNFHLPKSTLLMLVSAFSGMEHIRSVYRHAVEQEYRFFSYGDAMILGKAE

SEQ ID NO: 69244 - protein, 356 aa, Neisseria polysaccharea
  misc_feature (1)..(356): tr|E2PBT0|E2PBT0_NEIPO S-adenosylmethionine:tRNA ribosy ltransferase-isomerase OS=Neisseria polysaccharea ATCC 43768 OX=546267 GN=queA PE=3 SV=1
MAACPNESAAMDISDFDFTLPEHLIAQHPPEVRGSSRLLVALPDMPLQDRVFGDLPDYVGEGDVLVFNNTKVMKARLFGQKDSGGRIEALIERVLDSHTALAHIRSSKSPKPDTKLIFEGGIEAVMLERVGELFCLRFNSKQTVYELLEQNGHLPLPPYIERAADADDDSRYQTVYAKYQGAVAAPTAGLHFTEELLRRLKDKGVETAEVTLHVGAGTFQPVRVEKIEEHKMHSEWFEVPSETVAAVGAAKARGNKVWAVGTTSMRALESAARETGHLKDGQGDTDIFITPGYRFNVADRLITNFHLPKSTLLMLVSAFSGMGHIRAVYRHAVEREYRFFSYGDAMILGRNEGGGL

SEQ ID NO: 69245 - protein, 367 aa, Neisseria shayeganii
  misc_feature (1)..(367): tr|G4CGT3|G4CGT3_9NEIS S-adenosylmethionine:tRNA ribosy ltransferase-isomerase OS=Neisseria shayeganii 871 OX=1 032488 GN=queA2 PE=3 SV=1
MASFFLPVSRMQLADFDFDLPEHLIAQHPPAERGGSRLLAALPGQLPQDSRFADLPDWLSPGDVLVFNNTKVMKARLFGQKASGGRIEALVERVVDAETVLAHVRSSKSPKPGTELHFEGGVRAVMQERTGELFCLRFVLSGSQTVYDILERHGHLPLPPYIERPAGADDDERYQTVYAKHQGAVAAPTAGLHFTEALLARLAERGIETAEVTLHVGAGTFQPVRVENIAEHTMHSEWYRISEDTVQAVAAAQARGNRVWAVGTTSLRCLESAAASGSLRAGEGDTDIFITPGYRFRVVDGLITNFHLPKSTLLMLVSAFSGMEHIRRTYRHAIEQQYRFFSYGDAMLLQRNEEGGQTPLSFSGSPL

SEQ ID NO: 69246 - protein, 347 aa, Neisseria sicca
  misc_feature (1)..(347): tr|A0A2I1XB27|A0A2I1XB27_NEISI S-adenosylmethionine:tRN A ribosyltransferase-isomerase OS=Neisseria sicca OX=49 0 GN=queA PE=3 SV=1
MDISDFDFTLPDRLIAQHPPEVRGSSRLLVALPDMPLQDRAFGDLPNYIEAGDVLVFNNTKVMKARLFGQKESGGKIEALIERVLDNHTALAHIRSSKSPKPGTKLIFEGDIRAVMIERADELFCLRFEGEQTVYELLEQNGHLPLPPYIERAAGADDDKRYQTVYAKHQGAVAAPTAGLHFTDELLGRLKTKGVETAEVTLHVGAGTFQPVRVDKIEEHKMHSEWFDVLPETVAAIEAAHARGNKVWAVGTTSMRALESAARETGRLKAGQGDTDIFITPGYRFRVIDRLITNFHLPKSTLLMLVSAFSGMEHIRAVYRHAVEHEYRFFSYGDAMVLGRNETDIAD

SEQ ID NO: 69247 - protein, 343 aa, Neisseria sicca
  misc_feature (1)..(343): tr|I2NR21|I2NR21_NEISI S-adenosylmethionine:tRNA ribosy ltransferase-isomerase OS=Neisseria sicca VK64 OX=10957 48 GN=queA PE=3 SV=1
MDISDFDFTLPDRLIAQHPPEVRGSSRLLVALPDMPLQDRVFGDLPDYIEAGDVLVFNNTKVMKARLFGQKESGGKIEALIERVLDNHTALAHIRSSKSPKPGTKLIFEGDICAVMVERADELFCLRFEGEQTVYELLEQNGHLPLPPYIERAAGADDDTRYQTVYAKHQGAVAAPTAGLHFTDELLGRLKAKGVETAEVTLHVGAGTFQPVRVDKIEEHKMHSEWFDVPPETVAAIEAAHTRGNKVWAVGTTSMRALESAARETGRLKAGQGDTDIFITPGYRFRVIDRLITNFHLPKSTLLMLVSAFSGMEHIRAVYRHAVEHEYRFFSYGDAMVLGRSEP

SEQ ID NO: 69248 - protein, 347 aa, Neisseria sp.
  misc_feature (1)..(347): tr|A0A1F1S9H4|A0A1F1S9H4_9NEIS S-adenosylmethionine:tRN A ribosyltransferase-isomerase OS=Neisseria sp. HMSC31F 04 OX=1581075 GN=queA PE=3 SV=1
MQLSDFDFDLPDHLIAQQPPAERGASRLLSALPGEPLRDEMFSVLPQLVGRGDVLVFNNTKVMKARLFGQKASGGKIEALIERVLDAHTALAHIRSSKSPKPGMRLLFDGGIGAEMTAREGELFRLHFDGEETVYRLLEQHGRLPLPPYIERAADGDDESRYQTVYAKHQGAVAAPTAGLHFTDTLLAELKAKGVRLAEVTLHVGAGTFQPVRTENIAEHKMHSEWYDVPPETVAAVEAAKAEGAKVWAVGTTSMRALESAARETGRLKAGRGDTDIFITPGYRFRVADRLITNFHLPKSTLLMLVSAFSGIEEIRAVYRHAVAKEYRFFSYGDAMVLGRKDDAESF

SEQ ID NO: 69249 - protein, 345 aa, Neisseria sp.
  misc_feature (1)..(345): tr|A0A2H9X1Z0|A0A2H9X1Z0_9NEIS S-adenosylmethionine:tRN A ribosyltransferase-isomerase OS=Neisseria sp. N95_16 OX=2024408 GN=queA PE=3 SV=1
MDIADFDFELPEKLIAQHPPEVRGSSRLLVALPDMPLKDAHFADLPDYVGRGDVLVFNNTKVIKARLFGQKASGGKIEALIERVLDEHTALAHVRSSKSPKPGTELIFEGGINAVMVERQEELFCLRFDGTQTVYELLEQNGHLPLPPYIERAADDKDDSRYQTVYAKHQGAVAAPTAGLHFTDELLAALKAKGVEMAEVTLHVGAGTFQPVRVDNIADHKMHSEWFEVPSETVAAIEAAKARGNRVWSIGTTSMRALESAARETGRLKAGQGDTDIFITPGYRFKVVDRLITNFHLPKSTLLMLVSALSGMQHIRDVYQHAVEQEYRFFSYGDAMILGRVEHTD

SEQ ID NO: 69250 - protein, 342 aa, Neisseria subflava
  misc_feature (1)..(342): tr|A0A4D7X117|A0A4D7X117_NEISU S-adenosylmethionine:tRN A ribosyltransferase-isomerase OS=Neisseria subflava OX =28449 GN=queA PE=3 SV=1
MDISDFDFELPEKLIAQHPPEVRGSSRLLVALPTLPIEDKHFGDLPDYVAPGDVLVFNNTKVMKARLFGQKASGGKIEALIERVLDAHTALAHIRSSKSPKPGTKLIFEGDIHAVMMERAEELFCLKFEGGQTVYELLEQNGHLPLPPYIERAADDEDDSRYQTVYAKYQGAVAAPTAGLHFTDELLGRLKAKGVETAEVTLHVGAGTFQPVRVDKIEEHKMHSEWFDVPAETVAAVEAAKARGNKVWAVGTTSMRALESAARETGRLKAGRGDTDIFITPGYRFNVADRLITNFHLPKSTLLMLVSAFSGMEHIRNVYRHAVEQEYRFFSYGDAMILGKAE

SEQ ID NO: 69251 - protein, 342 aa, Neisseria subflava
  misc_feature (1)..(342): tr|D3A855|D3A855_NEISU S-adenosylmethionine:tRNA ribosy ltransferase-isomerase OS=Neisseria subflava NJ9703 OX= 546268 GN=queA PE=3 SV=1
MDISDFDFELPEKLIAQHPPEVRGSSRLLVALPTLPIEDKHFGDLPDYVAPGDVLVFNNTKVMKARLFGQKASGGKIEALIERVLDAHTALAHIRSSKSPKPGTELIFEGDIRAVMMERAEELFCLKFEGEQTVYELLEQNGHLPLPPYIERVADDEDDSRYQTVYAKYQGAVAAPTAGLHFTDELLGRLKAKGVETAEVTLHVGAGTFQPVRVDKIEEHKMHSEWFDVPAETVAAIEAAKARGNKVWAVGTTSMRALESAARETGRLKAGRGDTDIFITPGYRFNVADRLITNFHLPKSTLLMLVSAFSGMEHIRSVYRHAVEQEYRFFSYGDAMILGKAE

SEQ ID NO: 69252 - protein, 342 aa, Neisseria wadsworthii
  misc_feature (1)..(342): tr|G4CQK3|G4CQK3_9NEIS S-adenosylmethionine:tRNA ribosy ltransferase-isomerase OS=Neisseria wadsworthii 9715 OX =1030841 GN=queA2 PE=3 SV=1
MHISDFDFQLPEQLIAQHPPEIRGNSRLLVALPDKPFQDKVFADLPMWLETGDVLVFNNTKVIKARLFGQKASGGKIEALVERVLDTNRALAHIRSSKSPKPGTELWFEGGIKAVMEERRGELFCLRFEGGLNVYELLEQHGHLPLPPYIERAAGENDDSRYQTVYAKEQGAVAAPTAGLHFTEEMLKVLAAKGVEMAEVTLHVGAGTFQPVRVDNIAEHKMHSEWYEVSEETVNKIHKAKQAGRRVWSVGTTSMRALESAARSGVLSAGQGDTDIFITPGYRFEVIDRLITNFHLPKSTLLMLVSAFSGTQNIRDIYAHAIEQQYRFFSYGDAMILGRVED

SEQ ID NO: 69253 - protein, 351 aa, Neisseria weaveri
  misc_feature (1)..(351): tr|A0A3S4ZDX7|A0A3S4ZDX7_9NEIS S-adenosylmethionine:tRN A ribosyltransferase-isomerase OS=Neisseria weaveri OX= 28091 GN=queA PE=3 SV=1
MHISDFDFELPDDLIAQHPPEIRGSSRLLVACPGEPLGDGQFEHLPDWIAAGDVLVFNNTKVIKARLFGMKASGGKIEALVERVLDEHTALAHIRSSKSPKPGTELVFEGGIRAVMVERAGELFCLRFDGEKNVYELLEENGHLPLPPYIERAAGEEDDSRYQTVYAKHQGAVAAPTAGLHFTEALLQRLRDKGVCTTEVTLHVGAGTFQPVRVENVAEHKMHSEWFEVSEATVRLIEDAHARGNRVWAVGTTSMRALESAALETGRLKSGCGDTDIFITPGFRFKVVDGLITNFHLPKSTLLMLVSAFSGVEHIRSVYRHAVEKRYRFFSYGDAMLLKRCDGGDVTVNQS

SEQ ID NO: 69254 - protein, 344 aa, Neisseria zalophi
  misc_feature (1)..(344): tr|A0A5J6PTG6|A0A5J6PTG6_9NEIS tRNA preQ1(34) S-adenosy lmethionine ribosyltransferase-isomerase QueA OS=Neisse ria zalophi OX=640030 GN=queA PE=4 SV=1
MHISDFDFELPESLIAQYPPAERSSSRLLAALPGQPLTDTVFTSLPDYLADGDVLVFNNTKVMKARLFGAKASGGKIEALIERVIDHDTALAHIRSSKSPKPGTELIFEGDIHAVMEERAGELFRLRFHSSNSVYEILEQAGHLPLPPYIERAADDHDDARYQTVYAKHQGAVAAPTAGLHFTDSLLETIRAKGVHTTEVTLHVGAGTFQPVRVDNIEEHKMHSEWFEVPPETVAAIEAAKQRGNHVWSVGTTSMRALESAAKETGRLKAGTGDTDIFITPGYQFNVVDRLITNFHLPKSTLLMLVSAFSGIEHIRHVYQHAIEAQYRFFSYGDAMLLGYDKHK

SEQ ID NO: 69255 - protein, 350 aa, Neisseria zoodegmatis
  misc_feature (1)..(350): tr|A0A378WK02|A0A378WK02_9NEIS S-adenosylmethionine:tRN A ribosyltransferase-isomerase OS=Neisseria zoodegmatis OX=326523 GN=queA PE=3 SV=1
MHISDFDFELPEALIAQHPPAERGASRLLVALPDAPVTDTVFSALPDYLEAGDVLVFNNTKVMKARLFGAKASGGKIEALIERVLDAHTALAHVRSSKSPKPGTELIFEGDIRAVMEERAGELFRLRFEDSRSVYEILEHVGKLPLPPYIERTADDDDDARYQTVYAKHQGAVAAPTAGLHFTDGLLDAIRAKGVHTAEVTLHVGAGTFQPVRVENIAEHTMHSEWFEVPSETVAAIEAAQQRGNKVWAVGTTSMRALESAARETGRLKAGTGDTDIFITPGYRFHVADRLITNFHLPKSTLLMLVSAFSGTEHIRNIYRHAVGQQYRFFSYGDAMILGRADSSRHEAQD

SEQ ID NO: 69256 - protein, 350 aa, Neisseria zoodegmatis
  misc_feature (1)..(350): tr|A0A1X3CP00|A0A1X3CP00_9NEIS S-adenosylmethionine:tRN A ribosyltransferase-isomerase OS=Neisseria zoodegmatis OX=326523 GN=queA PE=3 SV=1
MHISDFDFELPEALIAQHPPAERGASRLLVALPDAPVADTVFSALPDYLEAGDVLVFNNTKVMKARLFGTKASGGKIEALIERVLDAHTALAHVRSSKSPKPGTELIFEGNIRAVMEERAGELFRLRFEDSRSVYEILEHVGKLPLPPYIERAADDDDDARYQTVYAKHQGAVAAPTAGLHFTDGLLEAIRTKGVHTAEVTLHVGAGTFQPVRVENIAEHTMHSEWFEVPSETVAAIEAAQQRGNKVWAVGTTSMRALESAARETGRLKAGTGDTDIFITPGYRFHVADRLITNFHLPKSTLLMLVSAFSGTEHIRNIYRHAVGQQYRFFSYGDAMILGRAYSSRHETQD

SEQ ID NO: 69257 - protein, 341 aa, Neisseriaceae bacterium
  misc_feature (1)..(341): tr|A0A2I7N8Y3|A0A2I7N8Y3_9NEIS S-adenosylmethionine:tRN A ribosyltransferase-isomerase OS=Neisseriaceae bacteri um DSM 100970 OX=2052837 GN=queA PE=3 SV=1
MKLSDFDYYLPEQLIATAPLKERHDSRLLIVSDKLLDQQFKDISKYISPGDLLVLNNTRVIKARLFGHKPSGGKVEVMLERIVDDYSLIAHVRTSKSIKLGMQITLPELEVEITEILGGLFKVSSKIPVNWIDYFDKHGNLPLPPYMQRQAELSDEERYQTVYAKDEGSVAAPTAGLHFSKEILDKLEAQGTKIAYVTLHVGSGTFKPVSVENISEHKMHSEIFNISQETIDKIIHTKKKGGKIVAVGTTSMRTLETVAKRGLVAQSGETDIFITPGFKFEIVDKLITNFHLPKSTLLMLVMAFAGINEIKNAYQYAIENKYRFFSYGDAMLLTRKESNHE

SEQ ID NO: 69258 - protein, 71 aa, Neisseriaceae bacterium
  misc_feature (1)..(71): tr|A0A431HMM1|A0A431HMM1_9NEIS S-adenosylmethionine:tRN A ribosyltransferase-isomerase (Fragment) OS=Neisseriac eae bacterium OX=2014784 GN=EKK64_05625 PE=3 SV=1
MKLSDFDYHLPEELIASLALENRSASRLLVASDDELIDKQFSDIIDYLQAGDLLVLNNTRVVKARLFGSKP

SEQ ID NO: 69259 - protein, 338 aa, Neisseriales bacterium
  misc_feature (1)..(338): tr|A0A3D5YT37|A0A3D5YT37_9NEIS S-adenosylmethionine:tRN A ribosyltransferase-isomerase OS=Neisseriales bacteriu m OX=2053582 GN=queA PE=3 SV=1
MQLSDFDYHLPEQLIACQPLANRDDSRLLVVDETPQDRQFKHILDYLNAGDLLVLNNTRVVKARLFGHKPTGGKVEVMLERVINNHEIIAHVGTSKAIKIGMQIELPAGISMQVIERMENIFRLRIVQDIDIYAYLEQHGNLPLPPYMQRQAVLDDETRYQTVFAQHNGSVAAPTAGLHFTPELLAQIRAKGVQISYVTLHVGSGTFKPVSVENIAEHKMHSEVFEISADTIELIKQTKLAGGKVIAVGTTSLRTLESVAKRGLYPQRGETDIFITPGFKFELVDKLITNFHLPKSTLLMLVAAFSGKTQIDASYQHAIQNNYRFFSYGDAMLLTRQD

SEQ ID NO: 69260 - protein, 338 aa, Neisseriales bacterium
  misc_feature (1)..(338): tr|A0A5C8BAS0|A0A5C8BAS0_9NEIS S-adenosylmethionine:tRN A ribosyltransferase-isomerase OS=Neisseriales bacteriu m OX=2053582 GN=queA PE=3 SV=1
MKLSDFDYHLPEELIAKNPLSNRSDSRLLVVNEHLEDHNFSEIINYINPGDLLIRNDTRVVKARIFGHKPSGGKVEVMLERIIDQQHFIAHVRTSKRINLGMEIILPDDLVVTVSETLDGLFALQTRTPIDLYAYLEHHGNLPLPPYMQRQAEIADESRYQTVYAAHNGSVAAPTAGLHFTPEILAQIEAKGAQIASVTLHVGSGTFKPVSVENISEHKMHSEVFQINEKTIELIKQTKARGGKIIAVGTTSLRTLESVAKRGLHAQSGETDIFITPGFKFKLVDKLITNFHLPKSTLLMLVSAFSSKDKINMAYQHAIKNNYRFFSYGDAMLLTRQD

SEQ ID NO: 69261 - protein, 353 aa, Neoasaia chiangmaiensis
  misc_feature (1)..(353): tr|A0A1U9KSF4|A0A1U9KSF4_9PROT S-adenosylmethionine:tRN A ribosyltransferase-isomerase OS=Neoasaia chiangmaiens is OX=320497 GN=queA PE=3 SV=1
MTQPAPPSAMAAFDFVLPPENIALAPARPRDSARLLHVQPGAPLAETAVRALPTLLRKGDLLIANDTAVIRAQLAAHRGTARIGITLDRILPNGEWHALARNARKLKAGDTLTFGEDPVTATVTENEGDGAVRLAFSVAGGDFDAFLLRVGALALPPYISRPFGPTEQDDIDYRTIFSRQKGAVAAPTAGLHFTPELLTALDAAGITRRTLTLHVGAGTFLPVRDDDIDRHRMHAEWGEIDAETAAAINETRARGGRIVAVGTTSLRLLESAADKNGIVHPWRGETDIFIRPGYRFRAVDVLMTNFHLPRSTLFMLVCAFSGTQTMRETYQYAVSNGFRFYSYGDACLLERAP

SEQ ID NO: 69262 - protein, 345 aa, Neochlamydia sp.
  misc_feature (1)..(345): tr|A0A0C1K7G1|A0A0C1K7G1_9BACT S-adenosylmethionine:tRN A ribosyltransferase-isomerase OS=Neochlamydia sp. TUME 1 OX=1478174 GN=queA PE=3 SV=1
MKDWHSLNNYLYDLPEELIAQYPCEPRDATRLLVVDRASGNMHEMVFHELADFLGKGDSLVFNNTKVLPSRLIGSRSSGGKAEIFLIKRLPTGDWEALVKPGKKLGKGSNVTFNEGFSCKIIDVLADGKRVVNFDYEGDITQALEKFGHVPLPPYMRRAAIPELDKERYQTVYAQHPGSVAAPTAGLHFTDKLLQRLEEKSVQVDKLTLHIGLGTFLPVKVEDIREHQMHDESFEISQETAERLNKRPINKRQICVGTTSCRALEAAASASGMITGGKYNTNIFIHPGYQFKYVQHLLTNFHQPGSSLLMLVSAFASPELIKEAYNKAIKERYRFLSYGDAMLIL

SEQ ID NO: 69263 - protein, 304 aa, Neochlamydia sp.
  misc_feature (1)..(304): tr|A0A3Q9XP54|A0A3Q9XP54_9BACT S-adenosylmethionine:tRN A ribosyltransferase-isomerase OS=Neochlamydia sp. S13 OX=1353976 GN=queA PE=3 SV=1
MHEMVFHELADFLGKGDSLVFNNTKVLPSRLIGSRSSGGKAEIFLIKRLPTGDWEALVKPGKKLGKGSNVTFKEGFSCKIIDVLADGKRVVNFDYEGDIAQALEKFGHIPLPPYMRRTAIPALDKERYQTVYAQHPGSVAAPTAGLHFTDNLLQKLEEKSVQVDKLTLHIGLGTFLPVKVEDIREHQMHAESFEISQETAERLNKRPINKRQICVGTTSCRALEAAASASGMITGGKYNTNIFIHPGYQFKYVQHLLTNFHQPGSSLLMLVSAFASPELIKEAYNKAIKERYRFLSYGDAMLIL

SEQ ID NO: 69264 - protein, 351 aa, Neokomagataea sp.
  misc_feature (1)..(351): tr|A0A506US94|A0A506US94_9PROT S-adenosylmethionine:tRN A ribosyltransferase-isomerase OS=Neokomagataea sp. Jb2 OX=2558904 GN=queA PE=3 SV=1
MVDDMAPYDFHLPESRIATHPARPRESARLLHVRPTSASQAVLNTHRITDLPTLLRPGDLLVANNTEVIHAKLEAMRGQARIGITLDRPLPGGTWHVLARNARKLRAGDLLTFGTDCVTAEVVANEGAGAAELRFSVEGAPFDAFLERCGVLALPPYIARPQGPTAQDERDYRTIFSRYRGAVAAPTAGLHFTPDLLEALAQRGIAQRTVTLHVGAGTFLPVRSSLAEHRMHAEWGHIDEATAQAINTTRAQGGRIVAVGTTSLRLLESAADENGLIHPWRGETSIFIRPGYRFRAVDVLMTNFHLPRSTLFMLVCAFAGTTNMQTAYHQAITDRMRFYSYGDACLLERQP

SEQ ID NO: 69265 - protein, 347 aa, Neokomagataea tanensis
  misc_feature (1)..(347): tr|A0A4Y6V7X1|A0A4Y6V7X1_9PROT S-adenosylmethionine:tRN A ribosyltransferase-isomerase OS=Neokomagataea tanensi s OX=661191 GN=queA PE=3 SV=1
MTDELALFDFDLPRSNIATEPARPRDTARLLHVPAQGSSTLGIVRDLPSFLRPGDLLIANDTAVIRAQLSATRGTARIGITLDRILPDRSWHALARNSRKLRPGDILNFGDDVVTAEIIENEGDGAIQLRFSVEGDDFDAFLDRVGALALPPYIERPTGPTHQDDDDYKTIFSDKRGAVAAPTAGLHFTPELLAALDARGITRRTLTLHVGAGTFLPVRSSISEHRMHAEWGEITAETAQLINDTRAKGGRVIAVGTTSLRLLESAAQEDGTVRPWSGETSIFIRPGYRFRAVDLLMTNFHLPRSTLFMLVCAFSGTETMRAAYERAIREDMRFYSYGDACLLERAE

SEQ ID NO: 69266 - protein, 362 aa, Neorhizobium alkalisoli
  misc_feature (1)..(362): tr|A0A561QV26|A0A561QV26_9RHIZ S-adenosylmethionine:tRN A ribosyltransferase-isomerase OS=Neorhizobium alkaliso li OX=528178 GN=queA PE=3 SV=1
MRVDLFDFDLPEENIALRPADPRDSARLLVVQPDGETVLSDHGVFELPSFLKPGDALVFNDTKVIPAQLEGIRHREGAGGQQVSATLHMRAGADVWKAFAKPGKRIKIGDRIEFGHAGDNTCLAGSLMATVEEKGEGGEVTLRFDLSGPALDEAIMAVGHIPLPPYIAAKRPEDEKDRKDYQTIYAREKGAVAAPTAGLHFTPDLFAALDAAGIERHFVTLHVGAGTFLPMKADDTDDHKMHEEIGYVSAETAERLNAVKARGGRVICVGTTSLRLIESAAADDSRIQPWSGATGIFITPGYRFKAVDMLMTNFHLPKSTLFMLVSAFAGLETMREAYAHAIATGYRFYSYGDSSLLFRKDR

SEQ ID NO: 69267 - protein, 361 aa, Neorhizobium galegae
  misc_feature (1)..(361): tr|A0A0T7HLE6|A0A0T7HLE6_RHIGA S-adenosylmethionine:tRN A ribosyltransferase-isomerase OS=Neorhizobium galegae bv. orientalis OX=323655 GN=queA PE=3 SV=1
MRVDLFDFDLPEKNIALRPASPRDSARLLVVRPEGEPVLADHRVSDLPGFLRPGDALVFNDTKVIPAQLEGIRHREGAGGQQVSATLHMRVAPDRWKAFAKPGKRIKTGDRIEFGDSGNACLIGSLAATVEDKGEGGEVTLRFDLSGPALDEAIMAVGHIPLPPYIAAKRPEDAQDQKDYQTIYAREEGAVAAPTAGLHFTPELFASLDAVGIERHFVTLHVGAGTFLPVKADDTAEHKMHQEIGHVSAETAARLNAVKRAGGRIVCVGTTSLRLIESAAADDGTIKPWSGATGIFITPGYRFKAVDMLMTNFHLPRSTLFMLVSAFCGLETMRSAYAHAIETGYRFYSYGDSSLLFRDNR

SEQ ID NO: 69268 - protein, 361 aa, Neorhizobium galegae
  misc_feature (1)..(361): tr|A0A0T7FPN7|A0A0T7FPN7_RHIGA S-adenosylmethionine:tRN A ribosyltransferase-isomerase OS=Neorhizobium galegae bv. officinalis OX=323656 GN=queA PE=3 SV=1
MRVDLFDFDLPEKNIALRPASPRDSARLLVVRPEGQPVLADHHVSDLPGFLKSGDALVFNDTKVIPAQLEGIRHREGAGGQQVSATLHMRVAPDRWKAFAKPGKRIKIGDRIEFGHGGNACLIGSLAATVEDKGEGGEVTLCFDLSGPALDEAIMAVGHIPLPPYIAAKRPEDAQDQKDYQTIYAREEGAVAAPTAGLHFTPELFAALDAVGIERHFVTLHVGAGTFLPVKADDTAEHKMHQEIGHVSAETAARLNAVKRAGGRIVCVGTTSLRLIESAAADDGTIKPWSGATGIFITPGYRFKAVDMLMTNFHLPRSTLFMLVSAFCGLETMRAAYSHAIETGYRFYSYGDSSLLFRDNR

SEQ ID NO: 69269 - protein, 362 aa, Neorhizobium sp.
  misc_feature (1)..(362): tr|A0A4R3A999|A0A4R3A999_9RHIZ S-adenosylmethionine:tRN A ribosyltransferase-isomerase OS=Neorhizobium sp. JUb4 5 OX=2485113 GN=queA PE=3 SV=1
MRVDLFDFDLPDDNIALRPANPRDSARLLVVKPGNEPELADHVVRDLVDFLKPGDALVFNDTKVIPAQLEGIRHRDGAGGQQVSATLHMRTEPDVWKAFAKPGKRIKVGDRIEFGKSDANTCLIGSLMATVEDKGEGGEVTLRFDLSGPALDEAIMGSGHIPLPPYIAAKRPEDEQDRKDYQTIYAREEGAVAAPTAGLHFTPDLFARLDAAGIERHFVTLHVGAGTFLPVKADDTDDHKMHLEIGHVSAETAEALNAVKARGGRIVCVGTTSLRLIESAASDDGLIHPWSDATGIFITPGYRFKAVDLLMTNFHLPKSTLMMLVSAFAGLETMQRAYAHAIDTGYRFYSYGDSSLLHRMPR

SEQ ID NO: 69270 - protein, 361 aa, Neorhizobium sp.
  misc_feature (1)..(361): tr|A0A4R3X4U8|A0A4R3X4U8_9RHIZ S-adenosylmethionine:tRN A ribosyltransferase-isomerase OS=Neorhizobium sp. S3-V 5DH OX=2485166 GN=queA PE=3 SV=1
MRVDLFDFDLPEENIALRPASPRDSARLLVVRPDGEPLLADHCVSDLARFLRAGDALVFNDTKVIPAQLEGQRIREGGNELPVSATLHMRAGPERWKAFARPGKRIKVGDRIAFGHTGNACLLGTLNATVEAKGEGGEITLLFDLTGPALDEAIMAVGHIPLPPYIADKRPEDDRDRKDYQTIYARERGAVAAPTAGLHFTPELFAVLDAAGIERHFVTLHVGAGTFLPVKADDTADHKMHEEIGHVSAETAARLNAVKARGGRIVCVGTTSLRLIESAASEDGQIHAWSGATDIFITPGYRFKAVDILMTNFHLPKSTLFMLVSAFSGLETMRSAYTHAIQSGYRFYSYGDASLLFRASK

SEQ ID NO: 69271 - protein, 378 aa, Neosynechococcus sphagnicola
  misc_feature (1)..(378): tr|A0A098TLC5|A0A098TLC5_9CYAN S-adenosylmethionine:tRN A ribosyltransferase-isomerase OS=Neosynechococcus spha gnicola sy1 OX=1497020 GN=queA PE=3 SV=1
MSGKLTASDRSLTSAPDASSDYDLAAYHFELPAERIAQNPVTPRDESRLLVVESTQRHRHCIFRDLPQLLRPGDLLVLNDTRVIPARLYGHKVGGTMVEVLLLEPRSPDCWLALVKPGKRLPPGTLIKFTAAHDPGLHLQATVLERDAATGGRILQFQLQSGNDSLAAALAAVGQVPLPPYITASQADPEQYQTVYAQRPGAVAAPTAGLHFTPELLSQLTHQGIEQTCLTLHVGVGTFRPVNTEDIRNHTLHGEWVEVPAPTVEKIQQTQARGDRVIAVGTTVARALEAAAQVNGLQPFCGKTNLYIYPGYQWQVVDGLITNFHLPGSSLLMLVSALIGRQRLLDLYQGAIDQNYRFYSFGDAMLVLPEARWESGHP

SEQ ID NO: 69272 - protein, 350 aa, Neptuniibacter sp.
  misc_feature (1)..(350): tr|A0A136H9N3|A0A136H9N3_9GAMM S-adenosylmethionine:tRN A ribosyltransferase-isomerase OS=Neptuniibacter sp. Ph e_28 OX=1795871 GN=queA PE=3 SV=1
MQVKDFYFELPDELIASFPLKERSASRLLSLNGESGELIHGVFRDVLQFIQPGDLMVFNDTRVIPARLFGQKASGGRVEVLIERVLDRQRALAHIRSSRSPKPGTRLTLDGGINAEMVARHDNLFELKFLIDGNIIDLLEEHGHMPLPPYMKREDQLSDRERYQTVYNKKPGAVAAPTAGLHFDDQLLADLDAKGVKRAFVTLHVGAGTFQPVKVDNIDEHVMHSEYIEVSPDVCELVRETRANGGRVIAVGTTSVRSLESASQGGEIEPFFGDSDIFIFPGYRFKSVDAMITNFHLSESTLLMLVSAFSGYEHIKAAYKEAVEQRYRFFSYGDAMYLTRKLDSQSELQG

SEQ ID NO: 69273 - protein, 348 aa, Neptunomonas antarctica
  misc_feature (1)..(348): tr|A0A1N7N497|A0A1N7N497_9GAMM S-adenosylmethionine:tRN A ribosyltransferase-isomerase OS=Neptunomonas antarcti ca OX=619304 GN=queA PE=3 SV=1
MQVKDFYFELPEELIASYPLEQRSASRLLCLEGNSGELAHRHFSDVLDLLHPGDLVVFNNTRVIPARLFGEKATGGKIEVLVERILDQHRVLAHVRSSRSPKPGALLFLEGDTEATMVARHDNLFELEFAGDTSVLDLLETHGHMPLPPYMKREDQLEDRERYQTVYNSQPGAVAAPTAGLHFDEALLAKLDEKGIEKAFVTLHVGAGTFQPVKVERIEDHIMHAEYIEVDESVCAAVKATRARGGRVVAVGTTSVRSLESASQSGEIQPFFGDSSIFIFPGYEFKSVDVLITNFHLSESTLLMLVSAFAGYAHTMKAYKVAIKERYRFFSYGDAMCISRKTDMTEAL

SEQ ID NO: 69274 - protein, 348 aa, Neptunomonas qingdaonensis
  misc_feature (1)..(348): tr|A0A1I2U1Z4|A0A1I2U1Z4_9GAMM S-adenosylmethionine:tRN A ribosyltransferase-isomerase OS=Neptunomonas qingdaon ensis OX=1045558 GN=queA PE=3 SV=1
MQVKDFHFDLPEELIASYPLAQRTASRLLCMDGNTGELAHRHFSDVLELLTPDDLVVFNNTRVIPARLFGEKASGGKVEVLVERVLDQHRVLAHVRSSRSPKPGTVLILEGVAQATMVARHENLFELEFAGETPVLDLLEQHGHMPLPPYMKREDQLEDRERYQTVYSSQPGAVAAPTAGLHFDEALLAKLDEKGIQKAFVTLHVGAGTFQPVKVERIEDHIMHAEYIEVDEKVCEAVRATRARGGRVVAVGTTSVRSLESASQNGEIEPFFGDSSIFITPGYEFKSVDLLITNFHLSESTLLMLVSAFAGYAHTMHAYAVAVKERYRFFSYGDAMCISRKTDTTEAL

SEQ ID NO: 69275 - protein, 348 aa, Neptunomonas sp.
  misc_feature (1)..(348): tr|A0A437Q622|A0A437Q622_9GAMM S-adenosylmethionine:tRN A ribosyltransferase-isomerase OS=Neptunomonas sp. HPM- 16 OX=1815562 GN=queA PE=3 SV=1
MQVKDFHFELPEELIASYPLDKRSASRLLCLDGNSGAVEHRQFSDILEYLDPGDVVVFNNTRVIPARLFGTKASGGKVEVLVERVLDSHRVLAHVRSSRSPKEGAVLLLEGEIQATMLGRHENLFELEFAGEASVFSLLEAHGHMPLPPYMKREDQLSDRERYQTVYGTQPGAVAAPTAGLHFDEELLAALDEKGVHKAFVTLHVGAGTFQPVKVDKIEDHVMHSEYIEVDQSVCDAVKAARARGNKVVAVGTTSVRSLESASKSGEIAPYQGDSDIFIFPGYEFKSVDLLITNFHLPESTLMMLVSAFAGYEHTMAAYRDAVAEKYRFFSYGDAMCIRRKTDQGEAA

SEQ ID NO: 69276 - protein, 353 aa, Nereida ignava
  misc_feature (1)..(353): tr|A0A0U1NLQ6|A0A0U1NLQ6_9RHOB S-adenosylmethionine:tRN A ribosyltransferase-isomerase OS=Nereida ignava OX=282 199 GN=queA PE=3 SV=1
MKLSDFDFDLPDNLIATRPAVPRTSAQLLVASGANTGAITDARVSDLTKYLRKGDRLVLNNTKVIPARLTGTRTRDAGQGPVSAKIEVTLLTPQPDGGWSALIKPLRKVAEGEVIVFTDDLTATLTAKADGQGILEFNLTGDDFDAALNAAGAMPLPPYIEAKRKADAQDKTDYQTVFARHTGAVAAPTASLHFDKPLLEALAAQGVTFTEVTLHVGAGTFLPVKVDDISEHKMHAEWGEITKSAAAEINQTKAEGGRVIPVGTTALRLIESAAKNGTLAEWRGETDIFITPGFEFQITDGLMTNFHLPKSTLMMLVSALMGQERIVEIYDHAVRTGYRFFSYGDSSLLLPNG

SEQ ID NO: 69277 - protein, 361 aa, Nesiotobacter exalbescens
  misc_feature (1)..(361): tr|A0A1U7JFG6|A0A1U7JFG6_9RHOB S-adenosylmethionine:tRN A ribosyltransferase-isomerase OS=Nesiotobacter exalbes cens OX=197461 GN=queA PE=3 SV=1
MRVDEFDFDLPPESIALRPVKPRDAARMLVVRPGQNPLLDDNAVLSLPDLLNPGDALVFNNTKVIPAQLVGFRDREGARAKLGVTLHQKTQTDSWRAFVKPAKKLRPGDVIQFFVEENADSDPLLRARVEEKSAAGDVLLQFDRGAGELDAAIAQVGHIPLPPYIASRRPEDAQDRQDYQTVYAEHKGAVAAPTAGLHFTERLLNALDSRGIQRHFITLHVGAGTFLPVKVDDTNDHQMHEEWGEITSETADALNAVRKRGNKVVAVGTTSLRILESATSEDHVIHPISGSTDIFITPGYRFKAVDGLMTNFHLPKSTLFMLVSAFAGLSEMRRAYEFAISNGYRFYSYGDSSLLFPKGDQ

SEQ ID NO: 69278 - protein, 346 aa, Nevskiales bacterium
  misc_feature (1)..(346): tr|A0A2E9ZU11|A0A2E9ZU11_9GAMM S-adenosylmethionine:tRN A ribosyltransferase-isomerase OS=Nevskiales bacterium OX=2026766 GN=queA PE=3 SV=1
MQKSDFHFDLPDHLIAQHPLPDRSGARMLDVDGATGQLRDARVLDLPERLQPGDLVVTNDVRVMPARVFGRKASGGRVEVMIERLVQPRVAWAHVRASKTPKPGGQLVLEGGHAVEVQGRQDDGLFVLELAQGTWPEVLEAVGHMPLPPYIRRADTPDDAERYQTVFARQPGAVAAPTAGLHFDDALMAAIQARGAELASTTLWVGAGTFQPVRSERIDEHRMHAERVQVPQATVDAVEATRARGGRVVAIGTTVVRALEAAAAQGQLAAMDGDTRLFIKPGDQFRVVDALFTNFHLPESTLLMLVCAFAGYDTVMHAYRHAVTQQYRFFSYGDAMWLTPQPEARA

SEQ ID NO: 69279 - protein, 349 aa, Niabella drilacis
  misc_feature (1)..(349): tr|A0A1G6SMV4|A0A1G6SMV4_9BACT S-adenosylmethionine:tRN A ribosyltransferase-isomerase OS=Niabella drilacis OX= 1285928 GN=queA PE=3 SV=1
MKLSQFQFDLPLNLIAQHPTKKREDARMMVVHRQTGQMENKNFRDILDYFDDKDVFVVNNTKVFPARMYGRKEKTGAKIEVFLLRELNKQNRLWDVIVDPARKIRVGNKLYFGENEELVAEVIDNTTSRGRTIRFLWEGSEDAFKAQLEALGETPLPKYIKRKPDDEDKERYQTVYAKHEGAVAAPTAGLHFSRELIKRLEIKGIRFAEVTLHTGLGTFRPIEVEDLSKHKMDAEYYHIDDTACRVVNKAKETNHRICSIGTTTMRAMESSFTAQKLLKPSEGWTNMFIHPPYDFNIANALVTNFHLPKTSLMIMTSAFAGYELTIEAYKKAIKDKYRFFSYGDALLII

SEQ ID NO: 69280 - protein, 410 aa, Niabella drilacis
  misc_feature (1)..(410): tr|A0A1G6RYT8|A0A1G6RYT8_9BACT S-adenosylmethionine:tRN A ribosyltransferase-isomerase OS=Niabella drilacis OX= 1285928 GN=queA PE=3 SV=1
MHPKDLNIADFTYELPEAKIAFFPLTQRDASRLLVYQAGTITTGTYRHIDQYIPEHSLAVFNNTKVVEARILFKKPTGGQIEVFCLEPHESYADITTAMAQQGKVLWCCLIGGASKWKSGQVLTRSIAGPKGETVLEARFIEKRSDSFLIELSWTPAFLSFAEILHATGQIPLPPYIKRIADKADEERYQTVYAAHDGSVAAPTAGLHFTEDVLKKLHAKNIQTDFVTLHVGAGTFKPVKAAIMNDHEMHAEFIVVTPGLIRKIAGHQGHPLIAVGTTSLRTLESLYWLGAKLLQDPDCFSSELPHVDQWDPYEESLQQYTVTDALEALAAHLSEKHSGTLVAKTQIIIAPGYPFKIADALVTNFHQPSSTLLLLVAAFIGDDWRKVYDYALANDFRFLSYGDGSLLWRG

SEQ ID NO: 69281 - protein, 349 aa, Niabella ginsenosidivorans
  misc_feature (1)..(349): tr|A0A1A9I6T7|A0A1A9I6T7_9BACT S-adenosylmethionine:tRN A ribosyltransferase-isomerase OS=Niabella ginsenosidiv orans OX=1176587 GN=queA PE=3 SV=1
MKLSQFQFDLPLNLIAQHPAKKREDARMMVVHRQTGQMENKHFRDILDYFDDKDVFVVNNTKVFPARMYGRKEKTGAKIEVFLLRELNKQNRLWDVIVDPARKIRVGNKLYFGDNEELVAEVIDNTTSRGRTIRFLWEGSEDDFKAQLEALGETPLPKYIKRKPDEEDKERYQTVYAKHEGAVAAPTAGLHFSRELIKRLEIKGIRFAEVTLHTGLGTFRPIEVEDLSKHKMDAEYYHIDDMACRIVNKAKETNHRICSIGTTTMRAMESSFTAQKLLKPSEGWTNMFIHPPYEFNIANALVTNFHLPKTSLMIMTSAFAGYELTIEAYKKAIKDKYRFFSYGDALLII

SEQ ID NO: 69282 - protein, 412 aa, Niabella ginsenosidivorans
  misc_feature (1)..(412): tr|A0A1A9I3S6|A0A1A9I3S6_9BACT S-adenosylmethionine:tRN A ribosyltransferase-isomerase OS=Niabella ginsenosidiv orans OX=1176587 GN=queA PE=3 SV=1
MHPRNLNISDFTYPLPEDKIAFFPLEQRDQSRLLIYKNGALSTDIYQHIDQYLPAGSLAVFNNTKVVEARLLFKKPTGGQIELFCLEPHESYADITTAMAQQSRVLWLCLIGGASKWKNGQVLQLSIPDQPHTIVLEARFIEKTTDCFVIELSWEPAFLSFAEVLHKAGQIPLPPYIKRKADSKDAERYQTIYARYDGSVAAPTAGLHFTEAVLQKLAQKSIQTDFVTLHVGAGTFKPVKADTMKDHEMHAEFIAVKPALIKKIMQQKDAPVIAVGTTSLRTIESLYWLGARLLRDAHCFDNQFPYLHQWDAYEATLQNFSLKESFSAILNYMEQRNLPELMAKTQIIIAPGYSFKVAAGLVTNFHQPASTLLLLVAAFIGEDWRKVYEYALENDFRFLSYGDGSLLWRKYP

SEQ ID NO: 69283 - protein, 349 aa, Niabella soli
  misc_feature (1)..(349): tr|W0EY19|W0EY19_9BACT S-adenosylmethionine:tRNA ribosy ltransferase-isomerase OS=Niabella soli DSM 19437 OX=92 9713 GN=queA PE=3 SV=1
MKLSQFQFDLPLNLIAQHPAKKREDARMMVVHRQTGQMENKHFRDILDYFDDKDVFVVNNTKVFPARMYGRKEKTGAKIEVFLLRELNKQNRLWDVIVDPARKIRVGNKLYFGDNEELVAEVIDNTTSRGRTIRFLWEGSEEEFKAQLEALGETPLPKYIKRKPDEDDKERYQTVYAKHEGAVAAPTAGLHFSRELIKRLEIQGIRFAEVTLHTGLGTFRPIEVEDLSKHKMDAEYYHIDEAACRVVNKAKETNHRICSIGTTTMRAMESSFTAQKLLKPSEGWTNMFIHPPYDFHIANALVTNFHLPKTSLMIMTSAFAGYELTTEAYKKAIKDKYRFFSYGDALLII

SEQ ID NO: 69284 - protein, 411 aa, Niabella soli
  misc_feature (1)..(411): tr|W0F2N5|W0F2N5_9BACT S-adenosylmethionine:tRNA ribosy ltransferase-isomerase OS=Niabella soli DSM 19437 OX=92 9713 GN=queA PE=3 SV=1
MHPKELNISDFTYQLPEEKIAFFPLQQRDQSKLLVYNNGIISTDIYQHIDKQLPAGTLAVFNDTKVVEARLLFKKPTGGQIELFCLEPHESYADITTAMLQQGKVRWLCLIGGASKWKNGQVLQLGFPEHDPKMMLEARFLEKRSDCFAIEFSWMPAVLTFAEILHQTGHIPLPPYIKRAADATDEERYQTVYAEHDGSVAAPTAGLHFTKTVLEKLVQKRVQTDFVTLHVGAGTFKPVKATVMQEHEMHAEFISVNAELIKKIIAQEGRPVVAIGTTSLRTLESLYWLGTKLLQNKDCFDDGLPFLSQWEVYELPPAPLTAALNALLEYMEQKQSAAFVAKTQIIIAPGYAFKVVDGLVTNFHQPSSTLLLLVAAFIGEDWRRVYNYALENDFRFLSYGDGSLLWRRRDA

SEQ ID NO: 69285 - protein, 349 aa, Niastella koreensis
  misc_feature (1)..(349): tr|G8T9V1|G8T9V1_NIAKG S-adenosylmethionine:tRNA ribosy ltransferase-isomerase OS=Niastella koreensis (strain D SM 17620 / KACC 11465 / GR20-10) OX=700598 GN=queA PE=3 SV=1
MKLSQFRFDLPLNLIAQHPTKKREDARLMVVHRSTGQIENKHFRDIMDYFDDKDVFVVNNTKVFPARMYGRKEKTGAKIEVFLLRELNKPNRLWDVIVDPARKIRVGNKLYFGENDELIAEVIDNTTSRGRTIRFLWDGTDEEFRNMLEFLGETPLPKYIKRKPEAEDKERYQTVYAKHEGAVAAPTAGLHFSIELIKRLEIKGIRFAEVTLHTGLGTFRPIEVEDLSKHKMDAEYYKIDDLSCKVVNKAIEGKHRICSVGTTTMRAIESSYTAEKLLKPSEGWTNIFIHPPYQFNIADSLVTNLHLPKTSLLIMVCAFAGYDLAMEAYRKAIKDKYRFFSYGDAMLVI

SEQ ID NO: 69286 - protein, 409 aa, Niastella koreensis
  misc_feature (1)..(409): tr|G8TCS2|G8TCS2_NIAKG S-adenosylmethionine:tRNA ribosy ltransferase-isomerase OS=Niastella koreensis (strain D SM 17620 / KACC 11465 / GR20-10) OX=700598 GN=Niako_731 2 PE=3 SV=1
MHPKELSVHDFTYELPEQQIARYPLPERDSSRLLIYKEGAIQESIYRDIYQHLPPDSLLIFNNTKVVAARLLFQKPTGAVVEIFCLEPPPQYADMTTAMTQKGSVTWICLIGGASKWKPGQILEKKMSWNGEEIILHARYLGKEKDSFAIELSWTPEGLTFAEVLHVAGNIPLPPYIKREAEQADSDRYQTIYANTEGSVAAPTAGLHFTDALFNQLDHKHIQREYVTLHVGAGTFKPVKSETMGEHPMHAEFIDVSTGAIERILQYLDKHITVVGTTSLRTIESLYWLGVKTVHQPNLPLEELVVHQWDPYEMEGKRVAAKTALESLLQYMHAHSTDRIITKTSLLIAPGYTFQIPRALVTNFHQPQSTLLLLVAAFVGNDWRKIYTYALENEFRFLSYGDGCLLFRQ

SEQ ID NO: 69287 - protein, 349 aa, Niastella populi
  misc_feature (1)..(349): tr|A0A1V9FCU1|A0A1V9FCU1_9BACT S-adenosylmethionine:tRN A ribosyltransferase-isomerase OS=Niastella populi OX=5 50983 GN=queA PE=3 SV=1
MKLSQFRFDLPLNLIAQHPTKRREDARLMVVHRSTGQIENKHFRDIMDYFDDKDVFVVNNTKVFPARMYGRKEKTGAKIEVFLLRELNKPNRLWDVIVDPARKIRVGNKLYFGENDELIAEVIDNTTSRGRTIRFLWDGTDEEFRNMLEFLGETPLPKYIKRKPEAEDKERYQTVYAKHEGAVAAPTAGLHFSIELIKRLEIKGVRFAEVTLHTGLGTFRPIEVEDLSKHKMDAEYYKIDDLSCKIVNKAIEGKHRICSIGTTTMRAIESSYTAEKLLKPSEGWTNIFIHPPYQFNIADSLVTNLHLPKTSLLIMVCAFAGYDLAMEAYKKAIKDKYRFFSYGDAMLVI

SEQ ID NO: 69288 - protein, 409 aa, Niastella populi
  misc_feature (1)..(409): tr|A0A1V9F693|A0A1V9F693_9BACT S-adenosylmethionine:tRN A ribosyltransferase-isomerase OS=Niastella populi OX=5 50983 GN=A4R26_06915 PE=3 SV=1
MHPKDLSVHDFTYELPEQKIARYPLPERDSSRLLIYKEGAIQEDIYRNIPQYVAAGSLLLFNNTRVVAARLLFQKPTGAVVEIFCLEPPPQYADMTTAMTQKGQVTWICLIGGASKWKPGQILEKRMAWNDDEIVLQARYLGKEKDSFSIELSWTPASLTFAEVLQVAGNIPLPPYIKRTVEQTDSERYQTIYANAEGSVAAPTAGLHFTDAVFKAFDQKQVHLEYVTLHVGAGTFKPVKSETMSGHPMHAEFIDVSIDTINCLLNYLDKQITVVGTTSLRTVESLYWLGVKATRQPDCPPEELVVHQWDPYELNGDPVPAKTALENLLNYLQQHQLDRIITKTSLLIAPGYTFRIPNALVTNFHQPQSTLLLLVAAFIGADWRKLYTYALENDFRFLSYGDGCLLFRH

SEQ ID NO: 69289 - protein, 349 aa, Niastella sp.
  misc_feature (1)..(349): tr|A0A1E4EAH3|A0A1E4EAH3_9BACT S-adenosylmethionine:tRN A ribosyltransferase-isomerase OS=Niastella sp. SCN 39- 18 OX=1660119 GN=queA PE=3 SV=1
MKLSQFRFDLPLNLIAQHPAKKREDSRLMVVHRDTGEIENKQFRDIMEYFDDKDVFVVNNTRVFPARMYGRKEKTGAKIEVFLLRELNRPNRLWDVIVDPARKIRVGNKLYFGENDELVAEVIDNTTSRGRTIRFLWDGTEEEFRKMLEFMGETPLPKYIKRKPEAEDKERYQTVYAKHEGAVAAPTAGLHFSKELIKRLEIQGIRFAEVTLHTGLGTFRPIEVEDLSKHKMDAEYYKIEQAACDIVNKAKETNHRICSIGTTTMRAMETSYTAQKLLKPSEGWTNHFIHPPYNFNIADALVTNFHLPKTSLLIMACAFAGYDLMMEAYKKAIKEKYRFFSYGDAMLII

SEQ ID NO: 69290 - protein, 412 aa, Niastella sp.
  misc_feature (1)..(412): tr|A0A1E4EC51|A0A1E4EC51_9BACT S-adenosylmethionine:tRN A ribosyltransferase-isomerase OS=Niastella sp. SCN 39- 18 OX=1660119 GN=ABS68_05405 PE=3 SV=1
MHPQHISILDFSYALPEDKIAWRPPARRDASKLLIYKNGEIKETHFNAIVDALPANTLMIFNNTKVINARILFKKETGASIEIFCLEPSGQITGYTSAMAKQQHTEWKCFIGGVAKWKNEILQKEIEIAGQTVLLKAELKQKEADAYIVRFSWEPDHLDFAHIIEAAGKVPLPPYIKRETEGEDSSRYQTIFAMQQGSVAAPTASLHFTPEIVARFPQKNIHSSFVTLHVGAGTFKPVKSATMQDHDMHAEYIEVSRQTIEDLLLAQGPIAVAGTTSLRTVETIYWLGVKAFDTPTAEQLSLGQWDVYDAALAAKDFTAKQALQSLLQWMIANQTDKIFTQTQLLIAPGYRFRIANILVTNFHQPQSTLLLLVAAAVGPSWRSLYEYALNHDFRFLSYGDANLIFINENSKA

SEQ ID NO: 69291 - protein, 409 aa, Niastella vici
  misc_feature (1)..(409): tr|A0A1V9FSL2|A0A1V9FSL2_9BACT S-adenosylmethionine:tRN A ribosyltransferase-isomerase OS=Niastella vici OX=170 3345 GN=A3860_06575 PE=3 SV=1
MHPKDLSVHDFTYELPEQKIARYPLPERDSSRLLIYKDGAISENIYRNIHELLSPGSLLLFNNTKVVAARLLFQKPTGAVVEIFCLEPPPQYADMTTAMNQKGRVTWICLIGGASKWKPGQILEKRMEYNGEEVLLQARYLGKEKDSFAIELSWSPVSLTFAEVLHVAGNIPLPPYIKRTVEQTDSERYQTIYANSEGSVAAPTAGLHFTDAVFAELDRKHIHREYVTLHVGAGTFKPVKADTMGEHPMHAEFIDVSTSTLECLLQYLNKQITVVGTTSLRTLESLYWLGVKAGRQPNLPLEELVVHQWDPYELNGTPVPAKAALENLLQYLQKKGLNRIITKTSLLIAPGYKFQIPQALVTNFHQPQSTLLLLVAAFVGNDWRKIYSYALENDFRFLSYGDGCLLLRQ

SEQ ID NO: 69292 - protein, 349 aa, Niastella vici
  misc_feature (1)..(349): tr|A0A1V9FUT2|A0A1V9FUT2_9BACT S-adenosylmethionine:tRN A ribosyltransferase-isomerase OS=Niastella vici OX=170 3345 GN=queA PE=3 SV=1
MKLSQFRFDLPLNLIAQHPTKRREDARLMVVHRQTGQIENKHFRDIMDYFDDKDVFVVNNTKVFPARMYGRKEKTGAKIEVFLLRELNKPNRLWDVIVDPARKIRVGNKLYFGENDELIAEVIDNTTSRGRTIRFLWDGTDEEFRNMLEFLGETPLPKYIKRKPEADDKERYQTVYAKHEGAVAAPTAGLHFSIELIKRLEIKGVRFAEVTLHTGLGTFRPIEVEDLSKHKMDAEYYKIEDLACKIVNKAIQGNHRICSIGTTTMRALESSYTAEKLLKPSEGWTNIFIHPPYQFNIADSLVTNLHLPKTSLLIMTCAFAGYDLAMEAYKKAIKDKYRFFSYGDAMLVI

SEQ ID NO: 69293 - protein, 409 aa, Niastella yeongjuensis
  misc_feature (1)..(409): tr|A0A1V9ENR7|A0A1V9ENR7_9BACT S-adenosylmethionine:tRN A ribosyltransferase-isomerase OS=Niastella yeongjuensi s OX=354355 GN=A4H97_30855 PE=3 SV=1
MHPKDLSVHDFTYELPEQQIARYPLPERDSSRLLIYKEGALQEAIYRDIYQHLPPDSLLIFNNTKVVAARLLFQKPTGAVVEIFCLEPPPQYADMTTAMTQKGRVTWICLIGGASKWKPGQILEKKMSWNGQEIVLQARYLGKEKDSFAIELSWEPASLTFAEVLHVAGNIPLPPYIKREVEQADSDRYQTIYANTEGSVAAPTAGLHFTDTLFEQLDRKQIQREYVTLHVGAGTFKPVKSETMGEHPMHAEFIDVNTGTIARILQYLDKHITVVGTTSLRTIESLYWLGVKTVHEPNLPLEDLVVHQWDPYELNGMPVTAKAALESLLQYMHARKMDRIITKTSLLIAPGYTFQIPRALVTNFHQPQSTLLLLVAAFVGNDWRKIYTYALENEFRFLSYGDGCLLFRQ

SEQ ID NO: 69294 - protein, 349 aa, Niastella yeongjuensis
  misc_feature (1)..(349): tr|A0A1V9EYY5|A0A1V9EYY5_9BACT S-adenosylmethionine:tRN A ribosyltransferase-isomerase OS=Niastella yeongjuensi s OX=354355 GN=queA PE=3 SV=1
MKLSQFRFDLPLNLIAQHPTKKREDARLMVVHRSTGQIENKHFRDIMDYFDDKDVFVVNNTKVFPARMYGRKEKTGAKIEVFLLRELNKPNRLWDVIVDPARKIRVGNKLYFGENDELIAEVIDNTTSRGRTIRFLWDGTDEEFRNMLEFLGETPLPKYIKRKPEAEDKERYQTVYAKHEGAVAAPTAGLHFSIELIKRLEIKGIRFAEVTLHTGLGTFRPIEVEDLSKHKMDAEYYKIDDLSCKVVNKAIEGKHRICSVGTTTMRAIESSYTADKLLKPSEGWTNIFIHPPYQFNIADSLVTNLHLPKTSLLIMVCAFAGYDLAMEAYRKAIKDKYRFFSYGDAMLVI

SEQ ID NO: 69295 - protein, 361 aa, Nibricoccus aquaticus
  misc_feature (1)..(361): tr|A0A290QNZ0|A0A290QNZ0_9BACT S-adenosylmethionine:tRN A ribosyltransferase-isomerase OS=Nibricoccus aquaticus OX=2576891 GN=queA PE=3 SV=1
MTLPTALFDYDLPAHLIAQTPAARRDASRLLVVDRASRTIAHHHFSDLPQFLRAGDTLFRNNAAVLPARLFAQRPTGGAVECFLTRPEPARGENVWWCLVRPGKKLPGGATFAHENNFTGEVLEKNAEGGALIRFTIPSGESVTALANRLGEVPLPPYITRDESELISKRAHDLERYQTVYANRDRQVAVAAPTAGLHFTPELLTQLSASGVTATDVTLHVGLGTFKPIMTETVEEHAIHRELYELPVATQRALFAPTGRRIAVGTTSVRTLEDFLSRHTSPLTNPFLAEADIFIYPPRTFRGVDALITNFHQPRSTLLCLVSAFLTPGSTDGIAWLKKIYAEAIAREYRFFSYGDAMLIV

SEQ ID NO: 69296 - protein, 363 aa, Nicoletella semolina
  misc_feature (1)..(363): tr|A0A4R2N8G6|A0A4R2N8G6_9PAST S-adenosylmethionine:tRN A ribosyltransferase-isomerase OS=Nicoletella semolina OX=271160 GN=queA PE=3 SV=1
MQVSDFHFDLPDDLIARYPTEERTASRLLYLNGETGNYQDQQFTDLLSHLNTGDLLIFNNTRVIPARLYGRKLSGGKLEVLIERVLDNHRCLAHIRASKAPKEEAILILGEDKLGDGNGLEVKMVARHDSLFELHFCSETPLFELLQQAGHIPLPPYIDRPDEKADQERYQTVYSQILGAVAAPTAGLHFDEATLKKLKNKGIETAFVTLHVGAGTFQPVRVTTLEEHKMHAEYAEVSQEVVDKILATKAQGKRVICVGTTSVRTIESAAQKAEEIGELIVPFNADTTIFLYPSKIFRVVDVLITNFHLPESTLIMLVSAFAGYNHCMQAYQHAVEKKYRFFSYGDAMFITKNPNALNDLPSN

SEQ ID NO: 69297 - protein, 354 aa, Nioella sp.
  misc_feature (1)..(354): tr|A0A2E2F1N7|A0A2E2F1N7_9RHOB S-adenosylmethionine:tRN A ribosyltransferase-isomerase OS=Nioella sp. OX=191209 1 GN=queA PE=3 SV=1
MNLSDFDFDLPEHLIATRPARPRSSARLLVADGDTTRDLHVRDLPDLLRAGDRLILNDTKVIPARLTGQRWRDSAQGRVAAKIEVTLLEPGPDGTWSALAKPMRKLKPGESIGFPGGLSADVVALEGGLRLRFNLAGDDFDAALNAAGAMPLPPYIAARRPADERDREDYQTVWARNKGAVAAPTASLHFDDALLATLLARGISFTHVTLHVGAGTFLPVTVEDVTTHKMHAEWGEISDQAAQEIAATKAAGGRIIPVGTTALRLIETAARETGQITPWQGETDIFIYPGFRFNVTDALMTNFHLPKSTLMMLVSALMGVDRIRALYAHAVAGGYRFFSYGDASLLIPQSAAND

SEQ ID NO: 69298 - protein, 344 aa, Nisaea sp.; identical to SEQ ID NO: 64789
  misc_feature (1)..(344): tr|A0A2D7JMZ7|A0A2D7JMZ7_9PROT S-adenosylmethionine:tRN A ribosyltransferase-isomerase OS=Nisaea sp. OX=2024842 GN=queA PE=3 SV=1

SEQ ID NO: 69299 - protein, 344 aa, Nisaea sp.
  misc_feature (1)..(344): tr|A0A2D7Z6A4|A0A2D7Z6A4_9PROT S-adenosylmethionine:tRN A ribosyltransferase-isomerase OS=Nisaea sp. OX=2024842 GN=queA PE=3 SV=1
MRVDLFDYDLPAELIADAPVEPRRQARLLDQTGAVFTDRRVGDLPELLRAGDILVFNDTKVLPARLVGRRGAAKVEVTLHKSLGQGQWLAFARPGRRLRVGDEVTFTEDLSAEVRAKDPRGDVTLDFGRPESDLRTLLWRHGSMPLPPYIKRDTPRGSDYDDYQTIFAAREGAVAAPTAGLHFTEDLLADLAAAGVATAAITLHVGAGTFLPVKVADADDHVMHSEWGEVSAATVARIAAAKAAGGRVVAVGTTSLRILESAARDGRLAPFSGDTDLFITPGFQFHAVDLLLTNFHLPRSTLLMLVAAFHGRVRMLEAYDHAKAAGYRFYSYGDCCLLDRRGDD

SEQ ID NO: 69300 - protein, 356 aa, Nissabacter sp.
  misc_feature (1)..(356): tr|A0A4P8SEE7|A0A4P8SEE7_9GAMM S-adenosylmethionine:tRN A ribosyltransferase-isomerase OS=Nissabacter sp. SGAir 0207 OX=2126321 GN=queA PE=3 SV=1
MRVADFSFELPESLIARYPQAERSGCRLLSLDGPTGELTHGVFTDLLEKLEAGDLLVFNNTRVIPARMFGRKVSGGKIEVLVERVLDDHRVLAHVRASKAPKVGAELLLGDDESLSATMVARHDALFELRFNDARDVFTVLNDIGHMPLPPYIDRPDEESDRELYQTVYSEKPGAVAAPTAGLHFDEPLLAALKTKGVEMAFVTLHVGAGTFQPVRVESIEDHIMHSEYAEVPQEVVDAVLACKARGKRVIAVGTTSVRSLESAAQASQEAPLAPFFGDTQIFIYPGYEYQVVDALVTNFHLPESTLIMLVSAFAGYRPTMKAYAEAVAEQYRFFSYGDAMFITRNPLAPQQQVGQ

SEQ ID NO: 69301 - protein, 343 aa, Nitratifractor salsuginis
  misc_feature (1)..(343): tr|E6X1G8|E6X1G8_NITSE S-adenosylmethionine:tRNA ribosy ltransferase-isomerase OS=Nitratifractor salsuginis (st rain DSM 16511 / JCM 12458 / E9I37-1) OX=749222 GN=queA PE=3 SV=1
MKADELDWLTQSYDYTLPPKQIATQPVEPPDAARMLVFDRRDGSIHHARFRDLERFLPSETALFLNDTRVIKARLYGTKATGGRVELLLNKPLPDNEYLAMIRGRVREGTRLSFDEGLQAEVRALLPDGARRVRFYQEDKELDFSRLVEILERIGHVPLPPYMNREDTPEDTRHYQSLFAREAGAVAAPTASLHFTPEQLERLKSTHPCYTLTLHVGAGTFKPVESEKILEHPMHSEYFRIPPEAAEYLRGDAPLLAVGTTVTRTVEYFARTSRTEGECDLFLHPGNPPRRVNHLLTNFHLPKSTLIMLVSAFIGREKTLELYREAIREGYRFYSYGDAMLIL

SEQ ID NO: 69302 - protein, 358 aa, Nitratireductor aquibiodomus
  misc_feature (1)..(358): tr|I5BUS7|I5BUS7_9RHIZ S-adenosylmethionine:tRNA ribosy ltransferase-isomerase OS=Nitratireductor aquibiodomus RA22 OX=1189611 GN=queA PE=3 SV=1
MRVDIFDFELPEERIALRPVSPRDSARLLTVQDGRIRDHVVRELPELLQPGDALVFNDTKVIPARLGGIRRRGEAQARIEATLHMREGPDRWRAFLKPAKRVNVGERIQFGHDGESCFLGTLEATVAEKGEGGEALLVFDFSGPVLDEAIAAAGHMPLPPYIAGKRAEDARDEVDYQTIYAREEGAVAAPTAGLHFTPELMQALDAAGIERHFVTLHVGAGTFLPVKVDDTDDHRMHSERGEVSAETAAALNAVRARGGRIVSVGTTSLRLLESASQRTGVLEAWSGATDIFITPGYRFRTVDVLMTNFHLPRSTLFMLVSAFSGTETMKRAYQHAIGNDYRFYSYGDASLLFRDDQS

SEQ ID NO: 69303 - protein, 357 aa, Nitratireductor basaltis
  misc_feature (1)..(357): tr|A0A084UB33|A0A084UB33_9RHIZ S-adenosylmethionine:tRN A ribosyltransferase-isomerase OS=Nitratireductor basal tis OX=472175 GN=queA PE=3 SV=1
MRVEQFDFELPEELIALRPASPRDSARLLEVEGARLDNRHVRDLTQILRAGDALVFNDTKVVPARLNGIRQRGEAIAHIEATLHMRTGADRWKAFIKPAKRVKEGEIIRFGADGGACEGATLDATVAEKGEAGEVLLVFDMSGPVLDERIAMVGQMPLPPYIAAKRPEDERDAIDYQTVYAKEEGAVAAPTAGLHFTPELLENLAAMGVEEHYVTLHVGAGTFLPVKVEDTNDHKMHSEWGEVDEATADALNAVKARGGRIVSVGTTSLRLLESAVDEKGRIIPWSGETDIFITPGYRFHTADMLMTNFHLPKSTLFMLVSAFAGFETMKRAYAHAIEYGYRFYSYGDSSLLYREDQ

SEQ ID NO: 69304 - protein, 358 aa, Nitratireductor indicus
  misc_feature (1)..(358): tr|K2P0M0|K2P0M0_9RHIZ S-adenosylmethionine:tRNA ribosy ltransferase-isomerase OS=Nitratireductor indicus C115 OX=1231190 GN=queA PE=3 SV=1
MRVDLFDFDLPEERIALRPASPRDSARLLVVEGEGFGDRTVSDLPALLRAGDALVFNDTKVIPARLNGLRQRGENQARIEATLHMRMSPDSWKAFIKPAKRVAVGDRISFGHEGRICLLGTLVATVAEKGDGGEVLLNFDFSGPVLDEAIATVGHMPLPPYIAGKREEDERDNADYQTIYAREEGAVAAPTAGLHFTPDLLSALDSAGIERHFVTLHVGAGTFLPVKAEDTEQHRMHSEWGVVTPETAAALNAVQARGGRIVSVGTTSLRLLESAARETGRLQGWSGATDIFITPGYRFRTADILMTNFHLPRSTLFMLVSAFSGMERMKNAYAHAINNGYRFYSYGDSSLLFRDDNA

SEQ ID NO: 69305 - protein, 358 aa, Nitratireductor pacificus
  misc_feature (1)..(358): tr|K2M622|K2M622_9RHIZ S-adenosylmethionine:tRNA ribosy ltransferase-isomerase OS=Nitratireductor pacificus pht -3B OX=391937 GN=queA PE=3 SV=1
MRVDLFDFDLPEDRIALRPASPRDAARMLVVEGETLSDRVVSDLSGLLRPGDALVFNDTRVIPARLNGLRRRGETEARVEATLHMRTGADRWKAFLKPAKRVNIGERISFGHDGESCFLGALDATVAEKGEGGEALLVFDFSGPVLDEAIAAAGHMPLPPYIAGKRPEDERDQTDYQTVYAREDGAVAAPTAGLHFTSELFAALDAAGIERHFVTLHVGAGTFLPVKAEDTDDHRMHAEWGEVSAETAAALNAVQARGGRIVSVGTTSLRLLESAARETGMLKAWSGATDIFITPGYRFHTADILMTNFHLPRSTLFMLVSAFSGTERMKAAYRHAIDGGYRFYSYGDASLLFRDDQA

SEQ ID NO: 69306 - protein, 358 aa, Nitratireductor sp.
  misc_feature (1)..(358): tr|A0A1H4ITF2|A0A1H4ITF2_9RHIZ S-adenosylmethionine:tRN A ribosyltransferase-isomerase OS=Nitratireductor sp. E S.061 OX=1855335 GN=queA PE=3 SV=1
MRVDIFDFELPEERIALRPVSPRDSARLLTVQDGRIRDHVVRELPEILQPGDALVFNDTRVIPARLGGIRRRGEAQARIEATLHMREGPDRWRAFLKPAKRVNVGERIQFGHDGESCFLGTLEATVAEKGEGGEALLVFDFSGPVLDEAIAAAGHMPLPPYIAGKRAEDARDEVDYQTIYAREEGAVAAPTAGLHFTPELMQALDAAGIERHFVTLHVGAGTFLPVKVDDTDDHRMHSERGEVSAETAEALNAVRARGGRIVSVGTTSLRLLESASQRTGVLEAWSGATDIFITPGYRFRTVDVLMTNFHLPRSTLFMLVSAFSGTETMKRAYQHAIGNDYRFYSYGDASLLFRDDQS

SEQ ID NO: 69307 - protein, 358 aa, Nitratireductor sp.
  misc_feature (1)..(358): tr|A0A2E0JAD2|A0A2E0JAD2_9RHIZ S-adenosylmethionine:tRN A ribosyltransferase-isomerase OS=Nitratireductor sp. O X=1872084 GN=queA PE=3 SV=1
MRVDIFDFELPEERIALRPANPRDSARLLKVEGGALTDHVVRALPEILRPGDALVFNDTKVIPARLSGVRRRGETEARIEATLHMREGPDRWRAFLKPAKRVNAGERIQFGHDGESCFLGTLGATVAEKGEGGEALLVFDFSGPVLDEAIAAAGHMPLPPYIAGKRAEDERDEVDYQTIYAREEGAVAAPTAGLHFTPELMQALDLAGIERHFVTLHVGAGTFLPVKVDDTDDHKMHSEWGEVDAETAEALNAVRKRGGRVVSVGTTSLRLLESASQRTGTLEAWSGATDIFITPGYRFRTVDVLMTNFHLPRSTLFMLVSAFCGTATMKRAYDHAIRNEYRFYSYGDASLLFRDDQL

SEQ ID NO: 69308 - protein, 340 aa, Nitratiruptor sp.
  misc_feature (1)..(340): sp|A6Q446|QUEA_NITSB S-adenosylmethionine:tRNA ribosylt ransferase-isomerase OS=Nitratiruptor sp. (strain SB155 -2) OX=387092 GN=queA PE=3 SV=1
MLDPLKVDSYDYHLPPHLIAKEPVQPADRAKLLIYDRKTDTITHTIFKNLPQFLPQKTHIVFNDTKVIKARIFGHKSSGGKIELLINRPLENERFNVFIRGKVKVGTTLHFSQGLQAIVEELIEDGTRIVTFYHDEKRLSFHELLPILDTIGSIPLPPYIDRAAKKEDETNYQPIFAKKAGAVAAPTASLHFTEQMLNSMAKEFPFHFVTLHVGAGTFKPVEANLITEHAMHSEYYEIPKDTIEVIESDEKVLAVGTTVTRTIEYYVRTKKSFGECDLFLNPLNPPKRVDHLLTNFHLPKSTLIMLVASFIGLETTKRVYQEAIEKEYRFYSYGDAMLIL

SEQ ID NO: 69309 - protein, 343 aa, Nitratiruptor tergarcus
  misc_feature (1)..(343): tr|A0A1W1WT64|A0A1W1WT64_9PROT S-adenosylmethionine:tRN A ribosyltransferase-isomerase OS=Nitratiruptor tergarc us DSM 16512 OX=1069081 GN=queA PE=3 SV=1
MKRKLDPTLVSSYDYELPSSAIAKYPANPPDSAKLLVYERETQKITHAIFRDLPQFLPKDVALVFNDTKVIKARIFGKKESGGKIELLLNRPVADKRFSVFIKGRVKKGTKLFFDEELEAQVVELLLDGSRIVIFYKDGKVLTFEELLPILEKIGHVPLPPYIDRADSKEDEIFYQPLFAQKPGAVAAPTASLHFTKELLAKLQKEHPFFSVTLHVGAGTFKPVESEKITEHSMHSEYYEIPPATCAMLDSKQPILAVGTTVTRTIEYYARTKRCFGECDLFLHPKNPPIRVNHLLTNFHLPKSTLIMLVASFIGLEKTLELYEIAIKEKYRFFSYGDAMLII

SEQ ID NO: 69310 - protein, 349 aa, Nitrincola lacisaponensis
  misc_feature (1)..(349): tr|A0A063Y3X2|A0A063Y3X2_9GAMM S-adenosylmethionine:tRN A ribosyltransferase-isomerase OS=Nitrincola lacisapone nsis OX=267850 GN=queA PE=3 SV=1
MRVSDFSFELPDELIARFPLEQRSASRLLCLDGTTGALQHRQFSDLTGLLRPGDLLVFNDTRVIPARLYGQKASGGQVEVLIERLQGDQQALAHIRASRAPKPGSQLLLEGGIQVEVTGRQGSLFVLQFDPLGDVMAQLEAHGHMPLPPYMQREDQPSDRERYQTVYNRRPGAVAAPTAGLHFDQPLLDALQQQGIETAFVTLHVGAGTFQPVKVDRVEEHTMHAEYIEVSETVCEAVRAARARGGRVVAVGTTSVRSLETASQSGELQPFSGDSQIFIYPGYRFRSVDAMITNFHLPESTLLMLVSAFAGQDNIRAAYAEAIAERYRFFSYGDAMFMTRQSAVIEESV

SEQ ID NO: 69311 - protein, 348 aa, Nitrincola nitratireducens
  misc_feature (1)..(348): tr|W9UZM8|W9UZM8_9GAMM S-adenosylmethionine:tRNA ribosy ltransferase-isomerase OS=Nitrincola nitratireducens OX =1229521 GN=queA PE=3 SV=1
MRVRDFYFELPDELIARFPLQERSHSRLLCLDAQEGRLQHRIFSDILELLTPGDLLVFNDTRVIPARLHGQKASGGKVEVLIERVLTPNTALAHVRSSRSPKPGSRLQLEGGVDVEVTGRKENLFELSFNIEGHLLEVLDAVGHIPLPPYMQREDQASDRERYQTVYNRKPGAVAAPTAGLHFDQALLDALKRKGVDIAFVTLHVGAGTFQPVKVDRIEDHVMHAEYIEVPDDVVDAVKAARARGKRVIAVGTTSVRSLESASQAGEIAPFYGDSQIFIYPGYEFKSVDALITNFHLPESTLLMLVSAFSGYDNIMRAYQEAIEQRYRFFSYGDAMFLTRLTQSEELV

SEQ ID NO: 69312 - protein, 349 aa, Nitrincola sp.
  misc_feature (1)..(349): tr|A0A099PBC2|A0A099PBC2_9GAMM S-adenosylmethionine:tRN A ribosyltransferase-isomerase OS=Nitrincola sp. A-D6 O X=1545442 GN=queA PE=3 SV=1
MRVSDFTFELPDELIARFPLETRSASRLLCVDGNDGLLQHLQFSELTELLNPGDLLVFNDTRVIPARLFGQKASGGKIEVLIERLQGEQRALAHIRSSRAPKVGARLLLEGGVEAEVLGRQENLFILQFDLGGDLLAALEAHGHMPLPPYMQRDDQPSDRERYQTVYNRKPGAVAAPTAGLHFDQPLLDKLQALGVETAFVTLHVGAGTFQPVKVDRVEDHHMHAEYIDVPESVCEAVRATRARGGRVIAVGTTSVRSLESASQSGEIQPFSGDSSIFIYPGYQFRSVDALITNFHLPESTLLMLVSAFAGYDHIKAAYAEAILQKYRFFSYGDAMFMTRQDLSAEEQA

SEQ ID NO: 69313 - protein, 350 aa, Nitrincola sp.
  misc_feature (1)..(350): tr|A0A5A9W749|A0A5A9W749_9GAMM S-adenosylmethionine:tRN A ribosyltransferase-isomerase OS=Nitrincola sp. MEB193 OX=1708751 GN=queA PE=3 SV=1
MQLSDFYFDLPDELIARYPLEQRSASRLLCVEGNTGARQHRQFTDLVALLEPGDLLVFNDTRVIPARLYGQKASGGKIELLIERILGEDHALAHLRASRAPKPGTELILEGGLQAEVLGRRGNLFELRFQAMSCSLLQALEDHGHIPLPPYMQREDQHSDRERYQTVYNAKPGAVAAPTAGLHFDEPLLAKLKDQGINTAFVTLHVGAGTFQPVKVDNIHEHQMHAEYIEVSEQVCAAVRAARARGRRVVAVGTTSVRALESASQSGEIAPFCGDSQIFIYPGYQFRSVDALITNFHLPESTLLMLVSAFAGYRSMMEAYQEAIAERYRFFSYGDAMFLTRRTLLDEESL

SEQ ID NO: 69314 - protein, 348 aa, Nitrincola tibetensis
  misc_feature (1)..(348): tr|A0A364NRP9|A0A364NRP9_9GAMM S-adenosylmethionine:tRN A ribosyltransferase-isomerase OS=Nitrincola tibetensis OX=2219697 GN=queA PE=3 SV=1
MRVRDFYFELPDELIARFPLQERSQSRLLCLDAQAGRLQHRIFSDILELLTPGDLLVFNDTRVIPARLHGQKASGGKVEVLIERVLTPTTALAHVRSSRSPKPGSRLQLEGGVDAEVTGRKDNLFELSFHIEGHLLEVLEAVGHIPLPPYMQREDQASDRERYQTVYNRKPGAVAAPTAGLHFDQALLDALKHKGVDIAFVTLHVGAGTFQPVKVDRIEDHVMHAEYIEVPDVVVDAVKAARARGKRVIAVGTTSVRSLESASQSGEIAPFYGDSQIFIYPGYEFKSVDALITNFHLPESTLLMLVSAFSGYDNIMRAYQDAIEQRYRFFSYGDAMFLTRLTQSEELV

SEQ ID NO: 69315 - protein, 349 aa, Nitritalea halalkaliphila
  misc_feature (1)..(349): tr|I5C0T6|I5C0T6_9BACT S-adenosylmethionine:tRNA ribosy ltransferase-isomerase OS=Nitritalea halalkaliphila LW7 OX=1189621 GN=queA PE=3 SV=1
MKLSDFKFEVPKKLISQYPVDNRDESRLMVVHRATGEIEHKLFKEIVTYFGEGDVFVMNNTKVFPARLYGNKEKTGAKIEVFLLRELNQELRLWDVLVDPARKIRVGNKLYFGDSDLVAEVIDNTTSRGRTIRFLFDGTDEAFYKAIDSLGETPLIKEHIERKVEPEDRERYQTIFAKHVGAVAAPTAGLHFTPHLLKRLELVGVQVSPITLHVGLGTFRQVDVEDLTKHKMDSENYEIPQETVEHVNQALDQKKRVVAVGTTSLKTIESSVTANNRLKASAGWTDKFIIPPYEFKIANALITNFHLPESTLLMTASAFGGYDLIMRAYQEAIKEKYRFFSYGDAMLIL

SEQ ID NO: 69316 - protein, 409 aa, Nitritalea halalkaliphila
  misc_feature (1)..(409): tr|I5C9Q5|I5C9Q5_9BACT S-adenosylmethionine:tRNA ribosy ltransferase-isomerase OS=Nitritalea halalkaliphila LW7 OX=1189621 GN=A3SI_02306 PE=3 SV=1
MAEKPGATSARKLYLPLPDERIARYPLADRAASKLLRYRAGEITAHGFTEIEDQLPAEALLVYNDTKVIPARMAFFRPTGARIELFLLKPLPADSPMEQAMAETKEAHWSCMIGNARKWKAEEILQMDLEIAGRTVRVEARRGRKEDSDVFFTWSEPLPFVQIVEAMGQVPLPPYLNRAAEESDRQRYQTVFSRSAGAVAAPTAGLHFTPEILAALQAKGLQMAELTLHVGAGTFQPVKEQQVMHHAMHSEQIVVQRETVQQLMRHAGPVIPVGTTSMRSLESLYWLGVKLLKGQCAARYFHIEKLYPYTEEEVRFSRQEAFAAIDAFMKVEQLEQLTGETSIMLMPGYRFRVCDALITNFHQPGSTLILLVAAFIGEDWRKVYDFALAQDFRFLSYGDSSLLWRNAPA

SEQ ID NO: 69317 - protein, 365 aa, Nitrobacter hamburgensis
  misc_feature (1)..(365): tr|Q1QMG3|Q1QMG3_NITHX S-adenosylmethionine:tRNA ribosy ltransferase-isomerase OS=Nitrobacter hamburgensis (str ain DSM 10229 / NCIMB 13809 / X14) OX=323097 GN=queA PE =3 SV=1
MTAYSMRTDLFDFELPSESIALRPASPRDSARMLVVQPGAGLHDQRVSDLPKWLRPGDQLVVNDTRVIAAQLRGRRIGRDAEPRIEATLIKRLDGSRWNALVKPARKLIAGDIVRFGNEGRVCFLGHLDAQVESKGEEGEVTFAFSFHGPTLDQAIADLGSPPLPPYIASKREPDDRDVADYQTMFAVHEGAVAAPTAGLHFTPAVEAVLRERGVGLHRLTLHVGAGTFLPVKTEDTVGHRMHSEWGTISAETADALNAARASGGRIVAVGTTSLRLLESATADDGRIAPFTGETAIFITPGYRFRAVDILMTNFHLPRSTLFMLVSAFSGLETMKQAYAHAIAAGYRFYSYGDACLLFPGTSDA

SEQ ID NO: 69318 - protein, 360 aa, Nitrobacter sp.
  misc_feature (1)..(360): tr|A0A1M3CMF3|A0A1M3CMF3_9BRAD S-adenosylmethionine:tRN A ribosyltransferase-isomerase OS=Nitrobacter sp. 62-23 OX=1895798 GN=queA PE=3 SV=1
MRTDLFDFELPSGSIALRPASPRDSARMLVVQPAAGLHDQHVGDLANWLRPGDQLVVNDTRVIAAQLHGRRIGRGAEPRIDATLIKRLDGSRWKALVKPAKKLDAGDIVRFGNEGRVCFLGHLDAKVESKGEEGEVTLAFSFHGPTLDQAIADLGSPPLPPYIASRRAPDDRDAADYQTMFAAHEGAVAAPTAGLHFTPAMEAALRDRGVGINRLTLHVGAGTFLPVKAEDTGGHRMHPEWGTISAETAEALNAARANGGRIVAVGTTSLRLLESAATEDGRVTPFTGETSIFITPGYRFRAVDILMTNFHLPRSTLFMLVSAFSGLDTMKQAYAHAIAGGYRFYSYGDACLLFPAAPAA

SEQ ID NO: 69319 - protein, 371 aa, Nitrobacter sp.
  misc_feature (1)..(371): tr|A3WZK9|A3WZK9_9BRAD S-adenosylmethionine:tRNA ribosy ltransferase-isomerase OS=Nitrobacter sp. Nb-311A OX=31 4253 GN=queA PE=3 SV=1
MTSYIRRLDHSMRTDLFDFELPAESIALRPASPRNSARMLVVHPGTRLHDQRVSDLPEWLRPGDQLVVNDTRVIAAQLHGRRIGREAEPRIDATLIKRLDGSRWSALVRPAKKLVAGDVVRFGNDGRVCFLGHLDAQVESKGEEGEVTFAFSFHGPTLDRAIAELGSTPLPPYIASKRAPDDQDAADYQTMFAAHEGAVAAPTAGLHFTPVIETALRERGVGLHRITLHVGAGTFLPVKAEDTAGHRMHSEWGTISAETADALNTARSRGGRIVAVGTTSLRLLESAAAEDGRIAPFTGETAIFITPGYRFRAIDILMTNFHLPRSTLFMLVSAFSGLKTMKQAYAHAIAAGYRFYSYGDACLLFPERSGA

SEQ ID NO: 69320 - protein, 360 aa, Nitrobacter vulgaris
  misc_feature (1)..(360): tr|A0A1V4HY65|A0A1V4HY65_NITVU S-adenosylmethionine:tRN A ribosyltransferase-isomerase OS=Nitrobacter vulgaris OX=29421 GN=queA PE=3 SV=1
MRTDLFDFELPAESIALRPASPRDSARMLVVQPGAGLRDQRVRDLPEWLRPGDQLVVNDTRVIAAQLHGRRIGRETEPRIDATLIKRLDGSRWSALVRPAKKLMTGDIVRFGNEGRVCFLGHLDAQVESKGEEGEVTFAFSFHGPTLDQAIADLGSTPLPPYIASKRAPDDRDAADYQTMFAAHEGAVAAPTAGLHFTPAIEAALRERDVGLHRITLHVGAGTFLPVKAEDSAGHRMHSEWGTISAETAAALNATRASGGRIVAVGTTSLRLLESAAGDDGQIAPFTGETAIFITPGYRFRAVDILMTNFHLPRSTLFMLVSAFSGFETMKHAYAHAIAGGYRFYSYGDACLLFPDRSDA

SEQ ID NO: 69321 - protein, 360 aa, Nitrobacter winogradskyi
  misc_feature (1)..(360): sp|Q3SRN4|QUEA_NITWN S-adenosylmethionine:tRNA ribosylt ransferase-isomerase OS=Nitrobacter winogradskyi (strai n ATCC 25391 / DSM 10237 / CIP 104748 / NCIMB 11846 / N b-255) OX=323098 GN=queA PE=3 SV=1
MRTDLFDFELPAGSIALRPASPRDSARMLVVQPGSGVRDQQVSDLPEWLRPGDQLVVNDTRVIAAQLHGRRIGREAEPRIDATLIKRLDGSRWSALVRPARKLMAGDIVRLGNEGRVCFLGHLDARVESKGEEGEVTFAFSFHGPMLDQAIAELGSTPLPPYIASKRAPDDRDASDYQTMFATHEGAVAAPTAGLHFTPEIETALRGRGVGLHRITLHVGAGTFLPVKVDDTAGHRMHSEWGAISTETADALNAARSRGGRIVAVGTTSLRLLESAADDDGRIKPFTGETAIFITPGHRFRAVDILMTNFHLPRSTLFMLVSAFSGLETMKQAYAHAISAGYRFYSYGDACLLFPERAGA

SEQ ID NO: 69322 - protein, 360 aa, Nitrobacter winogradskyi
  misc_feature (1)..(360): tr|A0A4Y3WBP1|A0A4Y3WBP1_NITWI S-adenosylmethionine:tRN A ribosyltransferase-isomerase OS=Nitrobacter winograds kyi OX=913 GN=queA PE=3 SV=1
MRTDLFDFELPAGSIALRPASPRDSARMLVVQPGSGVSDQRVSDLPEWLRPGDQLVVNDTRVIAAQLHGRRIGREAESRIDATLIKRLDGSRWSALVRPARKLMAGDIVRFGNEGRVCFLGHLDAQVESKGEEGEVTFAFSFHGPMLDQAIAELGSTPLPPYIASKRAPDDRDASDYQTMFAAHEGAVAAPTAGLHFTPAIEAALRGRGVGLHRITLHVGAGTFLPVKVDDTAGHRMHSEWGAISTETADALNAARSRGGRIVAVGTTSLRLLESAVDDDGRIKPFTGETAIFITPGYSFRAVDILMTNFHLPRSTLFMLVSAFSGLETMKQAYAHAISAGYRFYSYGDACLLFPERSSA

SEQ ID NO: 69323 - protein, 347 aa, Nitrococcus mobilis
  misc_feature (1)..(347): tr|A4BST9|A4BST9_9GAMM S-adenosylmethionine:tRNA ribosy ltransferase-isomerase OS=Nitrococcus mobilis Nb-231 OX =314278 GN=queA PE=3 SV=1
MRVSDFHFELPDELIASTPLPERTASRLLVIDAATGACQDRRFDALVELLRRGDLLVVNDTRVIPARLYGVKESGGRVEVLLERLLDAHSALVHVRANKAPRPGTRLWLEEALPALVLGRQGELYRLRFETTEPLLELLERYGHVPLPPYLRRADTPVDRERYQTVFAARPGAVAAPTAGLHFDQALLQRLAQKGVAQARVTLHVGAGTFQPLRTERVEQHQMHAEYLEVDSAVCARVAQTRAQGGRVVAVGTTVVRALETAARSGALQPYRGETDLFIYPGYRFRTVDALITNFHLPGSSLLMLVCAFAGREPVLSAYRHAVAARYRFYSYGDAMFIHPAQSEARA

SEQ ID NO: 69324 - protein, 354 aa, Nitrolancea hollandica
  misc_feature (1)..(354): tr|I4ECE0|I4ECE0_9CHLR S-adenosylmethionine:tRNA ribosy ltransferase-isomerase OS=Nitrolancea hollandica Lb OX= 1129897 GN=queA PE=3 SV=1
MNEHSSAVDDRPLLLSDYDYELPADLIAQTPADRRDGSRLMVVDRQSGTFRHHAFPDITTFLRPGDLLVINDTRVLPARLHGRKPTGGNVELLLLRRLEPGLWEAMGKPGRRLRPGSAVRLLTREGDPSDSSVVIEHRRDGGLFAVRLPVEVEGQLDRFGEMPLPPYIHTRLSDPERYQTVYSEKVGSAAAPTAGLHFTPELLAELDVRGVRIARVTLHVGLGTFLPVKVEDMRQHEMHAEWFHVPAGTRTAIQETKARGGRVIAVGTTSCRTLESVASSKDEGDLSGWTSLFITPGYRWKTVDALITNFHLPRSTLLLLVSAFAGRDLMLDAYREAIRQRYRFYSFGDALLIT

SEQ ID NO: 69325 - protein, 350 aa, Nitrosococcus halophilus
  misc_feature (1)..(350): tr|D5C3R2|D5C3R2_NITHN S-adenosylmethionine:tRNA ribosy ltransferase-isomerase OS=Nitrosococcus halophilus (str ain Nc4) OX=472759 GN=queA PE=3 SV=1
MLKFSVMQLSDFSYDLPERLIAQYPPERRGESRLLFLDGASGALRDQRFAELPALLSEGDLLVFNDTQVIPARLLGVKDSGGKVEVLIERILDQHRALAHVRASKPPRSGRRLVLEQSVEVEVGERVADLFELRFLDPRPLLQLLEAVGRMPLPPYIRRETTPIDRERYQTVYASRPGAVAAPTAGLHFNGPLLEQLQAQGVELGYVTLHVGAGTFQPVRVENIAEHRMHAEYVEVPEQVCAQVRETQRLGGRVVAVGTTTVRALETAAAGGAIAPYQGETEIFIFPGYRFRAVDALITNFHLPETTLLMLVCAFAGRDRVLAAYRHAVKEGYRFFSYGDAMLVTGAGAG

SEQ ID NO: 69326 - protein, 344 aa, Nitrosococcus oceani
  misc_feature (1)..(344): tr|A0A0E2Z1D2|A0A0E2Z1D2_9GAMM S-adenosylmethionine:tRN A ribosyltransferase-isomerase OS=Nitrosococcus oceani C-27 OX=314279 GN=queA PE=3 SV=1
MQLSDFTYNLPKQLIAQYPPKRRGESRLLSLEGASGIVKDRQFIELPELLSTKDLLIFNNTKVIPARIQGTKDSGGKIEILIERFLDQHRALAHIRANNPPRAGRRLVMEQSVEVEVKGRVKELFELRFLDPRPLPQLLEAIGQMPLPPYIQRKTVPVDKERYQTIYASRPGAVAAPTAGLHFDKPLLKRLQAQGIRSGYITLHVGAGTFQPVRVKNITQHQMHSEYVEVSEQICAQIRDTQQAGGRVVAVGTTTVRALEAASAKGVIAPYQGETEIFIFPGHRFHTVNALITNFHLPETTLLMLVCAFAGSEHVLAAYRHAIKKGYRFFSYGDAMFITEAKTG

SEQ ID NO: 69327 - protein, 344 aa, Nitrosococcus oceani; identical to SEQ ID NO: 69326
  misc_feature (1)..(344): sp|Q3JAM9|QUEA_NITOC S-adenosylmethionine:tRNA ribosylt ransferase-isomerase OS=Nitrosococcus oceani (strain AT CC 19707 / BCRC 17464 / NCIMB 11848 / C-107) OX=323261 GN=queA PE=3 SV=1

SEQ ID NO: 69328 - protein, 344 aa, Nitrosococcus wardiae
  misc_feature (1)..(344): tr|A0A4P7C175|A0A4P7C175_9GAMM S-adenosylmethionine:tRN A ribosyltransferase-isomerase OS=Nitrosococcus wardiae OX=1814290 GN=queA PE=3 SV=1
MQLSDFSYDLPERLIAQYPPERRGESRLLFLDGACGALGDRWFAELPTLLSEGDLLVFNDTKVIPARLLGVKDSGGKVEVLIERLLDQHRALAHVRASKPPRPGRRLVLEQSVEVEVGERVADLFELRFQDPRPLLQLLEAVGRMPLPPYIHRETKPIDRERYQTVYAARPGAVAAPTAGLHFNRPLLEQLQAQGVGLGYVTLHVGAGTFQPVRVENITEHRMHAEYVEVPEQVCVQVRETQRQGGRVVAVGTTTVRALESAAVGGTLAPYQGETEIFIFPGYRFHTVDALITNFHLPETTLLMLVCAFAGRDQVLAAYRHAVKEGYRFFSYGDAMLVTGAGAR

SEQ ID NO: 69329 - protein, 344 aa, Nitrosococcus watsoni
  misc_feature (1)..(344): tr|D8K665|D8K665_NITWC S-adenosylmethionine:tRNA ribosy ltransferase-isomerase OS=Nitrosococcus watsoni (strain C-113) OX=105559 GN=queA PE=3 SV=1
MQLSDFTYNLPKQLIAQYPPKRRGGSRLLSLEGSSGIVKDQQFIELPELLSTGDLLVFNNTKVIPAKIQGVKDSGGKIEVLIERFLDQHRALAHVWANNPPRAGQSLVMEQSVEVEVRKRIKGLFELRFLDPRPLPQLLEAIGQIPLPPYIQRKTTSVDKERYQTVYASRPGAIAAPTAGLHFDKLLLKRLQAQGIQSGYITLHVGAGTFQPVRVKNITQHQMHSEYVEVSEQICTQIRDTQQAGGRIVAVGTTTVRALEAASAKGIIAPYQGETEIFIFPGYRFRTVNALITNFHLPETTLLMLVCAFAGSKQVLTAYRHAVKKGYRFFSYGDAMFITESKID

SEQ ID NO: 69330 - protein, 344 aa, Nitrosomonadaceae bacterium
  misc_feature (1)..(344): tr|A0A2E6UQR5|A0A2E6UQR5_9PROT S-adenosylmethionine:tRN A ribosyltransferase-isomerase OS=Nitrosomonadaceae bac terium OX=2026767 GN=queA PE=3 SV=1
MKTQDFNFSLPSELIAQFPVSKRSSSRMLYLDGKKGTLQDTMFTDLPDYMQPGDVMVLNDTRVIKARLFGTKESGGKLEVMVERILDEHCVLAMIRASHAPKIGSIFNISGVVPVTVLGREHNFYRLYFDHKDTVIELLDRYGNLPLPPYIPREITQEDEVRYQTVYAKEKGAVAAPTAGLHFDEAMILKLRKMRIIIAYVTLHVGSGTFQPVQVENINDHKMHKEVYHVPEETIEAIHLAKSLGGRVLAVGTTSLRALEAAAKTGNGKLIPGHGNTDIFITPGYRLNIVDRLLTNFHSPCSTLMMLVSAFGGSENICQAYQHAIDKGYRFLSYGDAMLIERKV

SEQ ID NO: 69331 - protein, 342 aa, Nitrosomonadaceae bacterium
  misc_feature (1)..(342): tr|A0A4P5UG62|A0A4P5UG62_9PROT S-adenosylmethionine:tRN A ribosyltransferase-isomerase OS=Nitrosomonadaceae bac terium OX=2026767 GN=queA PE=3 SV=1
MKIQDFDFSLPSELIAQIPIERRASSRLLHLDGKTGVLRDLMFVDLTRHLRAGDVVVLNDTYVIKARLFGIKNTGGEIEVMVERVLSGHCVLAMIRASHAPKINAKFVIAGQILVTVLHRDHNLYTLHFDHEKTVSELLDLYGSLPLPPYILRAATSIDETRYQTVYAKERGAVAAPTAGLHFDQAMLTSLQEMGVIVTYVTLHVGAGTFQPVYVENIIDHKMHKEFFHVPEEAVNAIRYAKINKRKVLAVGTTSLRALEAATVAGNGELKSGHGETDIYITPGYRFCVVDCLLTNFHLPCSTLLILVSAFGGLENIHRSYRHAINERYRFFSYGDAMLIER

SEQ ID NO: 69332 - protein, 81 aa, Nitrosomonadales bacterium
  misc_feature (1)..(81): tr|A0A524M8N0|A0A524M8N0_9PROT S-adenosylmethionine:tRN A ribosyltransferase-isomerase (Fragment) OS=Nitrosomon adales bacterium OX=2026761 GN=E4H07_08960 PE=3 SV=1
MKTQDFNFFLPPELIAQFPIAKRAGSRMLYLDARNDTLKDAMFADLPKYLRSGDVMVFNDTRVIKARLFGVKESGGKIEVM

SEQ ID NO: 69333 - protein, 358 aa, Nitrosomonadales bacterium
  misc_feature (1)..(358): tr|A0A1E4GI10|A0A1E4GI10_9PROT S-adenosylmethionine:tRN A ribosyltransferase-isomerase OS=Nitrosomonadales bact erium SCN 54-20 OX=1660164 GN=queA PE=3 SV=1
MKIQDFDFDLPPELIAQFPAEKRGNSRMLHLDAASGALQDRMFADLPSYLRPGDVIVFNDTRVIKARLHGVRDTGGRVEILVERVLDRQRVLAAIRASHSPKPGSKLFLADAIEVIVLSRELDFYTLQFEHEGAVIELLERYGNLPLPPYISRPVEKSDEQRYQTIYATRPGAVAAPTAGLHFDEPMLELLRKMGVVMAHVTLHVGSGTFQPVRMENIADHRMHSEVFEVSTETVECIRSAKAEGGRVLAVGTTSLRALEAAAATEERAEPDDKREEGARIKCGAGETDIFITPGYQFRVVDCLLTNFHLPRSTLLMLVSAFGGVENIRRAYQHAIKERYRFFSFGDAMLIGKTEDMD

SEQ ID NO: 69334 - protein, 344 aa, Nitrosomonas aestuarii
  misc_feature (1)..(344): tr|A0A1I4C650|A0A1I4C650_9PROT S-adenosylmethionine:tRN A ribosyltransferase-isomerase OS=Nitrosomonas aestuari i OX=52441 GN=queA PE=3 SV=1
MKTQDFDFDLPPALIAKYPAEQRTSSRLLYLDSTQNRLHDAQFLYLPDYLRPGDVMVFNDTRVIKARLLGQKESGGKIEVMIERILDEHRVQASIRASHAPKSGSKLLLANHISAIVAERKDSFYTLCFEHEKSIYELLEYYGQLPLPPYIDRAVSAADESRYQTVYAKNAGAVAAPTAGLHFDDDLLAQLKIMGVVIVYVTLHVGAGTFQPVRVDNIADHTMHSELFHIPEETVRTIERAKKTGNRIMAVGTTSLRALEASATQNQGKLVAGLSETSIFITPGYRFQIAERLLTNFHLPRSTLLMLVSAFGGMENIRTAYHHAIANKYRFFSYGDAMLIERKS

SEQ ID NO: 69335 - protein, 344 aa, Nitrosomonas communis
  misc_feature (1)..(344): tr|A0A1H2Z726|A0A1H2Z726_9PROT S-adenosylmethionine:tRN A ribosyltransferase-isomerase OS=Nitrosomonas communis OX=44574 GN=queA PE=3 SV=1
MKIQDFDFFLPNDLIAQFPPQHRVDSRLLYLDSPSNKFQDALFVDLTTYLSAGDVIVFNNTRVIKARLWGSKQTGGKIEVMVERVLDSHHVLAMIRASHAPKIGSSLLLGNKINAVVKGHEQNLYILHFAHELPVIELLEQYGNLPLPPYIERQATQLDEERYQTIFAKEVGAVAAPTAGLHFDETMLAKLHELGVIIAYVTLHVGAGTFQPVRTDNILNHQMHTEIYHIPAETIDAIQQAKQIGNRVLAVGSTSLRALEACANANNGELKSGHGETNLFITPGFNFRIVDRLLTNFHLPRSTLIMMVSAFAGMENIRCAYQHAISQRYHFFSYGDAMLIERKV

SEQ ID NO: 69336 - protein, 346 aa, Nitrosomonas communis
  misc_feature (1)..(346): tr|A0A0F7KAP2|A0A0F7KAP2_9PROT S-adenosylmethionine:tRN A ribosyltransferase-isomerase OS=Nitrosomonas communis OX=44574 GN=queA PE=3 SV=1
MKIQDFDFFLPNDLIAQFPPQHRVDSRLLYLDSPSNKFQDALFVDLTTYLRAGDVIVFNNTRVIKARLWGSKQTGGKIEVMVERVLDSHHVLAMIRASHAPKIGSSLLLGNKINAVVQGHEQNLYILHFAHELPVIELLEQYGNLPLPPYIERQATQLDEERYQTIFAKEMGAVAAPTAGLHFDETMLAKLHELGVIIAYVTLHVGAGTFQPVRTDNILNHQMHTEIYHIPAETIDAIQQAKQIGNRVLAVGSTSLRALEACANANNGELKSGHGETNLFITPGFNFRIVDRLLTNFHLPRSTLLMMVSAFAGMENIRCAYQHAISQRYHFFSYGDAMLIEKKYEI

SEQ ID NO: 69337 - protein, 344 aa, Nitrosomonas cryotolerans
  misc_feature (1)..(344): tr|A0A1N6I4U4|A0A1N6I4U4_9PROT S-adenosylmethionine:tRN A ribosyltransferase-isomerase OS=Nitrosomonas cryotole rans ATCC 49181 OX=1131553 GN=queA PE=3 SV=1
MKTRDFDFYLPTELIAQFPAERRTSSRMLYLDGVNDQLQDTLFTQLPDYLRAGDVLVFNDTRVIKARLLGVKSSGGKIEVMVERILDNHRIQATIRASHAPQIGSRLLLADAIHVTVMAREQTFYTLLFEHEKTVTELLEQYGTLPLPPYISRQATAADETRYQTVYAKNTGAVAAPTAGLHFDTALLTKLHEMGIIISYVTLHVGAGTFQPVRVENIADHTMHSETFHIPTETVNAIQHAKASGKRILAVGTTSLRALEASALAHNGELTAGYGDTRIFITPGFRLRIVERLLTNFHLPCSTLLMLVSAFGGIRNIQRAYQHAITNRYRFFSYGDAMLIEKKS

SEQ ID NO: 69338 - protein, 344 aa, Nitrosomonas europaea
  misc_feature (1)..(344): tr|A0A1I0C6E5|A0A1I0C6E5_NITER S-adenosylmethionine:tRN A ribosyltransferase-isomerase OS=Nitrosomonas europaea OX=915 GN=queA PE=3 SV=1
MKTDDFDFHLPDELIAQFPLANRSDSRMLYVNGKHADLRDAAFRNLPDYLKRGDVIVLNNTRVVKARLSGVKSTGGKVEVMVERILDTHRARVLIRASHALVIGSTLLLENKITAQVEAREQDIYTLCFMHSLPLIELLDQFGHTPLPPYIGRNATVSDENRYQTVFAQESGAVAAPTAGLHFDETMLQTLRTLGVKIIYVTLHVGAGTFQPVRVQNIDQHVMHTEPYHIPTETVEAIQMCKSAGGSVLAVGTTSLRALESCMLTNDGTLVAGAGETNLFITPGFRFRIVDRLLTNFHLPRSTLLMLVSAFAGMETIRHAYRHAIDNHYRFFSYGDAMLIDSQP

SEQ ID NO: 69339 - protein, 353 aa, Nitrosomonas europaea
  misc_feature (1)..(353): sp|Q82VF1|QUEA_NITEU S-adenosylmethionine:tRNA ribosylt ransferase-isomerase OS=Nitrosomonas europaea (strain A TCC 19718 / CIP 103999 / KCTC 2705 / NBRC 14298) OX=228 410 GN=queA PE=3 SV=1
MLAIGIIRSMKTDDFDFHLPDELIAQFPLANRSDSRMLYVNGKHADLRDAAFRNLPDYLKRGDVIVLNNTRVVKARLSGVKSTGGKVEVMVERILDTHRARVLIRASHALVIGSTLLLENKITAQVEAREQDIYTLCFMHSLPLIELLDQFGHTPLPPYIGRNATVSDENRYQTVFAQESGAVAAPTAGLHFDETMLQTLRTLGVKIIYVTLHVGAGTFQPVRVQNIDQHVMHTEPYHIPTETVEAIQMCKSAGGSVLAVGTTSLRALESCMLTNDGTLVAGAGETNLFITPGFRFRIVDRLLTNFHLPRSTLLMLVSAFAGMETIRHAYRHAIDNHYRFFSYGDAMLIDSQP

SEQ ID NO: 69340 - protein, 346 aa, Nitrosomonas eutropha
  misc_feature (1)..(346): tr|A0A1I7G273|A0A1I7G273_9PROT S-adenosylmethionine:tRN A ribosyltransferase-isomerase OS=Nitrosomonas eutropha OX=916 GN=queA PE=3 SV=1
MKTDDFNFPLPDELIAQFPLANRADSRMLYVNSNQSALRDAAFKDLPAYLKQGDVIVFNNTRVVKARLAGFKSTGGKVEVMIERILDTQLARALIRASHAPAIGSTLLLENVITAQVEAREQDIYTLRFIHSQPLIELLDQYGHTPLPPYIERIATISDESRYQTVFAQETGAVAAPTAGLHFDETMLTTLQTLGVKVAWITLHVGAGTFQPVRVENIDQHIMHTEQYHIPAETIEIIRECKAGGGSVLAVGTTSLRALEASALIGDGELVAGSNETNLFITPGFQFRVVDQLLTNFHLPRSTLLMLVSAFAGIETIRHAYQHAVDNHYRFFSYGDAMLIKGDSQS

SEQ ID NO: 69341 - protein, 346 aa, Nitrosomonas eutropha
  misc_feature (1)..(346): sp|Q0AG56|QUEA_NITEC S-adenosylmethionine:tRNA ribosylt ransferase-isomerase OS=Nitrosomonas eutropha (strain D SM 101675 / C91) OX=335283 GN=queA PE=3 SV=1
MKTDDFDFSLPNELIAQLPLANRADSRMLYINSRQSDLRDAAFKDLPAYLKQGDVIVFNNTRVVKARLAGFKSTGGKVEVMIERILGTHQARALIRASHAPAIGSTLLLENAITVQVEAREQDIYTLRFIHSQPLIELLDQYGHTPLPPYIGRIATASDESRYQTVFAQETGAVAAPTAGLHFDETMLTTLQTLGIKIAWVTLHVGAGTFQPVRVENINQHIMHTEQYHIPTETIEIIRRCKAGGGSVLAVGTTSLRALEASALIGDGELVAGSNETNLFITPGFQFRVVDRLLTNFHLPRSTLLMLVSAFAGIETIRHAYQHAVNNHYRFFSYGDAMLIEGDSRS

SEQ ID NO: 69342 - protein, 358 aa, Nitrosomonas halophila
  misc_feature (1)..(358): tr|A0A1H3GGT3|A0A1H3GGT3_9PROT S-adenosylmethionine:tRN A ribosyltransferase-isomerase OS=Nitrosomonas halophil a OX=44576 GN=queA PE=3 SV=1
MVSEKGCAIGIIRGMKTDTFDFYLPDDLIAQFPLANRTDSRMLYVGGTAQHIKDATFRDLPDYMRRGDLLVLNNTRVIKARLSGFKPTGGKVEIMVERLLDVHRAQALIRASHAPAVGSTLSLSDGITAVVEARQQDIYTLRFLHPLPLLELLDRYGRVPLPPYIERTVTNSDESRYQTIFAQESGAVAAPTAGLHFDQAMLDTLRAMGVAIAYITLHVGAGTFQPVRAENIEDHVMHAERYSIPPDTIEAIRACKAGGGRVLAVGTTCLRALEACARAHEGQLIAGQGETNLFITPGYRFQVVDRLLTNFHLPRSTLLMLVSAFAGMDAIQRAYQHAVAARYRFFSYGDAMLLEIQS

SEQ ID NO: 69343 - protein, 344 aa, Nitrosomonas marina
  misc_feature (1)..(344): tr|A0A1H8GLU2|A0A1H8GLU2_9PROT S-adenosylmethionine:tRN A ribosyltransferase-isomerase OS=Nitrosomonas marina O X=917 GN=queA PE=3 SV=1
MNIREFDFDLPPELIAQHPAQQRASSRLLHLDSTSGQIRDLQFSCLPEYLRSGDVAVFNDTRVIKARLFGRKSSGGKIEILVERVLDEHHVQAAIRASHAPRPNSQLFLADEIPVTVLDRENAFYTLRFDHPQSIYELLERFGQLPLPPYISRSASSADESRYQTVYAKNAGAVAAPTAGLHFDENILNLLRAKGVMITYVTLHVGAGTFQPVRVETITDHTMHSELFHIPQQTADAIGHAKKNGGRILAVGTTSLRALEASAAQYHGQVTAGSGETDIFITPGYRFQVADRLLTNFHLPRSTLIMLVSAFGGMSNIRNAYQHAIKQQYRFFSYGDAMLIERKP

SEQ ID NO: 69344 - protein, 344 aa, Nitrosomonas marina
  misc_feature (1)..(344): tr|A0A1I0DD51|A0A1I0DD51_9PROT S-adenosylmethionine:tRN A ribosyltransferase-isomerase OS=Nitrosomonas marina O X=917 GN=queA PE=3 SV=1
MNIREFDFDLPSELIAQHPAQQRASSRLLHLDSASRQIRDLQFSCLPEYLRSGDVAVFNDTRVIKARLFGRKSSGGKIEILVERVLDDHHVQATIRASHAPRPDSRLVLADEIPVTVLDRGNAFYTLRFDHPQTVYELLERFGQLPLPPYIGRSASLADESSYQTVYAKNAGAVAAPTAGLHFDETTLNQLKTKGVMITYVTLHVGAGTFQPVRVEKITDHTMHSELFHIPQQTADAIGHAKKNGGRILAVGTTSLRALEASAAQHHGQVTAGSGETDIFITPGYRFHVADRLLTNFHLPRSTLIMLVSAFGGLSNIRNAYQHAIKQHYRFFSYGDAMLIERKP

SEQ ID NO: 69345 - protein, 350 aa, Nitrosomonas mobilis
  misc_feature (1)..(350): tr|A0A1G5SDT6|A0A1G5SDT6_9PROT S-adenosylmethionine:tRN A ribosyltransferase-isomerase OS=Nitrosomonas mobilis OX=51642 GN=queA PE=3 SV=1
MRTSPSMQTTEFDYHLPAELIAQFPLEKRTASRMLYVDPAGPVIRGDHFTQLPDYLRVNDLLILNDTRVIKARLHGVKQSGGKVEVMIERVLDDHRVLAMIRASHAPAIGSILLLEQEVSVMVEARQQSLYVLSFPEDRVLDELLERYGRLPLPPYIERAATAIDENRYQTVFAHVNGAVAAPTAGLHFDEIMLTSLQQQGINIAYVTLHVGAGTFQPVKTEMVEEHVMHAERYHISAETIDAIERCHAQGGRVLAVGTTCLRALEACAQANHGELLAGSGETRLFIAPGFDFQIVDRLLTNFHLPRSTLLMLVSAFAGMDTIRHAYQYAIAARYRFFSYGDAMLLEKSA

SEQ ID NO: 69346 - protein, 344 aa, Nitrosomonas nitrosa
  misc_feature (1)..(344): tr|A0A1I4KSI3|A0A1I4KSI3_9PROT S-adenosylmethionine:tRN A ribosyltransferase-isomerase OS=Nitrosomonas nitrosa OX=52442 GN=queA PE=3 SV=1
MKIQDFDYFLPNDLIAQFPPKQRTDSRMLYLDSRRDSFKDALFRDLPQYLRKGDVVVLNDTRVIKARLEGVKETGGKIEVLVERVLDDHHVQAMIRASHAPKTGSRLLLENNISATVQEHADNFYILQLAHEQAVIELLEQYGRLPLPPYIEREATHLDEDRYQTVFAKAPGAVAAPTAGLHFDDAMLKNLQAMGVTTRYVTLHVGAGTFQPVRVENILDHQMHTEIYHIPAETIDAINDAKHAGGRVLAVGSTSLRALEACAHKHEGELIAGYGETNLFITPGFHFHIVDRLLTNFHLPRSTLLMMVSAFAGIENIRHAYQHAIAQRYRFFSYGDAMLIEKKT

SEQ ID NO: 69347 - protein, 344 aa, Nitrosomonas nitrosa
  misc_feature (1)..(344): tr|A0A3D0FDJ4|A0A3D0FDJ4_9PROT S-adenosylmethionine:tRN A ribosyltransferase-isomerase OS=Nitrosomonas nitrosa OX=52442 GN=queA PE=3 SV=1
MKIQDFDYFLPNDLIAQFPPKQRTDSRMLYLDSRCDSFKDALFRDLPQYLRKGDVVVLNDTRVIKARLEGVKETGGKIEVLVERVLDDHHVQAMIRASHAPKTGSRLLLENNISATVQEHADNFYILQLAHEQAVIELLEQYGRLPLPPYIEREATHLDEDRYQTVFAKAPGAVAAPTAGLHFDDAMLKNLQAMGVTTRYVTLHVGAGTFKPVRVENILDHQMHTEIYHIPAETIDAINDAKLAGGRVLAVGSTSLRALEACAHKHEGKLIAGYGETNLFIIPGFHFHIVDRLLTNFHLPRSTLLMMVSAFAGIENIRHAYQHAVAQRYRFFSYGDAMLIEKKT

SEQ ID NO: 69348 - protein, 344 aa, Nitrosomonas oligotropha
  misc_feature (1)..(344): tr|A0A2T5H9W4|A0A2T5H9W4_9PROT S-adenosylmethionine:tRN A ribosyltransferase-isomerase OS=Nitrosomonas oligotro pha OX=42354 GN=queA PE=3 SV=1
MKTQDFDFYLPAELIAQFPSEQRTGSRLLYLDSNNNQWQDALFSNLPSFLRAGDVMVFNDTQVIKARLFGKKDSGGKVEVMVERILGDHHVLAAIRASHAPKPDSTLLLADAIPVTVIAREQEFYTLRFEHEKTTAELLECYGQLPLPPYIARPATAADEARYQTVYARNAGAVAAPTAGLHFDAVMMDRLRAMGIIIAYVTLHVGAGTFQPVRVENIADHTMHNETYHIPQATVDAIRQARLSGGRILAVGTTSLRALESCASSQDDQLIAGYGDTRIFITPGYRFQVVERLLTNFHLPCSTLLMLVSAFAGMENIRLAYRHAVTERYRFFSYGDAMLIEKKS

SEQ ID NO: 69349 - protein, 344 aa, Nitrosomonas oligotropha
  misc_feature (1)..(344): tr|A0A1H8UKR9|A0A1H8UKR9_9PROT S-adenosylmethionine:tRN A ribosyltransferase-isomerase OS=Nitrosomonas oligotro pha OX=42354 GN=queA PE=3 SV=1
MKTQDFDFYLPAELIAQFPAEQRTGSRLLYLDSNNHQWQDALFSNLSSFLRAGDVMVFNDTQVIKARMFGKKDSGGKVEVMVERILDDRHVLAAIRASHAPKPDSTLLLADAITATVIAREQEFYTLRFEHEKTTAELLECYGQLPLPPYIARPATAADEARYQTVYARNAGAVAAPTAGLHFDTGMMDQLRAMGITIAYVTLHVGAGTFQPVRVENIADHTMHSETYHIPQATVDAIRQAKLSGGRILAVGTTSLRALESCASSHHDQLIAGYGDTRIFITPGYHFQVVERLLTNFHLPCSTLLMLVSAFADMENIRLAYRHAVTERYRFFSYGDAMLIERKS

SEQ ID NO: 69350 - protein, 344 aa, Nitrosomonas sp.
  misc_feature (1)..(344): tr|A0A1H3Q6F4|A0A1H3Q6F4_9PROT S-adenosylmethionine:tRN A ribosyltransferase-isomerase OS=Nitrosomonas sp. Nm58 OX=200126 GN=queA PE=3 SV=1
MKTQDFDFFLPSDLIAQFPPTQRTDSRMLYLDSPCDKFQDTLFIDLPKYLRAGDVIVFNDTRVIKARLWGIKQTGGKIEVMVERVLDSHHVLAMIRASHAPKIGSRLLLENTINAIVQGHEQNFYILRFTHELSVIQLLEQYGSLPLPPYIERQATQLDEDRYQTIFAKQVGAVAAPTAGLHFDEAMLINLREIGVVITYVTLHVGAGTFQPVRAENILDHQMHTEIYYIPAETIGAIQQAKGTGNRVLAVGSTSLRALEACAKTNDGQLKPGYGETNLFVMPGFNFRIVDRLLTNFHLPRSTLLMMVSAFAGMENIHRAYQHAITQRYHFFSYGDAMLIERKV

SEQ ID NO: 69351 - protein, 344 aa, Nitrosomonas sp.
  misc_feature (1)..(344): tr|A0A1H3PPP4|A0A1H3PPP4_9PROT S-adenosylmethionine:tRN A ribosyltransferase-isomerase OS=Nitrosomonas sp. Nm33 OX=133724 GN=queA PE=3 SV=1
MKIQDFDFFLPSDLIAQFPPQHRADSRLLYLDSSSNKFQDTFFIDLPTYLRAGDVIVFNDTRVIKARLWGIKQTGGKIEVMVERILDSHHVLAMIRASHAPKIGSNLLLENKINAVVQGHEQNFYILHFAHELPVIELLEQYGSLPLPPYIERQVTQLDEDRYQTIFAKKTGAVAAPTAGLHFDEAMLVKLREMGVIITYVTLHVGAGTFQPVRAENILDHQMHTEIYHIPAATIDAIQQAKHIGNRVLAVGSTSLRALEACANANDGELKPGYGETNLFITPGFNFHIVDRLLTNFHLPRSTLLMMVSAFAGMENIRRTYQHAITQRYHFFSYGDAMLIERKV

SEQ ID NO: 69352 - protein, 346 aa, Nitrosomonas stercoris
  misc_feature (1)..(346): tr|A0A4Y1YMA1|A0A4Y1YMA1_9PROT S-adenosylmethionine:tRN A ribosyltransferase-isomerase OS=Nitrosomonas stercori s OX=1444684 GN=queA PE=3 SV=1
MKTDDFDFDLPAELIAQFPLAKRTDSRLLYVNSKQDSLRDATFKALPTFLTPGDVIVFNNTRVVKARLSGIKSTGGKVEVMIERIVDAHQVRALIRASHAPAIGSTLQLENEITAQVEARAQDIYTLRFMHTQPLTELLAQYGHTPLPPYIERAATLADESRYQTVFAQNEGAVAAPTAGLHFDQSMLDSLQTLGIKIAWLTLHVGAGTFQPVRSENIEQHHMHTEQYHIPAETVAMIQACKAKGGKILAVGTTSLRALEASALAGNGTLVAGSNETNLFVTPGFQFQIVDCLLTNFHLPRSTLLMLVSAFAGMGTIRHAYLHAIDQRYRFFSYGDAMLIEGNTYA

SEQ ID NO: 69353 - protein, 355 aa, Nitrosomonas ureae
  misc_feature (1)..(355): tr|A0A1H5VYK9|A0A1H5VYK9_9PROT S-adenosylmethionine:tRN A ribosyltransferase-isomerase OS=Nitrosomonas ureae OX =44577 GN=queA PE=3 SV=1
MENLLTGIIHRMKTQDFDFYLPPGLIAQFPAEQRTGSRLLYLDGINNHWQDALFANLPDFLRAGDVLVFNDTQVIKARLLGKKASGGKVEVLVERVLDDRHVVATVRASHAPKLDSQLVLADAISLTVIAREQEFYTLRFEHEKTVAELLESYGQLPLPPYIARPATMIDEARYQTVYARTPGAVAAPTAGLHFDIDMLEQLRAIGVTIAYVTLHVGAGTFQPIRVENIADHTMHRETYHIPQSTADAIKQAKISGGRILAVGTTSLRALEACASLHQGGLVAGYGDTRIFITPGYRFQVIDRLLTNFHLPCSTLLMLVSAFAGMENIRQAYQHAIKGQYRFFSYGDAMLIEREL

SEQ ID NO: 69354 - protein, 344 aa, Nitrosomonas ureae
  misc_feature (1)..(344): tr|A0A2T5I557|A0A2T5I557_9PROT S-adenosylmethionine:tRN A ribosyltransferase-isomerase OS=Nitrosomonas ureae OX =44577 GN=queA PE=3 SV=1
MKTQDFDFYLPTELIAQFPTEQRTGSRLLYLDSINNHWQDALFASLPNFLRAGDVLVFNDTQVIKARLMGKKASGGKVEVLVERVLDDRHVVATVRASHAPKLDSQLVLADAISLTVIAREQEFYTLRFEHEKTVAELLESYGQLPLPPYIARPATMIDEARYQTVYARTPGAVAAPTAGLHFDIDMLEQLRAIGVTIAYVTLHVGAGTFQPIRVENIADHIMHRETYHIPQSTADAIKQAKISGGRILAVGTTSLRALETCASLHQGGLVAGYGDTRIFITPGYRFQVIDRLLTNFHLPCSTLLMLVSAFAGMENIRQAYQHAIKGQYRFFSYGDAMLIERKL

SEQ ID NO: 69355 - protein, 350 aa, Nitrosospira briensis
  misc_feature (1)..(350): tr|A0A1I5C4I0|A0A1I5C4I0_9PROT S-adenosylmethionine:tRN A ribosyltransferase-isomerase OS=Nitrosospira briensis OX=35799 GN=queA PE=3 SV=1
MKIQDFDFDLPPELIAQFPAGQRASSRMLHMEGSTGGLRDAMFADLPDYLHAGDVMVFNDTRVIKARLYGVKDSGGRVEVMVERVLDTHRVLAVIRAGHSPKPASKLFLADAIEVTVLAHEHGFYTLHFDHETAVIELLERYGNLPLPPYISRPATQADEARYQTVYATQTGAVAAPTAGLHFDDVILKKLTDMGVVTAYITLHVGSGTFQPVRVENIADHKMHREIFHVPPETVESIRQAKAGGGRVLAVGTTSLRALEAAAASIEGIDGSGGELKPGRGETDIFITPGYRFRVVERLLTNFHLPRSTLLMLVSAFGGLENIRRAYRHAIDERYRFFSYGDAMLIERES

SEQ ID NO: 69356 - protein, 344 aa, Nitrosospira lacus
  misc_feature (1)..(344): tr|A0A1W6SKR9|A0A1W6SKR9_9PROT S-adenosylmethionine:tRN A ribosyltransferase-isomerase OS=Nitrosospira lacus OX =1288494 GN=queA PE=3 SV=1
MKIQDFDFDLPSELVTQFPTEERASSRMLHLEGSSGVLRDAMFADLPRYLRAGDVMVFNDTRVIKARLFGVKSSGGRVEVMVERVLDAHCALTVIRASHSPKPGSKLLLADAIEVTVLAHEQDLYTLRFDHERTVIELLECYGSLPLPPYISRPATETDEARYQTVYAKQAGAVAAPTAGLHFDESMLSTLSEMGVVLAHVTLHVGLGTFQPVRVENIADHKMHKEIFDVPQETVDSIRRAKAGGGRVLAIGTTSLRALEAAAAAGKGELQSGHGDTDIFITPGYRLRVVERLLTNFHLPRSTLLMLVSAFGGAENIRRAYQHAINERYRFFSYGDAMLIERGS

SEQ ID NO: 69357 - protein, 356 aa, Nitrosospira multiformis
  misc_feature (1)..(356): sp|Q2Y6A2|QUEA_NITMU S-adenosylmethionine:tRNA ribosylt ransferase-isomerase OS=Nitrosospira multiformis (strai n ATCC 25196 / NCIMB 11849 / C 71) OX=323848 GN=queA PE =3 SV=1
MKIQDFDFDLPPELIAQFPAEKRGNSRMLHLDATSGALQDRMFADLPSYLRPGDVIVFNDTRVIKARLYGVRDTGGRVEVLVERVLDSHCALAAIRASHSPKPGSKLFLAGAIEVTVLSREHGFYILQFEHESGVMELLERYGNLPLPPYISRPVEKSDELRYQTVYAARPGAVAAPTAGLHFDEHMLGLLRKMGVVMAHVTLHVGSGTFQPVRVENIADHRMHSEVFYVSAETVECIRHAKAEGGRVLAVGTTSLRALEAAAAFAGERAEADNGDGVRIKCGAGETDIFITPGYQFRVVDCLLTNFHLPRSTLLMLVSAFGGVENIRCAYRHAIKERYRFFSFGDAMLIGRAEGI

SEQ ID NO: 69358 - protein, 357 aa, Nitrosospira multiformis
  misc_feature (1)..(357): tr|A0A1I0C4K2|A0A1I0C4K2_9PROT S-adenosylmethionine:tRN A ribosyltransferase-isomerase OS=Nitrosospira multifor mis OX=1231 GN=queA PE=3 SV=1
MKIQDFDFDLPPELIAQFPAEKRGNSRMLHLDAASGALQDRMFADLPSYLRPGDVIVFNDTRVIKARLYGVRDTGGRVEVLVERVLDRQRVLAVIRASHSPKPGSKLFLADAIEVTVLSREHDFYTLQFEHEGAVSELLERYGNLPLPPYISRPVEKSDELRYQTVYANNPGAVAAPTAGLHFDEHMLELLRKMGVVMAHVTLHVGSGTFQPVRVENIADHRMHSEIFYVSAETVECIKHAKAEGGRVLAVGTTSLRALEAAAVATEEGAEADNGEDGVRIKCGAGETDIFITPGYQFRVVDCLLTNFHLPRSTLLMLVSAFGGVENIRLAYRHAIKERYRFFSFGDAMLIERAEGI

SEQ ID NO: 69359 - protein, 361 aa, Nitrosospira sp.
  misc_feature (1)..(361): tr|A0A495END4|A0A495END4_9PROT S-adenosylmethionine:tRN A ribosyltransferase-isomerase OS=Nitrosospira sp. Nsp4 4 OX=1945879 GN=queA PE=3 SV=1
MKIQDFDFDLPPELIAQFPIEQRVSGRMLRLDGSAGVIQDSQFADLPEFVRAGDVMVFNDTRVIKARLYGVKDTGGKVEVLVERVLDTHCALAVMRASHPSKPGTKLLLAESIEVTVLACEGEFYILRFEHECSVADLLERYGHLPLPPYISRSADKVDETRYQTIYARQPGAVAAPTAGLHFDENMLNALRNMGVVIAYVTLHVGSGTFQPVRVEDIADHKMHREIFHVPAETAEAIGRAKAEGRAVIAVGTTSLRALEAAAAAAEGLEGGESISRPVHGDTDIFITPGYRFRVVEHLLTNFHLPRSTLLMLVAAFGGLENVRNAYQHAISHRYRFFSYGDAMLIARGSRESSVSIRPML

SEQ ID NO: 69360 - protein, 351 aa, Nitrosospira sp.
  misc_feature (1)..(351): tr|A0A1G4Y3V1|A0A1G4Y3V1_9PROT S-adenosylmethionine:tRN A ribosyltransferase-isomerase OS=Nitrosospira sp. Nsp1 OX=136547 GN=queA PE=3 SV=1
MKIQDFDFNLPPELIAQFPVEQRASSRMLHLKGSGGALGDAMFADLPRLVRPGDVMVFNDTRVIKARLHGVRDTGGRVEVMVERVLDAHCVLAIMRASHMPKPGSKLFLAGAIDVTVLARERDFYTLRFDHANTVTDLLERYGNLPLPPYISRLPGKMDEARYQTIYAKQAGAVAAPTAGLHFDENMLAALREMGVLIAYVTLHVGSGTFQPVRVDNIADHKMHREIFHVPPETIDIIRRAKSGGGRVLAVGTTSLRALEGAAAQTAGAEAVERMDELKSGHGETDIFITPGYRFRVVERLLTNFHLPRSTLLMLVSAFGGTENIRRAYQHAVNERYRFFSYGDAMLIESQ

SEQ ID NO: 69361 - protein, 350 aa, Nitrosovibrio sp.
  misc_feature (1)..(350): tr|A0A497X8M7|A0A497X8M7_9PROT S-adenosylmethionine:tRN A ribosyltransferase-isomerase OS=Nitrosovibrio sp. Nv1 2 OX=2135773 GN=queA PE=3 SV=1
MKIQDFDFHLPPELIAQFPPEQRASSRMLHLEGSTGALQDAMFTDLPGYLRAGDVMVFNDTRVIKARLYGVKDSGGKVEVMVERVLDAHRAMAIIRASHSPKPGSKLFLADAIEVTVLDSEDHFYTLRFDHDSTVIDLLERYGNLPLPPYISRTATQADEARYQTVYAKQTGAVAAPTAGLHFDEPMLETLRGIGVVISHVTLHVGSGTFQPVRVENIADHKMHREIFHVPAETVESIRHAKAVGGRVLAVGTTSLRALEAAATAIEGVDEDGYELITGHGETDIFITPGYRFRVVERLLTNFHLPRSTLLMLVSAFGGLENIRRAYQHAIEERYRFFSYGDAMLIERES

SEQ ID NO: 69362 - protein, 344 aa, Nitrosovibrio sp.
  misc_feature (1)..(344): tr|A0A1K1M9B3|A0A1K1M9B3_9PROT S-adenosylmethionine:tRN A ribosyltransferase-isomerase OS=Nitrosovibrio sp. Nv1 7 OX=1855339 GN=queA PE=3 SV=1
MRVQDFDFALPPELIAQFPAVRRGDSRLLHLTGASGALRDATFADLPRFMRTGDVMVLNDTRVIKARLSGVKDSGGRVEVMVERVLDAHRVLAVIRASHAPLPGSGLRLAGVLEATVLAREADLYTLRFDCAETVAELLERHGSVPLPPYISRPAAQADESRYQTVFARHAGAVAAPTAGLHFDEAMLEALARMGVVVAYVTLHVGLGTFQPVRVERLAEHRMHRESFHVPEETVAAIQRARASGGRVLAVGTTSLRALEAAAAAGGGELRPGHGDTDLFIAPGYRLQVAERLLTNFHLPRSTLLMLVSAFAGMENIRRAYRHAIEARYRFFSYGDAMLIEGRT

SEQ ID NO: 69363 - protein, 359 aa, Nitrosovibrio tenuis
  misc_feature (1)..(359): tr|A0A1H7GDI8|A0A1H7GDI8_9PROT S-adenosylmethionine:tRN A ribosyltransferase-isomerase OS=Nitrosovibrio tenuis OX=1233 GN=queA PE=3 SV=1
MCARATGIIPAVKIQDFDFDIPPELIAQFPAEQRASSRMLHLEGSSGVLRDGWFADLPSYLRAGDVVVFNDTRVMKARLYGVRETGGRVEVMVERILDAQCAQAVIRASHAPKPGSRLFLCDAIEVTVVDRDHDLYTLRFEHESTLIDLLERYGTLPLPRYILRSATKTDEARYQTIYAKQAGAVAAPTAGLHFDENMLMTLREMGVVIANVTLHVGLGTFQPVRVENIADHSMHREIFDVPAETVEAIKCAKAIGGRVLAVGTTSLRALEAAAADGELKPGHGETDIFITPGYRFRVVERLLTNFHLPRSTLLMLVSAFGGTENIRRAYQHAIKGRYRFFSYGDAMLIERGAGCAQPG

SEQ ID NO: 69364 - protein, 346 aa, Nitrospina gracilis
  misc_feature (1)..(346): tr|M1YML0|M1YML0_NITG3 S-adenosylmethionine:tRNA ribosy ltransferase-isomerase OS=Nitrospina gracilis (strain 3 /211) OX=1266370 GN=queA PE=3 SV=1
MDISDFDFHLPEELIAQTPTEKRDASRLMVVNRITGKIEHMMFPHITEFLTDRPLLVFNNTRVLPAKLEGHRTDNGKPVEWLLARKVESGSWLVLTRGLSKLKPGQTFRFGNGLSAVFEGVEEAMAQVRFSSEELLKTTLNQIGRMPLPHYIKRSGGLGEKMDSLDRERYQTVFAEEAGAIAAPTAGLHFTPELMSLLKEKAELSFLTLHVGPGTFQPLRTNKVVEHQMKEEFYRIPSSTWNQIHQARAEGRPVFAVGTTSTRVLESVNFDTATEKDVEGWTNRFLYPGQIFRNVDRLLTNFHLPRSTLYLLVCAFAGKPLMDQAYREAITRKYRFFSYGDAMLIL

SEQ ID NO: 69365 - protein, 352 aa, Nitrospina sp.
  misc_feature (1)..(352): tr|A0A0J6YSQ1|A0A0J6YSQ1_9BACT S-adenosylmethionine:tRN A ribosyltransferase-isomerase OS=Nitrospina sp. SCGC_A AA799_C22 OX=1628279 GN=queA PE=3 SV=1
MSPLLKLSDFDFELPESLIAQKPVAVRDRSRLMVLDRETGSISHDVFNHLPSQLPPHSLMVFNDTQVTPARLCGHIVGNGRPLEILLVKENEDDHWEALIKGLAKLKPGTEIEFEEKSLKAKLTERRGDRAVLKLTCSKNLQSVLQRVGKMPLPPYIKRSEVDGENLSALDRERYQTVFARNPGAIAAPTAGLHFTPELMKTLHKEGIESVFLTLHVGMGTFQPIRSENITEHKMDAERFHIPKETLKALTRARAEGRDIVAVGSTATRVLESVDPGDIKVKDTCGWTDRFIYPGQEFKSVDRLLTNFHLPKSTLYLLVCAFAGKELIEEAYRKAIEHNYRFFSYGDAMLIL

SEQ ID NO: 69366 - protein, 344 aa, Nitrospina sp.
  misc_feature (1)..(344): tr|A0A523MVB0|A0A523MVB0_9BACT S-adenosylmethionine:tRN A ribosyltransferase-isomerase OS=Nitrospina sp. OX=202 4844 GN=queA PE=3 SV=1
MKLSDFDFALPEELIAQVPLPERDQSRLMVVDRSTGKISHDHFGSITDHLACSSLVVLNDTRVLPAKLIAFKKGASKPLEMLMVQEEVSGTWKVLLKGLGRLRPGQEFLLDDGRVTAVFLEQQKDIGIFRFSPGGVVPELMDKLGKVPLPHYIRRNQEDEELAKLDRMRYQTVFARHSGAIAAPTAGLHFTEDTIRRLQGKLAYLTLHVGPGTFQPIRADNVVDHKMKSESYNIPADTWNRVVRAKQEGAKVVAVGTTATRVLETVDFDSAKTEDVSGWTDRFIYPGQTFKNIDGLLTNFHLPMSTLYLLVCAFAGKTLMQEAYMKAVREKYRFFSYGDAMLIL

SEQ ID NO: 69367 - protein, 346 aa, Nitrospinae bacterium
  misc_feature (1)..(346): tr|A0A1G1EDY4|A0A1G1EDY4_9BACT S-adenosylmethionine:tRN A ribosyltransferase-isomerase OS=Nitrospinae bacterium RIFCSPLOWO2_12_FULL_45_22 OX=1801687 GN=queA PE=3 SV=1
METKELYYSLPEEFIAQYPAEEREASRLMILDRKGKSWGHSRFDSLPNYLQSGDLLVLNDTRVIPARLIGCKVNTHRKIEVLLVKEVAPRSWEALVKPGKKAPINTQIIFGKGDLKGVVTAVCGPGKRVIEFFANGYLEAKLKQYGMVPIPPYIKRDSHHPLELDQVRYQTVYARIEGAIAAPTAGLHFTERLLERIKEQGVQILSLTLHIGPGTFRPIKSRVVGEHPMEPEYYIIEPETADIITRAKEDGRRIVAVGTSVTRALETIFGSPYQPRPLEGWTDLFMYPGYCFKVVDSLVTNFHLPGSTLLALVFAFAGKELILKAYQAAIKERYRFYSYGDAMLII

SEQ ID NO: 69368 - protein, 319 aa, Nitrospinae bacterium
  misc_feature (1)..(319): tr|A0A1G1F043|A0A1G1F043_9BACT S-adenosylmethionine:tRN A ribosyltransferase-isomerase (Fragment) OS=Nitrospina e bacterium RIFCSPLOWO2_12_FULL_47_7 OX=1801688 GN=A3K0 9_08240 PE=3 SV=1
MIVHRETGEICQDIFSNFTKYFTVRPLMVFNNTRVFPAKLYGHKRGAEKSFEILMLREHLPSVWEVLIKGLGKIKVGTEITFGNGELAAILVDKNQEHGFLQFQYTGDFVSILNRVGKPPLPPYIRRGFHDEEELQRMDRERYQTIYAEKTGAIAAPTAGLHFTPTLLDAIKLHYADTATLTLHVGAGTFQSPRHDELSRHKMEKEYFNIPSETWNRLLTSLKDNQKILAVGTTATRALESVEINSPVSQDVSGWTDRFIHPGQKFNIVQQLLTNFHLPKSTLYLLVCAFAGKSLVEKAYNEAIRQKYRFFSYGDAMLI

SEQ ID NO: 69369 - protein, 385 aa, Nitrospira bacterium
  misc_feature (1)..(385): tr|A0A0S8CBH4|A0A0S8CBH4_9BACT S-adenosylmethionine:tRN A ribosyltransferase-isomerase OS=Nitrospira bacterium SG8_3 OX=1704023 GN=queA PE=3 SV=1
MYFLGDYDYPLPEALIAHAPVRQRDQARLMLLERGGRRISHYAFADLAGLLHPGDLLVVNDTRVIPGRLTGTKETGGKVEVLLLSYPGEIRGEQGLTCHRGSGCPPLEPMVAQGAENSEAWPSRRSPGHLVCDCLVKASKPPRPGSKIDFAGGLRATVLGATDGVYNMAFEFSGDFDALLDKIGQVPLPPYIKRNGQTPLGCDDRQAYQTVYAEKNGAVAAPTAGLHFSRQLLDQLKERGIEVVAVTLHVSYGTFLPVRVTDIRQHKIHPETYELTDAAASAINEAKDAGRRIIAVGTTTVRVLEHIAHLTGRVGPGSGQCDLFIYPGFQYKVIHGLITNFHLPKSTLLMLVSAFAGRQLILDAYEEAIRRKYRFYSYGDAMLIW

SEQ ID NO: 69370 - protein, 184 aa, Nitrospira bacterium
  misc_feature (1)..(184): tr|A0A0S8E7N3|A0A0S8E7N3_9BACT S-adenosylmethionine:tRN A ribosyltransferase-isomerase (Fragment) OS=Nitrospira bacterium SM23_35 OX=1704026 GN=AMK74_06210 PE=3 SV=1
MKTADFDYVLPEFLIAEKPLKERSVSRLLVLHRNGRTEHRHFFDLPSYLEQGDTLIINNTKVFPARLTGTKKNGKTLDILLVKEEFPGTWEVLSKGNFSGRLRISEELEVDLQRGTSARFQYSGDLMDLIWKYGDMPLPPYIGRSPDQSDKQAYQTVYATKEGSIAAPTAGLHFTGPLLEAIAS

SEQ ID NO: 69371 - protein, 346 aa, Nitrospira defluvii
  misc_feature (1)..(346): tr|D8PC12|D8PC12_9BACT S-adenosylmethionine:tRNA ribosy ltransferase-isomerase OS=Nitrospira defluvii OX=330214 GN=queA PE=3 SV=1
MLLSEFDFPFDPVLVADHPVIPRDRARLLVLDRQGGERLHRQVADLPSLLQSGDLVVVNNTKVMPARVPAQVRSNGRLLDLLFVEDLGQGLWEVLIKGRFRPGAVIEFPGGGTGEIVERSRLRTTVRVWGVTSVYELMQATGTMPLPPYIKREPSADDQEWYQTMFAQHEGAIAAPTAGLHFTRELVQALTGKGIELAEVTLHVGPGTFRSVKTERIEDHRMLAERIEVSAQTVEQIRRVRERGHRVVAVGTTVVRALETAGRGGRGIEPFQGQAELFITPGFEFQVIDAMVTNFHLPRTTLLMLVSAFVGVQPLRAAYEEAVAERYRFYSYGDAMLIGSGWATVT

SEQ ID NO: 69372 - protein, 344 aa, Nitrospira japonica
  misc_feature (1)..(344): tr|A0A1W1I5C1|A0A1W1I5C1_9BACT S-adenosylmethionine:tRN A ribosyltransferase-isomerase OS=Nitrospira japonica O X=1325564 GN=queA PE=3 SV=1
MQVAEFDFPFDPRLVASEPVLPRDQAKLLVLPASHRSSHSMMHHRVADLPHLLAPGDLIVVNDTKVMPVRLTGRKQPTGNAVDILFVREVAEGLWEVLIKGRLRPGQRIDLGVDGVLEVQSRDRVRTVVRLDCAMSPREFFARWGMMPLPPYIDRAPGDMDREWYQTVFAQEEGAIAAPTAGLHFTPELLTRLNQAGIGVARVTLHVGIGTFKPITTDHVEDHRMGSEWFEVGAETVQAIAHTKEKGGRIVAVGTTVVRALETAAARQGALGPQRGETSLFITPGFSFQVVDALMTNFHLPKTTLLMLVSAFAGTSLLRQAYEEAVRERYRFYSYGDAMLILKS

SEQ ID NO: 69373 - protein, 339 aa, Nitrospira lenta
  misc_feature (1)..(339): tr|A0A330L2H0|A0A330L2H0_9BACT S-adenosylmethionine:tRN A ribosyltransferase-isomerase OS=Nitrospira lenta OX=1 436998 GN=queA PE=3 SV=1
MNLSEFDFPFDPTLIASEPVLPRHAARLLCLDSQTGNLSNRRVADLPELLAPGDLLVVNDTKVMAARLSGRKQPTGTVVDVLFVKDCGDAVWEVMLKGHFRVGQAILFEGDASATVVQRDEHGTKIKVASSVPVVEFLRTHGCMPLPPYIKRSAQPEDHVWYQTCFADREGAIAAPTAGLHFTPELMARLRDRGVETAAVTLHVGPGTFKPVVVERIEEHQMGTEWFDVSERTVEAILKTKRAGGRVIAIGTTAVRALESAAQQAGGLQPTVGESRLFISPGFRFNVVDALMTNFHLPRTTLLMLVSALAGVDMMRKAYAEAVEQRYRFYSYGDAMLIL

SEQ ID NO: 69374 - protein, 339 aa, Nitrospira moscoviensis
  misc_feature (1)..(339): tr|A0A0K2G8N3|A0A0K2G8N3_NITMO S-adenosylmethionine:tRN A ribosyltransferase-isomerase OS=Nitrospira moscoviens is OX=42253 GN=queA PE=3 SV=1
MQLSDFDFPFDPNLVAAQPVEPRDRARLLVLERSTGALMHRHVADLPALLHPGDLLVLNDTKVVPARITGITHPTGKPVEILFVKDLGGDCWEVMAKGNLRVGQILDFGPGARATIVQRDAAGTRVKVQSRIPVRDILYAQGSMPLPPYIKRPATDEDRRWYQTVFAKHEGAIAAPTAGLHFTPEVLAELERWGIGRTMVTLHVGPGTFKPVTTERIEDHRMGAEAFEIGEETARAVERTKHAGRRVVAVGTTVVRALETAAAAQGRVVPMAGDSTLFITPGFRFQAIDALMTNFHLPKTTLLMLVSALAGLDLVRKAYEEAVRERYRFYSYGDAMLIL

SEQ ID NO: 69375 - protein, 339 aa, Nitrospira sp.
  misc_feature (1)..(339): tr|A0A177QGH4|A0A177QGH4_9BACT S-adenosylmethionine:tRN A ribosyltransferase-isomerase OS=Nitrospira sp. SCGC A G-212-E16 OX=1799664 GN=queA PE=3 SV=1
MQLSEFDFPFDSSLIADHPSLPRDHARLLVLQRHDRSLAHRRVDELPDLLHPGDLLVVNNTKVLAARVAGRKHPSGAEVEILFVKDLGDATWEVLIKGTFRPGQILEMGAEAVAVVVERGPIRTTVRVESPIPLSEWLRQYGRMPLPPYMKRAPTDQDREWYQTLFAQHEGAIAAPTAGLHFTPSLLARLQQRGIGLTTVTLHVGVGTFKPVVVDQIEDHRMGAEWIEVGAEAVRAIEQVRVTGKRIVAVGTTVARALETAARADGLIRPYRGETDLFITPGCPFKVVDTLLTNFHLPRTTLLMLVSALTGTEFLRQAYTEAVRERYRFYSYGDAMLIL

SEQ ID NO: 69376 - protein, 346 aa, Nitrospira sp.
  misc_feature (1)..(346): tr|A0A3C1QF10|A0A3C1QF10_9BACT S-adenosylmethionine:tRN A ribosyltransferase-isomerase OS=Nitrospira sp. OX=701 25 GN=queA PE=3 SV=1
MLLSEFDFPFDPVLVADHPVIPRDRARLLVLDRQGGERVHRQVADLPSLLKPGDLVVVNNTKVMPARVPAQVRSNGKLLDLLFVEDLGQGIWEVLIKGRFRPGAVIEFPGGGTGEIVERSRLRTTVQVSGVASVYELMQATGTMPLPPYIKREPSADDQEWYQTMFAQHEGAIAAPTAGLHFTRELVQALARKGIELAQVTLHVGPGTFRSVKTERIEDHRMLAERIEVSAQTVAQIRLTRERGNRVVAVGTTVVRALETAARGGRGIEPFQGPAELFITPGFEFQVIDAMVTNFHLPRTTLLMLVSAFVGVQPLRAAYEEAVAQRYRFYSYGDAMLIGSGWATVT

SEQ ID NO: 69377 - protein, 344 aa, Nitrospiraceae bacterium
  misc_feature (1)..(344): tr|A0A3A4WLB2|A0A3A4WLB2_9BACT S-adenosylmethionine:tRN A ribosyltransferase-isomerase OS=Nitrospiraceae bacter ium OX=2026770 GN=queA PE=3 SV=1
MKLSDFDYHIPREQIAQHPLPERDVSKLFVVRRDLNKFEHATFIDLTGYLRAGDVLVLNDTRVIPARLFGTKSSGGRVEILLLKELCANTWEALVKGLREGNVIVNKDIIAHVSRSNGAPATVRFEFNNVGAGFKPAPTPDIKKILHNIGVMPLPPYIKRDPVESDMKQYQTVYADKEGAVAAPTAGLHFTERLLDALRVKGVEIQYVTLHVGHGTFKPVKADDVRQHTMDKESYEIPGPTACAINRAKSEGRRIIAVGTTVTRTLESAALPTPSGPGTASIFIYPGYRFRVIDALITNFHQPKSTPVMLTSAFAGLNLLKKAYSTARQRGYRFFSYGDAMLII

SEQ ID NO: 69378 - protein, 347 aa, Nitrospiraceae bacterium
  misc_feature (1)..(347): tr|A0A349EK31|A0A349EK31_9BACT S-adenosylmethionine:tRN A ribosyltransferase-isomerase OS=Nitrospiraceae bacter ium OX=2026770 GN=queA PE=3 SV=1
MITEAAEHLLLSDFDYDLPEALIAQEPLPARDQSRLLVLGRSSGRIEHHRFHDILELLQDGDLLIVNNTKVFSCRLPARKPGGGKAEVFLLAEQDPNVWQALVKAPPARGKRLVIDEGVEAEVLSQGDDGLSTVRFHCTGNIRDLLPSLGKTPLPPYIKREPRTGDQERYQTVFASQPGAVAAPTAGLHFTEGLIETLKQQGVQMASVTLHVGPGTFLPVRCERVAEHRMFSESYEVPQETAVAINSARSEGRRVIAVGTTSVRTIETAAGPDGRIAAGRGSSSLYIYPGFTFKITDGLITNFHLPKSTLLLLVSAFAGRESVLAAYQEAVAKKYRFFSYGDAMLIS

SEQ ID NO: 69379 - protein, 340 aa, Nitrospirae bacterium
  misc_feature (1)..(340): tr|A0A1G1HZN3|A0A1G1HZN3_9BACT S-adenosylmethionine:tRN A ribosyltransferase-isomerase OS=Nitrospirae bacterium RIFCSPLOW2_12_42_9 OX=1801722 GN=queA PE=3 SV=1
MKQRIEDFDYEFDPELIAQYPSEKRDHSRLLVLDRMSGLIKHRRFFEIRDYLKPGDVLVLNNTKVVPCRLFGKKAKTGGSVELLLIKKLGNDIWEVMAKGRVNKGTRIIFTSSFSCEVMESSHERTVVRFYYKGDWVDHISRIGSVPIPPYIKREPIEEDREWYQTVYAKEDGSIAAPTAGLHFTEDILYSLSSDGIMIVFITLHVGTGTFKPVKAELIEDHKMGYEWFEVGKEAVDIIKKARCNNGRIVAAGTTAVRALEKAAIDGELKPAKGETDLFIYPGFKFNVVDSMITNFHLPKSTLLMLVMAFAGRENILNAYNEAVRLRYRFYSYGDAMLII

SEQ ID NO: 69380 - protein, 335 aa, Nitrospirae bacterium
  misc_feature (1)..(335): tr|A0A1G1FXY7|A0A1G1FXY7_9BACT S-adenosylmethionine:tRN A ribosyltransferase-isomerase OS=Nitrospirae bacterium RBG_13_39_12 OX=1801703 GN=queA PE=3 SV=1
MKVADFDFSLPKTLIAKRPLKERSSSRLLVLHRDGTIEHKLFSDLPSYLNKGDLLLMNNTKVFPARLTGIKQNGGNIEILMVRKNPDNSWEVFTKGKFNGTLKISDNMLLELYNGKKAVFKYSGDFMDIIWEKGNMPLPPYIRRLPDESDKERYQTVFAKKEGSIAAPTAGLHFTDRLLKVIKSKGTILRELTLHVGVGTFRPIRTENIEEHYMDLEYFELDKDLISEIKKIKVSDNRVFSVGTTTTRAIEGYISGRCNVTSRNGKLSGITDAFIYPGYKFRIVDSLITNFHLPRSTPLMLTSAICSWEKLKTAYTEAVARRYRFLSYGDAMLIL

SEQ ID NO: 69381 - protein, 337 aa, Nitrospirales bacterium
  misc_feature (1)..(337): tr|A0A4Y7WTS1|A0A4Y7WTS1_9BACT S-adenosylmethionine:tRN A ribosyltransferase-isomerase OS=Nitrospirales bacteri um LBB_01 OX=2552947 GN=queA PE=3 SV=1
MLNTSDFNYDLPAELIAMRPAEKRQRARLMVLKRDGSTVQSVFENLPEYLNSGDMLILNETKVVPARLIGKTQGGKPLDILITGKTAEGRHSILSRGKYSGILYFDGGFSCRVYEGKEAEFQSSENFTKLIFKNGLMPLPPYITRHPEDSDKERYQCVYAKYEGSIAAPTAGLHFTEDLLAQIKTKGVTIRAVTHHVGTGTFRPVKTKFVEEHRMDEERFEMNSSLVHDIASVRANGGRVIYVGTTVTRAVESVLSGVAVIDDSTDGKLRGRTSFFIYPGYVFKGADAIITNFHLPRSTPLFLVSAFIGRDNVLSAYKEAIKGGYRFFSYGDAMLLI

SEQ ID NO: 69382 - protein, 339 aa, Nitrospirales bacterium
  misc_feature (1)..(339): tr|A0A524ITF8|A0A524ITF8_9BACT S-adenosylmethionine:tRN A ribosyltransferase-isomerase OS=Nitrospirales bacteri um OX=2358460 GN=queA PE=3 SV=1
MNLSDFHFPFDPTLVAKHPIHPRDHARLLVLNRHQGQIVDRQVKDLPEILQPGDLLVVNDTKVIPARLLGKKVPSGGRIEMLFVKAIDATHAEVLMNGRVGIGQRVEFQGAGQAQVVEKQPGRTVIHWLGPDSLQAHLQQYGALPLPPYLKREPVVGDNEDYQTMFANVEGAVASPTASLHFTPSLIQALLDNGIGCATITLHVGPGTFQPVKSEVVEEHTMHAEWFEVSEHVVKQIQEVRQRGGRVVAVGTTVARSLESAAKAGREVRSGSGETQLFILPGYQFKVVDVLMTNFHFPETTLLMLVSAFAGVELIRDAYAHAMQERYRLYSYGDAMLIQ

SEQ ID NO: 69383 - protein, 357 aa, Nocardia amikacinitolerans
  misc_feature (1)..(357): tr|A0A285LU25|A0A285LU25_9NOCA S-adenosylmethionine:tRN A ribosyltransferase-isomerase OS=Nocardia amikacinitol erans OX=756689 GN=SAMN04244553_5384 PE=3 SV=1
MSKHGNVRAATESAGWARSFELPDRHNADSPPEARGLARDEVRLLVAGDQLTHARFRELPRYLRPGDLVVVNNSATTSAAVDATLADLPITLHFATWLDDGGWVVEARTRDRTPLPDRELRGGTVFELAGGARATLREPWLPAARRLWIADVTVDPRVLMSEHGRPITYSYVPRRWSPSYYTTVFGRIPGSAEMASAARPFTQDVVLDLVTSGVSLAPITLHTGVSSPEAGEPPSPERFAVPAATARLVIDTKNAGGRVVAVGTTVTRALESAADEDGRVRPAGGWTDLVLGANRPARVVDGLITGWHAPGASHLDLLVAVAGETTVRRAYAEALDTGYLWHEFGDSALLFRDDGRH

SEQ ID NO: 69384 - protein, 353 aa, Nocardia bhagyanarayanae
  misc_feature (1)..(353): tr|A0A543FBU7|A0A543FBU7_9NOCA S-adenosylmethionine:tRN A ribosyltransferase-isomerase OS=Nocardia bhagyanaraya nae OX=1215925 GN=FB390_2910 PE=3 SV=1
MSGGAATPSAAWARTFELPDRHSADSPPEARGLARDDVRLLVAGDRSTHARFRELPRYLRSGDLVVVNNSATTSAAVDATLADLPITLHFATWLDDGGWVVEVRTRERTPLTDRELRAGAVLELAGEARATLREPWLPGARRLWIADVTVDPRILMGEHGRPITYSYVPRRWSPSYYTTVFGRIPGSAEMPSAARPFTHDVVLDLVTSGVSLAPVTLHTGVSSPEAGEPPSPERFAVPAATARLVNDTKSAGGRIVAVGTTVTRALESAADADGRVRPAGGWTELVLAANRPARVVDGLITGWHAPGASHLDLLVAVAGETTVRRAYTEALDTGYLWHEFGDSALLFRGDGRD

SEQ ID NO: 69385 - protein, 346 aa, Nocardia brasiliensis
  misc_feature (1)..(346): tr|A0A379BWT1|A0A379BWT1_9NOCA S-adenosylmethionine:tRN A ribosyltransferase-isomerase OS=Nocardia brasiliensis OX=37326 GN=queA PE=3 SV=1
MTVLVDRPRFVLPPERNAVAPPEARGLARDEVRLLVAGAGLTHARFRELPRQLRPGDLVVVNNSATLAAAVDGRLDDRPMALHFATWLDDGGWVVEVRTTARTPFPAEELSAGAVIRLPDGVRATLRSPWLAGARRLWVADLTADPRQLFAVYGYPITYSYVPQRWSPSYYETVFGRVPGSAEMPSAARPFTERLVLDLVAAGVGLAPITLHTGVSSPEAGEPPSPERLTVPASTARRVNDTKAAGGRVIAVGTTVTRALETAGDAAGVVHPVLGWTELVLGAGRPARVVDGLITGWHAPGASHLDLLVAVAGEATVRAAYAAALETGYLWHEFGDSALLLGGADD

SEQ ID NO: 69386 - protein, 342 aa, Nocardia brasiliensis
  misc_feature (1)..(342): tr|K0F4B7|K0F4B7_9NOCA S-adenosylmethionine:tRNA ribosy ltransferase-isomerase OS=Nocardia brasiliensis ATCC 70 0358 OX=1133849 GN=O3I_032325 PE=3 SV=1
MTVLIDRPRFVLPPERNAVAPPEARGLARDEVRLLVAGASLTHARFRELPRQLRPGDLVVVNNSATLAAAVDGRLDDRPMALHFATWLDDGGWVVEVRTTARTPFPAEELSAGAVIRLPDGVRATLRSPWLPGGRRLWVADLTADPRQLFAVYGYPITYSYVPQRWSPSYYETVFGRVPGSAEMPSAARPFTERLVLDLVAAGIGFAPITLHTGVSSPEAGEPPSPERLTVSASTARRVNDTKAAGGRVIAVGTTVTRALETAGDAAGVVHPVHSWTELVLGARRPARVVDGLITGWHAPGASHLDLLVAVAGQATVDAAYAAALETGYLWHEFGDSALLLG

SEQ ID NO: 69387 - protein, 343 aa, Nocardia mexicana
  misc_feature (1)..(343): tr|A0A370HCE9|A0A370HCE9_9NOCA S-adenosylmethionine:tRN A ribosyltransferase-isomerase OS=Nocardia mexicana OX= 279262 GN=DFR68_102502 PE=3 SV=1
MTVTLDEFTVPAERAATAPPEARGSARDGVRLLVSDRGVLTHARFRELPRFLRPGDLVVVNNSATLAAAVDARYLGHPAVLHFATRLDDGGWVVELRSPDGVPFTAANPEPAARVELPGATAVLRGPWLPPARRLWIADIDAAVPQLLARHGRPITYSYVTQRWSPDYYRTVFGREPGSAEMPSAGRPFTDRLVTDLVTTGVTLAPITLHTGVSSPEAGEPPSPERYAVPENTARLVNSTRATGGRVIAVGTTVTRALESAADPSGRLHPASGWTEVVLGAARPARVVDGLITGWHEPGASHLELLQAVAGTETVRTAYRTALDSGYLWHEFGDTALLFTPSG

SEQ ID NO: 69388 - protein, 343 aa, Nocardia ninae
  misc_feature (1)..(343): tr|A0A511M8U7|A0A511M8U7_9NOCA S-adenosylmethionine:tRN A ribosyltransferase-isomerase OS=Nocardia ninae NBRC 1 08245 OX=1210091 GN=NN4_14800 PE=3 SV=1
MTVTLAQPSFVLPPERNAVAPPEARGLARDGVRLLVAGDSLTHARFCELPQHLTPGDLVVVNNSATLAAAIDGRMDSGPIAVHFATWLDDGGWVVELRTTARTPVPAEELSAGMRIQLPEGAHATLREPWLAGARRLWIADVTTDPRRLLDVYGYPITYSYVPQRWSASYYSTVFGRILGSAEMPSAARPFTEHLVLDLIAAGIGIAPITLHTGVSSPEAGEPPSPERFAVPDATARTVNDTKAAGGRVIAVGTTVTRALETAADPSGRVHPAHGWTELVLGEDRPARVVDGLITGWHAPGASHLDLLVAVAGETTVHAAYSVALDTGYLWHEFGDSALLLRG

SEQ ID NO: 69389 - protein, 385 aa, Nocardia puris
  misc_feature (1)..(385): tr|A0A366E3D9|A0A366E3D9_9NOCA S-adenosylmethionine:tRN A ribosyltransferase-isomerase OS=Nocardia puris OX=208 602 GN=DFR74_101910 PE=3 SV=1
MKVEGRRFRESGRAGSPDRHVDSGRIGGAREGGPGRVYRPFDANFVLPERLNATAPPEARGLSRDDVRLLVADGGLTHTRFHRLPEHLAPGDVLVVNNSAMVTAAVEGEVAGAPVVVHFSTWLDDGTWVIELRTKDRLPLADRSFEPGDAVDLPGDARMTLRAPWLPGGRRLWIAEVSTDVRALLWQYGNPITYAYVPERWLPTYYSTVFGRERGSAEMPSAARPFTHELVLDLVASGVWLAPITLHTGVSSPEAGEPPSPERFDVPAATAHLVNDARAAGGRIVAVGTTVTRALESATAPDGFVHAASGWTDLVLGPARPARVVDGLITGWHAPGASHLDLLVAVAGEDTVRRAYAEALDAGYLWHEFGDSALLFAPDRTLRSR

SEQ ID NO: 69390 - protein, 351 aa, Nocardia seriolae
  misc_feature (1)..(351): tr|A0A0B8NAT9|A0A0B8NAT9_9NOCA S-adenosylmethionine:tRN A ribosyltransferase-isomerase OS=Nocardia seriolae OX= 37332 GN=NS07_v2contig00039-0031 PE=3 SV=1
MTAGLDAHAFVLPDELSATSPPEARGLGRDEVRLMVADAGTLTHARFRELASFLRPGDLVVVNNSAMINAAVDAHYDGDAAVLHFSTRLDDGRWAVELRDPAGVPWRGRPLECGASVRLPAGYVATVWARWLPDGDRLWIADIIAPGRTAGEDARVLLARHGRPIAYSYVTERWSASYYRTVFGREPGSAEMPSAGRPFTEGLVTELVAGGVGLAPITLHTGVSSPDSGEPPSPERFAVPEMTARLVNATHAERGRVVAVGTTVTRALESATGADGSVHAAAGWTELVLDGSRPARAVDGLITGWHAPGASHLHLLESVAGAGVVREAYRAALESGYLWHEFGDSALLLRE

SEQ ID NO: 69391 - protein, 351 aa, Nocardia seriolae
  misc_feature (1)..(351): tr|A0A1I9ZFA1|A0A1I9ZFA1_9NOCA S-adenosylmethionine:tRN A ribosyltransferase-isomerase OS=Nocardia seriolae OX= 37332 GN=queA PE=3 SV=1
MTAGLDAHAFVLPDELSATSPPEARGLGRDEVRLMVADAGTLTHARFRELASFLRPGDLVVVNNSAMINAAVDAHYDGDAAVLHFSTRLDDGRWAVELRDPAGVPWRGRPLECGASVRLPAGYVATVWARWLPDGDRLWIADIIAPGRTAGEDARVLLARHGRPIAYSYVTERWSASYYRTVFGREPGSAEMPSAGRPFTEGLVTELVAGGVGLAPITLHTGVSSPESGEPPSPERFAVPEMTARLVNATHAERGRVVAVGTTVTRALESATGADGSVHAAAGWTELVLDGSRPARAVDGLITGWHAPGASHLHLLESVAGAGVVREAYRAALESGYLWHEFGDSALLLRE

SEQ ID NO: 69392 - protein, 343 aa, Nocardia sp.
  misc_feature (1)..(343): tr|A0A4P7H1K5|A0A4P7H1K5_9NOCA S-adenosylmethionine:tRN A ribosyltransferase-isomerase OS=Nocardia sp. CS682 OX =1047172 GN=DMB37_10960 PE=3 SV=1
MTITLAQPSFVLPPERNAVAPPEARGLARDEVRLLVAGDGLTHARFRELPQHLTQGDLVVVNNSATLAAAIDGRMNCGPIAVHFATWLDDGGWVVELRTTARTPVPVEELSAGMHIQLPEGAHATLREPWLAGARRLWIADITTDPRRLLDVYGYPITYSYVPQRWSASYYSTVFGRIPGSAEMPSAARPFTEHLVLDLIAAGIGIAPITLHTGVSSPEAGEPPSPERFAVPDSTARTVNDTKAAGGRVIAVGTTVTRALETAADPSGRVHPAHGWTELVLGEDRPARVVDGLITGWHAPGASHLDLLVAVVGETTVHAAYSAALDTGYLWHEFGDSALLLRG

SEQ ID NO: 69393 - protein, 354 aa, Nocardia sp.
  misc_feature (1)..(354): tr|A0A3A4JWS7|A0A3A4JWS7_9NOCA S-adenosylmethionine:tRN A ribosyltransferase-isomerase OS=Nocardia sp. YIM PH 2 1724 OX=2340916 GN=D5S18_16630 PE=3 SV=1
MTVLVSARTFHLPPERSATAPPEARGLARDEVRLLVTGGAESNRNELTHAVFRELPRQLRPGDLVVVNNSATLAAAVDGVLDGAPVVVHFSTRLEDGRWAIEVRLPQQRPYPGESLHADTVIGLPGGARATLREPWLPPARRLWIADIDVAVLGLLAAHGRPITYSYVPQRWSADYYETVFGRIPGSAEMPSAARPFTQRLVLDLMTSGVGLAPITLHTGVSSPETGEPPSPERFAVPAATARLVNEARAAGGRIIAVGTTVTRALESAADPSGRVESASGWTELVLGEHRPARVVDALITGWHAPGASHLDLLVAVAGADTVAAAYSSALDNGYLWHEFGDSALLFGWTSRSR

SEQ ID NO: 69394 - protein, 344 aa, Nocardia tenerifensis
  misc_feature (1)..(344): tr|A0A318KE20|A0A318KE20_9NOCA S-adenosylmethionine:tRN A ribosyltransferase-isomerase OS=Nocardia tenerifensis OX=228006 GN=DFR70_105406 PE=3 SV=1
MTVTLARRSFVLPPERNAVAPPEARGLARDEVRLLVAGDGLTHARFRELPAHLRPGDLVVVNNSATLAAAVDGRMADGPIALHFATWLDDGGWVVEVRTTTRTPYPTDELSAGTTIRLPEGARATLREPWLPGGRRLWIADLTVDPRRLLEVYGYPITYSYVPQRWSASYHSTVFGRIPGSAEMPSAARPFTERLVLDLIAAGVGLAPITLHTGVSSPEAGEPPSPERFVVPDSTARAVNDAKAAGGRVIAVGTTVTRALESAADPAGRVHAASGWTELVLGADHPARAVDGLITGWHAPGASHLDLLVAVAGEATVHEAYSAALDTGYLWHEFGDSALLLRGR

SEQ ID NO: 69395 - protein, 341 aa, Nocardia terpenica
  misc_feature (1)..(341): tr|A0A291RFW2|A0A291RFW2_9NOCA S-adenosylmethionine:tRN A ribosyltransferase-isomerase OS=Nocardia terpenica OX =455432 GN=CRH09_10020 PE=3 SV=1
MTVILENFALPADRAATEPPEARGLARDDVRMLVSDNGVHTHARFRELPRFLRPGDLVVVNNSATLNAAVDAHYLGRPVVLHFAARLDDGGWVVELRDPAGVPFTAAEPKPGRRVLLADTAVTLRRPWLPPARRLWIADPDGDVPALLARHGRPITYSYVAQRWSPEYYRTVFGREPGSAEMPSAGRPFTDNLVTDLVAAGVTLAPITLHTGVSSPETGEPPSPERYTVPEVTARLVNATHATGGRVIAVGTTVTRALESATVGTEVHPASGWTDLILDADHPTRSVDALITGWHEPGASHLHLLEAVAGTDTVRDAYEAALSTGYLWHEFGDTALLFRPR

SEQ ID NO: 69396 - protein, 341 aa, Nocardia terpenica
  misc_feature (1)..(341): tr|A0A161WR50|A0A161WR50_9NOCA S-adenosylmethionine:tRN A ribosyltransferase-isomerase OS=Nocardia terpenica OX =455432 GN=AWN90_21010 PE=3 SV=1
MTVILENFALPADRAATEPPEARGLARDDVRMLVSDNGVHTHARFRELPRFLRPGDLVVVNNSATLNAAVDAHYLGRPAVLHFAARLDDGGWVVELRDPAGVPFTAAEPKPGRRVLLAGTAVTLRRPWLPPARRLWIADPDGDVPALLARHGRPITYSYVAQRWSPEYYRTVFGREPGSAEMPSAGRPFTDNLVTDLVAAGVTLAPITLHTGVSSPETGEPPSPERYTVPEVTARLANATHATGGRVIAVGTTVTRALESATVGAEVRPASGWTDLILDADHPTRSVDALITGWHEPGASHLHLLEAVAGTDTVRDAYEAALDTGYLWHEFGDTALLFRPR

SEQ ID NO: 69397 - protein, 353 aa, Nocardioides albertanoniae
  misc_feature (1)..(353): tr|A0A543A7U3|A0A543A7U3_9ACTN S-adenosylmethionine:tRN A ribosyltransferase-isomerase OS=Nocardioides albertan oniae OX=1175486 GN=FB381_2553 PE=3 SV=1
MTLLVEHPTTTFPAPDDTTAPAPAEWRGRGRDEVRMLVARPDGVSHARFGDLADHLSPGDLVVVNDSATEARQLDADMVGRGRVVVHLAQRLDSGWALEIRSAPDASRAVLDASEGDVVVTGGLRATLLEPYPDGRTSSPTGEGNRLWRAEITGDVAAELEGAGRPIAYGYLDRRYPLSAYQTVFGRRPGSAEMPSAARPFTQSLVTDLVSRGIQIAPITLHTGVSSQEAGEAPGAEWFEVSETTARVVEQTRLAGGRVVAAGTTVTRALESAVVEATGVVRAASGWTDRVVTPANPPYVVNGLITGWHDPQASHLLLVEAVAGTELTQSAYDAAVAEGYLWHEFGDSALLLP

SEQ ID NO: 69398 - protein, 350 aa, Nocardioides alpinus
  misc_feature (1)..(350): tr|A0A1I0ZBK4|A0A1I0ZBK4_9ACTN S-adenosylmethionine:tRN A ribosyltransferase-isomerase OS=Nocardioides alpinus OX=748909 GN=SAMN05192575_105167 PE=3 SV=1
MTALAETPHTHFTASAFAPRPAEERGLARDEVRLLVGTPDGLEHARFRDLPDHLRAGDVLVVNTSATVPAEVDAVLDGRPVVLHVAHALDDGDRVVELRTAPDAARALLDASTGAAVSVGDVRLVLRSPWPDARPSSPTGEGNRLWRASVRGDLDRQLDRDGRPIAYGYLDRRYPISAYQTVFGTRPGSAEMASAGRPFTHELVTRLVTAGVQIAPITLHTGVSSQEAGEAPGPEWFEVPPSSARTINTARAAGGRVIAVGTTATRAVESTVRGGHVVAGRGWTSRVITPGDPPCVVDGLVTGWHDPMASHLLLVEAVAGQRLTQAAYDAAVAEGYLWHEFGDAALLLRR

SEQ ID NO: 69399 - protein, 322 aa, Nocardioides bacterium
  misc_feature (1)..(322): tr|A0A3D0S4M1|A0A3D0S4M1_9ACTN S-adenosylmethionine:tRN A ribosyltransferase-isomerase OS=Nocardioides bacteriu m OX=1565122 GN=DEQ43_19910 PE=3 SV=1
MSLAATAPPEARGLARDEVRMAVVTSERTHHRQARELPLWLEPGDLLVVNTSATLPSALPGGVHVSAELDDGSWVVELRRADGRGPRLPQPGEVVRLPGGVRLRLHQAHPAGQTRLWRATTLPVVDRVAYLRRYGEPIRYSYLHGSWPIEDLQNVYADVPGSAEMPSAGRPLSREVLVGLMSAGVVVAPLVLHTGVSSQEGHEPPQPEWFAVPSPTADLVELTRSRGGRVVAVGTTVARALETWAEGRATGWTSLVLAPARPAYVVDGLLTGLHEPEASHLDLLRAVAGEELVARAYADIATPDAPAYLWHEFGDSMLLLPG

SEQ ID NO: 69400 - protein, 377 aa, Nocardioides bacterium
  misc_feature (1)..(377): tr|A0A4V3YR85|A0A4V3YR85_9ACTN S-adenosylmethionine:tRN A ribosyltransferase-isomerase OS=Nocardioides bacteriu m OX=1565122 GN=E7Z54_13445 PE=3 SV=1
MTLLSERPAVRFLAPRDTFAPAPAERRGLRRDQVRLLVADEDRGLTHTSFAHLAEHLAPGDVVVVNDSATVPAQLDAVSTRHGPVVVHLATGLDDGSWVVEVRRAPDADRAVLDAEDGDLLSVAAGTTYLRLTEPYPEPGSSPTRTGNRLWRAVIADGDRVLRGVARRYGRPISYGYLADRYPLADYQTVFSHRPGSAEMPSAGRPFTADLVTRLVSRGVTITPVTLHTGVSSQEAGESPQPEWFEVPGSSAAVVNAARAGGGRVVAVGTTVTRALESAVVAAADGSARLVARSGWTTRVVTPLEPPRVVDGLVTGWHDPEASHLLLVEAVAGAELAQQAYEAAVAEGYLWHEFGDSCLLLPRAEGVRPGRRDQGES

SEQ ID NO: 69401 - protein, 356 aa, Nocardioides currus
  misc_feature (1)..(356): tr|A0A2R7YYV6|A0A2R7YYV6_9ACTN S-adenosylmethionine:tRN A ribosyltransferase-isomerase OS=Nocardioides currus O X=2133958 GN=C7S10_05675 PE=3 SV=1
MTTLSEAPGVHFEASDFAPQPAESRGLARDEVRLLVGTGDGVTHARFRDLPDHLRAGDVLVVNNSATVPGEVDATLHGAEVVLHVAARLDDGDRVVELRSAPDASRALLDAWPGDVVLAGDVRVTLAAPWPTGEASSPTRAGNRLWRARVRGDFDAVLARTGRPIAYGYLDRPYPLQAYQTVFGTRPGSAEMASAGRPFTEALVTSLVARGVAFAPVTLHTGVSSQEAGEAPGPEWFEVPDASARTVNAARAGGGRVVAVGTTATRAVESAVRDGALVSATGWTDRVVTPAAPPVVVDGLITGWHDPHASHLLLVEAVAGRALTQAAYDAAVANHYLWHEFGDSALLMPWRREGSE

SEQ ID NO: 69402 - protein, 349 aa, Nocardioides exalbidus
  misc_feature (1)..(349): tr|A0A1H4QIU1|A0A1H4QIU1_9ACTN S-adenosylmethionine:tRN A ribosyltransferase-isomerase OS=Nocardioides exalbidu s OX=402596 GN=SAMN04489844_1856 PE=3 SV=1
MSTLTETPHTRFAASDFAPQPAEARGLERDEVRLLVGTPDGLSHVRFRDLPDHLRPGDVLVVNTSATVNAEVDATIDGQPVVLHVAHHLEDGDRVVEVRSAPDAGRAVLDRAAGDVVRVGDVRLVLRSPWPGEASSPTGAGNRLWRASVRGDLDRQLGWNGRPIAYGYLDWRYPLADYQTVFGTRPGSAEMASAGRPFTPSLVTRLVTAGVQLAPVTLHTGVSSQEAGEAPGPEWFEVPPTSARTINVARENGGRVIAVGTTATRAVESSVLGRHVVASRGWTSRVVTPAQPPRVVDGLVTGWHDPMASHLLLVEAVAGERLTQAAYDAAVAEGYLWHEFGDSALLLRR

SEQ ID NO: 69403 - protein, 349 aa, Nocardioides ganghwensis
  misc_feature (1)..(349): tr|A0A4Q2SH65|A0A4Q2SH65_9ACTN S-adenosylmethionine:tRN A ribosyltransferase-isomerase OS=Nocardioides ganghwen sis OX=252230 GN=EUA07_06425 PE=3 SV=1
MTLLHETPHTRFEASSFAPQPPEARGLARDEVRLLVATPDGISHGQFRDLPDHLRAGDVLVVNTSATVAAEVDADLDGRAVVLHVAHRLDDGDSVVELRTAPDAARAVLDASAGAVVRVGDVRLTLRAPWPGGASSPTGSGNRLWRASVRGDLDRQLAWNGRPISYGYLDRRYPLADYQTVFGTRPGSAEMASAGRPFTPVLVTRLVTAGVQLAPVTLHTGVSSQEAGEAPGPEWFEVPATSARVINQARDNGGRVVAVGTTATRAVESAVLGRHVVASRGWTSRVVSPAQPPRVVDGLVTGWHDPMASHLLLVESVAGPRLTQAAYDAAVAEGYLWHEFGDSALLLRR

SEQ ID NO: 69404 - protein, 349 aa, Nocardioides glacieisoli
  misc_feature (1)..(349): tr|A0A4Q2RR16|A0A4Q2RR16_9ACTN S-adenosylmethionine:tRN A ribosyltransferase-isomerase OS=Nocardioides glacieis oli OX=1168730 GN=EUA06_12305 PE=3 SV=1
MTQLTETPHTHFAASAFAPQPAEERGLARDEVRLLVGTPDGLSHERFRDLPDHLAAGDVLVVNTSATIAAEVDAELDNRPVVLHVAHHLDDGDRVVELRTAPDAGRAILDRRPGDEITVGDVRLTLREPWPGAASSPTGVGNRLWRATVRGDLDRQLDWNGRPIAYGYLDRRYPLASYQTVFGRHPGSAEMASAGRPFTDALVTRLVTAGVQLAPVTLHTGVSSQEAGEAPGPEWFEVPPTSARIINGARANGGRVIAVGTTATRAVESAVNGRHVVAHRGWTDRVITPEAPPQVVDGLVTGWHDPMASHLLLVEAVAGQRLTQAAYDAAVAEGYLWHEFGDSALLMRR

SEQ ID NO: 69405 - protein, 371 aa, Nocardioides immobilis
  misc_feature (1)..(371): tr|A0A417XYY5|A0A417XYY5_9ACTN S-adenosylmethionine:tRN A ribosyltransferase-isomerase OS=Nocardioides immobili s OX=2049295 GN=D0Z08_18850 PE=3 SV=1
MPLLDERPATSFAAPRSVFAPAPAERRGVARDRVRLLVADADRGLTHTRFTHLTEHLRPGDVVVVNDSATVAAQLDALSDRHGPVVVHLAIPLPDDTWVVEVRRAPDADRAVLDAEVGDVLEVAAGVARLRLVAPSISVESTSAHSVSLVNSPTGTGNRLWRAEAEGDLAAAARRYGRPISYGYLADRYPLSDYQTVFGHRPGSAEMPSAGRPFTSELVTRLVAGGVMVAPVTLHTGVSSQEAGEAPQAERFEVTATTAAVVNAARAGGGRVIAVGTTVTRALESAVEPERDGSRLVPARGWTSRVVTPADPPRIVDGLITGWHDPEASHLLLVEAVAGAELTQRAYAAAVDARYLWHEFGDSALLLPTPR

SEQ ID NO: 69406 - protein, 350 aa, Nocardioides lianchengensis
  misc_feature (1)..(350): tr|A0A1G6SM42|A0A1G6SM42_9ACTN S-adenosylmethionine:tRN A ribosyltransferase-isomerase OS=Nocardioides lianchen gensis OX=1045774 GN=SAMN05421872_106202 PE=3 SV=1
MRMLEEHPSTTFAPAAFAPAPAEERGLTRDATRLLVAGPDGVRHTRFRELARHLSPGDVVVVNNSATVAGQLDAVSSRHGPVVVHLATPLDDGDWVVEVRSAPDAARAVLDAAPGEELRAGPVRLRLRAPYPRDGSSPTGRGDRLWRASVEGDLACHASRHGRPISYGYLDRAYPLAAYQTVFATEPGSAEMPSAGRPFTPALVTELVSRGIAVTPITLHTGVSSQEAGEAPQPERFEVSAATARLVEAARAGGGRVVAVGTTVTRALESAVDGRGRLAAARGWTERVVTPADPPRVVTGLVTGWHDPAASHLLLVEAVAGADLTQTSYDAAVAGGYLWHEFGDAALLLP

SEQ ID NO: 69407 - protein, 353 aa, Nocardioides luteus
  misc_feature (1)..(353): tr|A0A1J4NBT5|A0A1J4NBT5_9ACTN S-adenosylmethionine:tRN A ribosyltransferase-isomerase OS=Nocardioides luteus O X=1844 GN=UG56_003320 PE=3 SV=1
MTMLAERPTTTFPFPEDTTAPAPAEWRGLERDGVRLLVASPEGVRHARFRSLAEHLSPGDLVVVNDSITEARQLDADLIGRGRVVLHLAQRLDTGWAVELRSAPDASRSVLDAAEGDVVVTAGLRVTLREPYPDGRPSSPTGEGNRLWRAEVTGDVAAELARSGRPIAYGYLDRRYPLDAYQTVFGHRPGSAEMPSAARPFTHPLVTELVTRGIQIAPVTLHTGVSSQEAGEAPGAEWFEVSETTARLVEQTRYAGGRVVAAGTTVTRALESAVVPATGAMRAASGWTDRVITPANPPYVVNGLITGWHDPQASHLLLVEAVAGPELTQRAYDAAVAEGYLWHEFGDSALLLP

SEQ ID NO: 69408 - protein, 349 aa, Nocardioides oleivorans
  misc_feature (1)..(349): tr|A0A4Q2RXL2|A0A4Q2RXL2_9ACTN S-adenosylmethionine:tRN A ribosyltransferase-isomerase OS=Nocardioides oleivora ns OX=273676 GN=EUA93_05025 PE=3 SV=1
MSLLAETPHTRFAASDFAPQPAESRGLERDEVRLLVGTPDGLAHVRFRDLPDHLHAGDVLVVNTSATVNAEVDATLDGEPVVLHVAHHLEDGDRVVELRSSPDAGRAILDRTSGDVVRVGDVRLVLRSPWPGEASSPTGAGNRLWQASVAGDLDRQLEWNGRPIAYGYLDRRYPLADYQTVFGTRPGSAEMASAGRPFTPALVTRLVTAGVQLAPVTLHTGVSSQEAGEAPGPEWFEVPPTSARTINGARENGGRVIAVGTTATRAVESSVLGRHVVASRGWTSRVVTPAQPPRVVDGLVTGWHDPMASHLLLVEAVAGERLTQAAYDAAVAEGYLWHEFGDSALLLRR

SEQ ID NO: 69409 - protein, 357 aa, Nocardioides sp.
  misc_feature (1)..(357): tr|A0A0Q8DPF9|A0A0Q8DPF9_9ACTN S-adenosylmethionine:tRN A ribosyltransferase-isomerase OS=Nocardioides sp. Root 614 OX=1736571 GN=ASD81_24010 PE=3 SV=1
MSQLEAQEFAPAPAERRGLARDQVQLLVATDRGITHTRFHRLDEHLDPGDVVVVNNSATVAAAVDAVSDRHGPVVLHLATPLDDATWVVEVRRPPDAARAVLDAQAGDRIDLVGGAATVQLLEPYPAPGSSPTGAGNRLWRAAAVGDPLAVARRLGRPIAYGYLDARYPLADYQTVFGQRPGSAEMPSAGRPFSADLVTRLVAKGVLVAPITLHTGVSSQEAGEAPQAERFEVPPATAAAVNAVRAAGGRVIAVGTTATRALESAVEVDRDGPHVVPASGWTSRIISPADPPRVTDGLVTGWHDPNASHLLLVEAVAGTQLTRRAYTAAAASGYLWHEFGDSCLLLPTSGRSQGKSR

SEQ ID NO: 69410 - protein, 350 aa, Nocardioides sp.
  misc_feature (1)..(350): tr|A0A4Q2T101|A0A4Q2T101_9ACTN S-adenosylmethionine:tRN A ribosyltransferase-isomerase OS=Nocardioides sp. HLT2 -9 OX=1168729 GN=EUA94_12440 PE=3 SV=1
MTLLTETPHTHFESSAFAPQPAEARGLARDEVRLLVATPDGLSHQRFRDLPDHLGAGDVLVVNTSATVPAEADATLDGAPVVVHVAHHLEDGDRVVELRSAPDAARALLDASVGDVVEVGDVRLVLRAPWPSYAPSSPTGVGNRLWRVSVRGNLDRQLDWNGRPIAYGYLDGRYPLADYQTVFGRRPGSAEMASAGRPFTPELVTRLVTAGVQFAPVTLHTGVSSQEAGEAPGPEWFEVPPTSARLINGACDNGGRVIAVGTTATRAVESSVQGRYVVASRGWTSRVVTPAQPPRVIDGLITGWHDPMASHLLLVEAVAGQRLTQAAYDAAVVEGYLWHEFGDSALLLRR

SEQ ID NO: 69411 - protein, 356 aa, Nocardioides terrae
  misc_feature (1)..(356): tr|A0A1I1KY71|A0A1I1KY71_9ACTN S-adenosylmethionine:tRN A ribosyltransferase-isomerase OS=Nocardioides terrae O X=574651 GN=SAMN04487968_10965 PE=3 SV=1
MTLLSEQPAIRFPAPDDTTAPAPAEWRGYARDEVRLLVADRTGVVHTRFRSIADHLDRGDLLVVNDSATEPRELDAVLSGRGPVVLHLADRLRDGEWAVELRTAPDARRAVLDAGEGDVVTAAGLRLTLTAAYPDRPSSPTGRGNRLWRATVAGDVAAAIRQHGRPIAYGYLDRRYPLDAYQSVFGVRPGSAEMPSAARPFTADLVATLVARGVQIAPVTLHTGVSSQEAGEAPAPEWFEVTATTARIVRETKSAGGRVVAVGTTVTRALESAVVRRGRTGTTVRAARGWTDRVVTPRQPPVVVDGLITGWHDPHASHLLLVEAVAGRALTQRAYDEAVAAGYLWHEFGDAALLLP

SEQ ID NO: 69412 - protein, 354 aa, Nocardiopsis alba
  misc_feature (1)..(354): tr|J7L5V2|J7L5V2_NOCAA S-adenosylmethionine:tRNA ribosy ltransferase-isomerase OS=Nocardiopsis alba (strain ATC C BAA-2165 / BE74) OX=1205910 GN=B005_4327 PE=3 SV=1
MRTEEFDFDTEKRVMPADPVELRGKKRENGRMVVLDRSADTVEHTVFSDIVDHLRPGDLLVLNDSYTLSNTLTFRHGDRTLDLNVYGHEPGGTNIVKISSGERLRRGEALTSVDDERLTCTLLESQPDDLWKVAFEPAELLIETLDRHGRRVDENIHLDPTSWRERPDAYRSVYAKTPGSLEIPSAGLHFSKELLDRVVDKGVELAYITLHVGATEILAVRHISAEKVEDHEVRPEYFEIGSEAATRLTRAVSEGRRVVAVGTTVMRALESLPIDKESGGTIEPRKDWTDLYIHPGYRFKIIDVLLTNLHRPRSSHIVLTAAFGGKDLVMRSYSEIVDDGEYEFDMFGDSMLIL

SEQ ID NO: 69413 - protein, 398 aa, Nodularia sp.
  misc_feature (1)..(398): tr|A0A218Q9J3|A0A218Q9J3_9CYAN S-adenosylmethionine:tRN A ribosyltransferase-isomerase OS=Nodularia sp. NIES-35 85 OX=1973477 GN=queA PE=3 SV=1
MVEGGVNSVEPEIAHTNLNQLSQKDGELDFSLAGYNYTLPNELIAQNPVFPRDSSRLLVVNSPTTGKESPPIHQIFQDLPELLRADDLLIINDTKVIPARLYGHKSTGAEIEVLLLEERQYNCWLALVKPGKRFKPGTEIIFEPRGLGIRNPKDSHPFPTQLTAKVLETDAATGGRLLRFDVPEGKALVEVLDQFGEIPLPPYITASTAADEQYQTVYAQQPGAIAAPTAGLHFTPELLSKLSDRGINQAFITLHVGVGTFRPVEIEDVTSHQMHEEWISVPPATVEQIRATKAAGGRIIAVGTTAVRALEGAAKSGDLQPFCGKTDLFIYPGYQWRVVDGLITNFHLPRSSLLMLVSALIGRQRLLNIYQEAIASKYRFYSFGDAMLILPEARGIQG

SEQ ID NO: 69414 - protein, 374 aa, Nodularia spumigena
  misc_feature (1)..(374): tr|A0A2S0Q5T5|A0A2S0Q5T5_NODSP S-adenosylmethionine:tRN A ribosyltransferase-isomerase OS=Nodularia spumigena U HCC 0039 OX=1914872 GN=queA PE=3 SV=1
MEPEIVHTQTETPEVNLDCSLAGYNYTLPTELIAQNPVFPRDSSRLLVVNSPTTGTQTAPLHQIFRDLPELLRTGDLLIINDTKVIPARLYGRKSTGAEVEVLLLEERQYNCWLALVKPGKRFKPGTKIIFPPRGKDSQPLPTELSATVIDTDPATGGRLLRFDVPEGKPLVEVLDQFGEIPLPPYITASTAADEQYQTVYAQQPGAIAAPTAGLHFTPELLKKLGDRGINQASITLHVGIGTFRPVEIEDVTSHQMHEEWISVPPATVEQIRATKAAGGRIIAVGTTAVRALEGAAKSGDLQTFCGKTDLFIYPGYEWRVVDGLITNFHLPRSSLLMLVSALIGRERLLSIYQEAIALKYRFYSFGDAMLILR

SEQ ID NO: 69415 - protein, 374 aa, Nodularia spumigena
  misc_feature (1)..(374): tr|A0A161UUG6|A0A161UUG6_NODSP S-adenosylmethionine:tRN A ribosyltransferase-isomerase OS=Nodularia spumigena C ENA596 OX=1819295 GN=queA PE=3 SV=1
MEPEIVHTQTETPEVNLDCSLAGYNYTLPTELIAQNPVFPRDSSRLLVVNSPTTDTETPPLHQIFRDLPELLRTGDLLIINDTKVIPARLYGRKSTGAEVEVLLLEERQYNCWLALVKPGKRFKPGTKIIFPPRGKDSQPLPTELTATVIDTDPATGGRLLRFDVPEGKPLVEVLDQFGEIPLPPYITASTAADEQYQTVYAQQPGAIAAPTAGLHFTPELLKKLGDRGINQASITLHVGIGTFRPVEIEDVTSHQMHEEWISVPPATVEQIRATKAAGGRIIAVGTTAVRALEGAAKSGELQPFCGKTDLFIYPGYEWRVVDGLITNFHLPRSSLLMLVSALIGRERLLSIYQEAIALKYRFYSFGDAMLILR

SEQ ID NO: 69416 - protein, 350 aa, Nonlabens agnitus
  misc_feature (1)..(350): tr|A0A2S9WV43|A0A2S9WV43_9FLAO S-adenosylmethionine:tRN A ribosyltransferase-isomerase OS=Nonlabens agnitus OX= 870484 GN=queA PE=3 SV=1
MKLSQFGYKLPEELIAQHPVENRDESRLMVLHKKTGEIEHKMFKDVIDYFDEKDVFVMNDTKVFPARLYGNKEKTGARIEVFLLRELNPTTKLWDVLVDPARKIRIGNKLYFGEDESLVAEVIDNTTSRGRTLRFLYDGTYEEFRKKLRELGETPLPKELGREVEPEDEERYQTIYASNEGAVAAPVAGLHFSKHLLKRMEIKGIDVTSVTMHIGLGTFSPVEVEDLSKHKMDSEQAFISQETCNIVNKAIDEKRNICAVGTTTMRSLESAVSSDGHLNTFDGWTNKFIFPEYEFSIANAMITNFHNPKSTLMMQAAAFAGYDFLKKAYDVAMKEKYRFSTYGDAMLIID

SEQ ID NO: 69417 - protein, 350 aa, Nonlabens arenilitoris
  misc_feature (1)..(350): tr|A0A2S7UA79|A0A2S7UA79_9FLAO S-adenosylmethionine:tRN A ribosyltransferase-isomerase OS=Nonlabens arenilitori s OX=1217969 GN=queA PE=3 SV=1
MKLSQFGYKLPENLIAQHPAENRDESRLMVLHKKTGEIEHKMFKDVLDYFEEDDVFVTNNTRVFPARLYGNKEKTGARIEVFLLRELNPTTKLWDVLVDPARKIRIGNKLYFGDDESLVAEVIDNTTSRGRTLRFLFDGSYEEFRQKLKDLGETPLPRELGREVEEEDEERYQTIYATNEGAVAAPVAGLHFSKHLLKRLEIKGIHRTAITMHIGLGTFAPVEVEDLSKHKMDSEQAEITEETCAIVNKAIDARKNVCAVGTTTMRTLESAVSSDGHLNTFDGWTNKFIFPPYDFSIANAMITNFHHPKSTLMMQAAAFAGYDLLKKAYDVAIKEEYKFSTYGDAMLIVD

SEQ ID NO: 69418 - protein, 350 aa, Nonlabens dokdonensis
  misc_feature (1)..(350): tr|L7WA76|L7WA76_NONDD S-adenosylmethionine:tRNA ribosy ltransferase-isomerase OS=Nonlabens dokdonensis (strain DSM 17205 / KCTC 12402 / DSW-6) OX=592029 GN=queA PE=3 SV=1
MKLSQFGYDLPEDRIAQHPAENRDESKLMVLHRKTGKIEHKMFKDVIDYFNEDDVFVFNDTKVFPARLYGNKEKTGARIEVFLLRELNPDTKLWDVLVDPARKIRIGNKLYFGEDESLVAEVIDNTTSRGRTLRFLYDGSYEEFRQALKELGETPLPKELNRDVEPEDEERYQTIFAEKEGAVAAPVAGLHFSKHLLKRLEIKGVKMTAVTMHIGLGTFAPVEVEDLSKHKMDSEQAFITQDTCDMVNKAIDTKRNVCAVGTTTMRTLESAVSSNGHLNTFAEWTNKFIFPPYDFTIANSMITNFHHPKSTLMMQAAAFAGYDFLNEAYEEALKNDYRFSTYGDAMLIID

SEQ ID NO: 69419 - protein, 350 aa, Nonlabens dokdonensis
  misc_feature (1)..(350): tr|A0A1Z8AH03|A0A1Z8AH03_9FLAO S-adenosylmethionine:tRN A ribosyltransferase-isomerase OS=Nonlabens dokdonensis OX=328515 GN=queA PE=3 SV=1
MKLSQFGYDLPEDRIAQHPAENRDESKLMVLHRKTGEIEHKMFKDVIDYFNEDDVFVFNDTKVFPARLYGNKEKTGARIEVFLLRELNPDTKLWDVLVDPARKIRIGNKLYFGDDESLVAEVIDNTTSRGRTLRFLYDGSYEEFRQALKDLGETPLPKELNREVEPEDEERYQTIFAENEGAVAAPVAGLHFSKHLLKRLEIKGVNMTAVTMHIGLGTFAPVEVEDLSKHKMDSEQAFINQETCDMVNKAIDAKRNVCAVGTTTMRTLESAVSSNGHLNTFDEWTNKFIFPPYDFTIANSMITNFHHPKSTLMMQAAAFAGYDLLKEAYEVALKEDYRFSTYGDAMLIID

SEQ ID NO: 69420 - protein, 350 aa, Nonlabens marinus
  misc_feature (1)..(350): tr|W8VND0|W8VND0_9FLAO S-adenosylmethionine:tRNA ribosy ltransferase-isomerase OS=Nonlabens marinus S1-08 OX=14 54201 GN=queA PE=3 SV=1
MKLSQFGYKLPEELVAKHPVENRDDSRLMVLHKKTGEIEHKMFKDIMDYFDEKDVFVMNDTKVFPARLYGNKEKTGARIEVFLLRELNPTTKLWDVLVDPARKIRIGNKLYFGEDESLVAEVIDNTTSRGRTLRFLYDGTYEEFRKKLRELGETPLPKELEREVEPEDEERYQTIYAKNEGAVAAPVAGLHFSKHLLKRMEIKGIITTSVTMHIGLGTFSPVEVEDLSKHKMDSEQAFITQETCNIVNEAIDKRRNICAVGTTTMRSLESAVSSDGHLNTFDGWTNKFIFPEYEFSIANSMVTNFHHPKSTLMMQAAAFAGYDFLKKAYDIAMKEKYRFSTYGDAMLIID

SEQ ID NO: 69421 - protein, 350 aa, Nonlabens sediminis
  misc_feature (1)..(350): tr|A0A090Q7M5|A0A090Q7M5_9FLAO S-adenosylmethionine:tRN A ribosyltransferase-isomerase OS=Nonlabens sediminis O X=319236 GN=queA PE=3 SV=1
MKLSNFGYNLPQDRIAQYPEENRDESKLMVLHRKSGKIEHKLFKDVIDYFDEKDVFVMNDTKVFPARLYGNKEKTGARIEVFLLRELNPTTKLWDVLVDPARKIRIGNKLYFTEDDSLVAEVIDNTTSRGRTLRFLFDGTYEEFRKKLKDLGETPLPRELERDVEENDEERYQTIFAQNEGAVAAPVAGLHFSKHLLKRMEIKGIDVANVTMHIGLGTFAPVEVEDLSKHKMDSEQAFISQATCDAVNEAIDNKRNVVAVGTTTMRTLESSVSSDGHLNTYDGWTSKFIFPPYDFSIATAMITNFHPPKSTLMMQAAAFAGYDFLKEAYDIALKEGYRFSTYGDAMLIID

SEQ ID NO: 69422 - protein, 350 aa, Nonlabens sp.
  misc_feature (1)..(350): tr|A0A0Q0XRW9|A0A0Q0XRW9_9FLAO S-adenosylmethionine:tRN A ribosyltransferase-isomerase OS=Nonlabens sp. YIK11 O X=1453349 GN=queA PE=3 SV=1
MKLSQFGYKLPEELIAQHPVENRDESRLMVLHKKTGEIEHKMFKDVIDYFDEKDVFVMNDTKVFPARLYGNKEKTGARIEVFLLRELNPTTKLWDVLVDPARKIRIGNKLYFGEDESLVAEVIDNTTSRGRTLRFLYDGTYEEFRKKLRELGETPLPKELGRDVEPEDEERYQTIYASNEGAVAAPVAGLHFSKHLLKRMEIKGIDVTSVTMHIGLGTFSPVEVEDLSKHKMDSEQAFISQETCNIVNKAIDEKRNICAVGTTTMRSLESAVSSDGHLNTFDGWTNKFIFPEYEFSIANAMITNFHHPKSTLMMQAAAFAGYDFLKKAYDVAMKEKYRFSTYGDAMLIID

SEQ ID NO: 69423 - protein, 350 aa, Nonlabens sp.
  misc_feature (1)..(350): tr|A0A2K8X6C5|A0A2K8X6C5_9FLAO S-adenosylmethionine:tRN A ribosyltransferase-isomerase OS=Nonlabens sp. MB-3u-7 9 OX=2058134 GN=queA PE=3 SV=1
MKLSQFGFELPEDRIAQHPAENRDESKLMVLHRKTGEIEHKMFKDVIDYFNEDDIFVMNDTKVFPARLYGNKEKTGARIEVFLLRELNPETKLWDVLVDPARKIRIGNKLYFGEDENLVAEVIDNTTSRGRTLRFLYDGSYEEFRQALKELGETPLPKELNRDVEPEDEERYQTIFAEKEGAVAAPVAGLHFSKHLLKRLEIKGIKRTAVTMHIGLGTFAPVEVEDLSKHKMDSEQAFITQETCDIVNHAIDTRKNVCAVGTTTMRTLESAVSSDGHLNTFNEWTNKFIFPPYVFTIANSMITNFHHPKSTLMMQAAAFAGYDFLNEAYQVALKEGYKFSTYGDAMLIID

SEQ ID NO: 69424 - protein, 350 aa, Nonlabens spongiae
  misc_feature (1)..(350): tr|A0A1W6MMC0|A0A1W6MMC0_9FLAO S-adenosylmethionine:tRN A ribosyltransferase-isomerase OS=Nonlabens spongiae OX =331648 GN=queA PE=3 SV=1
MKLSQFGFDLPEERIAKHPPLNRDESKLMVLHPKTGEIEHKMFKDVLDYFEEDDVFVMNDTKVFPARLYGNKEKTNARIEVFLLRELNPTTKLWDVLVDPARKIRIGNKLYFGEDESLVAEVIDNTTSRGRTLRFLYDGSYEEFRKALNDLGETPLPKELDRDVEEDDEERYQTIFAQNEGAVAAPIAGLHFSKHLLKRMEIKGVKRTSVTMHIGLGTFAPVEVEDLSKHKMDSEQAFITQETCDIVNKAIDNKKKICVVGTTTMRTMESSVSSDGHLNPFDGWTNKFIFPSYEFAIADAMITNFHPPKSTLMMQAAAFAGYDLLKKAYELAIKEEYNFSTYGDAMLIIY

SEQ ID NO: 69425 - protein, 350 aa, Nonlabens tegetincola; identical to SEQ ID NO: 69421
  misc_feature (1)..(350): tr|A0A2S7THR9|A0A2S7THR9_9FLAO S-adenosylmethionine:tRN A ribosyltransferase-isomerase OS=Nonlabens tegetincola OX=323273 GN=queA PE=3 SV=1

SEQ ID NO: 69426 - protein, 350 aa, Nonlabens ulvanivorans
  misc_feature (1)..(350): tr|A0A090Q7R5|A0A090Q7R5_NONUL S-adenosylmethionine:tRN A ribosyltransferase-isomerase OS=Nonlabens ulvanivoran s OX=906888 GN=queA PE=3 SV=1
MKLSQFGYKLPENLIAQHPAENRDESRLMVLHKKTGEIEHKMFKDVLDYFEEDDVFVTNNTRVFPARLYGNKEKTGARIEVFLLRELNPTTKLWDVLVDPARKIRIGNKLYFGEDESLVAEVIDNTTSRGRTLRFLFDGSYEEFRQKLKDLGETPLPRELGREVEEEDEERYQTIYATNEGAVAAPVAGLHFSKHLLKRLEIKGIYRTAVTMHIGLGTFAPVEVEDLSKHKMDSEQAEITEETRAIVNKAIDNRKNVCAVGTTTMRTLESAVSSDGHLNTFDGWTNKFIFPPYDFSIANAMITNFHHPKSTLMMQAAAFAGYDLLKKAYDVAIKEEYKFSTYGDAMLIVD

SEQ ID NO: 69427 - protein, 350 aa, Nonlabens ulvanivorans
  misc_feature (1)..(350): tr|A0A084JT03|A0A084JT03_NONUL S-adenosylmethionine:tRN A ribosyltransferase-isomerase OS=Nonlabens ulvanivoran s OX=906888 GN=queA PE=3 SV=1
MKLSQFGYKLPENLIAQHPAENRDESRLMVLHKKTGEIEHKMFKDVLDYFEEDDVFVTNNTRVFPARLYGNKEKTGARIEVFLLRELNPTTKLWDVLVDPARKIRIGNKLYFGEDESLVAEVIDNTTSRGRTLRFLFDGSYEEFRQKLKDLGETPLPRELGREVEEEDEERYQTIYATNEGAVAAPVAGLHFSKHLLKRLEIKGIHRTAVTMHIGLGTFAPVEVEDLSKHKMDSEQAEITEETRAIVNKAIDNRKNVCAVGTTTMRTLESAVSSDGRLNTFDGWTNKFIFPPYDFSIANAMITNFHHPKSTLMMQAAAFAGYDLLKKAYDVAIKEEYKFSTYGDAMLIVD

SEQ ID NO: 69428 - protein, 350 aa, Nonlabens xylanidelens
  misc_feature (1)..(350): tr|A0A2S6ISC2|A0A2S6ISC2_9FLAO S-adenosylmethionine:tRN A ribosyltransferase-isomerase OS=Nonlabens xylanidelen s OX=191564 GN=queA PE=3 SV=1
MKLSQFGYDLPEDRIAQYPAENRDESKLMVLHKKTGEIEHKMFKDVIDYFNEDDIFVMNDTKVFPARLYGNKEKTGARIEVFLLRELNPETKLWDVLVDPARKIRIGNKLYFGDDESLVAEVIDNTTSRGRTLRFLYDGSYEEFRQALKDLGETPLPKELNREVEPEDEERFQTIFAKKEGAVAAPVAGLHFSKHLLKRLEIKGVKMATVTMHIGLGTFAPVEVEDLSKHKMDSEQAFITEETCAAVNEALDNKRNVCAVGTTTMRTLESAVSSNGRLNTFDEWTNKFIFPPYDFSIANSMITNFHPAKSTLMMQAAAFAGYDLLKKAYDVALKEDYKFSTYGDAMLIID

SEQ ID NO: 69429 - protein, 335 aa, Nonomuraea fuscirosea
  misc_feature (1)..(335): tr|A0A2T0MS34|A0A2T0MS34_9ACTN S-adenosylmethionine:tRN A ribosyltransferase-isomerase OS=Nonomuraea fuscirosea OX=1291556 GN=B0I32_11597 PE=3 SV=1
MTASLDFLLPPGLSATEPPEARGMARDAVRLMVSRGDAEPGHHHFSDLPRLLEPGDLIVVNNSATLPAAVRLDRLAVHFSTARNDGTWLVELRRRTSKASEPYAGGEPGEWLPLPGRATLRLIERETPRLWRAELDRDVQAYLRVHGTPIRYSYVERDWPIEAYQTVFATVPGSAEMPSAARPFTAELVTALVARGVGIAPITLHTGVASPEKDEPPYAERYEVPASTARLVNLTRANGGRVVAAGTTVVRALETAAGADGLVSAAAGWTRHVVTPEGGVRAVTGLITGLHEPRSSHLLMLTAIAGRPALARAYEAALREGYLWHEFGDTHLILK

SEQ ID NO: 69430 - protein, 335 aa, Nonomuraea gerenzanensis
  misc_feature (1)..(335): tr|A0A1M4DY49|A0A1M4DY49_9ACTN S-adenosylmethionine:tRN A ribosyltransferase-isomerase OS=Nonomuraea gerenzanen sis OX=93944 GN=BN4615_P1009 PE=3 SV=1
MTAALDFSLPPGLSAHEPPEAKGMARDAVRLMVSRGDRDPSHHRFSDLPGLLDPGDLIVVNNSATLPAAVRLDRLAVHFSTVRPDGTWLVELRRRTAKGSEPYGGGEAGEWLPMPGRATLRLVGRETPRLWRAVLDRDVEAYLRVHGVPIRYSYVERDWPIEAYQTVFATVPGSAEMPSAARPFTVELVTALVARGIGIAPITLHTGVASTEKDEPPYAERYEVPAATAALVNLTRQNGGRVVAAGTTVVRALESAADADGHVTASAGWTGHIVTPEVGVRAVTGLITGLHEPRSSHLLMLTAIAGEAALARAYEEALRKGYLWHEFGDTHLILK

SEQ ID NO: 69431 - protein, 336 aa, Nonomuraea jiangxiensis
  misc_feature (1)..(336): tr|A0A1G9L3A5|A0A1G9L3A5_9ACTN S-adenosylmethionine:tRN A ribosyltransferase-isomerase OS=Nonomuraea jiangxiens is OX=633440 GN=SAMN05421869_12765 PE=3 SV=1
MTAALDFALPADLSAHEPPEARGLSRDSVRLMVSRGTLDPSHHHFSDLPELLAPGDLIVVNNSATLPAAVRLDRLAVHFSTSRQDGTWLVELRRRTSRATEPYGGGEPGEWLPLPGGATLRLLARETPRLWRAVLDQEVEPYLRAYGVPIRYSYVERDWPIEAYQTVFATVPGSAEMPSAARPFTADLVTALVARGVGIAPITLHTGVASPEKDEPPYAERYEVPASTARLVNSSKEGGNRVVAAGTTVVRALETAVGADGRVAAAAGWTRHVVTPERGVRAVTGLITGLHEPRSSHLLMLTAVAGPAALAKAYEAALREGYLWHEFGDTHLILRD

SEQ ID NO: 69432 - protein, 336 aa, Nonomuraea maritima
  misc_feature (1)..(336): tr|A0A1G9L9W3|A0A1G9L9W3_9ACTN S-adenosylmethionine:tRN A ribosyltransferase-isomerase OS=Nonomuraea maritima O X=683260 GN=SAMN05421874_12479 PE=3 SV=1
MTATLDFTLPPGLSAREPAEARGLARDAVRMLVSRGELEPSHHRFGDLPDLLDPGDLVVVNNSATLPAAVRLDRLAVHFSTAAPDGTWLVELRQRSGTATEPYAGGEPGEWLPMPGRATLRLIARETPRLWRATLDRDVEPYLRAHGVPIRYSYVDRDWPIEAYQTVFATVPGSAEMPSAARPFSAELVTALVAHGIGIAPITLHTGVASPEKDEPPYAERYEVPAATARLVGLALANGNRVVAAGTTVVRALETAADAPGHVTASSGWTRHVVTPETGVRAVTGLITGLHEPRSSHLLMLTAIAGAPALARAYDAALGAEYLWHEFGDTHLILKK

SEQ ID NO: 69433 - protein, 337 aa, Nonomuraea polychroma
  misc_feature (1)..(337): tr|A0A438MLN9|A0A438MLN9_9ACTN S-adenosylmethionine:tRN A ribosyltransferase-isomerase OS=Nonomuraea polychroma OX=46176 GN=EDD27_9394 PE=3 SV=1
MTAPTLDFVLPPGLTAQEPPEARGMSRDAVRLMVSRGDLEPEHRRFAELPGLLDPGDLIVVNNSATLPAAVRLDRLAVHFSTAREDGTWLVELRRRTAKASEPYGGGEAGEWLPLPGRATLRLIERETPRLWRAALDRDVEAYLRAYGVPIRYSYVERDWPIDAYQTVFATVPGSAEMPSAARPFTTDLVTALVARGVGIAPITLHTGVASPEKDEPPYAERYEVPASTARLVNLARRNGNRVVAAGTTVVRALETAVDAAGRVTAAAGWTRHVVTPERGVRAVTGLITGLHEPRSSHLLMLTAIAGEEALARAYEEALRQGYLWHEFGDTHLILKK

SEQ ID NO: 69434 - protein, 335 aa, Nonomuraea pusilla
  misc_feature (1)..(335): tr|A0A1H7QV14|A0A1H7QV14_9ACTN S-adenosylmethionine:tRN A ribosyltransferase-isomerase OS=Nonomuraea pusilla OX =46177 GN=SAMN05660976_02688 PE=3 SV=1
MTAAPDFALPSELSAHEPPEARGLRRDGVRLLVSQGDLPPRHRRFTDLPALLEPGDLVVVNNSATLPAAVRLDRLAVHFSTAQEDGTWLVELRRRAGRSYEPYRGGEPGEWLPLPGRATLRLLGRVTPRLWRAALDRDVEPYLSAYGVPIRYSYVERDWPIDAYQTVFAAVPGSAEMPSAGRPFSAELVTALVSRGVTVAPVTLHTGVASPEKDEPPYAERFDVPASTARLVNLARENGNRVVASGTTVVRALETAVDGDGRVAAASGWTTHLVTPETGVRAVTGLITGLHEPRSSHLLMLTAIAGERVLARAYEEALRAGYLWHEFGDTHMILD

SEQ ID NO: 69435 - protein, 336 aa, Nonomuraea solani
  misc_feature (1)..(336): tr|A0A1H6CQ64|A0A1H6CQ64_9ACTN S-adenosylmethionine:tRN A ribosyltransferase-isomerase OS=Nonomuraea solani OX= 1144553 GN=SAMN05444920_104230 PE=3 SV=1
MTAALDFSLPPGLSAHEPPEARGMARDAVRLMVSRGDLDPAHHHFSDLPNLLDPGDLIVVNNSATLPAAVRLDRLAVHFSTVARDGTWLVELRRRTAKGSEPYGGGEPGEWLPMPGRATLRLIERETPRLWRAVLDRDVEAYLRVHGAPIRYSYVERDWPIEAYQTVFATVPGSAEMPSAARPFTADLVTALVARGIGIAPITLHTGVASPEKDEPPYAERYEVPAATARLVNLARQNGGRVVAAGTTVVRALETAVGANGLVTAAQGWTGHVVTPESGVRAVTGLITGLHEPRSSHLLMLTAVAGEPALARAYEEALRNGYLWHEFGDTHLILQK

SEQ ID NO: 69436 - protein, 364 aa, Nonomuraea sp.
  misc_feature (1)..(364): tr|A0A5C8JFI0|A0A5C8JFI0_9ACTN S-adenosylmethionine:tRN A ribosyltransferase-isomerase OS=Nonomuraea sp. C10 OX =2600577 GN=FR742_39470 PE=3 SV=1
MTRPTTPPETPPATTATTTATTTTVTAEAANAAFDFVLPPALSAQEPPEARGVGRDGVRLLVSAGDGEPAHHRFTDLPGLLDPGDLIVVNNSATLPAAVRLDRLAVHFSTARPDGTWLVELRRRTATATEQYRGGAPGEWLPLPGGATLRLVGRETPRLWRAVLDRDVETYLRGYGAPIRYAYVTRDWPIEAYQTVFATVPGSAEMPSAARPFTPELVTALVARGVGIAPITLHTGVASPEKDEPPYAERYAVPEATARLVDLTLGSGRRVVAAGTTVVRALETAAAGGLVTASEGWTSHVVTPATGVRAVTGLITGLHEPRSSHLMMLTAIAGERPLRAAYEAALRERYLWHEFGDAHLILRT

SEQ ID NO: 69437 - protein, 342 aa, Nonomuraea sp.
  misc_feature (1)..(342): tr|A0A4R5EJT3|A0A4R5EJT3_9ACTN S-adenosylmethionine:tRN A ribosyltransferase-isomerase OS=Nonomuraea sp. 6K102 OX=2530382 GN=E1295_36845 PE=3 SV=1
MTASLTGALDFSLPPGLAAHEPPEARGTARDAVRLMVSRGDLDPGHHRFADLPRLLDPGDLIVVNNSATLPAAVRLDRLAVHFSTAREDGTWLVELRRRTPRASEPYGGGEPGEWLPLPGRATLRLIERETPRLWRAELDRDVKRYLRVHGVPIRYSYVERDWPIEDYQTVFATVPGSAEMPSAARPFTADLVAALVARGIGIAPITLHTGVASPEKDEPPYAERYDVPGHTARLVNLTRENGNRVVAAGTTVVRALETAAAGGADGRVAASAGWTRHIVTPEHGVRAVTGLITGLHEPRSSHLLMLSAIVGESVLARAYEAALRERYLWHEFGDTHLILQH

SEQ ID NO: 69438 - protein, 336 aa, Nonomuraea wenchangensis
  misc_feature (1)..(336): tr|A0A1I0LKT3|A0A1I0LKT3_9ACTN S-adenosylmethionine:tRN A ribosyltransferase-isomerase OS=Nonomuraea wenchangen sis OX=568860 GN=SAMN05421811_117168 PE=3 SV=1
MTAPALDFELPPGLSAQEPPEVRGRSRDDVRLLVSNGERAPEHRRFRDLPDLLGPGDLLVVNNSATLPAAVRLDRLAVHFSTAREDGTWLVELRRRTGRASEPYAGGEPGEWLPLPGRATLRLIGRETPRLWRAELDRDVEAYLRAYGVPIRYSYVVGEWPIEAYQTVFSTVPGSAEMPSAARPFTEALVTALVARGVGIAPITLHTGVASPEKDEPPYAERYEVPAATARLVELARESGTRVVAAGTTVVRALESAVGADGRVRAASGWTRHLVTPERGVRAVTGLLTGLHEPRSSHLLMLTAIAGEKALAGAYEAALREGYLWHEFGDTHLILK

SEQ ID NO: 69439 - protein, 340 aa, Nosocomiicoccus massiliensis
  misc_feature (1)..(340): tr|A0A2J6NH22|A0A2J6NH22_9STAP S-adenosylmethionine:tRN A ribosyltransferase-isomerase OS=Nosocomiicoccus massi liensis OX=1232430 GN=queA PE=3 SV=1
MKLTDFDFHLPESLIAQHPLKNRTDSKLLVLDRETGEMEDRHFYNIIDYLKKDDVLVLNNTRVLPARLHGHKKDSGGHVEMLLLNPETNGYKVLIKPARRVHVGTEIVFGDGELTATPLEKHDNGIYIVKLQYDGILEEVLDGLGEMPLPPYIKAQLEDNERYQTVFSKHSGSAAAPTAGLHFTTELLSQIKEKGVDIVYITLHVGLGTFRPVAVENVEEHDMHSEFYSIEKSTAKRLNEAKEKGHRIISVGTTSTRTLEANFRTYKKFVATSDWTDIFIYPGQDILSVDGLITNFHLPKSTLLMLVSTVSTRENILKAYNHAVEKEYRFFSFGDAMLII

SEQ ID NO: 69440 - protein, 372 aa, Nostoc azollae
  misc_feature (1)..(372): tr|D7E324|D7E324_NOSA0 S-adenosylmethionine:tRNA ribosy ltransferase-isomerase OS=Nostoc azollae (strain 0708) OX=551115 GN=queA PE=3 SV=1
MSNLEIQDVDLDRSLSGYDYELPPELIAQNPAVPRDTSRLLVVNSPNIGEEIPALNHIFRDLPDLLQPGDLLVMNNTKVMPARLYGRKLTGAEVEVLLLEEKQPNCWLALVKPGKHFKVGTKIIFGGNKLGRAKHPATTNDDELMAIVVDKDTATGGRLLQFDLPEYRSLVQVLENFGEIPLPPYITGSTAADEQYQTVYAQQTGAIAAPTAGLHFTPELLEKLRARGINQAFLTLHVGVGTFRPVEVEDVTTHQMHSEWIEVNSATVEEIRATKAAGGRIIAIGTTVVRALEGAAQSGDLQPYVGKVNLFIYPGYQWQVVEGLITNFHLPRSSLLMLVSALIGRERLLKIYQQAIASQYRFYSFGDAMLIL

SEQ ID NO: 69441 - protein, 417 aa, Nostoc calcicola
  misc_feature (1)..(417): tr|A0A1U7IPH6|A0A1U7IPH6_9NOSO S-adenosylmethionine:tRN A ribosyltransferase-isomerase OS=Nostoc calcicola FACH B-389 OX=1357508 GN=queA PE=3 SV=1
MKQKILQFDLSNTSSSQAKNLELDCSVAGYDYELPPELIAQNPAFPRDSSQLLVVNSPTTGIDTAPLNQIFRDLPALLRSGDLLVMNNTKVIPARLYGHKSTGAQIEVLLLEERQHNCWLALVKPGKRFKQGAKIIFAVKGDEGVAGDEGVAGDEGENTTSSPSSPSSSSSPSSSSSPSSPHLLTATVLETDTATGGRLLQFDVPEGKSLLQLLEVFGELPLPPYITASEAADEQYQTVYAQQPGAIAAPTAGLHFTPELLQKLRDRQINQAFVTLHVGVGTFRPVEVEDVTTHQMHEEWIEVPPATVEQIRATKADGGRIIAVGTTAVRALEGAAQSGDLEPFCGKTNLFIYPGYQWRVVDGLITNFHLPRSSLLMLVSALIGRERLLNIYHEAIASRYRFYSFGDAMLILPEGVG

SEQ ID NO: 69442 - protein, 384 aa, Nostoc carneum
  misc_feature (1)..(384): tr|A0A1Z4HYI3|A0A1Z4HYI3_9NOSO S-adenosylmethionine:tRN A ribosyltransferase-isomerase OS=Nostoc carneum NIES-2 107 OX=1973483 GN=queA PE=3 SV=1
MEQQLTPAALTPDSNNDVVNTELDRSLSAYDYELPTELIAQNPAIPRDSSRLLVVNSRSIHHTFRDLPHLLKAGDLLVMNNTSVIPARLYGRKATGAEIEVLLLEERQYNCWLALVKPGKRFKVGSKIIFAPRRAFQPGSKGAGEDEEVNSSLSLTATVLETDPATGGRLLQFDVPGGVPLVQVLDVFGEVPLPPYITASEATDEQYQTVYAQHPGAIAAPTAGLHFTPELLETLRDRGINQAFITLHVGVGTFRPVEVEDVTTHQMHEEWIEVPAATVEQIRATKAAGGRVIAVGTTAVRSLEGAAQSGELQPFCGKTNLFIYPGYQWRVVDGLITNFHLPRSSLLMLVSALIGRERLLNIYQEAIAARYRFYSFGDAMLILP

SEQ ID NO: 69443 - protein, 401 aa, Nostoc commune
  misc_feature (1)..(401): tr|A0A2R5FKN9|A0A2R5FKN9_NOSCO S-adenosylmethionine:tRN A ribosyltransferase-isomerase OS=Nostoc commune NIES-4 072 OX=2005467 GN=queA PE=3 SV=1
MKDTSRPQEKDFELDCSVAGYDYELPPELIAQNPAVPRDSSRLLVVDSPTTGIETPPLHHIFHDLPGLLRSGDLLVMNNTRVIPARLYGHKSTGGKIQVLLLEERQYNCWLALVKPGKSFKHGTKIIFEARQAETRGWGLEIGDWEDSSLVPSPQSSVSSPQLTATVLETDAATGGRLLQFDVPEGKSLIQLLEVFGEVPLPPYITTSEAADEQYQTVYAKQPGAIAAPTAGLHFTPELLQKLRDRNIHQAFITLHVGVGTFRPVEVEDVTTHQMHEEWIEVPAATVEQIRATKAAGGRIIAVGTTAVRALEGAAQSGNLQSFCGKTDLFIYPGYQWRVVDGLITNFHLPRSSLLMLVSALIGRQRLLNIYNEAIAFGYRFYSFGDAMLILPSSMGVGRRD

SEQ ID NO: 69444 - protein, 390 aa, Nostoc cycadae
  misc_feature (1)..(390): tr|A0A2H6LIH3|A0A2H6LIH3_9NOSO S-adenosylmethionine:tRN A ribosyltransferase-isomerase OS=Nostoc cycadae WK-1 O X=1861711 GN=queA PE=3 SV=1
MEPAITQGNFNKVTATGVEEVNLDCSLIGYDYVLPPELIAQNPAVPRDSSRLLVVNSAATGRDSAPLHHIFRDLPELLRPGDLLVMNNTRVIPARLYGNKSTGAEIEVLLLEERQHNCWLALVKPGKRFKSGSQIIFSGKGLENDSSTPQLTATVLETDAATGGRLLQFDVPPGKSLVELLDKFGEIPLPPYITTSAAADEQYQTVYAEQPGAIAAPTAGLHFTPELLEKLRDRNIHQAFVTLHVGVGTFRPVEVEDVTTHAMHEEWIEVPAATVEQIRATQAAGGRIIAVGTTVVRSLEGAAQSGQLQPFCGKTNLFIYPGYQWRVVEGLITNFHLPRSSLLMLVSALIGRQRLLKIYQEAIASRYRFYSFGDAMLILPEGREMLSAEC

SEQ ID NO: 69445 - protein, 387 aa, Nostoc flagelliforme
  misc_feature (1)..(387): tr|A0A2K8SZH2|A0A2K8SZH2_9NOSO S-adenosylmethionine:tRN A ribosyltransferase-isomerase OS=Nostoc flagelliforme CCNUN1 OX=2038116 GN=queA PE=3 SV=1
MKDTSRPQEKDFELDCSVAGYDYELPPELIAQNPAVPRDSSRLLVVDSPTTGIETAPLHHIFHDLPALLRSGDLLVMNNTRVIPARLYGHKSTGGKIQVLLLEERQYNCWLALVKPGKSFKQGTKIIFDVRQLRIGDLEDSYPVKNPQLTATVLETDAATGGRLLQFDVPEGKSLVQLLEVFGEIPLPPYITTSSAADDQYQTVYAKQPGAIAAPTAGLHFTPELLQKLRDRNINQAFITLHVGVGTFRPVEVEDVTTHQMHEEWIEVPAATVEQIRATKAAGGRIIAVGTTAVRALEGAAQSGNLQPFCQKTDLFIYPGYQWRVVDGLITNFHLPRSSLLMLVSALIGRQRLLNIYNEAIAFGYRFYSFGDAMLILPSAVGVLSQA

SEQ ID NO: 69446 - protein, 433 aa, Nostoc linckia
  misc_feature (1)..(433): tr|A0A2C6W4J1|A0A2C6W4J1_NOSLI S-adenosylmethionine:tRN A ribosyltransferase-isomerase OS=Nostoc linckia z16 OX =1628751 GN=queA PE=3 SV=1
MKREISQIHLNNTFSSQTKDLELDCSVAGYDYELPPELIAQNPVFPRDSSQLLVVDSPTTGMETPPLNHIFRDLPALLRCGDLLVMNNTKVIPARLYGHKSTGAQIEVLLLEERQDNCWLALVKPGKRFKQGARIVFDVRGAREEDAGTGGRGDAGNGKATSDQRENSSPAYPTLSTSVSSFSVSEGLSVPVSSPYLTATVLETDAATGGRLLQFDVPEGKSLVQLLEVFGEVPLPPYITASAAGDEQYQTVYAQKPGAIAAPTAGLHFTPELLQKLRDRQINQAFVTLHVGVGTFRPVEVEDVTTHQMHEEWIEVPATTVEQIRATKAAGGRIIAVGTTVVRALEGAAQSGNLEPFCGKTNLFIYPGYQWQVVDGLITNFHLPRSSLLMLVSALIGRQRLLNIYKQAIASQYRFYSFGDAMLILPEAVGHAI

SEQ ID NO: 69447 - protein, 402 aa, Nostoc linckia
  misc_feature (1)..(402): tr|A0A1Z4L3A1|A0A1Z4L3A1_NOSLI S-adenosylmethionine:tRN A ribosyltransferase-isomerase OS=Nostoc linckia NIES-2 5 OX=1091006 GN=queA PE=3 SV=1
MKQKISQINLNNTFSSQTHDLELDCSVAGYDYELPPELIAQNPAFPRDSSQLLVVNSPTTGIETAPLNHVFRDLPALLRSGDLLVMNNTKVIPARLYGNKSTGAQIEVLLLEERQHNCWLALVKPGKRFKPGAKISFEVRQLGIRDSETSPVPSKESPVNSHQLTATVLETDAATGGRLLQFDLPEGKSLVQLLEFFGEVPLPPYITASEAADEQYQTVYAQKPGAIAAPTAGLHFTPELLQKLCDRQINQAFVTLHVGVGTFRPVEVEDVTTHQMHEEWIEVPANTVEQIRATKAAGGRIIAVGTTVVRALEGAAHSGHLEPFCGKTNLFIYPGYQWRVVDGLITNFHLPRSSLLMLVSALIGRQRLLNIYNEAIASRYRFYSFGDAMLILPEAVTALSQR

SEQ ID NO: 69448 - protein, 404 aa, Nostoc minutum
  misc_feature (1)..(404): tr|A0A367R578|A0A367R578_9NOSO S-adenosylmethionine:tRN A ribosyltransferase-isomerase OS=Nostoc minutum NIES-2 6 OX=1844469 GN=queA PE=3 SV=1
MEQQIAHSNLDRSSIPEAKDMNLDCLLAGYDYELPSELIAQNPAFPRDSSRLLVVNSYTTGNETAPLDQIFRDLPELLHPGDLLVMNNTQVIPARLYGRKSTGAEIEVLLLEERQYNCWLALVKPGKRFKRGARIIFEAGGVGAREQGSKGGSSSSSSSSSSPHLLSATVLETDEATGGRLLQFDVPEGKPLVQLLDAFGEIPLPPYITSSVAADEQYQTVYAQQPGAIAAPTAGLHFTPELLEKLRDRGINQAFVTLHVGVGTFRPVEVEDVTSHHMHEEWIEVPAATVEQIRATKAAGGRIIAVGTTAVRALEGAAQSGDLQSFCGKTNLFIYPGYQWRVVDGLITNFHLPRSSLLMLVSALIGRQRLLNIYKQAIASRYRFYSFGDAMLILPQAVRVLSSE

SEQ ID NO: 69449 - protein, 384 aa, Nostoc piscinale
  misc_feature (1)..(384): tr|A0A0M4SPN3|A0A0M4SPN3_9NOSO S-adenosylmethionine:tRN A ribosyltransferase-isomerase OS=Nostoc piscinale CENA 21 OX=224013 GN=queA PE=3 SV=1
MEPAITKENFNKVTDTGVEDRQLDCSLTGYDYILPPELIAQNPVVPRDSSRLLVINSTATGNNLAPLHHIFRDLPELLHPGDLLVMNNTKVIPARLYGNKSTGAEIEVLLLEERQNNCWLALVKPGKRFKLGSHIIFSGKNSSTPQLTATVLENDAATGGRLLQFDVPPGKSLVELLDNFGEIPLPPYITTTAAADEQYQTVYAKQPGAIAAPTAGLHFTPELLKKLRDRNIHQAFVTLHVGVGTFRPVEVEDVTTHEMHEEWIEVPAVTVEQIRATKAAGGRIIAVGTTVVRSLEGAAQSGELQPFCGKTNLFIYPGYQWRVVDGLITNFHLPRSSLLMLVSALIGRPRLLQIYQEAIASRYRFYSFGDAMLILPEGREKYEV

SEQ ID NO: 69450 - protein, 401 aa, Nostoc punctiforme
  misc_feature (1)..(401): tr|B2IUS4|B2IUS4_NOSP7 S-adenosylmethionine:tRNA ribosy ltransferase-isomerase OS=Nostoc punctiforme (strain AT CC 29133 / PCC 73102) OX=63737 GN=queA PE=3 SV=1
MKDTSSPKEKNFELDCSVAGYDYTLPPELIAQNPAVPRDSSRLLVVNSPTTGAETEASHHIFHDLPALLRSGDLLVMNNTRVIPARLYGHKTTGAKIQVLLLEERQYNCWLALVKPGKSFKQGTKIIFEAKQRIGDSKEAEGRSAGGRGENSSPCSLDFSPVTSQQLTATVLETDAATGGRLLQFDVPEGKPLVQLLEVFGEVPLPPYITASSAADEQYQTVYAEQPGAIAAPTAGLHFTPQLLQKLRDRNINQAFVTLHVGVGTFRPVEVEDVTTHQMHEEWIEVPAATVEQIRATKAAGGRIIAVGTTAVRALEGAAKSGNLQAFCGKTDLFIYPGYQWRVVDGLITNFHLPRSSLLMLVSALIGRERLLNIYNEAIASKYRFYSFGDAMLILPEAIKS

SEQ ID NO: 69451 - protein, 408 aa, Nostoc punctiforme
  misc_feature (1)..(408): tr|A0A367R5A2|A0A367R5A2_NOSPU S-adenosylmethionine:tRN A ribosyltransferase-isomerase OS=Nostoc punctiforme NI ES-2108 OX=1356359 GN=queA PE=3 SV=1
MKQKLVQANLKDTSSPQEKDLELDCSVAGYDYKLPPELIAQNPAVPRDSSRLLVINSPTTGIEAAPLHHIFHDLPALLRSGDLLVMNNTRVIPARLYGYKSTGAKIQVLLLEERQHNCWLALVKPGKSFKRGAKIIFEPREAGIGHSKEAEGRGAGGRGENSPLLLAPSPQLTATVLETDAATGGRLLQFDVPEGKTLVELLEVFGEVPLPPYITTSEAADEQYQTVYAKQPGAIAAPTAGLHFTPELLQKLRDRQINQAFVTLHVGVGTFRPVEVEDVTTHQMHEEWIEVPAATVEQIRATKAAGGRIIAVGTTAVRALEGAAQSGNLQPFCGKTDLFIYPGYQWRVVDGLITNFHLPRSSLLMLVSALIGRQRLLNIYNEAIAFGYRFYSFGDAMLILPSAVGVGS

SEQ ID NO: 69452 - protein, 397 aa, Nostoc sp.
  misc_feature (1)..(397): sp|Q8YW18|QUEA_NOSS1 S-adenosylmethionine:tRNA ribosylt ransferase-isomerase OS=Nostoc sp. (strain PCC 7120 / S AG 25.82 / UTEX 2576) OX=103690 GN=queA PE=3 SV=1
MKKQILQLNLEQTSSAAAEDTNLDCSLAGYDYVLPPERIAQNPAVPRDSSRLLVVNSQTTGKETPPLHQIFRDLPDILRPGDLLIMNNTKVIPARLYGRKSSGAEVEILLLEERKFNCWLALVKPGKRFKKGTQIIFEGLGMRNLGIENSPQYSVASPHQLTATVLETDKATGGRLLQFDLPEGQSLVQLLDKFGEIPLPPYITTSQAADEQYQTVYAEEPGAIAAPTAGLHFTPELLQKLRDRNINQAFITLHVGVGTFRPVEVEDVATHQMHEEWIEVPAATVAQIKATKAAGGRIIAVGTTVVRALEGAAASGNLQEFCGKTNLFIYPGYKWQVVEGLITNFHLPRSSLLMLVSALIGRERLLNIYQEAIASQYRFYSFGDAMLILPEARGVEQ

SEQ ID NO: 69453 - protein, 391 aa, Nostoc sp.
  misc_feature (1)..(391): tr|K9QXF4|K9QXF4_NOSS7 S-adenosylmethionine:tRNA ribosy ltransferase-isomerase OS=Nostoc sp. (strain ATCC 29411 / PCC 7524) OX=28072 GN=queA PE=3 SV=1
MEQQLSQVNHNPISNQAAQVTNLDSSLAGYDYELPPELIAQNPVIPRDSSRLLVVDSPTTGQDSAPLHHIFRDLADILRSGDLLIMNNTKVIPARLYGRKSTGAEVEILLLEERQHNCWLALVKPGKRFKKGSKIFFESGRLGLYSAPSPQLTATVLETDKATGGRLLQFDVPEGQSLVQILDKFGEIPLPPYITASQAADEQYQTVYAEQPGAIAAPTAGLHFTPELLEKLRDRHINQAFITLHVGVGTFRPVEVEDVTSHQMHEEWIEVPADTVEQIRATKQAGGRIIAVGTTVVRALEGAAACGDLQPFCGKTNLFIYPGYQWRVVEGLITNFHLPRSSLLMLVSALIGRERLLNIYQEAIASRYRFYSFGDAMLILPEAKGVVSAES

SEQ ID NO: 69454 - protein, 400 aa, Nostocales cyanobacterium
  misc_feature (1)..(400): tr|A0A1Y0RNA5|A0A1Y0RNA5_9CYAN S-adenosylmethionine:tRN A ribosyltransferase-isomerase OS=Nostocales cyanobacte rium HT-58-2 OX=1940762 GN=queA PE=3 SV=1
MQQKLVKNNLNSISSPQKEDVELDICLSGYDYELPQELIAQNPVVPRDSSRLLVVNSPSTGRESVPLNYIFRDLPELLKPKDLLVMNNTRVIPARLYGRKSTGAEVEVLLLEERQHNCWLALVKPGKRFKQGAKIIFEARRVGEVEGVRGEKAPLSSRLSQPSLTATVLETDEATGGRPLQFDLPEGISLVQLLDIFGEVPLPPYITGSDAQHEQYQTVYAKTPGAVAAPTAGLHFTPELLEQLRDRGIHQAFVTLHVGVGTFRPVEVEDIKTHKMHEEWIEVPSSTVEQIRATQASGGRVIAVGTTVVRALEGAAAQGELQPFCGKTNLFIYPGYQWRVVEGLITNFHLPRSSLLMLVSALIGRQRLLNIYQYAVESRYRFYSFGDAMLILPEGKSAEF

SEQ ID NO: 69455 - protein, 362 aa, Notoacmeibacter marinus
  misc_feature (1)..(362): tr|A0A231UY82|A0A231UY82_9RHIZ S-adenosylmethionine:tRN A ribosyltransferase-isomerase OS=Notoacmeibacter marin us OX=1876515 GN=queA PE=3 SV=1
MKTDLFDFDLPESAIALRPAEPREAARLLLVRPEAAAPFTDRTIADLPDLLQPGDALVFNDTKVIPAQLEGVRQREGAPDARIGATLHMRLDASRWNAFVRGARKLQPGDRIRFGHRNTSCLLGALDATVEQKAQSGEVTLAFDLSGAALDEALHAGGRIPLPPYISGKRAVDEQDRSDYQTIYAREDGAVAAPTAGLHFTPELMARLEAAGIERHFVTLHVGAGTFLPVKADETSEHVMHSERGTLTAQTADALNAVRERGGRIVAVGTTSLRLLESAAGEDGRLAAWSGATDIFITPGYRFRVIDALMTNFHLPRSTLFMLVSAFSGLDRMQAAYHHAIESGYRFYSYGDSSLLFRNDDP

SEQ ID NO: 69456 - protein, 361 aa, Notoacmeibacter sp.
  misc_feature (1)..(361): tr|A0A3L7JFE4|A0A3L7JFE4_9RHIZ S-adenosylmethionine:tRN A ribosyltransferase-isomerase OS=Notoacmeibacter sp. M 2BS9Y-3-1 OX=2448481 GN=queA PE=3 SV=1
MKTDLFDFDLPEHAIALRPAEPREAARLLEVRPGAPDALNDARIKDLPDILRPGDALVFNDTKVIPAQLEGVRQREGALPARISATLHMRLDLARWKAFVRGAKKLQPGDRILFGSAQSADPSGVLSAAVEEKGDGGETTLVFDLSGAALDEALHALGEVPLPPYISGKRTADERDRADYQTIYARENGAVAAPTAGLHFTDAMMERLDSAGIERHFVTLHVGAGTFLPVKVENTNDHVMHSERGTLSGETAEALNRVRANGGRVVAVGTTSLRLLESAADEAGQLSAWSGATDIFITPGYRFRVIDVLMTNFHLPRSTLFMLVSAFSGLDTMQAAYSHAIAEGYRFYSYGDACLLFRKDI

SEQ ID NO: 69457 - protein, 342 aa, Novibacillus thermophilus
  misc_feature (1)..(342): tr|A0A1U9K590|A0A1U9K590_9BACL S-adenosylmethionine:tRN A ribosyltransferase-isomerase OS=Novibacillus thermoph ilus OX=1471761 GN=queA PE=3 SV=1
MDVSQFDFDLPERLIAQTPLAERSESRLLVLRREDGSIRHRRFQDIVEFLQPGDVLVLNDSKVIPARLIGSKADTGAKIELLLLKQLQGDRWETLVKPAKRIKAGTKVVFGQGELVAVAEEEGEAPGGRIFRLEYDGVLMELLNRLGQMPLPPYIKKQLDDPDRYQTVYARHPGSAAAPTAGLHFTPELLNRIEQRGVNIAAITLHVGLGTFRPVTADRVEDHRMHAEYYDVSREAAEAVNKAKANGRRVVAVGTTSCRTLESIADDEGTVYARSGWTDIFIYPGYTFRAVDALITNFHLPKSTLVMLVSAFAGRELTMKSYREAVREEYRFFSFGDAMLII

SEQ ID NO: 69458 - protein, 340 aa, Noviherbaspirillum autotrophicum
  misc_feature (1)..(340): tr|A0A0C2BJ35|A0A0C2BJ35_9BURK S-adenosylmethionine:tRN A ribosyltransferase-isomerase OS=Noviherbaspirillum au totrophicum OX=709839 GN=queA PE=3 SV=1
MYSLSDFDFDLPQELIAQLPLPQRSASRLLHVDGDALVDRAFADLVGLLAPGDLLVFNDTRVLKARFFGVKETGGKVEVLVERVLDNRTVHAQVRASKSPQAGSRIRLSDAFDVVVGERAGEFYTLQFPSDVFDLIEAHGRLPLPPYIEHAADDFDEQRYQTVYAKQPGAVAAPTAGLHFDQPLLDALRDKGVQFAYVTLHVGAGTFQPVRVENLAEHKMHSEWYTILPETVDAVRAAKDGGGNVIAVGTTSMRALESASQSGRLQAGSGDTSLFITPGYVFKTVDRLITNFHLPKSTLLMLVSAFAGYQRIRTAYAHAIEKRYRFFSYGDAMLLTNTSC

SEQ ID NO: 69459 - protein, 341 aa, Noviherbaspirillum denitrificans
  misc_feature (1)..(341): tr|A0A254TFY7|A0A254TFY7_9BURK S-adenosylmethionine:tRN A ribosyltransferase-isomerase OS=Noviherbaspirillum de nitrificans OX=1968433 GN=queA PE=3 SV=1
MYSLSDFDFDLPQELIAQLPLPERSASRLLHVDSGGLVDRSFSEIVDQLSPGDLLVFNNTRVLKARFFGAKDSGGKVEVLVERVLDTRHVLAQVRASKSPKAGSTIRLADAFDVVVGERAGEFYTLEFPADVFDLIEAHGRLPLPPYIEHAADDFDEKRYQTVYAKEPGAVAAPTAGLHFDQALLDRVREKGVQFAYVTLHVGAGTFQPVRTENLAEHKMHSEWYTIPPETVDAVRAVRSAGSKVVAVGTTSMRALESASQSGELVAGSADTNLFITPGYTFKTVDRLITNFHLPKSTLLMLVSAFAGYQQIRAAYAHAIEKRYRFFSYGDAMLLTRNEQC

SEQ ID NO: 69460 - protein, 339 aa, Noviherbaspirillum humi
  misc_feature (1)..(339): tr|A0A239K994|A0A239K994_9BURK S-adenosylmethionine:tRN A ribosyltransferase-isomerase OS=Noviherbaspirillum hu mi OX=1688639 GN=queA PE=3 SV=1
MYSLSDFDFYLPSELIAQTPLAERSASRLLQVQGNALADRHFADIVDLLQPGDLLVFNDTRVLKARFFGAKASGGKVEVLVERILDSRTVHAQVRASKTPGPGTTLRLADAFDVTVGERAGEFFTLAFPGDVFELIDRHGRLPLPPYIEHDADEFDERRYQTVYAREPGAVAAPTAGLHFDEALLDKLRARGVNLAFVTLHVGAGTFQPVRVENLAEHKMHSEWYTISRETVDAVRAARTAGRDVIAVGTTSLRALESASRGGELQPGSDDTNLFITPGYTFRTVTRLITNFHLPKSTLMMLVSAFAGYDEIRRAYAHAIAQRYRFFSYGDAMLLTRNS

SEQ ID NO: 69461 - protein, 338 aa, Noviherbaspirillum sp.
  misc_feature (1)..(338): tr|A0A3A3G2U2|A0A3A3G2U2_9BURK S-adenosylmethionine:tRN A ribosyltransferase-isomerase OS=Noviherbaspirillum sp . K1S02-23 OX=2320865 GN=queA PE=3 SV=1
MYSLSDFDFDLPPELIAQIPLASRSASRLLEVDGSRLADWHFADIVDLLSPGDLLVFNDTRVLKARFFGVKQSGGKVEVLIERILDNRTVHAQVRASKSPQPGSTIRLADAFDVTVGERAGEFFTLGFPSDVFELVEAHGRLPLPPYIAHAADDFDEERYQTVYAKAPGAVAAPTAGLHFDQALLARLRARGVQTAFVTLHVGAGTFQPVRHENLAEHKMHSEWYTIAQETVDAVRAAQAAGRAVVAVGTTSLRALESASQSGSLQAGSADTRLFITPGYVFKTVTRLVTNFHLPKSTLLMLVSAFAGYDAIRAAYAHAIAQKYRFFSYGDAMLLSRV

SEQ ID NO: 69462 - protein, 340 aa, Noviherbaspirillum sp.
  misc_feature (1)..(340): tr|A0A5B8NDA5|A0A5B8NDA5_9BURK S-adenosylmethionine:tRN A ribosyltransferase-isomerase OS=Noviherbaspirillum sp . UKPF54 OX=2601898 GN=queA PE=3 SV=1
MYSLSDFDFDLPQELIAQVPLPQRSASRLLHVDGDALVDRAFADIVGLIAPGDLLVFNDTRVLKARFFGTKETGGKVEVLIERVLDNRTVHAQVRASKSPHAGSKIRLAEAFDVTVGERAGEFYTLQFPSDVFDLIEAHGRLPLPPYIEHAADEFDEQRYQTVYAKEPGAVAAPTAGLHFDQPLLDALRDKGVRFAYVTLHVGAGTFQPVRTENLAEHKMHSEWYTTPQETVDAVRAAKAAGRNVVAVGTTSMRALESASQSGQLLAGSGDTSLFITPGYVFKTVDRLITNFHLPKSTLLMLVSAFAGYPRIRTAYAHAIEKRYRFFSYGDAMLLTNTSC

SEQ ID NO: 69463 - protein, 342 aa, Novimethylophilus kurashikiensis
  misc_feature (1)..(342): tr|A0A2R5FBA9|A0A2R5FBA9_9PROT S-adenosylmethionine:tRN A ribosyltransferase-isomerase OS=Novimethylophilus kur ashikiensis OX=1825523 GN=queA PE=3 SV=1
MRTEDFNFYLPEDLIAQFPAPERRASRLLRLDGNSGALSDAWFKDLPNMLVPGDLLIFNDTRVIKARLLGQKESGGKVEALIERILDEHEALAHVRASHAPKPGQRLIFADAVEAEMVERQGDLFRLRFLGEKPLLDLLDEYGALPLPPYIQHNPDEFDENRYQTVYAREPGAVAAPTAGLHFDDAMLEELKNQGIGIAHVTLHVGAGTFQPVRVDNIAEHRMHSERYNVPQATVDAIEATRAAGRTVTAVGTTAMRALESAARDGQLKAGSGETDIFITPGYQFQVVERLLTNFHLPKSTLLMLVSAFAGVENIREAYRHAVEQRYRFFSYGDAMLIERKR

SEQ ID NO: 69464 - protein, 342 aa, Novosphingobium aromaticivorans
  misc_feature (1)..(342): sp|Q2G636|QUEA_NOVAD S-adenosylmethionine:tRNA ribosylt ransferase-isomerase OS=Novosphingobium aromaticivorans (strain ATCC 700278 / DSM 12444 / CIP 105152 / NBRC 16 084 / F199) OX=279238 GN=queA PE=3 SV=1
MRVDLFDFELPSENIALRPARPRDSARLLGVGRDGPFRDLIVRDLPDLLNPGDVLVFNDTRVIPAQLEGQRGEARVGATLHKRIDLRRWQAFVRNAKRLREGDVIQFGAGVTATAEMRLPDGSWTLFFPGEEPVEVLLERAGRMPLPPYIAGKRPTDEQDREDYQTMFAAKDGAVAAPTAALHFTPSLMEALAARGVATETLTLHVGAGTFLPVKADDTQDHQMHAEWGTIDAATADRLNAARAAGKRVIAVGTTSLRLLESATGEDRVIRPFEGDTSIFITPGYTFRAIDGLMTNFHLPKSTLFMLVSALMGLDRMQAAYAHAIAGGYRFYSYGDSSLLLP

SEQ ID NO: 69465 - protein, 342 aa, Novosphingobium barchaimii
  misc_feature (1)..(342): tr|A0A147EJD0|A0A147EJD0_9SPHN S-adenosylmethionine:tRN A ribosyltransferase-isomerase OS=Novosphingobium barch aimii OX=1420591 GN=queA PE=3 SV=1
MNVDLFDFELPNERIALRPVKPRDAARMLVADGTAEIADRNVRDLPQMLRAGDVLVFNDTRVIPAQLEGQRGEARIGATLHKRIDLRRWQAFVRNAKRLRPGDVISFPAGVSATAEQRFENGSWTLAFSGDEPVEVLLERAGRMPLPPYIAGKRPTDEADRSDYQTMFATRDGAVAAPTASLHFTPDLVERLDAAGIGRETLTLHVGAGTFLPVKAEDTADHRMHAEWGRIDGDTAARLNAVRKKGGRVIAVGTTSLRLLESAAQDDGQIAPFEGDTAIFITPGYRFRAIDGLMTNFHLPRSTLFMLVSALMGLERMKEAYSHAIENGYRFYSYGDASLLLP

SEQ ID NO: 69466 - protein, 342 aa, Novosphingobium barchaimii
  misc_feature (1)..(342): tr|A0A0J7Y6I0|A0A0J7Y6I0_9SPHN S-adenosylmethionine:tRN A ribosyltransferase-isomerase OS=Novosphingobium barch aimii LL02 OX=1114963 GN=queA PE=3 SV=1
MRVDLFDFDLPPESIALRPARPRDAAQMLVVDGERPFCNRHVRDLPDALRAGDVLVFNDTRVIPAQLEGTRGEARIGATLHKRIDLRRWQAFVRNAKRLRAGDLIAFPADVTAVAEERHDDGSWTLAFQGDEPVEVLLERAGRMPLPPYIAGKRPTDEADATDYQTMFAREKGAVAAPTAALHFTPELMKALGTAGIGSETLTLHVGAGTFLPVKADDTAEHRMHAEWGRIDAATADRLNAVRAGGGRLIAVGTTSLRVLESATGEDGVILPFEGDTSIFITPGYRFKAVDGLMTNFHLPKSTLFMLVSALMGLERMQAVYAHAIENGYRFYSYGDSSLLIP

SEQ ID NO: 69467 - protein, 342 aa, Novosphingobium fuchskuhlense
  misc_feature (1)..(342): tr|A0A117UVX2|A0A117UVX2_9SPHN S-adenosylmethionine:tRN A ribosyltransferase-isomerase OS=Novosphingobium fuchs kuhlense OX=1117702 GN=queA PE=3 SV=1
MRVDLFDFELPPERIALRPASPRDSAKLLGVGAEGPLIDAVVRDLPALLRAGDVLVFNDTRVIPAQLEGEVGNARIGATLHKRIDLRRWQAFVRNGRRLKPGVVVTFGAGVTAVAEERHADGSWTLAFGGEEPVEVLLERAGRMPLPPYIAGKRAVDERDRADYQTMFAARDGAVAAPTAALHFTPELMAALAEAGIGQETLTLHVGAGTFLPVKAEDTDDHAMHAEWGRIEPETAARLNAVRAAGGRIIAVGTTSLRLLESAADSSCVIHPFAGDTSIFITPGYRFRAIDGLMTNFHLPKSTLMMLVSALMGLERMQEAYAYAIANGYRFYSYGDSSLLIP

SEQ ID NO: 69468 - protein, 343 aa, Novosphingobium ginsenosidimutans
  misc_feature (1)..(343): tr|A0A5B8S6H9|A0A5B8S6H9_9SPHN S-adenosylmethionine:tRN A ribosyltransferase-isomerase OS=Novosphingobium ginse nosidimutans OX=1176536 GN=queA PE=3 SV=1
MRVDLFDFELPTDRIALRPARPRDAARLLFVPGQGDFADKGVLDLPSLLEPGDVLVFNDTRVIPAQLEGYRGAARIGATLHKRIDLRRWQAFVRNGKRLKAGDLIEFAAAVSAVAEERHADGSWTLAFAGDEPVEVLLDRAGQVPLPPYIAGKRAIDEQDKSDYQTMFAAKDGAVAAPTAALHFTPRLMEALAAREIGHETLTLHVGAGTFLPVKADDTNDHQMHAEWGVISAETAERLNASRARGNRIVAVGTTSLRLLESAADADRVIHPFEGDTAIFITPGYRFKGIDGLVTNFHLPKSTLFMLVSALMGLDRMQAAYAHAIANEYRFYSYGDSSLLLPS

SEQ ID NO: 69469 - protein, 342 aa, Novosphingobium guangzhouense
  misc_feature (1)..(342): tr|A0A2K2G571|A0A2K2G571_9SPHN S-adenosylmethionine:tRN A ribosyltransferase-isomerase OS=Novosphingobium guang zhouense OX=1850347 GN=queA PE=3 SV=1
MRVDLFDFDLPPESIALRPARPRDAAKMLVVAGDAPFEDHHVRDLPSQLRAGDVLVFNDTRVIPAQLEGMRGEARIGATLHKRIDLRRWQAFVRNAKRLREGDRISFPADVTAIAESRLPDGSWTLAFEGDEPVEVLLERAGRMPLPPYIAGKRPTDEADASDYQTMFAREKGAVAAPTAALHFTPELVEALDAAGVARETLTLHVGAGTFLPVKADDTVDHQMHAEFGRIDQATADRLNAARAAGGRVIAVGTTSLRLLESATGEDGVIRPFEGDTAIFITPGYRFRAIDGLMTNFHLPKSTLMMLVSALMGLERMQAVYAYAIANGYRFYSYGDSSLLLP

SEQ ID NO: 69470 - protein, 345 aa, Novosphingobium kunmingense
  misc_feature (1)..(345): tr|A0A2N0I257|A0A2N0I257_9SPHN S-adenosylmethionine:tRN A ribosyltransferase-isomerase OS=Novosphingobium kunmi ngense OX=1211806 GN=queA PE=3 SV=1
MRVDLFDFDLPPESIALRPARPRDAARLLLAKGRSAPLEDHVVRDLPGLLRKGDVLVFNDTRVIPAQLEGLRGEARIGATLHKRIDLRRWQAFVRNAKRLRDGDVIAFPAGVGAVAEERGDDGSWTLHFLGDEPVEVLLERAGQMPLPPYIAGKRATDEQDRADYQTMFAAQDGAVAAPTAALHFTPDLIAALDVAGVARETLTLHVGAGTFLPVKVDDTTDHRMHAEWGTIDAATAERLNAARAAGGRVIAVGTTSLRLLESATGEDGLIRSFSGDTAIFITPGYRFRAIDGLMTNFHLPKSTLFMLVSALMGLERMHEIYAHAIAGGYRFYSYGDSSLLLPSA

SEQ ID NO: 69471 - protein, 344 aa, Novosphingobium lindaniclasticum
  misc_feature (1)..(344): tr|T0IHF5|T0IHF5_9SPHN S-adenosylmethionine:tRNA ribosy ltransferase-isomerase OS=Novosphingobium lindaniclasti cum LE124 OX=1096930 GN=queA PE=3 SV=1
MRVDLFDFDLPPENIALRPARPRDSARMLVVQGRDQGPLVERVVRDLPGELRAGDVLVFNDTRVIPAQLEGRRGEAKIGATLHKRIDLRRWQAFVRNAKRLKAGDRMEFPADVSALAEERHEDGSWTLFFEGDEPVEVLLERAGRMPLPPYIAGKRQTDEQDASDYQTMFAREKGAVAAPTAALHFTPELIERLDAAGIKRETLTLHVGAGTFLPVKADETADHKMHAEWGRIDAATADRLNAARAAGGRVIAVGTTSLRLLESAAGEDDMIRPFEGDTSIFITPGYRFKAIDGLMTNFHLPKSTLFMLVSALMGLERMQEVYAHAISKAYRFYSYGDSSLLLP

SEQ ID NO: 69472 - protein, 343 aa, Novosphingobium malaysiense
  misc_feature (1)..(343): tr|A0A0B1ZPP3|A0A0B1ZPP3_9SPHN S-adenosylmethionine:tRN A ribosyltransferase-isomerase OS=Novosphingobium malay siense OX=1348853 GN=queA PE=3 SV=1
MRVDLFDFDLPPERIALRPARPRDAARMLVVEGEAPFTDRHVFDLPGILRRGDVLVFNDTRVIPAQLEGRRGEARIGATLHKRVDLRRWQAFVRNAKRLKSGDRIAFPADVHALAEERHEDGSWTLFFEGDEPVEVLLERAGRMPLPPYIAGKRETDEADASDYQTMFAREKGAVAAPTAALHFTPELVERLDAAGIARETLTLHVGAGTFLPVKAEDTADHRMHAEWGRIDAETADRLNAARAAGGRLIAVGTTSLRLLESAADDDDIIRPFAGDTSIFITPGYRFKAIDGLMTNFHLPKSTLFMLVSALMGLEKMQAAYAHAIAGQYRFYSYGDSSLLLPA

SEQ ID NO: 69473 - protein, 342 aa, Novosphingobium mathurense
  misc_feature (1)..(342): tr|A0A1U6GW44|A0A1U6GW44_9SPHN S-adenosylmethionine:tRN A ribosyltransferase-isomerase OS=Novosphingobium mathu rense OX=428990 GN=queA PE=3 SV=1
MRVDLFDFDLPTERIALRPAKPRDAARMLVVEGDALFSDRHVRDLPQRLRKGDVLVFNDTRVIPAQLEGRRGEARIGATLHKRIDLRRWQAFVRNAKRLKLGDRIEFPAEVTAIAEARHDDGSWTLAFEGDEPVEVLLERAGRMPLPPYIAGKRETDEADRSDYQTMFAREKGAVAAPTAALHFTPELVDRLDEAGIARETLTLHVGAGTFLPVKADDTADHKMHAEWGRIDQATADRLNAARMAGGRLIAVGTTSLRLLESAAGDDNVIRPFEGDTSIFITPGYRFKAIDGLMTNFHLPKSTLFMLVSALMGLEKMQAVYAHAIAEEYRFYSYGDSSLLLP

SEQ ID NO: 69474 - protein, 342 aa, Novosphingobium nitrogenifigens
  misc_feature (1)..(342): tr|F1Z8W6|F1Z8W6_9SPHN S-adenosylmethionine:tRNA ribosy ltransferase-isomerase OS=Novosphingobium nitrogenifige ns DSM 19370 OX=983920 GN=queA PE=3 SV=1
MRVDLFDFDLPPERIALRPARPRDSARLLHVPGKGALGDLHVRDLPGLLRKGDVLVFNDTRVIPAQLEGMRGQARIGATLHKREDLRRWQAFVRNGKRLSPGDTIDFGEGVMALAEVRHPDGSWTLAFQGDEPVEILLERAGRMPLPPYIASKRPTDAADRQDYQTMFAARDGAVAAPTAALHFTPGLLEALADAGIGHETLTLHVGAGTFLPVKAEDTSDHAMHPEWGRIEQETADRLNAVRAGGGRVIAVGTTSLRLLESAAGEDRVIRPFAGDTSIFITPGYTFRAIDGLMTNFHLPKSTLFMLVSALMGLDRMQEAYAHAIREGYRFYSYGDASLLLS

SEQ ID NO: 69475 - protein, 342 aa, Novosphingobium pentaromativorans
  misc_feature (1)..(342): tr|G6E6T1|G6E6T1_9SPHN S-adenosylmethionine:tRNA ribosy ltransferase-isomerase OS=Novosphingobium pentaromativo rans US6-1 OX=1088721 GN=queA PE=3 SV=1
MRVDLFDFDLPTERIALRPARPRDAARMLVVDGDAPFSDRHVRDLPQMLRKGDVLVFNDTRVIPAQLEGRRGEARIGATLHKRIDLRRWQAFVRNAKRLRPGDRVEFPAEVTAIAEARHEDGSWTLAFEGDEPVEVLLERAGRMPLPPYIAGKRDTDEADRSDYQTMFAREKGAVAAPTAALHFTPELVERLDEAGIARETLTLHVGAGTFLPVKADDTSDHKMHAEWGRIDQATADRLNAARAAGGRLIAVGTTSLRLLESAAGEDDVIRPFEGDTSIFITPGYRFKAIDGLMTNFHLPKSTLFMLVSALMGLDKMQAVYAHAIGAQYRFYSYGDSSLLLP

SEQ ID NO: 69476 - protein, 344 aa, Novosphingobium pentaromativorans
  misc_feature (1)..(344): tr|A0A2W5NNH3|A0A2W5NNH3_9SPHN S-adenosylmethionine:tRN A ribosyltransferase-isomerase OS=Novosphingobium penta romativorans OX=205844 GN=queA PE=3 SV=1
MRVDLFDFDLPPENIALRPARPRDSARMLVVHGRDEGPMAERAVRDLPGELHAGDVLVFNDTRVIPAQLEGRRGEAKIGATLHKRMDLRRWQAFVRNAKRLKAGDRIEFPAEVTALAEERHADGSWTLLFEGDEPVEVLLERAGRMPLPPYIAGKRETDEQDASDYQTMFAREKGAVAAPTAALHFTPELIERLDAAGVKRETLTLHVGAGTFLPVKADETQDHKMHAEWGRIDAETADRLNAARAAGGRIIAVGTTSLRLLESATGEDDVIRPFEGDTSIFITPGYRFKAIDGLMTNFHLPKSTLFMLVSALMGLERMQAVYAHAIDEGYRFYSYGDSSLLLP

SEQ ID NO: 69477 - protein, 342 aa, Novosphingobium resinovorum
  misc_feature (1)..(342): tr|A0A031K7E2|A0A031K7E2_9SPHN S-adenosylmethionine:tRN A ribosyltransferase-isomerase OS=Novosphingobium resin ovorum OX=158500 GN=queA PE=3 SV=1
MRVDLFDFDLPPESIALRPARPRDAAKMLVVDGDTPFADHHVRDLPAQLRAGDVLVFNDTRVIPAQLEGTRGEARIGATLHKRIDLRRWQAFVRNAKRLREGDRIAFPAEVTAIAESRLPDGSWTLAFEGDEPVEVLLERAGRMPLPPYIAGKRPTDEADASDYQTMFAREKGAVAAPTAALHFTPELVEALDAAGVARETLTLHVGAGTFLPVKADDTVDHQMHAEFGRIDQATADRLNAARAAGGRVIAVGTTSLRLLESATGEDGVIRPFEGDTAIFITPGYRFRAIDGLMTNFHLPKSTLMMLVSALMGLEKMQAVYAHAIANGYRFYSYGDSSLLLP

SEQ ID NO: 69478 - protein, 342 aa, Novosphingobium sediminis
  misc_feature (1)..(342): tr|A0A512AGK7|A0A512AGK7_9SPHN S-adenosylmethionine:tRN A ribosyltransferase-isomerase OS=Novosphingobium sedim inis OX=707214 GN=queA PE=3 SV=1
MRVDLFDFELPPERIALRPASPRDSARLLGVRTEGPFTDAVVRDLPSLLRAGDVLVFNDTRVIPAQLEGEVGNARIGATLHKRIDLRRWQAFVRNGRRLKPGVVVAFGAGVTAVAEERFADGSWTLAFGGEEPVEVLLERAGRMPLPPYIAGKRAVDERDREDYQTMFAAKDGAVAAPTASLHFTPELMAALAGAGIGHETLTLHVGAGTFLPVKADDTDDHAMHAEWGRIEPETAARLNAVRAAGGRIIAVGTTSLRLLESAADEARVIHPFAGDTSIFITPGYRFRAIDGLMTNFHLPKSTLMMLVSALMGLERMKEAYAYAIANEYRFYSYGDSSLLIP

SEQ ID NO: 69479 - protein, 342 aa, Novosphingobium sp.
  misc_feature (1)..(342): tr|A0A5C7UFX7|A0A5C7UFX7_9SPHN S-adenosylmethionine:tRN A ribosyltransferase-isomerase OS=Novosphingobium sp. O X=1874826 GN=queA PE=3 SV=1
MRVDLFDFELPQENIALRPARPRDSARLLGVGTDGPFRDLTVLDLPTLLNPGDVLVFNDTRVIPAQLEGQRGEARIGATLHKRIDLRRWQAFVRNGKRLREGDEIMFGAGVTAFAESRFADGSWTLFFPGEEPVEVLLERAGQMPLPPYIAGKRPTDEQDREDYQTMFAAKDGAVAAPTAALHFTPRLMDAIAARGIRTETLTLHVGAGTFLPVKADDTADHQMHAEWGTIDAATADRLNAARAAGNRVIAVGTTSLRLLESAAGEDKRIRPFEGDTAIFITPGYTFRAIDGLMTNFHLPKSTLFMLVSALMGLERMQAAYAHAIASGYRFYSYGDSSLLLP

SEQ ID NO: 69480 - protein, 344 aa, Novosphingobium sp.
  misc_feature (1)..(344): tr|A0A1W7MCN9|A0A1W7MCN9_9SPHN S-adenosylmethionine:tRN A ribosyltransferase-isomerase OS=Novosphingobium sp. M D-1 OX=1630648 GN=queA PE=3 SV=1
MRVDLFDFELPPERIALRPARPRDAARMLLAKGDGTLADHVVRDLPALLRAGDVLVFNDTRVIPAQLEGRRGEAKIGATLHKRIDLRRWQAFVRNAKRLREGDVIDFGADVSGTAEQRHDDGSWTLFFPGDEPVEVLLERAGRMPLPPYIAGKRPTDEEDRRDYQTMFAARDGAVAAPTAALHFTDGLMAALAQAGIAHETLTLHVGAGTFLPVKAEDTADHRMHAEWGRIEADTADRLNRARAAGGRVIAVGTTSLRLLESAAGEDNVIRPFAGDTSIFITPGYRFRAIDGLMTNFHLPRSTLFMLVSALMGLETMQAAYAHAIANAYRFYSYGDSSLLLPEG

SEQ ID NO: 69481 - protein, 347 aa, Novosphingobium subterraneum
  misc_feature (1)..(347): tr|A0A0B9A1C9|A0A0B9A1C9_9SPHN S-adenosylmethionine:tRN A ribosyltransferase-isomerase OS=Novosphingobium subte rraneum OX=48936 GN=queA PE=3 SV=1
MRVDLFDFELPQENIALRPARPRDSARLLGVGMDGPFRDLTVLDLPSLLNPGDVLVFNDTRVIPAQLEGQRPSLNGEGARLGATLHKRIDLRRWQAFVRNGKRLREGDEIRFGAGVSAFAESRFPDGSWTLFFPGEEPVEVLLERAGQMPLPPYIAGKRPTDERDREDYQTMFAAKDGAVAAPTAALHFTPRLMEAIAERGIRTETLTLHVGAGTFLPVKADDTKDHQMHAEWGTIDSATADRLNAARADGNRVIAVGTTSLRLLESAAGEDRVIRPFEGDTAIFITPGYSFRAIDGLMTNFHLPKSTLFMLVSALMGLDRMQAAYAHAIASGYRFYSYGDSSLLLP

SEQ ID NO: 69482 - protein, 342 aa, Novosphingobium taihuense
  misc_feature (1)..(342): tr|A0A562JXY8|A0A562JXY8_9SPHN S-adenosylmethionine:tRN A ribosyltransferase-isomerase OS=Novosphingobium taihu ense OX=260085 GN=queA PE=3 SV=1
MRVDLFDFELPQENIALRPARPRDSARLLGVGHEGPFRDLTVLDLPSLLNPGDVLVFNDTRVIPAQLEGQRGQARIGATLHKRIDLRRWQAFVRNGKRLRQDDEIRFGAGVTAYAETRHTDGSWTLFFPGEEPVEVLLERAGQMPLPPYIAGKRPTDAQDREDYQTMFAAKDGAVAAPTAALHFTPRLMEALSARGILTETLTLHVGAGTFLPVKAEDTQDHQMHAEWGTIDAATADRLNAARAAGNRVIAVGTTSLRLLESAAGDDKVIRPFEGDTAIFITPGYTFRAIDGLMTNFHLPKSTLFMLVSALMGLDRMQEAYAHAIGAGYRFYSYGDSSLLLP

SEQ ID NO: 69483 - protein, 343 aa, Novosphingobium tardaugens
  misc_feature (1)..(343): tr|U2ZWY0|U2ZWY0_9SPHN S-adenosylmethionine:tRNA ribosy ltransferase-isomerase OS=Novosphingobium tardaugens NB RC 16725 OX=1219035 GN=queA PE=3 SV=1
MRVDLFDFVLPPERIALRPARPRDAARMLVVRGDIAPFGDCTVRDLPAQLRRGDVLVFNDTRVIPAQLEGRRGDARIGATLHKRIDLRRWQAFIRNGKRLRVGDVVQFARDVAAIAEARHDDGSWTLAFVGDEPVEVLLERAGTMPLPPYIAGKRPTDEADRSDYQTMFAREEGAVAAPTAALHFTPDLLAALDEAGIGRETLTLHVGAGTFLPVKVEDTAEHRMHSEWGRIEPDVAARLNAARQAGGRVIAVGTTSLRVLESATGDDGIIQPFSGDTDIFITPGYRFRAIDGLMTNFHLPRSTLFMLVSALMGMERMQAAYAHAIAEHYRFYSYGDGSLLLP

SEQ ID NO: 69484 - protein, 357 aa, Obesumbacterium proteus
  misc_feature (1)..(357): tr|A0A4Q9D9A3|A0A4Q9D9A3_9GAMM S-adenosylmethionine:tRN A ribosyltransferase-isomerase OS=Obesumbacterium prote us OX=82983 GN=queA PE=3 SV=1
MRVSDFSFELPDNLIAHYPQAERSACRLLSLDGPTGKLEHGVFTDVLDKIEAGDLLIFNNTRVIPARLFGRKASGGKLEVLVERVLDDTRVLAHVRASKSPKPGAELLLGDNEDIRVTMVARHDTLFELRFDDGRDVLTILNAAGHMPLPPYIDRPDEDADRELYQTVYSSRPGAVAAPTAGLHFDEPLLEKLRAKGVEMAFVTLHVGAGTFQPVRVDTIENHTMHSEYAEVPQDVVDAVLACKARGNRVIAVGTTSVRSIESAAAAAKDALIAPFFDDTQIFIYPGYHYQVIDALITNFHLPESTLIMLVSAFAGYQNTMHAYHEAVAKEYRFFSYGDAMFITRSELAEQEKVSAE

SEQ ID NO: 69485 - protein, 357 aa, Obesumbacterium proteus
  misc_feature (1)..(357): tr|A0A1B7KJZ3|A0A1B7KJZ3_9GAMM S-adenosylmethionine:tRN A ribosyltransferase-isomerase OS=Obesumbacterium prote us ATCC 12841 OX=1354268 GN=queA PE=3 SV=1
MRVSDFSFELPDNLIARYPQAERSACRLLSLDGPTGKLEHGVFTDVLDKIEAGDLLIFNNTRVIPARLFGRKASGGKLEVLVERVLDDTRVLAHVRASKSPKPGAELLLGDNEDIRVTMVARHDTLFELRFDDGRDVLTILNAAGHMPLPPYIDRPDEDADRELYQTVYSSRPGAVAAPTAGLHFDEPLLEKLRAKGVEMAFVTLHVGAGTFQPVRVDTIENHTMHSEYAEVPQDVVDAVLACKARGNRVIAVGTTSVRSIESAAAAAKDALIAPFFDDTQIFIYPGYHYQVIDALITNFHLPESTLIMLVSAFAGYQNTMHAYHEAVAKEYRFFSYGDAMFITRSELAEQEKVSAE

SEQ ID NO: 69486 - protein, 345 aa, Oblitimonas alkaliphila
  misc_feature (1)..(345): tr|A0A0K1XC01|A0A0K1XC01_9GAMM S-adenosylmethionine:tRN A ribosyltransferase-isomerase OS=Oblitimonas alkaliphi la OX=1697053 GN=queA PE=3 SV=1
MRVEQFHFDLPDELIARYPLAERRASRLLMLKAGEALQHQQFSDLLAEIQPGDLMVFNNTRVIPARLFGQKTTGGKLEVLVERVLDEHRVLAHVRASKAPKVEALLEFSGFQASMLARHDSLFELAFVQPVLQVLQQIGHMPLPPYIDRADELADRERYQTVYAQTAGAVAAPTAGLHFDQAMLDALAAKGVEQAFVTLHVGAGTFQPVRVETIEQHHMHSEWLEVGPEVVEAVEACKARGGRVIAVGTTSVRSLETAALSGKIQPFTGDTDIFIYPGKTFNVVDALVTNFHLPESTLLMLVSAFAGYHETMAAYHAAVANKYRFFSYGDAMFLTRHPQPSIPEE

SEQ ID NO: 69487 - protein, 344 aa, Oceanibacterium hippocampi
  misc_feature (1)..(344): tr|A0A1Y5TA64|A0A1Y5TA64_9PROT S-adenosylmethionine:tRN A ribosyltransferase-isomerase OS=Oceanibacterium hippo campi OX=745714 GN=queA PE=3 SV=1
MKVDAFDFELPAELIAERPAEPRDSARLLVVGNDGFADRQVADLADLLSPGDLLVFNDTKVIPARLRGLRREAKVEATLHMRLGPGRWAAFARPAKRLKPSDRIDFAEDFHATVAEKGEAGEITLDFDREGAALDEAIAAHGELPLPPYIASRRAVDRRDLDDYQTMFAEKSGAVAAPTAGLHFTPGLIGKLSARDIGHLCITLHVGAGTFLPVKADDTDEHRMHSEIGVIAPDHADRINAVRAGGGRIVAVGTTSLRLLESAADETGQVQPFSGATDIFITPGYRFRAVDLLITNFHLPRSTLFMLVSAFSGLERMRAAYGHAIDRRYRFYSYGDAALLFPGS

SEQ ID NO: 69488 - protein, 342 aa, Oceanibaculum indicum
  misc_feature (1)..(342): tr|A0A420WQS0|A0A420WQS0_9PROT S-adenosylmethionine:tRN A ribosyltransferase-isomerase OS=Oceanibaculum indicum OX=526216 GN=queA PE=3 SV=1
MKVDLFDFHLPPERIAQMPAEPRDSARLLDIRPDRLGDCGVLDLPALLNPGDLLVFNDTRVIPARLNGNRGEVAVEVLLHKAEADGTWLAFARPGKRLKIGQTIRFAEDFAADILEKREGGELRLSFTGASDLLEALKRHGSMPLPPYIRGGKAEAADAERYQTIYAREEGAVAAPTAGLHFTDRLMAKLAERGIGTAFLTLHVGAGTFLPVKADDTTDHRMHAEWGSIDADTAARITETKRQGGRVVAVGTTSLRLLESAAREDGTVPAFSGDTDIFITPGYRFKAVDLLMTNFHLPRSTLFMLVSAFSGLERMQSAYSHAIEAGYRFYSYGDACLLHPSR

SEQ ID NO: 69489 - protein, 342 aa, Oceanibaculum indicum
  misc_feature (1)..(342): tr|K2JP56|K2JP56_9PROT S-adenosylmethionine:tRNA ribosy ltransferase-isomerase OS=Oceanibaculum indicum P24 OX= 1207063 GN=queA PE=3 SV=1
MKVDLFDFHLPPERIAQMPAEPRDSARLLDIRPDRLGDCGVLDLPALLNPGDLLVFNDTRVIPARLHGYRGEVAVEVLLHKAEADGTWLAFARPGKRLKTGQTIRFAEDFAADILEKREGGELRLAFAGAADLLEALKRHGSMPLPPYIRGGKAEAADAERYQTIYAREEGAVAAPTAGLHFTDRLMAALAERGIGTAFLTLHVGAGTFLPVKADDTEDHRMHAEWGSIDPETAARITETKRQGGRVVAVGTTSLRLLESAAREDGTVPAFSGDTDIFITPGYRFKAVDLLMTNFHLPRSTLFMLVSAFAGLERMQSAYSHAIEAGYRFYSYGDACLLHPSR

SEQ ID NO: 69490 - protein, 357 aa, Oceanicaulis sp.
  misc_feature (1)..(357): tr|A0A2T4ZSN7|A0A2T4ZSN7_9RHOB S-adenosylmethionine:tRN A ribosyltransferase-isomerase OS=Oceanicaulis sp. PT13 A OX=2135616 GN=queA PE=3 SV=1
MTQLRLTDFDFHLPEDRIALRPARPRDSARLLLVKDGGVSDLGVLDLPDLLEPGDLLVFNDTRVIPAALTGVRPARAHGGGGDVEIEINLHKRDDEAVWRAFVRPAKRLKENDTLHFKGGLTAQVTDKREGGEVVLTFDRAGVALDKAIVEAGAPPLPPYIASKRAADAADLEDYQTVYAAPDKAGSVAAPTAGLHFTDRLFEALDARGVKRTHVTLHVGAGTFLPVKTEDLSEHQMHAEYYEISEETAALINETRKAGGRIIAVGTTSIRTLESAAEADGTVRAEARDTAIFITPGYRFKVIDALMTNFHLPKSTLFMLVSALAGFDEMHAAYAHAIKQEYRFFSYGDSSLLWRKT

SEQ ID NO: 69491 - protein, 353 aa, Oceanicaulis sp.
  misc_feature (1)..(353): tr|A0A2D5FR23|A0A2D5FR23_9RHOB S-adenosylmethionine:tRN A ribosyltransferase-isomerase OS=Oceanicaulis sp. OX=1 924941 GN=queA PE=3 SV=1
MRVSDFDFELPEERIALRPARPRDAARLLHIAGNGVFADRGVSDLPELLREGDLMVFNDTRVIPAALTGVRPARSAGGGGPVDVEVNLHKRLDASGWRAFVRPAKRLRVGDVIAFSDALSAEVTGKSEGGDTRLVFNRTGAALDEAIAATGVPPLPPYIARKREVDEQDVEDYQTLFARQDGSVAAPTAGLHFTERLLTALADRGVQQTHVTLHVGAGTFLPVKADDLADHRMHAEWCTVSTRAAEAINTAKAEGRRVIPVGTTALRTIESLAVQPGVIEAGSRDTDIFITPGYDFRITDALMTNFHLPRSTLFMLVSALAGLDVMKRAYAHAIRSGYRFYSYGDASLIERSA

SEQ ID NO: 69492 - protein, 350 aa, Oceanicella actignis
  misc_feature (1)..(350): tr|A0A1M7TZY3|A0A1M7TZY3_9RHOB S-adenosylmethionine:tRN A ribosyltransferase-isomerase OS=Oceanicella actignis OX=1189325 GN=queA PE=3 SV=1
MRVDEFDFDLPEELIALRPVRPRRAARLLAARGDAIDDLRVADLPRLLRAGDVLVFNDTRVIPARLFGERRRQTADGSGVARIEATLLERAGADAWRALARPAKRLREGDEILFAGGLRARVAERGAGGEVALVFDRAGPELDAAIAAAGVMPLPPYIAARRPADAQDEEDYQTVFAARPGAVAAPTAALHFDQPLLAALDEAGVRSARVTLHVGAGTFLPVKAERVEDHRMHAEWGEISAEAAETIARARAEGGRVIAVGTTALRVLETAADEDGRLRPWSGETDIFITPGYRFRAVDGLMTNFHLPRSTLMMLVSALMGVERIRRIYAHAVAERYRFYSYGDASLLIP

SEQ ID NO: 69493 - protein, 350 aa, Oceanicella actignis
  misc_feature (1)..(350): tr|A0A5D3W7N2|A0A5D3W7N2_9RHOB S-adenosylmethionine:tRN A ribosyltransferase-isomerase OS=Oceanicella actignis OX=1189325 GN=queA PE=3 SV=1
MRVDEFDFDLPEELIALRPVRPRRAARLLAARGDAIDDLRVADLPRLLRAGDVLVFNDTRVIPARLFGERRRQTADGSGVARIEATLLERAGADAWRALARPAKRLREGDEILFAGGLRARVAERGAGGEVALVFDRAGPELDAAIAAAGVMPLPPYIAARRPADAQDEEDYQTVFAARPGAVAAPTAALHFDQPLLAALDEAGVRSARVTLHVGAGTFLPVKAERVEDHRMHAEWGEISAEAAEAIARARAEGGRVVAVGTTALRVLETAADEDGRLRPWSGETDIFITPGYRFRAVDGLMTNFHLPRSTLMMLVSALMGVERIRRIYAHAVAERYRFYSYGDASLLIP

SEQ ID NO: 69494 - protein, 354 aa, Oceanicoccus sagamiensis
  misc_feature (1)..(354): tr|A0A1X9NMP3|A0A1X9NMP3_9GAMM S-adenosylmethionine:tRN A ribosyltransferase-isomerase OS=Oceanicoccus sagamien sis OX=716816 GN=queA PE=3 SV=1
MQLSDFHFDLPDSLIARYPMAERTASRLLVLDGAAGAIQHQQFTDLLSLLNKGDLLVFNDTKVLPARLWGKKSTGGRIEILVERVLDENRVLAHMRSSKSPKAGAELHLVADQDSDKVLAKVEVLGRQEALFELLFTEGGNALEVMNAIGHMPLPPYIDRADELDDRERYQTVFGKREGAVAAPTAGLHFTEDFIAQCQAKGVDTTFVTLHVGAGTFQPVRVDNITEHKMHAEYIEVSADVCEQVKTTRANGGRVIAVGTTSVRSLESASQGGELQPFSGDSEIFIYPGYTFKSVDAMVTNFHLPESTLIMLVSAFAGQDNVLAAYKEAVTQQYRFFSYGDAMLVLPSTTTSEN

SEQ ID NO: 69495 - protein, 349 aa, Oceanicola granulosus
  misc_feature (1)..(349): tr|Q2CD33|Q2CD33_OCEGH S-adenosylmethionine:tRNA ribosy ltransferase-isomerase OS=Oceanicola granulosus (strain ATCC BAA-861 / DSM 15982 / KCTC 12143 / HTCC2516) OX=3 14256 GN=queA PE=3 SV=1
MQLSDFDFDLPDELIAVRPARPRSSARLLLAEGDAIGDRIVSELPRILQPGDRLVLNDTRVIPARLTGTRTRPGAAGEGVARIEVTLLEPRADGLWSALVKPLRKLREGEEVVFSPRLTASLEAREAGQGLLRFNCTGEDFDAALAEAGAMPLPPYIAARRPADAADKDDYQTVWAERPGAVAAPTASLHFDAPLLEAIAARGVEITRVTLHVGAGTFLPVKVEDVTTHRMHAEWGEVTEAAAAEIAATRGAGGRVIPVGTTALRLIETAARASGEIAPWTGETDIFIYPGFEFRVADGLMTNFHLPRSTLMMLVSAFMGMERVRAIYAHAVAERYRFFSYGDASLLLP

SEQ ID NO: 69496 - protein, 351 aa, Oceanicola litoreus
  misc_feature (1)..(351): tr|A0A1N6ER69|A0A1N6ER69_9RHOB S-adenosylmethionine:tRN A ribosyltransferase-isomerase OS=Oceanicola litoreus O X=1217970 GN=queA PE=3 SV=1
MKLDDFDFALPEELIAVRPAYPRGASRLLVAGADWIEDRGVADIVDYLRPGDRLVLNNTRVIPARLSGVRRRLSAQGPVEARVEVTLLEPGAGGEWLALARPARKVKPGEVLEFGAGLAAEVLEREGGEVRLRFSVEGADFDAALEQVGAMPLPPYIAARRAADEADREDYQTVFAKRRGAVAAPTASLHFDEALLARIRAMGVGLTEVTLHVGAGTFLPVTVEDVTTHRMHAERGEVSAQAADEINATKAAGGRIIPVGTTALRLIESAAVETGRIAAWDGETDIFIYPGFRFRLTDALMTNFHLPKSTLMMLVSALMGQDRIREVYRHAIEARYRFFSYGDSSLLLPGA

SEQ ID NO: 69497 - protein, 351 aa, Oceanicola sp.
  misc_feature (1)..(351): tr|A0A5B8BUB4|A0A5B8BUB4_9RHOB S-adenosylmethionine:tRN A ribosyltransferase-isomerase OS=Oceanicola sp. D3 OX= 2587163 GN=queA PE=3 SV=1
MKLDDFDFDLPEELIAVRPAYPRGASRLLVAGADWIDDRGVGDICDYLRPGDRLVLNNTKVIPARLSGVRRRDSAQGMVEARVEVTLLEPGTGGEWLALARPARKVKPGEVVEFGAGLKAEVLSRDGGEVRLRFSAEGEAFDAALEQVGAMPLPPYIAARRVADEADREDYQTVFAKHTGAVAAPTASLHFDAALLARIEAMGVGLTEVTLHVGAGTFLPVTVEDVTTHRMHAERGEVTAQAADEINATKAAGGRIIPVGTTALRLIESAAAGPGRIAPWQGETDIFIYPGFQFALTDALMTNFHLPKSTLMMLVSALMGQERIGEIYRHAIEARYRFFSYGDSSLLLPGE

SEQ ID NO: 69498 - protein, 348 aa, Oceanicola sp.
  misc_feature (1)..(348): tr|A0A254RB20|A0A254RB20_9RHOB S-adenosylmethionine:tRN A ribosyltransferase-isomerase OS=Oceanicola sp. 22II-s 10i OX=1317116 GN=queA PE=3 SV=1
MKLDDFDFDLPERLIATRPARPRSSARLLVAEGDRITDAVVRDLTDWLRPGDRLVLNDTKVIPARLFGERLRAGEAGETAARIEVTLTEPRADGCWAALLKPLRKVRDGEEIRFSPRLTARLEARDGGQGVLRFNCEGADFDAALAEAGQMPLPPYIAAKRPADAQDREDYQTVWARHAGAVAAPTASLHFDDELLARVRAAGVEMTHVTLHVGAGTFLPVKVEDVTTHRMHAEWGEVTEAAAAAIAATKAAGGRVIPVGTTALRLIESAAAGGAIAPWRGDTDIFIYPGYEFRVTDALMTNFHLPKSTLLMLVSALMGRDRMLRVYDHAVREGYRFFSYGDASLLVP

SEQ ID NO: 69499 - protein, 349 aa, Oceanihabitans sediminis
  misc_feature (1)..(349): tr|A0A368PCD9|A0A368PCD9_9FLAO S-adenosylmethionine:tRN A ribosyltransferase-isomerase OS=Oceanihabitans sedimi nis OX=1812012 GN=queA PE=3 SV=1
MKLSHFQFDLPDELLAEFPAENRDESRLMVLNREKQTIEHKMFKDLIEYFDEDDVLILNNTKVFPARLYGNKEKTGARIEVFLLRELNEEQRLWDVLVDPARKIRIGNKLYFGEDETLVAEVIDNTTSRGRTLRFLYDGSYQEFRRKLNELGETPLPKYINREVTPEDEVRYQTIFAKNEGAVAAPTAGLHFSKHLLKRLEIKGVNFAEVTLHVGLGTFNPVEVEDLSKHKMDSEEIKIDATAANIINTAKLNKKRICAVGTTAMRAIESSVSTNGTLNEFEGWTNKFIFPPYDFSIANCMITNFHTPKSTLLMMASAFAGHEFIKKAYDEAIKEKYNFYSYGDAMLII

SEQ ID NO: 69500 - protein, 348 aa, Oceanimonas baumannii
  misc_feature (1)..(348): tr|A0A235CP94|A0A235CP94_9GAMM S-adenosylmethionine:tRN A ribosyltransferase-isomerase OS=Oceanimonas baumannii OX=129578 GN=queA PE=3 SV=1
MQVQDFSFELPDELIARHPMAERTASRLLQLDGNTGNLVHGSFGDILDLINPGDLLVFNNTRVIPARLFGRKASGGKLEVLVERMLDDKRVLAHVRASKAPKPGTELILEPDVKATMVARHDALFEIEFDDARTVLEILESVGHMPLPPYIDRPDTDADKERYQTVYNEKPGAVAAPTAGLHFDEPLLARLKEKGADLAFITLHVGAGTFQPVRVDNVLEHKMHAEYIEVPADVVAQIEATRTRGGRVIAVGTTSVRSLESAAQASLAEGKALAPFYGDTNIFIYPGYRFQLVDAMVTNFHLPESTLIMLVSAFAGQDHIMEAYRQAVAERYRFFSYGDAMFITKQQA

SEQ ID NO: 69501 - protein, 348 aa, Oceanimonas doudoroffii
  misc_feature (1)..(348): tr|A0A233REE4|A0A233REE4_9GAMM S-adenosylmethionine:tRN A ribosyltransferase-isomerase OS=Oceanimonas doudoroff ii OX=84158 GN=queA PE=3 SV=1
MQVQDFSFELPDELIARHPMPERTASRLLQLDGNTGNLVHGRFGDILDLINPGDLLVFNNTRVIPARLFGRKASGGKLEVLVERMLDDKRVLAHVRSSKSPKPGTELILEPDVHATMVARHDALFEIEFNDDRSVLEILEAVGHMPLPPYIDRPDTDADKERYQTVYNEKPGAVAAPTAGLHFDEPLLNAIRAKGAELAFITLHVGAGTFQPVRVDNVLEHKMHAEYIEVPAEVVAQIEATRARGGRVIAVGTTSVRSLESAAQASLAKGEPLAPFYGDTDIFIYPGYRFQLVDAMVTNFHLPESTLIMLVSAFAGQDHIMEAYRQAVAERYRFFSYGDAMFITRQIK

SEQ ID NO: 69502 - protein, 353 aa, Oceanimonas sp.
  misc_feature (1)..(353): tr|H2FZA4|H2FZA4_OCESG S-adenosylmethionine:tRNA ribosy ltransferase-isomerase OS=Oceanimonas sp. (strain GK1) OX=511062 GN=queA PE=3 SV=1
MQVHDFSFELPDELIARHPMPERTASRLLQLDGNTGQLVHGRFGDILDLINPGDLLVFNNTRVIPARLFGRKASGGKLEVLVERVLDDQRVLAHVRSSKAPKPGSALILEPDVKATMVARHDALFEIEFHDERTVLEILESVGHMPLPPYIDRPDTDADKERYQTVYNEKPGAVAAPTAGLHFDEPLLARLKEKGAELAFITLHVGAGTFQPVRVDNVLEHKMHAEYIEVPAEVVAQIEATRAQGGRVIAVGTTSVRSLESAAQASLANGEPLAPFYGDTDIFIYPGYRFQLVDAMVTNFHLPESTLIMLVSAFAGREHIMEAYRAAVAERYRFFSYGDAMFITRQQGLGTGE

SEQ ID NO: 69503 - protein, 244 aa, Oceaniovalibus guishaninsula
  misc_feature (1)..(244): tr|K2HBZ9|K2HBZ9_9RHOB S-adenosylmethionine:tRNA ribosy ltransferase-isomerase OS=Oceaniovalibus guishaninsula JLT2003 OX=1231392 GN=OCGS_0708 PE=3 SV=1
MVFSPDLSATVEGRGEGAALLRFNLAGDDFDAALDAAGAMPLPPYIASKRAADAQDRTDYQTIWAARAGAVAAPTASLHFDDALLAAVRARGVDLTHVTLHVGAGTFLPVKVDDVSQHRMHAEWGEVTADAAARIAATRASGGRVIPVGTTALRLIESAAARGAIAPFRGQTDIFIRPGHVFRVVDGLMTNFHLPKSTLMMLVSALMGVDRMRRVYAHAVAREYRFFSYGDASLLLPDADGARG

SEQ ID NO: 69504 - protein, 365 aa, Oceaniovalibus sp.
  misc_feature (1)..(365): tr|A0A5D0S850|A0A5D0S850_9RHOB S-adenosylmethionine:tRN A ribosyltransferase-isomerase OS=Oceaniovalibus sp. AC AM 378 OX=2599923 GN=queA PE=3 SV=1
MKLSDFDFDLPEALIATRPVRPRSSARMLVAEGGAIADAAMIDLPGWLLPGDLLVLNDTRVIPARLSGQRFRDGAEGRTAARIGVTLLEPRPGGLWSALVKPLKKLRDGEEIRFSDQLSARLEGRDEGTALLAFNVAGASFDAALAEAGEMPLPPYIANRRPADDRDREDYQTLWARHSGAVAAPTASLHFDDTLMAGLAARGVTTTHVTLHVGAGTFLPVKTDDVSQHRMHAEWGEVTVEAADQINATIRAGGRIVPVGTTALRLIESAATGDGVIAPWRGATDIFITPGFRFRLTDALVTNFHLPKSTLMMLVSALVGQDEVRRIYAHAISERYRFFSYGDGSLLIPPRQRRHQMVANDTTVP

SEQ ID NO: 69505 - protein, 353 aa, Oceanisphaera arctica
  misc_feature (1)..(353): tr|A0A2P5TQ31|A0A2P5TQ31_9GAMM S-adenosylmethionine:tRN A ribosyltransferase-isomerase OS=Oceanisphaera arctica OX=641510 GN=queA PE=3 SV=1
MLVRDFSFELPDELIARHPMPERSASRLLQLNGNGGDITHGQFSQILDLVNPGDLLVFNNTRVIPARLFGRKASGGKLEVLIERVLDDKRVLAHVRASKAPKPGTALILDPDVQATMLARHDALFEIEFHDERPVLEILDAVGHMPLPPYIDRPDTDADKERYQTVYNEKPGAVAAPTAGLHFDQPLLDALTAKGAELAFVTLHVGAGTFQPVRVEQVLEHKMHAEYIEVSPQVVAQIEATRARGGRVIAVGTTSVRSLESAARATMANGEPLAPFYGDTDIFIYPGYRFQLVDAMVTNFHLPESTLIMLVSAFAGYDHIMEAYRQAVAERYRFFSYGDAMFITRQQGLGNRD

SEQ ID NO: 69506 - protein, 348 aa, Oceanisphaera avium
  misc_feature (1)..(348): tr|A0A1Y0CTQ7|A0A1Y0CTQ7_9GAMM S-adenosylmethionine:tRN A ribosyltransferase-isomerase OS=Oceanisphaera avium O X=1903694 GN=queA PE=3 SV=1
MLVRDFSFELPNELIAHHPMSERTASRLLQLDGNSGAITHGHFSQLLEQVNAGDLLVFNNTRVIPARLHGHKASGGKIEVLVERILDDKRVLAHVRASKAPKPGTALILEPNVQATMLARHDALFEIEFNDSRAVLDILEAVGHMPLPPYIDRPDTEADKERYQTVYNEKPGAVAAPTAGLHFDQALLDALVAKGAELAFVTLHVGAGTFQPVRVEQVLDHKMHAEYIEVPLEVIDKIKATRAQGGRIIAVGTTSVRSLESAAQASLAQGQPLAPFYGDTDIFIYPGYKFQLVDMMITNFHLPESTLMMLVSAFAGYNQIKEAYRQAIEQRYRFFSYGDAMLLSRRDA

SEQ ID NO: 69507 - protein, 348 aa, Oceanisphaera profunda
  misc_feature (1)..(348): tr|A0A1Y0D2Y2|A0A1Y0D2Y2_9GAMM S-adenosylmethionine:tRN A ribosyltransferase-isomerase OS=Oceanisphaera profund a OX=1416627 GN=queA PE=3 SV=1
MLVRDFSFELPDELIARHPMAERTASRLLQVDGNSGAISHGHFQQLLTQINAGDLLVFNNTRVIPARLYGHKASGGKLEVLVERVLDDKRVLAHVRSSKSPKPGTALILEPNVQATMLARHDALFEIEFNDPRSVLEILEAVGHMPLPPYIDRPDTDADKERYQTVYNEKPGAVAAPTAGLHFDQALLDALVAKGAELAFVTLHVGAGTFQPVRVEQVLDHKMHAEYIEVPAEVVDKINAARARGGRIIAVGTTSVRSLESAAQASLAQGQPLAPFYGDTDIFIYPGYEFQLVDLMVTNFHLPESTLMMLVSAFAGYDHIKEAYRQAIEQRYRFFSYGDAMLLTKREA

SEQ ID NO: 69508 - protein, 348 aa, Oceanisphaera psychrotolerans
  misc_feature (1)..(348): tr|A0A1J4QHG6|A0A1J4QHG6_9GAMM S-adenosylmethionine:tRN A ribosyltransferase-isomerase OS=Oceanisphaera psychro tolerans OX=1414654 GN=queA PE=3 SV=1
MLVRDFSFELPDELIARHPMPERSASRLLQLNGNSGDITHGQFGQILNLVNPGDLLVFNNTRVIPARLFGRKASGGKLEVLVERVLDDKRVLAHVRASKAPKPGSALVLEPDVQATMLARHDALFEIEFHDERPVLEILEAVGHMPLPPYIDRPDTDADKERYQTVYNEKPGAVAAPTAGLHFDQPLLDALTAKGAELAFVTLHVGAGTFQPVRVDKVLEHKMHAEYIEVSPEVVAQIAATRARGGRVIAVGTTSVRSLESAARATMANGEPLAPFYGDTDIFIYPGYRFQLVDAMITNFHLPESTLIMLVSAFAGYDHIMEAYRQAVAERYRFFSYGDAMFITRQQG

SEQ ID NO: 69509 - protein, 339 aa, Oceanispirochaeta sp.
  misc_feature (1)..(339): tr|A0A370B0E6|A0A370B0E6_9SPIO S-adenosylmethionine:tRN A ribosyltransferase-isomerase OS=Oceanispirochaeta sp. M1 OX=2283433 GN=queA PE=3 SV=1
MKIREFSFNLPPEQIAQHPPEERGTAKLMVMDRENGQVSHKNMQDFPDLIEPGTLVIFNNSRVRKARVFAFSEHGGKVEFFFLKSLEENLWLCMVSKAKKQKTGKKFSFPGDLKGVIEEEVSSNHRKVRFSAPVDDDYLDIHGHIPLPPYIKREDSKDDSERYQSVFSKETGSVAAPTASLHFTDEILGRLKERGIETAFITLHVGLGTFEPVRTESILDHEMHEEQFSISDETADKVEKAVREGRPVLAVGTTSVRTLESAWVDGKLQRGENSTDIFIYPGYEFKVVNRMFTNFHTPESTLLVLVSAFAGKDHIDAAYKEAVEKGYMFFSYGDAMLMK

SEQ ID NO: 69510 - protein, 339 aa, Oceanispirochaeta sp.
  misc_feature (1)..(339): tr|A0A5C1QM78|A0A5C1QM78_9SPIO S-adenosylmethionine:tRN A ribosyltransferase-isomerase OS=Oceanispirochaeta sp. K2 OX=2518645 GN=queA PE=3 SV=1
MKIRDFSFNLPPEQVAQHPPETRGTAKLMVLNRTSGEISHKNMQDFPDLVEEGTLVVFNNSRVRKARVYAQSEFGGRVEFFFLKSLEEDLWLCMVSKAKKQKRGKTFQFPGDLKGTITEEVSNNHRKVRFSSPVDDDYLDQFGHIPLPPYIKRDDSDEDAERYQSVFSKETGSVAAPTASLHFTDEIIEKLHKKGVETTFVTLHVGLGTFEPVRTESILDHKMHEEQFFISEETALKVEAAVREGRPILAVGTTSVRTLESAWGNGQLKRGENSTDIFIYPGYEFQVVNRMFTNFHTPESTLLVLVSAFAGKKTIEKAYEEAVASGYMFYSYGDAMLML

SEQ ID NO: 69511 - protein, 339 aa, Oceanithermus desulfurans
  misc_feature (1)..(339): tr|A0A511RKM8|A0A511RKM8_9DEIN S-adenosylmethionine:tRN A ribosyltransferase-isomerase OS=Oceanithermus desulfu rans NBRC 100063 OX=1227550 GN=queA PE=3 SV=1
MNEPGRRVEDYDYPLPQERIAQEGVEPRDRSRLMVVERGRGVRAHARFFELPRFLRAGDLLVFNETKVIPARLAGVKEGGARVEALLVREEAPDRWWAMVRPGRRLRPGARVRFGELAAEVAAVDDEGLRLLVFSGAVRPRLERLGATPLPPYLHRPVDPARYQTVYARREGSVAAPTAGLHFTPRLLEDLAAMGVEQARVVLHVGPGTFQPVKGSIEEHRMHAERYEVPPEAAAQVNRALAEGRRVVAVGTTVVRTLESAFAPGEGVRAGAGETRLFIRPPYRFRVVGGLVTNFHLPRSTLLMLVAAFAGYELTMAAYREALTREYRFFSLGDAMLIV

SEQ ID NO: 69512 - protein, 339 aa, Oceanithermus profundus
  misc_feature (1)..(339): tr|E4U873|E4U873_OCEP5 S-adenosylmethionine:tRNA ribosy ltransferase-isomerase OS=Oceanithermus profundus (stra in DSM 14977 / NBRC 100410 / VKM B-2274 / 506) OX=67048 7 GN=queA PE=3 SV=1
MSEPGRRIEDYDYPLPEERIAQEGASPRDHSRLMVVERGRGVRAHARFFELPRFLRAGDLLVFNETKVIPARIFGVKEGGARVEALLVREEAPERWWAMVRPGRRLRPGARVRFGELAAEVAAVDDEGLRLLVFSGPVRPLLERLGRTPLPPYIHRPVDPERYQTVYARREGSVAAPTAGLHFTPRLLEELAAMGVEQARVVLHVGPGTFQPVKGAIEEHRMHAERYEVPAEAAARVNRALAEGRRVVAVGTTVVRTLEAAFAPGEGVRPGAGETRLFIRPPYRFQVVGGLVTNFHLPRSTLLMLVAAFAGYEVTMAAYREALARDYRFFSLGDAMVIV

SEQ ID NO: 69513 - protein, 342 aa, Oceanobacillus arenosus
  misc_feature (1)..(342): tr|A0A3D8PT54|A0A3D8PT54_9BACI S-adenosylmethionine:tRN A ribosyltransferase-isomerase OS=Oceanobacillus arenos us OX=1229153 GN=queA PE=3 SV=1
MNIEDFDYHLPEELIAQTPLKDRTASRLMVIDRETKEIANKHFPDVMQYLQAGDTLVLNDTRVLPARLYGVKKDTGAKIEVLLLRQEENDTWEVLTKPAKKVKVGTELVFGDGKLTAVCKDFKDHGGRVLEFSYEGIFYEILDQLGEMPLPPYIKEQLPEKERYQTVYAREEGSAAAPTAGLHFTNELLAEIKEMGVNIAFITLHVGLGTFRPVSVDTIEDHEMHSEFYQMTKETAELLNQTKASGGRIISVGTTSTRTLETIARDNQGTFTESSGWTNIFIYPPYEFKAIDGLITNFHLPKSTLIMLVSALVDRETILHAYKEAVNEKYRFFSFGDAMLII

SEQ ID NO: 69514 - protein, 342 aa, Oceanobacillus bengalensis
  misc_feature (1)..(342): tr|A0A494Z5U6|A0A494Z5U6_9BACI S-adenosylmethionine:tRN A ribosyltransferase-isomerase OS=Oceanobacillus bengal ensis OX=1435466 GN=queA PE=3 SV=1
MNIEDFDFHLPEELIAQTPLKDRASSRLMALNRETKEIKHQHFSDIKNHLKEGDCLVLNDTKVLPARLYGVKKDTGAKIEVLLLHQEEKDTWEVLTKPAKKVKVGTELVFGDGLLKATCKDYKEHGGRVLEFSYDGIFYEVLDQLGEMPLPPYIKEQLSEKDRYQTVYAKEEGSAAAPTAGLHFTNELLEEIQEMGVTIAFITLHVGLGTFRPVSVETIEAHKMHSEFYHMSKETAETLNKIKKSGGRIISVGTTSTRTLETIARDYDGKFVETSGWTDIFIYPPYTFKAIDGLITNFHLPKSTLIMLVSSLVDRDTILKAYNEAVKERYRFFSFGDAMLIL

SEQ ID NO: 69515 - protein, 342 aa, Oceanobacillus chungangensis
  misc_feature (1)..(342): tr|A0A3D8Q0V2|A0A3D8Q0V2_9BACI S-adenosylmethionine:tRN A ribosyltransferase-isomerase OS=Oceanobacillus chunga ngensis OX=1229152 GN=queA PE=3 SV=1
MNIEDFDYHLPEELIAQTPLKDRTASRLMVIDKEKKQFAHQHFTDVKQHLRAGDTLVLNDTRVLPARLYGVKKDTGAKIEVLLLRQEENDTWEVLTKPAKKVKVGTELVFGDGKLTAVCKEFKDHGGRMLEFSYEGIFYEVLDQLGEMPLPPYIKEQLPEKERYQTVYAKEEGSAAAPTAGLHFTNDLLAEIKSMGVNIAFITLHVGLGTFRPVSVDTIEDHEMHSEFYQMTNETAKLLNQTKASGGRIISVGTTSTRTLETIARDNQGTFKESSGWTNIFIYPPYQFKAIDGLITNFHLPKSTLIMLVSALVDRETILEAYKEAVNEKYRFFSFGDAMLII

SEQ ID NO: 69516 - protein, 342 aa, Oceanobacillus halophilus
  misc_feature (1)..(342): tr|A0A495AH50|A0A495AH50_9BACI S-adenosylmethionine:tRN A ribosyltransferase-isomerase OS=Oceanobacillus haloph ilus OX=930130 GN=queA PE=3 SV=1
MNIEDFDFDLPEELIAQTPLKDRTSSRLLVLDKESKEISHQHFRDIKKYLKPGDCLVLNNTKVLPARLYGVKEDTGAKIEVLLLHQDEKDTWEVLTKPAKKVKEGTKLIFGDGLLKATCTGYKNHGGRILQFSYDGIFYEVLDKLGEMPLPPYIKEQLPEKERYQTVYAKEEGSAAAPTAGLHFTNELLQEIKDMGVTISFITLHVGLGTFRPVSVDSVEEHEMHAEFYQMTKKTADTLNKVKEDGGRIISIGTTSTRTLETIARDHDGQFVESSGWTDIFIYPPYEFKAINGLITNFHLPKSTLIMLVSALVDRETILKAYNEAVKERYRFFSFGDAMLIL

SEQ ID NO: 69517 - protein, 342 aa, Oceanobacillus iheyensis
  misc_feature (1)..(342): sp|Q8EPQ8|QUEA_OCEIH S-adenosylmethionine:tRNA ribosylt ransferase-isomerase OS=Oceanobacillus iheyensis (strai n DSM 14371 / CIP 107618 / JCM 11309 / KCTC 3954 / HTE8 31) OX=221109 GN=queA PE=3 SV=1
MQIEDFDFHLPEELIAQTPLKDRTSSRLCVLDKQTSEITHRSFKDITTYLQAGDCLVLNDTKVLPARLYGVKSDTGAKIEVLLLHQQEEDTWEVLVKPAKKVKVGTEIIFGNGKLKATCIDLKDHGGRIMTFSYTGIFYEILDQLGEMPLPPYIKEQLPEQDRYQTVYAKEKGSAAAPTAGLHFTDKLLEDIKAMGVNIVFVTLHVGLGTFRPVSVDSVEDHDMHSEFYSMSESAAKTLNEAKAAGRRIISVGTTSTRTLETIVRDHDGKFVATRGWTDIFIYPPYKFRAIDGLITNFHLPKSTLIMMISALAGKEAILHAYNEAVKEEYRFFSFGDAMLIL

SEQ ID NO: 69518 - protein, 341 aa, Oceanobacillus iheyensis
  misc_feature (1)..(341): tr|A0A2P1WKY3|A0A2P1WKY3_9BACI S-adenosylmethionine:tRN A ribosyltransferase-isomerase OS=Oceanobacillus iheyen sis OX=182710 GN=queA PE=3 SV=1
MNIEDFDFHLPEELIAQTPLKDRTSSRLLVLDKNKKELDHKKFKDIKDYIKPGDALVLNDTRVLPARLYGVKEDTGANIEVLLLHQENGDTWEVLAKPAKKVKQGSVITFGDGKLQATCVGLKEHGGRVMEFSYSGIFYEVLDELGEMPLPPYIKEKLPEKERYQTVYAKEEGSAAAPTAGLHFTNELLDELKAKGVTVSFITLHVGLGTFRPVSVDNIDDHQMHSEFYHMSQETADTLNQIKEQGGRIISVGTTSTRTLETIARDNGTFVETSGWTDIFIYPPYQFRAVDGLITNFHLPKSTLIMLVSALADKDSILRAYEEAVREKYRFFSFGDAMLII

SEQ ID NO: 69519 - protein, 342 aa, Oceanobacillus limi
  misc_feature (1)..(342): tr|A0A1I0HFB8|A0A1I0HFB8_9BACI S-adenosylmethionine:tRN A ribosyltransferase-isomerase OS=Oceanobacillus limi O X=930131 GN=queA PE=3 SV=1
MNIEDFDFNLPEELIAQTPLKDRTASRLLVLNKDTKDVAHDSFKNIKQYLQKGDCLVLNDTRVLPARLYGVKEDTGANIELLLLHQQERDTWEVLTKPAKKVKEGTTIVFGDGKLRATCVGLKDHGGRIFEFSYEGIFYEVLDQLGEMPLPPYIKEQLPERERYQTVYAKEEGSAAAPTAGLHFTEELLDEIKEMGVTITFITLHVGLGTFRPVSVDDIDNHEMHAEFYHMSEETAKTLTNVKEAGGRIISVGTTSTRTLETIARDNDGKFVASSGWTDIFIYPPYQFRAIDGLITNFHLPKSTLIMLVSALVDRETVLSAYKVAVQEKYRFFSFGDAMLII

SEQ ID NO: 69520 - protein, 344 aa, Oceanobacillus oncorhynchi
  misc_feature (1)..(344): tr|A0A0A1MWB5|A0A0A1MWB5_9BACI S-adenosylmethionine:tRN A ribosyltransferase-isomerase OS=Oceanobacillus oncorh ynchi OX=545501 GN=queA PE=3 SV=1
MDMNIEDFDFDLPEELIAQTPLKDRTASRLCVLDKQTGRIQHQHFSDIIDYLQTGDCLVLNDTKVLPARLYGVKEDTGAKLEVLLLHQEEGDSWEVLVKPAKKVKKGTVIDFGDGLLKAVCTGTKEHGGRTVEFSYQGIFYEILDELGEMPLPPYIKEQLSEKDRYQTVYAKEKGSAAAPTAGLHFTDALLQQIREKGVQIIFITLHVGLGTFRPVSVDSVEEHTMHSEFYRMSEEAADTLNQAKVEGRRIISVGTTSTRTLETIARDYDGSFAETSGWTDIFIYPPYQYQAIDGLITNFHLPKSTLIMLVSALAGKDEVLHAYHEAVKERYRFFSFGDAMLII

SEQ ID NO: 69521 - protein, 341 aa, Oceanobacillus picturae
  misc_feature (1)..(341): tr|W9A8E0|W9A8E0_9BACI S-adenosylmethionine:tRNA ribosy ltransferase-isomerase OS=Oceanobacillus picturae OX=17 1693 GN=queA PE=3 SV=1
MNIEDFDFHLPEELIAQTPLKDRTSSRLLVLDKNKKELDHKKFKDIKDYIKPGDALVLNDTRVLPARLYGVKEDTGANIEVLLLHQENGDTWEVLAKPAKKVKQGSVITFGDGKLQATCVGLKEHGGRVMEFSYSGIFYEVLDELGEMPLPPYIKEKLPEKERYQTVYAKEEGSAAAPTAGLHFTNELLDELKAKGVTVSFITLHVGLGTFRPVSVDNIDDHQMHSEFYHMSQETADTLNQIKEQGGRIISVGTTSTRTLETIARDNGTFVETSGWTDIFIYPPYQFRAVDGLITNFHLPKSTLIMLVSALADKDSILHAYKEAVRERYRFFSFGDAMLII

SEQ ID NO: 69522 - protein, 342 aa, Oceanobacillus profundus
  misc_feature (1)..(342): tr|A0A417YJ67|A0A417YJ67_9BACI S-adenosylmethionine:tRN A ribosyltransferase-isomerase OS=Oceanobacillus profun dus OX=372463 GN=queA PE=3 SV=1
MNIEDFDFDLPESLIAQTPLKDRTASRLLVLNPATKEITHQHFADIKNYFKKGDCLVLNDTRVLPARLYGVKKDTGANIEVLLLHQEAQDTWEVLTKPAKKVKVGTELIFGDGKLKATCTGLKEHGGREMKFSYDGIFYEVLDELGEMPLPPYIKEQLPEKERYQTVYAKEEGSAAAPTAGLHFTTELLEEIKELGVNIAFITLHVGLGTFRPVSVDDIDEHEMHSEFYQMTEETAATLNEIKANGGRIISVGTTSTRTLETIARDNDGKFVASSGWTDIFIYPPYQFKAIDGLITNFHLPKSTLIMLVSALADRETVLHAYREAVREQYRFFSFGDAMLIL

SEQ ID NO: 69523 - protein, 342 aa, Oceanobacillus sojae
  misc_feature (1)..(342): tr|A0A511ZDI6|A0A511ZDI6_9BACI S-adenosylmethionine:tRN A ribosyltransferase-isomerase OS=Oceanobacillus sojae OX=582851 GN=queA PE=3 SV=1
MNIEDFDFDLPEELIAQTPLKDRTASRLCVLDKQTGQIQHQHFSDIINYLHAGDCLVLNDTKVLPARLYGVKEDTGAKIEVLLLHQEENDNWEVLVKPAKKVKEGTVIDFGDGLLKAVCTDIKKHGGRTVKFSYDGIFYEILDELGEMPLPPYIKEQLSEKDRYQTVYAKEKGSAAAPTAGLHFTNELLQQIKDKGVEVIFITLHVGLGTFRPVSVDSVEEHTMHSEFYRMSQKASESLNNAKAEGRRIISVGTTSTRTLETIARDNNGAFVETSGWTDIFIYPPYQYQAIDGLITNFHLPKSTLIMLVSALAGKDEVLHAYREAVRERYRFFSFGDAMLII

SEQ ID NO: 69524 - protein, 341 aa, Oceanobacillus sp.
  misc_feature (1)..(341): tr|A0A1E5K498|A0A1E5K498_9BACI S-adenosylmethionine:tRN A ribosyltransferase-isomerase OS=Oceanobacillus sp. E9 OX=1742575 GN=queA PE=3 SV=1
MQIEDFDFHLPEELIAQTPLKDRTSSRLCVLDKQTSEITHRHFKDITTYLQAGDCLVLNDTKVLPARLYGVKSDTGAKIEVLLLHQQEEDTWEVLVKPAKKVKIGTEVVFGNGELKATCIDLKDHGGRIMTFSYTGIFYEILDQLGEMPLPPYIKEQLPEQDRYQTVYAKEKGSAAAPTAGLHFTDKLLADIEAMGVNIVFVTLHVGLGTFRPVSVDSIEDHDMHSEFYSMSEVAAEKLNEAKTTGRRIISVGTTSTRTLETVVRDHDKFVATSGWTDIFIYPPYEFRAIDGLITNFHLPKSTLIMMISALAGKEAILHAYNEAVKEKYRFFSFGDAMLIL

SEQ ID NO: 69525 - protein, 342 aa, Oceanobacillus sp.
  misc_feature (1)..(342): tr|A0A345PHU6|A0A345PHU6_9BACI S-adenosylmethionine:tRN A ribosyltransferase-isomerase OS=Oceanobacillus sp. 16 0 OX=2052660 GN=queA PE=3 SV=1
MNIEDFDYHLPEELIAQTPLKDRTASRLMVIDKEKKEFAHKHFSDIKQHLQPGDTLVLNDTRVLPARLYGIKKDTGAKIEVLLLRQEENDTWEVLTKPAKKVKVGTELVFGDGKLTAVCKGFKDHGGRILEFSYEGIFYEVLDQLGEMPLPPYIKEQLSEKERYQTVYAKEEGSAAAPTAGLHFTNDLLAEIKSMGVNIAFITLHVGLGTFRPVSVDTIEDHEMHSEFYQMTKETAELLNQTKATGGRIISVGTTSTRTLETIARDNQGAFNESSGWTNIFIYPPYEFKAIDGLITNFHLPKSTLIMLVSALVDRETILEAYKEAVNEKYRFFSFGDAMLII

SEQ ID NO: 69526 - protein, 348 aa, Oceanobacter sp.
  misc_feature (1)..(348): tr|A0A2G2JRG8|A0A2G2JRG8_9GAMM S-adenosylmethionine:tRN A ribosyltransferase-isomerase OS=Oceanobacter sp. OX=2 030817 GN=queA PE=3 SV=1
MKTSDFSFELPDELIARYPMPERSSSRLLVFDTEQDQIQDRIFRDIEELLVPGDLLVFNNTRVIPARLFGEKLSGGKLEALVERVIGEHDVLAHVRCSRSPKPGQQIRLGNALVEVVGREDALFHLRFPSDKPVLDVLEEIGHMPLPHYMERDDAEEDRERYQTVYAEKPGAVAAPTAGLHFDEPLLERLKAKGIRFAFVTLHVGAGTFKPVKVDNVNEHVMHSEYIEVSDDVVKAVKDTRAHGNRVVAVGTTSVRSLESASQSGQIESFYGDSQIFIYPGYQFRSVDAIITNFHLPESTLIMLISAFAGRDGTLAAYDHAVTEGYRFYSYGDAMFLPNKISNEASPS

SEQ ID NO: 69527 - protein, 338 aa, Oceanococcus atlanticus
  misc_feature (1)..(338): tr|A0A1Y1SFB5|A0A1Y1SFB5_9GAMM S-adenosylmethionine:tRN A ribosyltransferase-isomerase OS=Oceanococcus atlantic us OX=1317117 GN=queA PE=3 SV=1
MQRSDFAYTLPPELIAQQPPEQRAGARLLQLDGDQLHDRWVRDLPTLLRPNDLVVFNDTRVIPARLHAHKPTGGAVEIMIERVVDDHHVWAFLRASKTPKPGAIIALEQASIEVLGRDGQLFHLRNAEPGWSDLMQAHGEVPLPPYIQRHADAQDNERYQTVYARHAGAVAAPTAGLHFDQALLDAVSARGAQMDYVTLHVGAGTFQPVRADDLSEHRMHAERLRVSAELVARVAETKAAGGRVVAIGTTVVRALESAAASGQLQPFDGDSRLFITPGYRFRVVDALMTNFHLPESTLLMLVSAFAGYTPVMRAYRHAVEQRYRFFSYGDAMWLERAA

SEQ ID NO: 69528 - protein, 338 aa, Oceanococcus sp.
  misc_feature (1)..(338): tr|A0A520ST53|A0A520ST53_9GAMM S-adenosylmethionine:tRN A ribosyltransferase-isomerase OS=Oceanococcus sp. OX=1 958892 GN=queA PE=3 SV=1
MQRSDFAYTLPPELIAQQPPEQRAGARLLQLDGDQLHDRWVRDLPTLLRPNDLVIFNDTRVIPARLHAHKPTGGAVEIMIERVVDDHHVWAFLRASKTPKPGAIIALEQASIEVLGRDGQLFHLRNAEPGWSDLMQAHGEVPLPPYIQRHADAQDNERYQTVYARHAGAVAAPTAGLHFDQALLDAVSARGAQMDYVTLHVGAGTFQPVRADDLSEHRMHAERLRVSAELVARVAETKAAGGRVVAIGTTVVRALESAAASGQLQPFDGDSQLFITPGYRFRVVDALMTNFHLPESTLLMLVSAFAGYTPVMRAYRHAVEQRYRFFSYGDAMWLERAA

SEQ ID NO: 69529 - protein, 347 aa, Oceanospirillaceae bacterium
  misc_feature (1)..(347): tr|A0A2D5WPT4|A0A2D5WPT4_9GAMM S-adenosylmethionine:tRN A ribosyltransferase-isomerase OS=Oceanospirillaceae ba cterium OX=1899355 GN=queA PE=3 SV=1
MKTSDFSFELPDHLIARHPAAERSASRLLVFDPQLQQIDDRIFRDIESLIEPGDLLVFNNTRVIPARLFGEKASGGKLEALIERVVSEHEVLAHLRSSRSPKPGQLVSLGGEDAEVVGREGALFHLRFTSDRPVLDILEDVGHMPLPPYMEREDAAEDRERYQTVYAEKPGAVAAPTAGLHFDDGLLDRLSTKGVNFAFVTLHVGAGTFQPVKVDNIHEHHMHSEYIEVPADVVDAVRATRAAGKRVIAVGTTSVRSLESASRSGAIEVFQGDSDIFIFPGYEFRSVDAMITNFHLPESTLIMLVSAFAGREGTLAAYDHAVANEYRFYSYGDAMFMPCRLRQSSGS

SEQ ID NO: 69530 - protein, 349 aa, Oceanospirillaceae bacterium
  misc_feature (1)..(349): tr|A0A2D5PGZ6|A0A2D5PGZ6_9GAMM S-adenosylmethionine:tRN A ribosyltransferase-isomerase OS=Oceanospirillaceae ba cterium OX=1899355 GN=queA PE=3 SV=1
MKTKDFDFDLPDELIARYPMAERSSSRLLVLDGVTGQTTHLVFRDLLDKAEAGDLLVFNNTRVIPARLFGEKASGGKLEALIERMTGEHTALAHLRSSRSPKPGSRITLGGVEVDVSGRQGALFELTFLDERPLLSILEEVGHMPLPPYMAREDAEEDRERYQTVYAEKPGAVAAPTAGLHFDEPLLTALKEKGVNFAYVTLHVGAGTFQPVKVDTIEEHEMHAEYIEVPQDVVDAVKATRAAGKRVIAVGTTSVRSLESASSDGEIAPFYGESRIFIYPGYRFRSVDAMITNFHLPESTLIMLVSAFAGRDNTLAAYAEAVAGKYRFYSYGDAMFLERPQPLVSEESA

SEQ ID NO: 69531 - protein, 354 aa, Oceanospirillales bacterium
  misc_feature (1)..(354): tr|A0A2A4XLI7|A0A2A4XLI7_9GAMM S-adenosylmethionine:tRN A ribosyltransferase-isomerase OS=Oceanospirillales bac terium OX=1914300 GN=queA PE=3 SV=1
MNVSDFHFDLPDELIARYPLRERSASRLLCLEGTTGDTAHRLFTDLPDLLQPGDLLVFNNTRVIPARLFGKKETGGQVEVLVERVTGEHDLVAHVRASKALKEGQKVILEDGTALRMTGRSDALFHLESEADEPVLDTLERIGHMPLPPYVDRPDESTDRERYQTVYAKEAGAVAAPTAGLHFDESVLEALKQRGVESTFVTLHVGAGTFQPVRVDRIDDHVMHSEIAHVPEEAVEAVNRARARGGRVVAVGTTSVRSLESASRGGCLKPFRGETDIFIYPGYRFQTVDALVTNFHLPESTLIMLVSAFAGYEHVKHAYRDAIVEKYRFFSYGDAMFITGQKPSLLSLNIGDTP

SEQ ID NO: 69532 - protein, 369 aa, Oceanospirillales bacterium; identical to SEQ ID NO: 68602
  misc_feature (1)..(369): tr|A0A2E5S8F1|A0A2E5S8F1_9GAMM S-adenosylmethionine:tRN A ribosyltransferase-isomerase OS=Oceanospirillales bac terium OX=1914300 GN=queA PE=3 SV=1

SEQ ID NO: 69533 - protein, 355 aa, Oceanospirillum linum
  misc_feature (1)..(355): tr|A0A1T1HFU2|A0A1T1HFU2_OCELI S-adenosylmethionine:tRN A ribosyltransferase-isomerase OS=Oceanospirillum linum OX=966 GN=queA PE=3 SV=1
MLRTDFTFNLPESLIARYPTKERTASRLLQVDGESGVLSHGQFTDILDLVQPGDLMVFNDTRVIPARLFGRKESGGKIEILLERLQEDNRALAHIRSSRSPKAGAKLILQDDSEVEVLGRQDALFEIQFDPQADLLELLEKIGHMPLPPYIDREDELEDRERYQTVYGKNAGAVAAPTAGLHFDEALLQSLADKGVKTAFVTLHVGAGTFQPVKADNIFEHHMHSEFVQVSAAVCQQVKETKARGNRVIAVGTTSVRCLETAAKLSSIPGEIEPVQTDTNIFIYPGYRFQVVDSLLTNFHLPESTLLMLVSALAGYSTMMQAYKEAVEQEYRFFSYGDAMFISQNTQPDLPPSAA

SEQ ID NO: 69534 - protein, 353 aa, Oceanospirillum multiglobuliferum
  misc_feature (1)..(353): tr|A0A1T4M1U0|A0A1T4M1U0_9GAMM S-adenosylmethionine:tRN A ribosyltransferase-isomerase OS=Oceanospirillum multi globuliferum OX=64969 GN=queA PE=3 SV=1
MLRTDFSFELPDDLIARYPTAERTASRLLCVEGVSGQLSHRHFSDLLALVEPGDLMVFNDTRVIPARLFGKKESGGQIEILIERLLDHNQALAHIRSSRSPKAGSKLILENGTELLVLGRQDALFELQFPESGSVLELLDQVGHMPLPPYISREDELSDRERYQTVYGKNAGAVAAPTAGLHFDDALLAALKEKGVEMAFVTLHVGAGTFQPVKAESIFEHHMHSEMIQVSAEVCEQVKAAKARGNRVIAVGTTSVRCLETAARSGEITPMETDTNIFIYPGYRFNVVDALVTNFHLPESTLLMLVCALGGYRNLMNAYEHAVQLQYRFFSYGDAMFITKNTAPDLPPSAMTE

SEQ ID NO: 69535 - protein, 351 aa, Oceanospirillum sp.
  misc_feature (1)..(351): tr|A0A2D5GDL1|A0A2D5GDL1_9GAMM S-adenosylmethionine:tRN A ribosyltransferase-isomerase OS=Oceanospirillum sp. O X=2021254 GN=queA PE=3 SV=1
MLRTDFSFDLPDELIARYPTAERTASRLLCLNGAEGTIQHNGFIDILNLVQPGDLMVFNDTRVIPARLFGQKETGGKIEILLERLQDNNTALAHIRSSRSPKPGAKLLLQDGTAVEVLGRQESLFELQFPLDMNLLDLLDKIGHMPLPPYIEREDELSDRERYQTVYSKNAGAVAAPTAGLHFDEPLLQALKDKGVETAFVTLHVGAGTFQPVKADNIFEHHMHSEYIQVSDEVCQQVKAAKARGNRVIAVGTTSVRCLETASASGEIEPMATDTNIFIYPGYRFNVVDALVTNFHLPESTLMMLVSALGGYRNIMQAYREAVQEKYRFFSYGDAMFITQNPEPDLPPSAE

SEQ ID NO: 69536 - protein, 336 aa, Oceanotoga teriensis
  misc_feature (1)..(336): tr|A0A316D3E2|A0A316D3E2_9THEM S-adenosylmethionine:tRN A ribosyltransferase-isomerase OS=Oceanotoga teriensis OX=515440 GN=queA PE=3 SV=1
MYRIEEYDYYLPQEQIAQDPVEPRDSSKLMILDREKKTIEHKIFREIIDYLNPKDLLIVNNTKVIPARIYGKKSTGAKIEILLLEKIGEGNKWKSLVKPGGKIKLGNELIFSNKLKAKVIKHYDDGARLLEFYGENIWDEINKIGETPLPPYIHKKLEDNNRYQTNYAKIEGAVAAPTAGLHFTKELLDKISKKGIDLEEVTLHVGLGTFRPVNEEDIRNHQIHEEYYSISEDVKNKIEETKKNGGRIIAVGTTVVRTLESYALNKKLSGKTNIYIYPPYNFKIVDGLITNFHLPKSSLLMLVSAFNGHQFTMKSYKEAVEKNYRFFSFGDAMFIK

SEQ ID NO: 69537 - protein, 363 aa, Ochrobactrum anthropi
  misc_feature (1)..(363): sp|A6X0Y9|QUEA_OCHA4 S-adenosylmethionine:tRNA ribosylt ransferase-isomerase OS=Ochrobactrum anthropi (strain A TCC 49188 / DSM 6882 / JCM 21032 / NBRC 15819 / NCTC 12 168) OX=439375 GN=queA PE=3 SV=1
MRVDLFDFDLPEESIALRPAEPRDHARLLRVRPGQPFEDRQVFELPDLLQPGDALVFNDTKVIPAQLEGMRERDGNISQVSATLHMRTGPDRWKAFLRPGKRVKEGDRIRFGHSGSSCFLGTLDATVAEKGDAGEALLVFDLSGAMLDEAIASVGHIPLPPYIASKRAEDERDRKDYQTVYAREEGAVAAPTAGLHFTPDLLEKIKAKGVEEHFVTLHVGAGTFLPVKADDTTDHKMHSEIGYVSQRTADALNAVHERGGKIICVGTTSLRLIESAAGEDGIIRPWAGATDIFITPGYKFRAVDLLMTNFHLPRSTLFMLVSAFSGFETMHAAYEHAISNGYRFYSYGDASLLERADKAKDTA

SEQ ID NO: 69538 - protein, 363 aa, Ochrobactrum anthropi
  misc_feature (1)..(363): tr|A0A011T235|A0A011T235_OCHAN S-adenosylmethionine:tRN A ribosyltransferase-isomerase OS=Ochrobactrum anthropi OX=529 GN=queA PE=3 SV=1
MRVDLFDFDLPEESIALRPAEPRDHARLLRVRPGQPFEDRQVFELPDLLQPGDALVFNDTKVIPAQLEGMRERDGNISQVSATLHMRTGPDRWKAFLRPGKRIKEGDRIRFGHSGSSCFLGTLDATVAEKGDAGEALLVFDLSGAMLDEAIASVGHIPLPPYIASKRAEDERDRKDYQTVYAREEGAVAAPTAGLHFTPDLLEKIKAKGVEEHFVTLHVGAGTFLPVKADDTTDHKMHSEIGYVSQRTADALNAVHERGGKIICVGTTSLRLIESAAGEDGIIRPWAGATDIFITPGYKFRAVDLLMTNFHLPRSTLFMLVSAFSGFETMHAAYEHAISNGYRFYSYGDGSLLERADKAKDTA

SEQ ID NO: 69539 - protein, 363 aa, Ochrobactrum cytisi
  misc_feature (1)..(363): tr|A0A1J6HIS1|A0A1J6HIS1_9RHIZ S-adenosylmethionine:tRN A ribosyltransferase-isomerase OS=Ochrobactrum cytisi O X=407152 GN=queA PE=3 SV=1
MRVDLFDFDLPEESIALRPAEPRDHARLLRVRPGQPFEDRQVFELPDLLQPGDALVFNDTKVIPAQLEGMRERDGNISQVSATLHMRTGPGRWKAFLRPGKRVKEGDRIRFGHSGSSCFLGTLDATVAEKGDAGEALLVFDLSGAMLDEAIASVGHIPLPPYIASKRAEDERDRKDYQTVYAREEGAVAAPTAGLHFTPDLLEKIKAKGVEEHFVTLHVGAGTFLPVKADDTTDHKMHSEIGYVSQRTADALNAVHERGGKIICVGTTSLRLIESAAGEDGIIRPWAGATDIFITPGYKFRAVDLLMTNFHLPRSTLFMLVSAFSGFETMHAAYEHAISNGYRFYSYGDGSLLERADKAKDTA

SEQ ID NO: 69540 - protein, 356 aa, Ochrobactrum gallinifaecis
  misc_feature (1)..(356): tr|A0A502BNX0|A0A502BNX0_9RHIZ S-adenosylmethionine:tRN A ribosyltransferase-isomerase OS=Ochrobactrum gallinif aecis OX=215590 GN=queA PE=3 SV=1
MRVDLFDFDLPDESIALRPAEPRDHAKLLRVRPGQPFEDRQVFELPDLLQPGDALVFNDTKVIPAQLEGMRERDGNISQVSATLHMRIGADRWKAFLRPAKRVKEGDRIRFGHSGSSCFMGTLGATVAEKGDAGEVLLVFDLSGAMLDEAIAAVGHIPLPPYIASKRPEDERDRSDYQTVYAREEGAVAAPTAGLHFTPELLTKIRERGIEEHFVTLHVGAGTFLPVKADDTTDHKMHSEIGYVSKETADALNAVHARGGRIICVGTTSLRLIESASGADGIIRPWAGPTDIFITPGYKFRAVDLLMTNFHLPRSTLFMLVSAFSGFEVMHDAYKHAIKTGYRFYSYGDSSLLERA

SEQ ID NO: 69541 - protein, 356 aa, Ochrobactrum grignonense
  misc_feature (1)..(356): tr|A0A256FMJ7|A0A256FMJ7_9RHIZ S-adenosylmethionine:tRN A ribosyltransferase-isomerase OS=Ochrobactrum grignone nse OX=94627 GN=queA PE=3 SV=1
MRVDLFDFDLPDERIALRPAEPRDHAKLLRVRPGQPFEDRQVFELPDLLQPGDALVFNDTKVIPAQLEGMREREGNISQVSATLHMRTGLDRWKAFLRPAKRVKEGDRIRFGHSGSSCFMGALDATVAEKGDAGEVLLVFDLSGAMLDEAIAAVGHIPLPPYIASKRAEDERDRSDYQTVYAREEGAVAAPTAGLHFTPDLLERIRERGIEEHFVTLHVGAGTFLPVKADDTTDHKMHSEIGYVSQETADALNAVHARGGRVICVGTTSLRLIESAAGEDGIIRPWAGPTDIFITPGYKFRAVDLLMTNFHLPRSTLFMLVSAFSGFDTMQEAYKRAIETGYRFYSYGDASLLERA

SEQ ID NO: 69542 - protein, 356 aa, Ochrobactrum haematophilum
  misc_feature (1)..(356): tr|A0A397L0N8|A0A397L0N8_9RHIZ S-adenosylmethionine:tRN A ribosyltransferase-isomerase OS=Ochrobactrum haematop hilum OX=419474 GN=queA PE=3 SV=1
MRVDLFDFDLPEERIALRPAEPRDHARLLRVSPGQPFEDRHVYDLPDLLQPGDALVFNDTKVIPAQLEGMRERDGNISQVSATLHMRVGPDRWKAFLRPAKRVKEGDRIRFGHSGSSCFLGTLDATVTEKGDAGEALLVFDLSSAALDEAIAAVGHIPLPPYIASKRAEDDRDRSDYQTVYAREEGAVAAPTAGLHFTPELLEKIKTKGIEEHFVTLHVGAGTFLPVKADDTNDHKMHSEIGHVSQATADALNAVHERGGRVVCVGTTSLRLIESAAGEDGIIRPWSGATDIFITPGYRFRAVDMLMTNFHLPRSTLFMLVSAFSGLDTMRAAYEHAIATGYRFYSYGDGSLLERA

SEQ ID NO: 69543 - protein, 356 aa, Ochrobactrum haematophilum; identical to SEQ ID NO: 64450
  misc_feature (1)..(356): tr|A0A2P9HNB9|A0A2P9HNB9_9RHIZ S-adenosylmethionine:tRN A ribosyltransferase-isomerase OS=Ochrobactrum haematop hilum OX=419474 GN=queA PE=3 SV=1

SEQ ID NO: 69544 - protein, 364 aa, Ochrobactrum intermedium
  misc_feature (1)..(364): tr|U4VBC5|U4VBC5_9RHIZ S-adenosylmethionine:tRNA ribosy ltransferase-isomerase OS=Ochrobactrum intermedium 229E OX=1337887 GN=queA PE=3 SV=1
MRVDLFDFDLPEESIALRPIEPRDHARLLRVRPGQPFEDRQVFELPDLLHPGDALVFNDTKVIPAQLEGMRERDGNISQVSATLHMRSGADRWKAFLRPAKRVKEGDRIRFGHSGSSCFLGTLDATVAEKGDAGEALLVFDLSGAMLDEAIASVGHIPLPPYIASKRAEDERDRKDYQTVYAREEGAVAAPPTAGLHFTPELLEKIKAKGVEEHFVTLHVGAGTFLPVKADDTADHKMHSEIGHVSQRTADALNAVHERGGRIVCVGTTSLRLIESAAGEDGVIRPWSGATDIFITPGYKFRAVDLLMTNFHLPRSTLFMLVSAFSGLDTMRAAYDHAISNGYRFYSYGDGSLLERADKVKDTA

SEQ ID NO: 69545 - protein, 363 aa, Ochrobactrum intermedium
  misc_feature (1)..(363): tr|C4WHS6|C4WHS6_9RHIZ S-adenosylmethionine:tRNA ribosy ltransferase-isomerase OS=Ochrobactrum intermedium LMG 3301 OX=641118 GN=queA PE=3 SV=1
MRVDLFDFDLPEESIALRPIEPRDHARLLRVRPGQPFEDRQVFELPDLLHPGDALVFNDTKVIPAQLEGMRERDGNISQVSATLHMRSGADRWKAFLRPAKRVKEGDRIRFGHSGSSCFLGTLDATVAEKGDAGEALLVFDLSGAMLDEAIASVGHIPLPPYIASKRAEDERDRKDYQTVYAREEGAVAAPTAGLHFTPELLEKIKAKGVEEHFVTLHVGAGTFLPVKADDTADHKMHSEIGHVSQRTADALNAVHERGGRIVCVGTTSLRLIESAAGEDGVIRPWSGATDIFITPGYKFRAVDLLMTNFHLPRSTLFMLVSAFSGLDTMRAAYDHAISNGYRFYSYGDGSLLERADKVKDTA

SEQ ID NO: 69546 - protein, 363 aa, Ochrobactrum lupini
  misc_feature (1)..(363): tr|A0A256GXP3|A0A256GXP3_9RHIZ S-adenosylmethionine:tRN A ribosyltransferase-isomerase OS=Ochrobactrum lupini O X=255457 GN=queA PE=3 SV=1
MRVDLFDFDLPEESIALRPAEPRDHARLLRVRPGQPFEDRQVFELPDLLQPGDALVFNDTKVIPAQLEGMRERDGNISQVSATLHMRTGPDRWKAFLRPGKRVKEGDRIRFGHSGSSCFLGTLDATVAEKGDAGEALLVFDLSGAMLDEAIASVGHIPLPPYIASKRAEDERDRKDYQTVYAREEGAVAAPTAGLHFTPDLLEKIKAKGVEEHFVTLHVGAGTFLPVKADDTTDHKMHSEIGYVSQRTADALNAVHERGGKIICVGTTSLRLIESAAGEDGIIRPWTGATDIFITPGYKFRAVDLLMTNFHLPRSTLFMLVSAFSGFETMHAAYEHAISNGYRFYSYGDGSLLERADKAKDTA

SEQ ID NO: 69547 - protein, 363 aa, Ochrobactrum oryzae
  misc_feature (1)..(363): tr|A0A2S7IXR3|A0A2S7IXR3_9RHIZ S-adenosylmethionine:tRN A ribosyltransferase-isomerase OS=Ochrobactrum oryzae O X=335286 GN=queA PE=3 SV=1
MRVDLFDFDLPEESIALRPVEPRDHARLLRVRPGQPFEDRQVFELPDLLQPGDALVFNDTKVIPAQLEGMRERDGNISQVSATLHMRTGPDRWKAFLRPGKRVKEGDRIRFGHSGSSCFLGTLDATVTEKGDAGEALLVFDLSGAILDEAIASVGHIPLPPYIASKRAEDERDRKDYQTVYAREEGAVAAPTAGLHFTPDLLERIKAKGVEEHFVTLHVGAGTFLPVKADDTTDHKMHSEIGYVSQRTANALNAVHERGGRIICVGTTSLRLIESAAGEDGIIRPWAGPTDIFITPGYRFRAVDLLMTNFHLPRSTLFMLVSAFSGFETMRAAYDHAISNGYRFYSYGDGSLLERADKAKDPA

SEQ ID NO: 69548 - protein, 363 aa, Ochrobactrum pecoris
  misc_feature (1)..(363): tr|A0A5C5CSV4|A0A5C5CSV4_9RHIZ S-adenosylmethionine:tRN A ribosyltransferase-isomerase OS=Ochrobactrum pecoris OX=867683 GN=queA PE=3 SV=1
MRVDLFDFELPEESIALRPVEPRDHAKLLCVRPGQPFEDRQVFELPDLLQPGDALVFNDTKVIPAQLEGMRERDGNISQISATLHMRTGPDRWKAFLRPGKRVKEGDRIRFGHSGSSCFLGTLDATVAEKGDAGEALLVFDLSGAMLDEAIASVGHIPLPPYIASKRAEDERDRKDYQTVYAREEGAVAAPTAGLHFTPDLLEKIKAKGIEEHFVTLHVGAGTFLPVKADDTTDHKMHSEIGYVSQRTANALNAVHERGGRIICVGTTSLRLIESAAGEDGIVRPWSGATDIFITPGYKFRAVDLLMTNFHLPRSTLFMLVSAFSGFETMHAAYDHAINNGYRFYSYGDGSLLERADKAKDTA

SEQ ID NO: 69549 - protein, 356 aa, Ochrobactrum pseudogrignonense
  misc_feature (1)..(356): tr|A0A1A9FLG1|A0A1A9FLG1_9RHIZ S-adenosylmethionine:tRN A ribosyltransferase-isomerase OS=Ochrobactrum pseudogr ignonense OX=419475 GN=queA PE=3 SV=1
MRVDLFDFDLPEESIALRPAEPRDHAKLLRVRPGQPFEDRQVFELPDLLQPGDALVFNDTKVIPAQLEGMRERDGNISQVSATLHMRTGPDRWKAFLRPAKRVKEGDRIRFGHSGSSCFLGTLDATVAEKGDAGEVLLVFDLSGAMLDEAIASVGHIPLPPYIASKRAEDERDRSDYQTVYAREEGAVAAPTAGLHFTPDLLKKIRDRGIEEHFVTLHVGAGTFLPVKADDTTDHKMHSEIGYVSQETADALNAVHARGGRVICVGTTSLRLIESAAGEDGIIRPWAGPTDIFITPGYKFRAVDLLMTNFHLPRSTLFMLVSAFSGFETMQDAYKRAIETGYRFYSYGDSSLLERQ

SEQ ID NO: 69550 - protein, 356 aa, Ochrobactrum pseudogrignonense
  misc_feature (1)..(356): tr|A0A256GUH5|A0A256GUH5_9RHIZ S-adenosylmethionine:tRN A ribosyltransferase-isomerase OS=Ochrobactrum pseudogr ignonense OX=419475 GN=queA PE=3 SV=1
MRVDLFDFDLPEESIALRPAEPRDHAKLLRVRPGQPFEDRQVFELPDLLQPGDALVFNDTKVIPAQLEGMRERDGNISQVSATLHMRTGPDRWKAFLRPAKRVKEGDRIRFGHSGSSCFLGTLDATVAEKGDAGEVLLVFDLSGAMLDEAIASVGHIPLPPYIASKRAEDERDRSDYQTVYAREEGAVAAPTAGLHFTPDLLKKIRERGIEEHFVTLHVGAGTFLPVKADDTTDHKMHSEIGYVSQETADALNAVHARGGRVICVGTTSLRLIESAAGEDGIIRPWAGPTDIFITPGYKFRTVDLLMTNFHLPRSTLFMLVSAFSGFETMQDAYKRAIETGYRFYSYGDSSLLERK

SEQ ID NO: 69551 - protein, 356 aa, Ochrobactrum quorumnocens
  misc_feature (1)..(356): tr|A0A248UIY3|A0A248UIY3_9RHIZ S-adenosylmethionine:tRN A ribosyltransferase-isomerase OS=Ochrobactrum quorumno cens OX=271865 GN=queA PE=3 SV=1
MRVDLFDFDLPEESIALRPAEPRDHAKLLRVRPGQPFEDRQVFELPDLLQPGDALVFNDTKVIPAQLEGMRERDGNISQVSATLHMRTGPDRWKAFLRPAKRVKEGDRIRFGHSGSSCFLGTLDATVAEKGDAGEALLVFDLSGAMLDEAIASVGHIPLPPYIASKRAEDERDRSDYQTVYAREEGAVAAPTAGLHFTPDLLKKIRDRGIEEHFVTLHVGAGTFLPVKADDTTDHKMHSEIGYVSQETSDALNAVHARGGRVICVGTTSLRLIESAAGEDGIIRPWAGPTDIFITPGYKFRAVDLLMTNFHLPRSTLFMLVSAFSGFETMQDAYKHAIETGYRFYSYGDSSLLERK

SEQ ID NO: 69552 - protein, 356 aa, Ochrobactrum rhizosphaerae
  misc_feature (1)..(356): tr|A0A256FI86|A0A256FI86_9RHIZ S-adenosylmethionine:tRN A ribosyltransferase-isomerase OS=Ochrobactrum rhizosph aerae OX=571254 GN=queA PE=3 SV=1
MRVDLFDFDLPDERIALRPAEPRDHARLLRVRPGQPFEDRQVFELPDLLQLGDALVFNDTKVIPAQLEGMRERDGNISQVSATLHMRTGPDRWKAFLRPAKRVKEGDRIRFGHSGASCFLGTLDATVAEKGDAGEVLLVFDLASAALDEAIAAVGHIPLPPYIASKRAEDDRDRSDYQTVYAREEGAVAAPTAGLHFTPDLLKTIRDRGIEEHFVTLHVGAGTFLPVKADDTTDHKMHAEIGYVSQETANALNAVHARGGRVICVGTTSLRLIESAADEDGTVQPWSGATDIFITPGYKFRAVDLLMTNFHLPRSTLFMLVSAFSGFDTMQEAYKRAIETDYRFYSYGDASLLERA

SEQ ID NO: 69553 - protein, 356 aa, Ochrobactrum sp.
  misc_feature (1)..(356): tr|A0A4R7WXY4|A0A4R7WXY4_9RHIZ S-adenosylmethionine:tRN A ribosyltransferase-isomerase OS=Ochrobactrum sp. LP_5 _YM OX=2485134 GN=queA PE=3 SV=1
MRVDLFDFDLPEESIALRPAEPRDHAKLLRVRPGQPFEDRQVFELPDLLQPGDALVFNDTKVIPAQLEGMRERDGNISQVSATLHMRTGPDRWKAFLRPAKRVKEGDRIRFGHSGSSCLLGTLDATVAEKGDAGEVLLVFDLASAALDEAIATVGHIPLPPYIASKRAEDERDRSDYQTVYAREEGAVAAPTAGLHFTPELLAKIRERGIEEHFVTLHVGAGTFLPVKADDTTEHKMHAEIGYVSQETADALNAVHARGGRVICVGTTSLRLIESAADEDGTIRAWSGATDIFITPGYKFRAVDLLMTNFHLPRSTLFMLVSAFSGFDTMQEAYKRAIETGYRFYSYGDGSLLERA

SEQ ID NO: 69554 - protein, 192 aa, Ochrobactrum sp.
  misc_feature (1)..(192): tr|A0A3D2CZ87|A0A3D2CZ87_9RHIZ S-adenosylmethionine:tRN A ribosyltransferase-isomerase (Fragment) OS=Ochrobactr um sp. OX=42190 GN=DFK19_12575 PE=3 SV=1
MRVDLFDFDLPEESIALRPVEPRDHARLLRVRPGQPFEDRQVFELPDLLQAGDALVFNDTKVIPAQLEGMRERDGNISQVSATLHMRTGADRWKAFLRPAKRVKEGDGIRFGHSGSSCFLGTLDATVAEKGDAGEALLVFDLSGAMLDEAIASVGHIPLPPYIASKRAEDERDRKDYQTVYAREEGAVAAPT

SEQ ID NO: 69555 - protein, 356 aa, Ochrobactrum thiophenivorans
  misc_feature (1)..(356): tr|A0A256FWE0|A0A256FWE0_9RHIZ S-adenosylmethionine:tRN A ribosyltransferase-isomerase OS=Ochrobactrum thiophen ivorans OX=571255 GN=queA PE=3 SV=1
MRVDLFDFDLPDERIALRPVEPRDHAKLLRVRPGQPFEDRQVFELPDLLQSGDALVFNDTKVIPAQLEGMRERDGNISQVSATLHMRTGPDRWKAFLRPAKRVKEGDRIRFGHSGSSCFLGTLDATVAEKGDAGEVLLVFDLSGAMLDEAIAAVGHIPLPPYIASKRPEDERDRSDYQTVYAREEGAVAAPTAGLHFTPELLEKIRARGIEEHFVTLHVGAGTFLPVKADDTTDHKMHSEIGYVSKETADALNAVHARGGRVICVGTTSLRLIESAAGEDGIIRTWAGPTDIFITPGYKFRAVDLLMTNFHLPRSTLFMLVSAFSGFDVMHEAYQRAIETGYRFYSYGDSSLLERA

SEQ ID NO: 69556 - protein, 350 aa, Unknown
  misc_feature (1)..(350): tr|A0A2A4Z0P7|A0A2A4Z0P7_9PROT S-adenosylmethionine:tRN A ribosyltransferase-isomerase OS=OCS116 cluster bacter ium OX=2030921 GN=queA PE=3 SV=1
  misc_feature (349)..(349): Xaa can be any naturally occurring amino acid
MRVDEFDFTLPEDNIALRPVEPRHNSKLLRVKNGKLADFHYYDLPDLLQDGDVLVLNDTKVIPARMQAVRTRGEFKSNISVTLHMKKSQNEWVAFVRPAKRVKVGETLNFVVEGGSLSAEILSKNGGELHLKFDKSAADLDAAIALAGEMPLPPYIASKRDYDDKDVEDYQTIYANEKGAVAAPTAGLHFTDELFEKLRAKNIEIIFLTLHVGAGTFLPMVVDKTEDHIMHAEYGLITKEIASKLTVAKQAGRRIVAVGTTSLRLLESAANDAGEILPFADETDIFITPGYKFKAVDVLLTNFHLPKSTLFMLVSAFTSLEIMQNAYKAAIERGYRFYSYGDACLLEMXK

SEQ ID NO: 69557 - protein, 350 aa, Octadecabacter antarcticus
  misc_feature (1)..(350): tr|M9R876|M9R876_9RHOB S-adenosylmethionine:tRNA ribosy ltransferase-isomerase OS=Octadecabacter antarcticus 30 7 OX=391626 GN=queA PE=3 SV=1
MKLSDFDFDLPDSLIAVRPARPRSSAKLLVAGGDGTRDLRVTDLVSVLRAGDHLVLNDTKVIPARLVGERMRKSTDGAGLAKIEVTLLEPQADGTWAALIKPLRKVRDGERVVFSDDLSAVLVHRFDGMGYLDFNVTGDDFDAALNAAGAMPLPPYIAAKRPADDLDKEDYQTVWAARSGAVAAPTASLHFEQWLLDDLAAMGVKFSYVTLHVGAGTFLPVKVDDVADHVMHSEWGQVSALSASDIMATKAAGGRVIPVGTTACRLIETAGASGTLAAWEGETDIFITPGFEFQITDGLMTNFHLPKSTLMMLVSALMGSQRIKDIYAHAIANEYRFFSYGDSSILLPKD

SEQ ID NO: 69558 - protein, 350 aa, Octadecabacter arcticus
  misc_feature (1)..(350): tr|M9RHV2|M9RHV2_9RHOB S-adenosylmethionine:tRNA ribosy ltransferase-isomerase OS=Octadecabacter arcticus 238 O X=391616 GN=queA PE=3 SV=1
MKLSDFDFDLPDTLIAVRPVRPRSSAKLLVADGPETHDLQVTDLRSVLQAGDHLVLNDTKVIPARLFGERIRKSPDGAGLAKIEVTLLEPQADGTWAALIKPLRKVRDGERIVFSQDLSAMLVHRYDGMGYLEFNVKDDDFDTALNAVGAMPLPPYIAAKRPADDLDKDDYQTVWARASGAVAAPTASLHFEQWLLDDLIAMGVKISYVTLHVGAGTFVPVKVDDVADHVMHSEWGQVSALAASDIMATKAAGGRVIPVGTTACRLIETAGASGTLVEWEGETDIFITPGFEFQITDGLMTNFHLPKSTLMMLVSALMGTQRIKDIYAHAIANEYRFFSYGDASILLPKG

SEQ ID NO: 69559 - protein, 348 aa, Octadecabacter ascidiaceicola
  misc_feature (1)..(348): tr|A0A238JP19|A0A238JP19_9RHOB S-adenosylmethionine:tRN A ribosyltransferase-isomerase OS=Octadecabacter ascidi aceicola OX=1655543 GN=queA PE=3 SV=1
MKLSEFDFDLPERLIAVRPAVPRSSAKMLVAQGARTRDMIVTDLVSVLRSGDHLVLNDTKVIPARLFGERTRDSEHGSGVAKIEVTLLEPQADGTWAALIKPLRKVRDGETIVFSPSLSATVKARDDGMGFLEFNLSGDDFDAALNEAGAMPLPPYIAAKRAADEQDKDDYQTVWAAKTGAVAAPTASLHFEQWLLDDLAAMGVKFSYVTLHVGAGTFLPVKVDDVSEHVMHSEWGQVSAQTAAAVMVTKAAGGRVIPVGTTACRLIETAGRSGVLEAWEGDTDIFITPGFEFQIADGLMTNFHLPKSTLMMLVSALMGQDCIREIYAHAIANDYRFFSYGDASILLP

SEQ ID NO: 69560 - protein, 350 aa, Octadecabacter sp.
  misc_feature (1)..(350): tr|A0A5B9EQ21|A0A5B9EQ21_9RHOB S-adenosylmethionine:tRN A ribosyltransferase-isomerase OS=Octadecabacter sp. SW 4 OX=2602067 GN=queA PE=3 SV=1
MQLSDFDFDLPDDLIATRPVTPRGDARLLLAQGDDTRDLHVRDLVDVLHAGDRLVLNDTKVIPARLTGERRRESAQGVVQARIEVTLLEPRADGCWAALIKPLRKLKIAETVVFSPDLSASLAAVVDGQGVLRFNLTGDDFDAALAKAGAMPLPPYIAARRAADEADKRDYQTVWARHKGAVAAPTASLHLDRAMLDALAAKGVQFTYVTLHVGAGTFLPVKVDDIADHKMHAEWGHVSAQAAGEINATRAAGGRVIPVGTTALRLIESAATDGGVAPWEGPTDIFITPGFIFRVADGLMTNFHLPKSTLMMLVSALMGPARVRDIYAHAIAQKYRFFSYGDASLLLPKA

SEQ ID NO: 69561 - protein, 102 aa, Octadecabacter sp.
  misc_feature (1)..(102): tr|A0A3D3ZWC6|A0A3D3ZWC6_9RHOB S-adenosylmethionine:tRN A ribosyltransferase-isomerase (Fragment) OS=Octadecaba cter sp. OX=1920174 GN=DIT67_11830 PE=3 SV=1
MKLSEFDFDLPERLIAVRPAVPRSAAKMLVAEGVKTRDMVVTDLVSVLRAGDHLVLNDTKVIPARLFGERSRQSEHGSGIAKIEVTLLEPQADGTWGALIKP

SEQ ID NO: 69562 - protein, 350 aa, Octadecabacter temperatus
  misc_feature (1)..(350): tr|A0A0K0Y5Q9|A0A0K0Y5Q9_9RHOB S-adenosylmethionine:tRN A ribosyltransferase-isomerase OS=Octadecabacter temper atus OX=1458307 GN=queA PE=3 SV=1
MKLSEFDFDLPEHLIAVRPAVPRSSAKMLVAEGMQTRDMAVTDLVSVLRAGDHLVLNDTKVIPARLFGERSRVSEHGSGIAKIEVTLLEPQASGTWAALIKPLRKVRDGETIVFSPRLSATLTARDDGMGYLEFNLSGDDFDAALNEAGAMPLPPYIAAKRAADEQDKDDYQTVWAANTGAVAAPTASLHFEQWLLDDLADLGVKFSYVTLHVGAGTFLPVKVDDVSEHVMHSEWGQVSAQTAAEVMETKAAGGRVIPVGTTACRLIETAGRSGVLEAWEGDTDIFITPGFEFQIADGLMTNFHLPKSTLMMLVSALMGQDRIREIYAHAITNDYRFFSYGDASILLPKG

SEQ ID NO: 69563 - protein, 349 aa, Odoribacter laneus
  misc_feature (1)..(349): tr|R5VFR3|R5VFR3_9BACT S-adenosylmethionine:tRNA ribosy ltransferase-isomerase OS=Odoribacter laneus CAG:561 OX =1263089 GN=queA PE=3 SV=1
MKLSKFKYKLPSDLIALHPTPNRDECRLMVLDKKTGKIEHKIFRDIIDYFEEKDVFVFNDTKVFPARLYGNKEKTGAEIEVFLLRELNKDLRIWDVLVDPARKIRIGNKLYFGEDDSLVAEVIDNTTSRGRTLRFLFDGDYDEFKKILYDLGETPLPKFINRKVESEDAQNYQTIFAKNEGAVAAPTAGLHFSRELMKRMEIRGINFAFLTLHVGLGNFREVDVEDLTKHKMDSEQIIVTPETVKIVNEAKDEKRKVCAVGTTVVRTLESCVTTKGRLTEFEGWTNKFIFPPYDFSVPDAFVSNFHLPYSTLLMMVAAFGGYENVMKAYDVAVKEKYKFGTYGDAMLII

SEQ ID NO: 69564 - protein, 410 aa, Odoribacter laneus
  misc_feature (1)..(410): tr|R5UR85|R5UR85_9BACT S-adenosylmethionine:tRNA ribosy ltransferase-isomerase OS=Odoribacter laneus CAG:561 OX =1263089 GN=queA PE=3 SV=1
MDTRILDRLKEIRIEDYTYDLPEEKIAKFPLPQRELSKLLIYKQGEITKNTFTAVKEILAPGQTLIFNNTKVIFARIFFQKRTGGHIEIFCLEPAEPADYALNFAARATCVWTCMVGNLRKWREGEIFCRFFHEGREVVLTAQKVTQEGGEVKVRFSWPPHLSFSEVLEACGRIPIPPYLNRDAEDSDKIRYQTVYSREEGSVAAPTAGLHFTKEILETLASRGVRIDELTLHVGAGTFRPVKAEKIGGHDMHTEHVVVSRQLIEDLAKKAGEVIAVGTTSVRTLESLYWMGVKKLEGDPCFYDLSQWEAYTLPSCYSLQQAMGALQEWFDETQEELLKARTTIIIVPGYSYRVIDALFTNFHQPQSTLLLLVAAAVGEDWKRIYAYALRENFRFLSYGDTSLLWINKHK

SEQ ID NO: 69565 - protein, 419 aa, Odoribacter sp.
  misc_feature (1)..(419): tr|A0A373U9Q0|A0A373U9Q0_9BACT S-adenosylmethionine:tRN A ribosyltransferase-isomerase OS=Odoribacter sp. AF21- 41 OX=2293111 GN=DWX82_17530 PE=3 SV=1
MTKKIAIENSREMVEKLKEIRIEDYTYDLPDERIAKFPLENREASKLLIYDEGRIDERHFYEVPEILDAGKMLVFNNTKVIYARILFQKVTGAVIEVFCLEPYQPSDYVQSFAAYGKCEWKCMIGNLKKWKEGTIFCHYRFEGKEYQLAATRKLREENDVIVEFTWDAPASFSDVLECCGRIPIPPYLNRESEEDDKIRYQTVYSKNEGSVAAPTAGLHFSIPVLKALREKGITIEELTLHVGAGTFRPVKSETIGGHDMHTEHISVRREVVEHLCTHPENIIAVGTTSVRTLESLYWMGVKRILGDEDFSSLGQWEAYDLPSGYSLKESMTALLGWFDERDAELLKAKTTIIIVPGYSYRVITAMFTNFHQPQSTLLLLVAAAIGEDWHKVYDYALAHDFRFLSYGDSSLLKVRKDKK

SEQ ID NO: 69566 - protein, 408 aa, Odoribacter sp.
  misc_feature (1)..(408): tr|A0A417WWY1|A0A417WWY1_9BACT S-adenosylmethionine:tRN A ribosyltransferase-isomerase OS=Odoribacter sp. OF09- 27XD OX=2293112 GN=queA PE=3 SV=1
MNTIELTALKNIKIEDYTYDLPEEKIAKFPLADREASRLLIYDRGAVSETFFSQVPALLKSGQTLIFNNTKVIYARLFFQKETGAHIEIFCLEPLVPADYARNFESNYYCEWSCMVGNLKKWRDGAIFCRFKRGQDEVVLKAEKLGQTGGEVHVRFSWNKELSFSEVLEYCGKIPIPPYLNRESEDSDKIRYQTVYSREEGSVAAPTAGLHFTRNILSVLEKQGVHIDELTLHVGAGTFRPVKAERIGGHDMHTEHIVISRKLVDDLSRKQGEVIAVGTTSVRTLESLYWMGVKRLMGEEEFYSLSQWEAYTLPVGYSLQEAMAALVDWFDRSGEELLKARTTIIIVPGYRFQVIDAMFTNFHQPQSTLLLLVGAAVGEDWRKIYAYALSHHFRFLSYGDSSFLKVRK

SEQ ID NO: 69567 - protein, 349 aa, Odoribacter splanchnicus
  misc_feature (1)..(349): tr|A0A1Y4A2I1|A0A1Y4A2I1_9BACT S-adenosylmethionine:tRN A ribosyltransferase-isomerase OS=Odoribacter splanchni cus OX=28118 GN=queA PE=3 SV=1
MKLSKFRYKLPPELIAQHPSANRDECRLMVVDRKTGTIEHKVFKDVIDYFDEKDVFVFNDTKVFPARLYGNKEKTGAEIEVFLLRELNRDLRIWDVLVDPARKIRIGNKLYFGEDDSLVAEVIDNTTSRGRTLRFLFDGEYDEFKKLLYGLGETPLPRTITRKVEPEDEERYQTIFARYEGAVAAPTAGLHFSRELMKRMEIKGIDFAYITLHVGLGNFREVDVEDLTKHKMDSEQIIVGGDTVKIVNDAKDERHKICAVGTTVVRTLESCVTTKGRLTEYDGWTNKFIFPPYDFSVPDAFISNFHLPYSTLLMMVAAFGGYDLVMKAYDLAVKEKYRFGTYGDAMLII

SEQ ID NO: 69568 - protein, 408 aa, Odoribacter splanchnicus
  misc_feature (1)..(408): tr|A0A412TX78|A0A412TX78_9BACT S-adenosylmethionine:tRN A ribosyltransferase-isomerase OS=Odoribacter splanchni cus OX=28118 GN=queA PE=3 SV=1
MDRELDKLRNIRIEDYTYNLPDERIAKFPLAEREASKLLIYRGGRIEESRFSEVRHLLRAGQMLVFNNTKVIHARLFFRKATGAVIEVFCLEPYLPVDYAQNFAARDSCEWSCMVGNLKKWKEGSIACDFTYGEATYRLTAEKVRQQEGELIIRFSWTGGLSFSEVLEGCGRIPIPPYLNRESEASDEVRYQTVYSKEEGSVAAPTAGLHFTRAILNDLKEKGVHVRELTLHVGAGTFRPVKAETIGDHDMHTEHLVISRELVEQLKEKTGDIVAVGTTSVRTLESLYWMGVKRLAGQEDFFTLGQWEAYTLPQDYSLREAMEALCGWFDTACQELLKARTTIIIVPGYRYRVIDAMFTNFHQPQSTLLLLVGAAVGEDWHKIYDYALTHDFRFLSYGDSSLLEVKKS

SEQ ID NO: 69569 - protein, 188 aa, Oenococcus alcoholitolerans
  misc_feature (1)..(188): tr|A0A0A0LZK7|A0A0A0LZK7_9LACT S-adenosylmethionine:tRN A ribosyltransferase-isomerase (Fragment) OS=Oenococcus alcoholitolerans OX=931074 GN=Q757_07510 PE=3 SV=1
TERYQTVYSKIEGSAAAPTAGLHWTPELLDKVRAKGVKTIELTLHVGLGTFRPVEEEDIDHHKMHSEFYQLSQQAADEINKVRHDGGKIVATGTTTIRTLETIGHKFNGDEFGGDLQADSGWTDIFIKPGFKWTTVDAFITNFHLPKSTLVMLVAAFTGRDNILNAYKHAIAEKYRFFSFGDAMFIHK

SEQ ID NO: 69570 - protein, 359 aa, Oenococcus kitaharae
  misc_feature (1)..(359): tr|G9WFG3|G9WFG3_9LACT S-adenosylmethionine:tRNA ribosy ltransferase-isomerase OS=Oenococcus kitaharae DSM 1733 0 OX=1045004 GN=queA PE=3 SV=1
MTEEKTPHYTLSDFDYDLPKELIAQTPLKQRDSSRMLVLNADSGAYEDKHFYDILDYLNPGDALVMNNSRVIPARLHGWRPDTKGHVEVLLLRQDHGDVWETLIKPAKKFPIGSTIDFGDENQTVMTGEVVGELEHGGRYVEFHYDGIFMELLDKLGEMPLPPYIKEKLADQERYQTVYSKVEGSAAAPTAGLHWTPELLDKVRAKGVKTIELTLHVGLGTFRPVEEEDIDHHKMHSEFYQLSQRAADEINQVRKQGGKIVATGTTTIRTLETIGHKFNGDQYGQELKADSGWTDIFIKPGFKWTTVDAFITNFHLPKSTLVMLVAAFTGRENILNAYAHAIKEKYRFFSFGDAMFIHR

SEQ ID NO: 69571 - protein, 359 aa, Oenococcus oeni
  misc_feature (1)..(359): tr|A0A5E9PAM5|A0A5E9PAM5_OENOE S-adenosylmethionine:tRN A ribosyltransferase-isomerase OS=Oenococcus oeni OX=12 47 GN=queA PE=3 SV=1
MTEEKVPHYTLSDFDYDLPHELIAQTPLKQRDTSRLLLLNAKTGAYEDKHFYDIIDYLNPGDALVMNNSRVIPARLHGWRPETKGHVEVLLLRQDHGDVWETLIKPAKKFPVGSVIDFGNENETIMTGKVVGELEHGGRYVEFQYDGIFMELLDKLGEMPLPPYIKEKLKDQERYQTVYSKIEGSAAAPTAGLHWTPELLDKVRAKGIKTIELTLHVGLGTFRPVEEENIDKHKMHSEFYQLSQAAADQINQVRNNGGRIVATGTTTIRTLETIGHKFNGDKYGGNVQADSGWTDIFIKPGFKWTTVDAFITNFHLPKSTLVMLVAAFTGRENILNAYKHAIQEKYRFFSFGDAMFIHK

SEQ ID NO: 69572 - protein, 359 aa, Oenococcus oeni
  misc_feature (1)..(359): tr|Q04GA0|Q04GA0_OENOB S-adenosylmethionine:tRNA ribosy ltransferase-isomerase OS=Oenococcus oeni (strain ATCC BAA-331 / PSU-1) OX=203123 GN=queA PE=3 SV=1
MTEEKVPHYTLSDFDYNLPHELIAQTPLKQRDASRLLLLNAKTGAYEDKHFYDIIDYLNPGDALVMNNSRVIPARLRGWRPETKGHVEVLLLRQDHGDVWETLIKPAKKFPVGSVIDFGNENETIMTGKVVGELEHGGRYVEFQYDGIFMELLDKLGEMPLPPYIKEKLKDQERYQTVYSKIEGSAAAPTAGLHWTPELLDKVRAKGIKTIELTLHVGLGTFRPVEEENIDKHKMHSEFYQLSQAAADQINQVRNNGGRIVATGTTTIRTLETIGHKFNRDKYGGNVQADSGWTDIFIKPGFRWTTVDAFITNFHLPKSTLVMLVAAFTGRENILNAYKHAIQEKYRFFSFGDAMFIHK

SEQ ID NO: 69573 - protein, 359 aa, Oenococcus sicerae
  misc_feature (1)..(359): tr|A0A410N9W1|A0A410N9W1_9LACT S-adenosylmethionine:tRN A ribosyltransferase-isomerase OS=Oenococcus sicerae OX =2203724 GN=queA PE=3 SV=1
MTEEKTPHYTLSDFDYNLPHELIAQTPLAQRDASRLLVLNAGDGAYEDRHFYNIIDYLNPGDAIVMNNSRVIPARLHGWRPDTLGHVEVLLLRQDHGDIWETLVKPAKKFPIGSTIDFGDEKQTIMTGTVTGELEHGGRYIEFHYDGIFMELLDKLGEMPLPPYIKEKLVDQERYQTVYSKVEGSAAAPTAGLHWTPELLDKVRAKGVKTIELTLHVGLGTFRPVEEEDIDQHKMHSEFYELSQKAADQINEVRHHGGKIVATGTTTIRTLETIGHKFNGDQYGQDVQADSGWTDIFIKPGFKWTTVDAFITNFHLPKSTLVMLVAAFTGRKNILNAYEHAIQEKYRFFSFGDAMFIHK

SEQ ID NO: 69574 - protein, 359 aa, Oenococcus sp.
  misc_feature (1)..(359): tr|A0A3T0TRQ2|A0A3T0TRQ2_9LACT S-adenosylmethionine:tRN A ribosyltransferase-isomerase OS=Oenococcus sp. UCMA 1 6435 OX=2259623 GN=queA PE=3 SV=1
MTEEKVPHYTLSDFDYDLPHELIAQTPLKQRDASRLLLLNARTGAYEDKHFYDIIDYLNPGDALVMNNSRVIPARLHGWRPETKGHVEVLLLRQDHGDVWETLIKPAKKFPVGSVIDFGNENETIMTGKVVGELEHGGRYVEFQYDGIFMELLDKLGEMPLPPYIKEKLKDQERYQTVYSKVEGSAAAPTAGLHWTPELLDKVRAKGIKTIELTLHVGLGTFRPVEEENIDEHKMHSEFYQLSQDAADQINQVRNNGGRIVATGTTTIRTLETIGHKFNGDQYGGNVQADSGWTDIFIKPGFKWTTVDAFITNFHLPKSTLVMLVAAFTGRENILNAYQHAIKEKYRFFSFGDAMFIHK

SEQ ID NO: 69575 - protein, 359 aa, Oenococcus sp.
  misc_feature (1)..(359): tr|A0A484HHS0|A0A484HHS0_9LACT S-adenosylmethionine:tRN A ribosyltransferase-isomerase OS=Oenococcus sp. WK4 OX =1806810 GN=queA PE=3 SV=1
MTEEKTPHYTLSDFDYNLPHELIAQTPLAQRDASRLLVLNAGDGAYEDRHFYNIVDYLNPGDAIVMNNSRVIPARLHGWRPDTLGHVEVLLLRQDRGDIWETLVKPAKKFPIGSTIDFGDEKQTIMTGTVTGELEHGGRYIEFHYDGIFMELLDRLGEMPLPPYIKEKLADQERYQTVYSKVEGSAAAPTAGLHWTPELLDKVRAKGVKTIELTLHVGLGTFRPVEEEDIDQHKMHSEFYELSQKAADQINEVRHHGGKIVATGTTTIRTLETIGHKFNGDQYGQDVQADSGWTDIFIKPGFKWTTVDAFITNFHLPKSTLVMLVAAFTGRKNILNAYEHAIQEKYRFFSFGDAMFIHK

SEQ ID NO: 69576 - protein, 370 aa, Oharaeibacter diazotrophicus
  misc_feature (1)..(370): tr|A0A4R6RLN0|A0A4R6RLN0_9RHIZ S-adenosylmethionine:tRN A ribosyltransferase-isomerase OS=Oharaeibacter diazotr ophicus OX=1920512 GN=queA PE=3 SV=1
MDVSLFDFDLPPESIALRPASPRDSARLLLVPPDGGFVDHVVRDLPDLLGPGDVLVFNDTKVIPAQLAGLRLREGAAPVAISATLHMRVGPDRWKAFVKGARKLAVGDRVAFGAQAGEGGAPACLAGALDATVAERGEDGETTFAFDLSGPDLDTAIATVGHIPLPPYIAARRPEDARDRADYQTVYAREEGAVAAPTAGLHFTPELMARLDARGVERRFVTLHVGAGTFLPVKAEDTADHRMHAEIGHVDAETAAALNAARARGGRVIAVGTTSLRLLESAADADGTIRPFAAATEIFITPGYRFRAVDGLVTNFHLPRSTLFMLVSAFAGLERMRAAYAHAIATGYRFYSYGDGSLLLPGRQGRTPDE

SEQ ID NO: 69577 - protein, 393 aa, Ohtaekwangia koreensis
  misc_feature (1)..(393): tr|A0A1T5MFH9|A0A1T5MFH9_9BACT S-adenosylmethionine:tRN A ribosyltransferase-isomerase OS=Ohtaekwangia koreensi s OX=688867 GN=queA PE=3 SV=1
MKELNINDFTYDLPADRIALYPLDKRDQSKLLVYRKGKVMHEQFRSLVDFLPASTMLFFNDTKVIPARLHFAKETGASIEVFLLHPVTPSSLLAEAMQAHEKCTWKCTIGNLKRWKDDVLYKLLGDATLEARLVNREDGIVEFRWNQGISFAEIITRSGETPLPPYLKRKPESTDRDRYQTVYAHYEGAVAAPTAGLHFTDEVLQSLRAKGIQTDYLTLHVSAGTFQPVKVQNAVEHPMHTEQVLIRKSNLDNLLKDTFVVPVGTTSMRTLESLYWYGVKLKEDPDAIFTINQHDPYQSYTSLPSRQEAFKYIAAYMDRKKLDILTGETSIYIMPGYTFRVCQGLVTNFHQPGSTLILLVAALVGDHWKNIYQQALENDYRFLSYGDSSLLLP

SEQ ID NO: 69578 - protein, 348 aa, Ohtaekwangia koreensis
  misc_feature (1)..(348): tr|A0A1T5IQ84|A0A1T5IQ84_9BACT S-adenosylmethionine:tRN A ribosyltransferase-isomerase OS=Ohtaekwangia koreensi s OX=688867 GN=queA PE=3 SV=1
MKLSEFKFELPNNSIALDPAENRDEARLMVVHKDTGKIEHKIFKDVVEYFNDGDVMVGNDTMVFPARLYGRKEKTGAKIEVFLLRELNADMHLWDVLVDPARKIRVGNKLYFGNGDLVAEVIDNTTSRGRTIRFLFDGDSAAFDKVVETLGETPLPKYIKRKVKPEDKDRFQTIFAKNKGAVSAPTAGLHFTRQLLKRLQLKGVDMTFVTLHIGLGTFRPVDVEDLTKHKMDSENFIVGTEAVDIVNKALDNKNRVCAIGTTTMRALESAVSATNRLKAREGWTDKFIFPPYDFKICNAMITNFHMPESTLLMMASAFGGYELIMEAYRVAKKEKYKFLTYGDAMLII

SEQ ID NO: 69579 - protein, 365 aa, Okeania hirsuta
  misc_feature (1)..(365): tr|A0A3N6RPT4|A0A3N6RPT4_9CYAN S-adenosylmethionine:tRN A ribosyltransferase-isomerase OS=Okeania hirsuta OX=14 58930 GN=queA PE=3 SV=1
MTEVDWSIDAYDYELPQELIAQNPIVPRDSSHLMVVDSLTHHNCIFRDLPDLLESGDLLVLNNTRVIPGRLYGHKTTGARVEILLLKPVENDCWLALVKPGKRFSNGTTIEFIPNSSNCNYKLQATVLSTDRETGGRFLQFNLPQGISLINLLDQFGHVPFPPYVTDSQALTEQYQTVYGTILGAVAAPTAGLHFTDELLEKLEQKNIRLAFITLHVGLGTFRPVETEDITKHDMHYEWIEVSPSVVDKINQTKSQGGRIIAVGTTVVRALEGAALANQNNSNEQLSISPFSGYTNIFIYPGYKWQIVEGLITNFHLPRSSLLMLVSAMIGRKRLFSLYQEAIAKKYRFYSFGDAMFILPVARIN

SEQ ID NO: 69580 - protein, 341 aa, Olavius algarvensis
  misc_feature (1)..(341): tr|A0A3P5VL15|A0A3P5VL15_9SPIR S-adenosylmethionine:tRN A ribosyltransferase-isomerase OS=Olavius algarvensis s pirochete endosymbiont OX=260710 GN=queA PE=3 SV=1
MQANLFSFNLPDELIAKVPSGRRGDSRLIVCDRNEDGPPQHTAMIKLPDFLSPGTVMVFNDTKVRKARVYARRSDTEGISEFLFLHQTREGEWNCIVNRMRKKRIGQNWFFPGDILGTITNLRSENLCTIKLNPIPDESWFEKSGHIPLPSYIGRLDNREDEERYQTVYSRNIGSAAAPTAGLHFTQEIMQILRENDIEICWITLQIGLGTFSPVRERDIQNHIMHLESYNIPYETAEKITAAKKDGRKVLAVGTTTVRTLETSWSSNKLASGAGKTDLFIYPGYRFKVVDQLFTNLHTPKSTLLMLVSAFLGRKRLLEAYDIAIEENYRFFSYGDAMLIR

SEQ ID NO: 69581 - protein, 343 aa, Oleiagrimonas soli
  misc_feature (1)..(343): tr|A0A099D0A0|A0A099D0A0_9GAMM S-adenosylmethionine:tRN A ribosyltransferase-isomerase OS=Oleiagrimonas soli OX =1543381 GN=queA PE=3 SV=1
MKKSDFHFDLPQRLIAQAPLAERSASRMLVLDVPHKRWQDSGVRALPDFLREGDLLVFNDTRVLPARLFGRKETGGAVEILLERVTGAHEARAQMRVSKKPAAGSRILLDDGTPVEVLGREDAFFRLRFDTDEPLEKVLLRVGHMPLPPYIERADSAEDAERYQTVFAREPGAVAAPTAGLHFDDALLEALRARGVDSGYVTLHVGAGTFQPMRAERIEDHHMHREWLNVGAQLIEKIHRTRAAGGRVIAVGTTVVRALESATVEGELRPFAGETQIFIFPGYRITSIDGLLTNFHLPESTLLMLVSALAGREFMLDAYRHAVEAEYRFFSYGDAMLILPQGV

SEQ ID NO: 69582 - protein, 343 aa, Oleiagrimonas sp.
  misc_feature (1)..(343): tr|A0A328T3I0|A0A328T3I0_9GAMM S-adenosylmethionine:tRN A ribosyltransferase-isomerase OS=Oleiagrimonas sp. MCC C 1A03011 OX=1926883 GN=queA PE=3 SV=1
MKKSDFHFDLPQHLIAQAPLAERSASRMLVLDVPNTRWQDSSVRALPDFLREGDLLVFNDTRVLPARLFGRKETGGAVEILLERVTGTHEARAQMRVSKKPAPGSRILLDDGTPVEVLGREDAFFRLRFDTEEPLEKVLLRVGHMPLPPYIERDDSAEDAERYQTVFAREPGAVAAPTAGLHFDDALLDALRARGVDSGYVTLHVGAGTFQPMRAERIEDHHMHREWLNVGAELIEKIHRTRAAGGRVIAVGTTVVRALESATVEGELHPFAGETQIFIFPGYRFTSIDGLLTNFHLPESTLLMLVSALAGREFMLDAYRHAVEAEYRFFSYGDAMLILPQGA

SEQ ID NO: 69583 - protein, 347 aa, Oleibacter marinus
  misc_feature (1)..(347): tr|A0A1N7KNH7|A0A1N7KNH7_9GAMM S-adenosylmethionine:tRN A ribosyltransferase-isomerase OS=Oleibacter marinus OX =484498 GN=queA PE=3 SV=1
MKTSDFSFELPDHLIARHPAAERSASRLLVFDPQQQQIDDRIFRDIESLIEPGDLLVFNNTRVIPARLFGEKASGGKLEALIERVVSEHDVLAHLRSSRSPKPGQSISLGGENAEVVGREGALFHLRFTSERPVLDILEDVGHMPLPPYMEREDAEEDRERYQTVYAEKPGAVAAPTAGLHFDDGLLERLTAKGVNFAFVTLHVGAGTFQPVKVDNIHEHHMHSEYIEVPENVVEAVKATRAAGKRVIAVGTTSVRSLESASRSGAIETFQGDSDIFIYPGYEFRSVDAMITNFHLPESTLIMLVSAFAGREGTLAAYDHAVANEYRFYSYGDAMFMPCRLYQSSGS

SEQ ID NO: 69584 - protein, 348 aa, Oleibacter sp.
  misc_feature (1)..(348): tr|A0A2D8AEL4|A0A2D8AEL4_9GAMM S-adenosylmethionine:tRN A ribosyltransferase-isomerase OS=Oleibacter sp. OX=202 4845 GN=queA PE=3 SV=1
MKTKDFDFDLPDELIARYPMAERSSSRLLVLNGETGNTAHHIFRDLLNMVEPGDLMVFNNTRVIPARLFGEKASGGKLEALIERVTGEHTALAHLRSSRSPKPGSMISLGGTEVEVTGRQGALFELKFLDERPLLSILEDVGHMPLPPYMERDDAEEDRERYQTVYAEKPGAVAAPTAGLHFDEPLLAALKEKGVNFAYVTLHVGAGTFQPVKVDSIEEHEMHAEYIEVPPDVVEAVKATRAAGKRVIAVGTTSVRSLESASTSGEIETFYGESRIFIYPGYRFRSVDAMVTNFHLPESTLIMLVSAFAGRDHTLAAYAEAVKEKYRFYSYGDAMFLACPQANAEESV

SEQ ID NO: 69585 - protein, 355 aa, Oleiphilus messinensis; identical to SEQ ID NO: 69533
  misc_feature (1)..(355): tr|A0A1H5WTM5|A0A1H5WTM5_9GAMM S-adenosylmethionine:tRN A ribosyltransferase-isomerase OS=Oleiphilus messinensi s OX=141451 GN=queA PE=3 SV=1

SEQ ID NO: 69586 - protein, 349 aa, Oleiphilus messinensis
  misc_feature (1)..(349): tr|A0A1Y0IAV8|A0A1Y0IAV8_9GAMM S-adenosylmethionine:tRN A ribosyltransferase-isomerase OS=Oleiphilus messinensi s OX=141451 GN=queA PE=3 SV=1
MNVSDFDYELPDELIARFPSPERASSRLLCLDKHNGEVVHRQFKDVLALIEPGDLLVFNDTRVIPARLFGRKATGGRIEVLVERLLGDGTALAHIRSSKSPKPGSLLYVDEFENQQEGLSAAPELEMTGRQGELFEIRGLAGKNILDILNQKGHMPLPPYIDRADVESDRERYQTVYSKREGAVAAPTAGLHFDDELLRTLQEKGAEMAYVTLHVGAGTFQPVRVDNIEDHIMHSEWLEVGAEVCAKVNATRARGGRVIAVGTTSVRSLETASAAGAIAPYAGETDIFIYPGYEFKTVDALITNFHLPESTLIMLISALAGRENVLAAYQEAIEHRYRFFSYGDAMFIG

SEQ ID NO: 69587 - protein, 344 aa, Oleispira antarctica
  misc_feature (1)..(344): tr|R4YTK8|R4YTK8_OLEAN S-adenosylmethionine:tRNA ribosy ltransferase-isomerase OS=Oleispira antarctica RB-8 OX= 698738 GN=queA PE=3 SV=1
MKTSDFSFDLPDELIARFPMEERSASRLLCVDGETGSIEHNGFRDLEGLLNPGDLLVFNNTKVIPARLYGQKESGGKLEALVERVLDEHHVIAHVKSSRSPKAGQRIMLGGADVEVIGRKGALFELKFLDPRPVFEILEAEGHMPLPHYMDRPDVEDDKERYQTVYAQHEGAVAAPTAGLHFDDPLLERLKEKGIEFGYVTLHVGAGTFQPVQVDDVNDHTMHSEYVDVDQALCDQVNAARARGNRVIAVGTTSVRSLESASQSGQIQPFNDDTQIFIYPGYEFKSVDALITNFHLPESTLIMLVSAFAGKAHTLNAYDCAIKEKYRFYSYGDSMFIPRPMKKL

SEQ ID NO: 69588 - protein, 345 aa, Oleispira antarctica
  misc_feature (1)..(345): tr|A0A1Y5HRP5|A0A1Y5HRP5_OLEAN S-adenosylmethionine:tRN A ribosyltransferase-isomerase OS=Oleispira antarctica OX=188908 GN=queA PE=3 SV=1
MKTSDFSFDLPDELIARYPMEERSASRLLCVDGESGSIEHNGFRDLEGLLNPGDLLVFNNTKVIPARLYGQKESGGKLEALVERVLDEHHVIAHVKSSRSPKAGQRITLGGAEVEVIGRKGALFELKFLDPRPVFEILEAEGHMPLPHYMDRPDVEDDKERYQTVYAQHDGAVAAPTAGLHFDDPLLERLEAKGIEFGYVTLHVGAGTFQPVQVDDVNDHTMHSEYVDVDQKLCDQVNAARARGNRVIAVGTTSVRSLESASQSGQIQPFNDDTQIFIYPGYEFKSVDALITNFHLPESTLIMLVSAFAGKEHTLNAYDVAIKEKYRFYSYGDSMFIPRPIQKFK

SEQ ID NO: 69589 - protein, 346 aa, Oleomonas sp.
  misc_feature (1)..(346): tr|A0A418WBE3|A0A418WBE3_9PROT S-adenosylmethionine:tRN A ribosyltransferase-isomerase OS=Oleomonas sp. K1W22B- 8 OX=2320859 GN=queA PE=3 SV=1
MKVADFDFDLPPDRIAVRPAEPRESARLLRITADGLSDRTIGDLPDLLRAGDLLVVNDTKVIPARLVGRIGEGRVEVNLIHAVDDHTWECLARPGKRFRPGSTVVFGALVAHIIAKAEDGTITLSFDVAGAALMAALDRVGTMPLPPYIARKREPDDQDRTDYQTAFAERTGAVAAPTAGLHLTPTMLGRLDAMGVERVAVTLHVGAGTFLPVKVDDTDDHRMHAEWGEVSAHAAARINAARAAGKRIVALGTTALRLIESAATPAGTVAPFGAWTDIFITPGYRFRTADLLLTNFHLPQSTLFMLVSAFAGTARMKAAYAHAVAQGYRFYSYGDACLIDRVDPGS

SEQ ID NO: 69590 - protein, 360 aa, Oligella ureolytica
  misc_feature (1)..(360): tr|A0A378XJM3|A0A378XJM3_9BURK S-adenosylmethionine:tRN A ribosyltransferase-isomerase OS=Oligella ureolytica O X=90244 GN=queA PE=3 SV=1
MMNNSSLPNPLPVADLLLSDFDYQLPDELIAQSPAEQRNKSRLLRIDAQGQCHDHQFTDLLQFLKPHDLLVFNNTKVIKARLFGQKTTGGKVELLIERLLDEQRALAHIRASKSPKLNSEIIFADGAFSAEVVDREDALFELVFSESLLPLLEQYGQTPLPPYITHTPDSDDDERYQTVYAKTPGAVAAPTAGLHFDDGLLEQLNKNNIHTAFVTLHVGAGTFQPVRVDDIRDHVMHAELYDVSADVVEAIKAARAAGGRVIAVGTTSVRALESAAQFGGTIDDMRCPIAHQGDTRLFITPGYQFKVVDALITNFHLPQSTLLMLVAALMGLDTMKKTYEHAIQQKYRFFSYGDSMFIDM

SEQ ID NO: 69591 - protein, 352 aa, Oligella urethralis
  misc_feature (1)..(352): tr|A0A095ZC13|A0A095ZC13_9BURK S-adenosylmethionine:tRN A ribosyltransferase-isomerase OS=Oligella urethralis D NF00040 OX=1401065 GN=queA PE=3 SV=1
MPPLDNTLTLSDFDYELPEDLIAQSPAEQRNKSRLLRVDVQGHCHDHQFTELIDFVKPHDLLVFNNTKVIKARLFGHKSSGGKIEILIERLLDDQRALAHIKASKAPKLDSTLHFADDQFSAQVLGREDALYELVFSKPLLPLLEEFGATPLPPYITHTPDAEDDERYQTVYAKTPGAVAAPTAGLHFDNELLEQLRQKGINTTFVTLHVGAGTFQPVRTTAIKDHIMHAEWYEVGPEVVTAIQSARAAGGRVIAVGTTSVRALESAAQFGGTIEAMRCPLAHQGDTRLFITPGYQFKVVDALITNFHLPQSTLLMLVAALMGLDSMKKTYQHAIQQRYRFFSYGDAMFIDF

SEQ ID NO: 69592 - protein, 359 aa, Oligella urethralis
  misc_feature (1)..(359): tr|A0A2N6QFN0|A0A2N6QFN0_9BURK S-adenosylmethionine:tRN A ribosyltransferase-isomerase OS=Oligella urethralis O X=90245 GN=queA PE=3 SV=1
MNNNSLTLPPLDNTLTLSDFDYELPEDLIAQSPAEQRNKSRLLRVDAQGHCHDHQFTELIDFVKPHDLLVFNNTKVIKARLFGHKSSGGKIELLIERLLDDQRALAHIKASKAPKLDSTLHFADDQFSAQVLGREDALYELVFSKPLLPLLEEFGATPLPPYITHTPDAEDDERYQTVYAKTPGAVAAPTAGLHFDNELLEQLRQKGINTTFVTLHVGAGTFQPVRTTAIKDHIMHAEWYEVGPEVVTAIQSARAAGGRVIAVGTTSVRALESAAQFGGTIEAMRCPLAHQGDTRLFITPGYQFKVVDALITNFHLPQSTLLMLVAALMGLDSMKKTYQHAIQQRYRFFSYGDAMFIDF

SEQ ID NO: 69593 - protein, 361 aa, Oligotropha carboxidovorans
  misc_feature (1)..(361): sp|B6JFC2|QUEA_OLICO S-adenosylmethionine:tRNA ribosylt ransferase-isomerase OS=Oligotropha carboxidovorans (st rain ATCC 49405 / DSM 1227 / KCTC 32145 / OM5) OX=50483 2 GN=queA PE=3 SV=1
MRTDLFDFDLPPECIALRPAEPRDSARLLLVRPNVGVEDHSVRDLPGLLAPGDQIVVNDTKVIAAQLSGRRIGGTSEPHIDVTLIKRIDGSRWQALVRPARKLSEGDVLRFGNEGRVCLLGNLDASVEAKGEAGEVTLAFAFHGPVLDQAIADLGAPPLPPYIASRRAPDDKDVGDYQTMFAKNEGAVAAPTAGLHFTPALEAALAARGIGIQRLTLHVGAGTFLPVKADDTDDHKMHSEWGTVSEETAKTLNEARAKGGRVVAVGSTSMRLLESAATEDGIIQPFTGETAIFITPGYKFRAVDVMMTNFHLPRSTLFMLVSAFSGLDTMRAAYAHAIAKGYRFYSYGDACLLFRNAGAAS

SEQ ID NO: 69594 - protein, 349 aa, Olivibacter sp.
  misc_feature (1)..(349): tr|A0A5C0ZM45|A0A5C0ZM45_9SPHI S-adenosylmethionine:tRN A ribosyltransferase-isomerase OS=Olivibacter sp. LS-1 OX=2592345 GN=queA PE=3 SV=1
MKLSQFKFNLPDSLIAHEPAETRDEARLMVLDRKTGAIEHKIFKDVLNYFEEHDVMILNNTKVFPARLYGNKEKTGATIEVFLLRELNKELRLWDVLVDPARKIRVGNKLYFGDNDLLVAEVVDNTTSRGRTIRFLFDGSDEEFRRNIEILGETPLPKYIKRKPTPEDKFRYQTIFAKNEGAVAAPTAGLHFSRELMKRLELKGVEFAEVTLHVGLGTFRQVEVEDLTKHKMDSEQFIIEQKDADIVNKAIAEKRRVCAVGTTSMRSIESAVSANRTLKAANDWTSKFIFPPYDFSIANSMITNFHTPESTLLMMICAFGGYEHVMNAYEIAVKEKYRFYSYGDAMLII

SEQ ID NO: 69595 - protein, 349 aa, Olleya aquimaris
  misc_feature (1)..(349): tr|A0A327RG70|A0A327RG70_9FLAO S-adenosylmethionine:tRN A ribosyltransferase-isomerase OS=Olleya aquimaris OX=6 39310 GN=queA PE=3 SV=1
MKLSHFNFDLPEELLAEYPAENRDESRLMVLNRKEQTIEHKMFKDIIDYFDEKDVMILNNTKVFPARLFGNKEKTGARIEVFLLRELNQEQRLWDVLVDPARKIRIGNKLYFGEDETLVAEVIDNTTSRGRTLRFLYDGSYQEFRIKLQELGETPLPKYIKREVEPEDEERYQTIYAKNEGAVAAPTAGLHFSKHLLKRLEIKGVDFAEVTLHVGLGTFNPVEVEDLSKHKMDSEELKIEAKAVETINNAQKEKRRICAVGTTAMRAIESSVSSSGTLNEIEGWTNKFIFPPYDFSIANAMITNFHTPKSTLLMMVSAFAGHDFIKKAYEEAVKEKYKFYSYGDAMLII

SEQ ID NO: 69596 - protein, 349 aa, Olleya namhaensis
  misc_feature (1)..(349): tr|A0A1I3L5S1|A0A1I3L5S1_9FLAO S-adenosylmethionine:tRN A ribosyltransferase-isomerase OS=Olleya namhaensis OX= 1144750 GN=queA PE=3 SV=1
MKLSHFHFDLPDELLAEYPAENRDESRLMVLNRKEQTIEHKMFKDLIEYFDEKDVMILNNTKVFPARLFGNKEKTGARIEVFLLRELNKEQRLWDVLVDPARKIRIGNKLYFGDDETLVAEVIDNTTSRGRTLRFLYDGSYEEFRKKLQLLGETPLPKYIKREVEPEDEERYQTIYAKEEGAVAAPTAGLHFSKHLLKRLEIKGVDFAEVTLHVGLGTFNPVEVEDLSKHKMDSEELKIEAPAVEIINNAKKEKRRICAVGTTAMRAIESSVSSSGTLNEIEGWTNKFIFPPYDFSIANAMITNFHTPKSTLMMMVSAFAGHDFMKKAYEEAVKEKYKFYSYGDAMLII

SEQ ID NO: 69597 - protein, 349 aa, Olleya sp.
  misc_feature (1)..(349): tr|A0A2K8WXT6|A0A2K8WXT6_9FLAO S-adenosylmethionine:tRN A ribosyltransferase-isomerase OS=Olleya sp. Bg11-27 OX =2058135 GN=queA PE=3 SV=1
MKLSHFHFDLPDELLAEYPAENRDESRLMVLNRKEQTIEHRMFKDIIEYFDEKDVMILNNTKVFPARLFGNKEKTGARIEVFLLRELNKEQRLWDVLVDPARKIRIGNKLYFGDDETLVAEVIDNTTSRGRTLRFLYDGSYEEFRKKLQLLGETPLPKYIKRDVEPEDEERYQTIYAKEEGAVAAPTAGMHFSKHLLKRLEIKGVDFAEVTLHVGLGTFNPVEVEDLSKHKMDSEELKIEAAAVEIINNAKKEKRRICAVGTTAMRAIESSVSSSGTLNEIEGWTNKFIFPPYDFSIANAMITNFHTPKSTLMMMVSAFAGHDFMKKAYDEAVKEKYKFYSYGDAMLII

SEQ ID NO: 69598 - protein, 349 aa, Olleya sp.
  misc_feature (1)..(349): tr|A0A559REQ5|A0A559REQ5_9FLAO S-adenosylmethionine:tRN A ribosyltransferase-isomerase OS=Olleya sp. Hel_I_94 O X=1250001 GN=queA PE=3 SV=1
MKLSHFNFELPEELLAEYPAENRDESRLMVLNRKEQTIEHKMFKDLIEYFDEKDVMILNNTKVFPARLFGNKEKTGARIEVFLLRELNQEQRLWDVLVDPARKIRIGNKLYFGDDETLVAEVIDNTTSRGRTLRFLYDGSYQEFRIKLQELGETPLPKYIKREVEPEDEDRYQTIYAKEEGAVAAPTAGLHFSKHLLKRLEIKGVDFAEVTLHVGLGTFNPVEVEDLSKHKMDSEELKIEAKAVEIINNAKKEKRRICAVGTTAMRAIESSVSSSGTLNEVEGWTNKFIFPPYDFSIANAMITNFHTPKSTLLMMVSAFAGHDFMKKAYEEAVKEKYKFYSYGDAMLII

SEQ ID NO: 69599 - protein, 391 aa, Olsenella profusa
  misc_feature (1)..(391): tr|U2TPM4|U2TPM4_9ACTN S-adenosylmethionine:tRNA ribosy ltransferase-isomerase OS=Olsenella profusa F0195 OX=11 25712 GN=queA PE=3 SV=1
MEEPVRTDDFDYPLPDELIAQEPVEPRDSCRLLVLDRKDGSIKHGRFRDVIDYLDPGDLLVANRTRVLPARLMGHKQGTGGVAETLLLKRREDLDALGHVWECLVKPGKRLKRNARIEYHEGGVHAPLSRPVVLIGEVIDYLDDNRGGRLVRFEPAGGLTLDAAIHKAGHVPLPPYITEYEGDPERYQTVYAMHEEHSAAAPTAGLHFTPELIERIGDRGVDWTTVELEVGIDTFRLVDEDDPTQHVMHTERYHVSQEVVDAAHATKAAGHRVIAVGTTSVRSLESAFAADVTTSEPACVAQRFEDAADSARMRGRGDIVERRDATTNLYLMPGSTFHVVDAMITNFHAPRSTLMMLVSAFATREQIMGAYQAAMDERYRFLSFGDAMLIL

SEQ ID NO: 69600 - protein, 388 aa, Olsenella scatoligenes
  misc_feature (1)..(388): tr|A0A100YUF9|A0A100YUF9_9ACTN S-adenosylmethionine:tRN A ribosyltransferase-isomerase OS=Olsenella scatoligene s OX=1299998 GN=queA PE=3 SV=1
MRTDDFDYPLPDELIAQAPAEPRDSCRLLVLNREDGSLEHRHFTDVIDYLDPGDLLVANKTRVMPARLVGHKRGTGGVAETLLLKRREDLDPMGHVWECLVNPGKRLRQPGIIIEYRAGGLHAPLSAEVVLTGEIIDFLEDNRGGRLVRFEPQGDRTLDAAIHEAGHVPLPPYITKYEGDPEKYQTVYAMHEEHSAAAPTAGLHFTPELIKRIEDKGVGWKTVELEVGIDTFRLVTEDDPTKHVMHTERYHVPQDVVDAVHATKAAGHRVVAVGTTAVRSLESAWDPEAPASTPAVTARRFEDAPDSAAVTGRGDIVERRDATTNLYLMPGSTYHVVDALITNFHVPRSTLMMLVSALATREQIMAAYQAAIDERYRFLSFGDAMLIR

SEQ ID NO: 69601 - protein, 388 aa, Olsenella sp.
  misc_feature (1)..(388): tr|A0A1Y4DP68|A0A1Y4DP68_9ACTN S-adenosylmethionine:tRN A ribosyltransferase-isomerase OS=Olsenella sp. An270 O X=1965615 GN=queA PE=3 SV=1
MRTDDFDYPLPDELIAQAPAEPRDSCRLLVLHREDGSVEHRRFTDVIDYLEPGDLLVANRTRVMPARLVGRKRGTGGVCETLLLKRREDVDPLGGVWECLVNPGKRLRQPGIVIEYRAGGLHAPESAPVVLTGEIVDFVEGSKGGRLVRFSPAGEREDGSPRTLDEAIHAAGHVPLPPYITQYEGDPEKYQTVYAMTEEHSAAAPTAGLHFTPELIERIREKGVGWATVELEVGIDTFRLVTEDDPAQHVMHTERYHVSQEVVDAVHATKAAGHRVIAVGTTSVRSLESAWEEGAAPSEPPVSALRFEAAAGTGDIVARENATTNLYLMPGSSFHVVDAMITNFHVPRSTLMMLVSAFATRDQIMDAYAAAIEERYRFLSFGDAMLIE

SEQ ID NO: 69602 - protein, 388 aa, Olsenella sp.
  misc_feature (1)..(388): tr|A0A1I0ACJ3|A0A1I0ACJ3_9ACTN S-adenosylmethionine:tRN A ribosyltransferase-isomerase OS=Olsenella sp. KH3B4 O X=1855394 GN=queA PE=3 SV=1
MRTDDFDYPLPDELIAQAPAEPRDSCRLLVLNREDGSLEHRHFTDVIDYLDPGDLLVANKTRVMPARLVGHKRGTGGVAETLLLKRREDLDPLGHVWECLVNPGKRLRQPGTIIEYRAGGLHAPLSAEVVLTGEILDFLEDNRGGRLVRFEPQGGRTLDAAIHEAGHVPLPPYITKYEGDPEKYQTVYAMHEEHSAAAPTAGLHFTPELIERIEDKGVGWKTVELEVGIDTFRLVTEDDPTKHVMHTERYHVPQDVVDAVHATKAAGHRVVAVGTTAVRSLESAWDPKAPAYTPAVTARRFEDAPDSAAVTGRGDIVERRDATTNLYLMPGSTYHVVDALITNFHVPRSTLMMLVSALATREQIMAAYQAAIDEKYRFLSFGDAMLIR

SEQ ID NO: 69603 - protein, 387 aa, Olsenella uli
  misc_feature (1)..(387): tr|X8HP85|X8HP85_9ACTN S-adenosylmethionine:tRNA ribosy ltransferase-isomerase OS=Olsenella uli MSTE5 OX=119062 1 GN=queA PE=3 SV=1
MRTDDFDYPLPDSLIAQVPCEPRDACRLLVLDRKDGSVEHRRFTDLVDYLEPGDLLVANRTRVLPARLMGHKRGTGGVSETLLLARREDVDALGHVWECLVKPGKRLKQGAVVEYREGGIHAPMDWPVVLTGEVIDYVGESRGGRLVRFEPVGGLSLDEAIHRAGHVPLPPYITDYEGDPERYQTVYSMREEHSAAAPTAGLHFTPELIRRIRGRDIDFRTVELEVGIDTFRLVEEDDPTQHAMHTERYHVGRGVVDAVHATKAAGHRVIAVGTTSVRSLESAFDPDVPAWGTPVCARRFEGARDSARLLGRGDIVERVDATTDLYLMPGSTFHVVDAMITNFHVPRSTLMMLVSAFATREQIMGAYQAAMNEGYRFLSFGDAMLIE

SEQ ID NO: 69604 - protein, 387 aa, Olsenella uli
  misc_feature (1)..(387): tr|E1QZM9|E1QZM9_OLSUV S-adenosylmethionine:tRNA ribosy ltransferase-isomerase OS=Olsenella uli (strain ATCC 49 627 / DSM 7084 / CIP 109912 / JCM 12494 / NCIMB 702895 / VPI D76D-27C) OX=633147 GN=queA PE=3 SV=1
MRTDDFDYPLPDSLIAQVPCEPRDACRLLVLDRKDGSVEHRRFTDLVDYLEPGDLLVANRTRVLPARLMGHKRGTGGVSETLLLARREDVDALGHVWECLVKPGKRLKQGAVVEYREGGIHAPMDWPVVLTGEVIDYVDESRGGRLVRFEPVGGLSLDEAIHRAGHVPLPPYITDYEGDPERYQTVYSMREEHSAAAPTAGLHFTPELIKRIRGRDIDFRTVELEVGIDTFRLVEEDDPTQHAMHTERYHVGRGVVDAVHATKAAGHRVIAVGTTSVRSLESAFDPDVPAWGTPVCARRFEGARDSARLLGRGDIVERVDATTDLYLMPGSTFHVVDAMITNFHVPRSTLMMLVSAFATREQIMGAYQAAMNEGYRFLSFGDAMLIE

SEQ ID NO: 69605 - protein, 387 aa, Olsenella umbonata
  misc_feature (1)..(387): tr|A0A1H1KYS5|A0A1H1KYS5_9ACTN S-adenosylmethionine:tRN A ribosyltransferase-isomerase OS=Olsenella umbonata OX =604330 GN=queA PE=3 SV=1
MRTDDFDYDLPEELIAQEPAEPRDSCRLLVLHRDDGSVEHRHFYDIVDCLEPGDLIVANKTRVMPARLMGHKRGTGGVSETLLLKRREDLDVMGHVWECLVKPGKRLKQGAVIEYREGGIHAPMSWPVVLTGEVVDYVDESRGGRLVRFEPAEGLTLDEAIHKAGHVPLPPYITQYDGDPEKYQTVYAMHEEHSAAAPTAGLHFTPELIRRIEDMGVQWKTVELEVGIDTFRLVEEDDPTKHVMHTERYHVSQDVVDAVHATKAAGHRVIAIGTTSVRSLESAFDANVPAWEPACVARRFEDAPDSARKLGRGDIVERRDATTNLYLMPGSTYHVVDAMVTNFHVPRSTLMMLVSAFATREQIMAAYQAAIAEKYRFFSFGDAMLMV

SEQ ID NO: 69606 - protein, 390 aa, Olsenella umbonata
  misc_feature (1)..(390): tr|A0A1H9NZQ7|A0A1H9NZQ7_9ACTN S-adenosylmethionine:tRN A ribosyltransferase-isomerase OS=Olsenella umbonata OX =604330 GN=queA PE=3 SV=1
MSTMRTDDFDYTLPEELIAQAPAEPRDACNMLVLHREDGSVEHKHFFDIIDYLEPDDLLVANKTRVMPARLMGHKKGTGGVAETLLLKRREDIDALGHVWECLVKPGKRLKQGAVIEYRPGGAHAPMSAPVCLTAEVIDYVDDNRGGRLVRFTPADGMELDEAIHEAGRVPLPPYITDYEGDPEKYQTVYAMDEEHSAAAPTAGLHFTPELIERLEEKGIQFKTVELEVGIDTFRLVEEDDPTQHVMHTERYHVNQDVVDAVHATKAAGHRVVAVGTTSVRSLESAFDPEAVAWESPCVARRFEGRDDSADSLGRGDIVERRDAKTSLYLMPGSTFHVVDAMITNFHVPRSTLMMLVSAFATREQIMAAYQAAIEKRYRFFSFGDAMLIV

SEQ ID NO: 69607 - protein, 347 aa, Unknown
  misc_feature (1)..(347): tr|A0A2A5W9T1|A0A2A5W9T1_9GAMM S-adenosylmethionine:tRN A ribosyltransferase-isomerase OS=OM182 bacterium MED-G 28 OX=1986256 GN=queA PE=3 SV=1
MKVSEFSYELPEELIAHYPADARTSSRLLCLNSVSGEMAHKYFTDLLNYLRPNDLLVFNNTKVIPARFFGEKETGGKIEILVERIMLDNCLLAQIKASKSPKIGSKLFFYAKNTDQPEDSLVATVLDLEEGFFKIQFGSEISLSQSLFPHGYMPLPPYIRRQEEALDLKRYQTIYATKEGAVAAPTAGLHFDRSLISNLLGNGINTAFLTLHVGAGTFQPVRVKNLEEHRMHREFIELDASVCNKVEQCREKEGRVIAVGTTSVRCLESAAEDGKLKATQKETAIFIYPGYKFQIVDAMITNFHLPESTLLMLVSAFSSKKVILDAYQEAIRKRYRFFSYGDAMFIY

SEQ ID NO: 69608 - protein, 349 aa, Unknown
  misc_feature (1)..(349): tr|A0A520RPX7|A0A520RPX7_9GAMM S-adenosylmethionine:tRN A ribosyltransferase-isomerase OS=OM182 bacterium OX=25 10334 GN=queA PE=3 SV=1
MQLSDFDYDLPQALIAQKPLPGRTDSRLLAVTQAGLAHRQFVHLRDYLRPNDMLVLNDTKVVPARFFAQKDSGGQAEVLLERVLPGVSEAGPENSEEALCQVRVSKPLRPGQTLRCQGEVITALGRESSFYRLRFPGSVFAFLDRRGELPLPPYIQREAVSEEDVERYQTVFAENPGAVAAPTAGLHFSEEFLAEVQSQGVNVAKITLHVGAGTFQPVRQEDLSQHQMHEEYFHIGSTSRDAIMASKEQGGRIIAVGTTVLRALESGAQDGELRPGEGSTRLFIKPGYRFQVVDALVTNFHLPRSTLMMLVCALGGHERMMAAYRCAVAEGYRFFSYGDAMFIEGDQGV

SEQ ID NO: 69609 - protein, 342 aa, Omnitrophica bacterium
  misc_feature (1)..(342): tr|A0A1G1KNQ6|A0A1G1KNQ6_9BACT S-adenosylmethionine:tRN A ribosyltransferase-isomerase (Fragment) OS=Omnitrophi ca bacterium RIFCSPLOWO2_01_FULL_45_24 OX=1801828 GN=A3 K16_00410 PE=3 SV=1
MKLSEFDYILPKELIAQYPVKEREKCRLMVLDRANQTVSHKTFEDIAGYFKKDDCLVLNDTKVIAARLFGKRKTGGKVELFLLEKKNPICEALVRPSSRLKEGEKITLESGDDVEVLDRGEVGRRVKFNRSLDDILKESGHIPLPPYIDRIDGASDKDDYQTVYGVKEGATASPTAGLHFTRELIEEIRDQGAGVQFVTLHTNYGTFAPIKTSEVEAHKMHKEYFELSADTAKFVNETKKNGGKVFAVGTTTTRLLEYCASLSSLTLSEVEGFSRNDGSLKGYTDILIYPGYQFKVVDHLITNFHLPKSTLLLLVSAFAGKEFIFEAYRQAILKRYRFFSYG

SEQ ID NO: 69610 - protein, 395 aa, Omnitrophica bacterium
  misc_feature (1)..(395): tr|A0A1G1KSB6|A0A1G1KSB6_9BACT S-adenosylmethionine:tRN A ribosyltransferase-isomerase OS=Omnitrophica bacteriu m RIFCSPLOWO2_12_FULL_44_17 OX=1801832 GN=queA PE=3 SV= 1
MKLSDFDYELPKELIAQQALSERTEARLLILDRKTQTLEHRIFRDLLDYFRPGDVLVLNDTRVLHARLFAKKKTGGKVEILLLKQVDFSNGTGSEGDTFQGLKKPENRETCPPQNRYRSVWQALIRPSRRVKINEELFFADEPNLVARVLDEGDPETGTRRIEFQCDQNFETVLSRVGRVPLPPYISREDVPIDRELYQTVFAKCPGAVASPTAGLHFDQAMLTALRAKGVQIVFVTLHVGYGTFQPVQDETLKSHRMHEEFYDISEGAAVLINQAKKEGRRVVACGTTVVRTLETVASNSVNPSPSPLPCGERDGVRGHSPIIRAGQGNTKLFIYPPFRFKMVDAMITNFHFPRTTLLMLVGAFCGYELMMKAYQEAIREKYRFYSYGDAMMIF

SEQ ID NO: 69611 - protein, 347 aa, Unknown
  misc_feature (1)..(347): tr|A0A1G1NX75|A0A1G1NX75_9BACT S-adenosylmethionine:tRN A ribosyltransferase-isomerase OS=Omnitrophica WOR_2 ba cterium RIFCSPLOWO2_02_FULL_50_19 OX=1801865 GN=queA PE =3 SV=1
MRLSEFDYKLPEGLIAQYPAKARDGSRLMVVHRISKKIEHRNFCDIVDYIGPSDCLVVNDTKVIKARLPAKRADTGAKAEITLIEKMSDRLYKCLIDTSTKIKIGTKFIFVDGELTGVIRGESEGIRLIEFSINGTDFGDILEKIGIVPLPPYIKRSPEKGDEERYQTVYAKTPGAVAAPTAGLHFSDGVLKKIKAKGSSVESLTLHVGYGTFKPVSADEVARHKLEPEVFELKEEAAQRLNYIKGKGGKIFAVGTTTCRVLENQARLVKGSKNRVEKGKGWTNLFIHPPYNFKFVDALVTNFHLPKTTLLMLVAAFCSREVMFKAYGEAVKEKYRFYSYGDSMLII

SEQ ID NO: 69612 - protein, 271 aa, Unknown
  misc_feature (1)..(271): tr|A0A1G1PHA1|A0A1G1PHA1_9BACT S-adenosylmethionine:tRN A ribosyltransferase-isomerase (Fragment) OS=Omnitrophi ca WOR_2 bacterium RIFCSPLOWO2_01_FULL_41_12 OX=1801863 GN=A2984_01975 PE=3 SV=1
TMVLSCRLKAKRLTGGKVELLLLNQNQNDNRTFDALIKPSRIKIGEKIIFDGGKIYGTVSAEKQITFSTASINTIYNLGMMPLPPYIKREPEKLDNICYQTVYAVNPGAIASPTAGLHFTKELMKRIKSKSINLGFLTLHIGYSTFKPVKSEDVTGHRMEKEYFNIPESTQRLIEEAQYKKSRIVAVGTTSLRALESYDSKMKDGYTDLFIYPGYKFKLVDCLLTNFHLPRTTLFILACAFAGNKLIKKAYQEAIDKKYRFYSYGDAMLIL

SEQ ID NO: 69613 - protein, 371 aa, Opitutaceae bacterium
  misc_feature (1)..(371): tr|A0A178ILH4|A0A178ILH4_9BACT S-adenosylmethionine:tRN A ribosyltransferase-isomerase OS=Opitutaceae bacterium TSB47 OX=1184151 GN=queA PE=3 SV=1
MPLPTELFDYELPPRLIAQTPAARRDASRLMVVDRASRKVVHTVFAELPAWLRAGDILFRNNAAVLPARLHARRPTGGAVECFLLRPDTVSDRGEAWWCLVRPGKRLPPGAVFSGGEGDFSATVLEKREDGTALVRFTTPRDASIIAVANRLGDIPLPPYISREGTEEERERDIERYQTVYADRASQVAVAAPTAGLHFTPELLARLAALGVGTADMTLHVGLGTFKPIGTETVEEHAIHREIYEMPEAAARRLVAPGGGRRIAVGTTSVRTIEDYLAKREREGAGAWQTGAGGGVQCAEAALFIYPPRRFLGVDALITNFHQPRSTLLCLVSAFLTPGSTDGIAWMRELYAEAIAREYRFFSYGDAMLVL

SEQ ID NO: 69614 - protein, 359 aa, Opitutaceae bacterium
  misc_feature (1)..(359): tr|A0A2T6DVU6|A0A2T6DVU6_9BACT S-adenosylmethionine:tRN A ribosyltransferase-isomerase OS=Opitutaceae bacterium EW11 OX=2161865 GN=queA PE=3 SV=1
MSLSTDLFDFELPARLVAQRPAERRDASRLLVVHRAEHRWEHRVFTDLPEYLRPGDTLFRNNAAVLPARLQAHRPTGGAVECFLLRQDPTAGENAWWCLIKPGRRLPVGSTFSSDDAFSATVIDKTEDGTALVRFAVRPGETVEELAARVGHVPLPPYISREGKPGEREQDLARYQTVYADIQKRVAVAAPTAGLHFTPELLETLASKGIETADVTLHVGLGTFKPITTDVVSRHAIHREHYEMPPETQQKLFSARGRRIAVGTTSVRTIEDFLTGHTTPLAQPYRSDTSIFIYPPYAFRGVDALITNFHQPRSTLLCLVAAFLSPGSTEGVGWLREIYADAISREYRFFSYGDAMLIL

SEQ ID NO: 69615 - protein, 370 aa, Opitutae bacterium
  misc_feature (1)..(370): tr|A0A2A2QRZ5|A0A2A2QRZ5_9BACT S-adenosylmethionine:tRN A ribosyltransferase-isomerase OS=Opitutae bacterium To us-C5TDCM OX=1982322 GN=queA PE=3 SV=1
MFPLVPPLSTDLFDYHLPAHLIAQTPAARRDGSRLMVIDRATRTLSHHTFAELPRFLRAGDTLFRNNASVLPARLHARRPTGGQVECFLLRPKEGHAATTWQCLIKPGKKLAVGATFADVAGTFQAEIVSRETDGSAFVRFTTLNGESVTALANRIGEVPLPPYIERSPAPTFASTTSSLDRDRYQTVYANPERQVAVAAPTAGLHFTPEILAALRAQGVLTADLTLHVGLGTFKPITAKMVEDHAIHRELYEIPVITQRALFPPLPGRRIAVGTTSVRSIEDFLAHNPAARETPQIAEASIYIYPPRTFAGIDALITNFHQPRSTLLCLVSAFLTPGSTDGVDWLHSIYAEAVAREYRFFSYGDAMLIL

SEQ ID NO: 69616 - protein, 352 aa, Opitutae bacterium
  misc_feature (1)..(352): tr|A0A2D8VBF0|A0A2D8VBF0_9BACT S-adenosylmethionine:tRN A ribosyltransferase-isomerase OS=Opitutae bacterium OX =2026771 GN=queA PE=3 SV=1
MLTSELDFNLPGDRVAQFPTDRRDRSRLLVYRRSEQSVHHHYFHELPDLLPSRLRIFRNDVSVLKARLFGQRKTGGAVECLLLRPTEKLDDTWHCLLKPGGKTARAGRFSLPGEYDATVMKTLPSGEYLVKFDLPKDDDPADLAQRVGALPLPPYVDRPAHEIDDSRYQTVYANPENRTAVAAPTAGLHFTPEILNELKDKGYSIYDLTLSVGLGTFRPIETEKIDDHPMHAEEYSIGPEAKKALKEKDGKTLAVGTTTVRTIEHYLSAIDLTPEKTTRAQTDLFIRPPYSFLGVDHLLTNFHLPGSTLLCLVSAFLSPGKEDGLATLKDIYAQAISQEYRFFSYGDAMLIL

SEQ ID NO: 69617 - protein, 363 aa, Opitutales bacterium
  misc_feature (1)..(363): tr|A0A3R7V5W6|A0A3R7V5W6_9BACT S-adenosylmethionine:tRN A ribosyltransferase-isomerase OS=Opitutales bacterium TMED207 OX=1986795 GN=queA PE=3 SV=1
MDLSLFDYTLPKSLIAQEPSEKRSDARLLVYNRKNGMISHAQFKDIGDFLPKNVQFFRNQVSVLKARLFGKRKTGGLVECLLLNPAEDSNTWWCLIKPGKKTLNARYFFDENHYEANVLDTNINGEYKVRFNLFHENNVYDLANKLGKMPLPPYIQREKKDIRDKLDSERYQTVYADDNKPFAAAAPTAGLHFTNELIEKLKAEGHDFLDLSLNVGIGTFRPIQVDAIENHKIHRESFEIPPATIKALQPKGSKLRVAVGTTSVRSLESFYAHLSKNSDTLEQFFDKPYSASTDLYIYPPAKFLGVDAMITNFHLPRSSLLCLVSAFLEPDTTHGVELLKTLYNLAIKNNYRFYSYGDAMLIL

SEQ ID NO: 69618 - protein, 352 aa, Opitutales bacterium
  misc_feature (1)..(352): tr|A0A2E7PWU4|A0A2E7PWU4_9BACT S-adenosylmethionine:tRN A ribosyltransferase-isomerase OS=Opitutales bacterium OX=2026772 GN=CMI33_06485 PE=3 SV=1
MLTSELQYELPSDRIAQSPCAKRDESRLLVYRRSDHSIAHHLFHELPDLLPPKLSILRNDVSVLKARLPGQRPTGGAVECLLLRPADQPGSTWRCLLKPGAKTAKAGTFGQDGEYSAKVIESLPSGEYLISFDLPKDSDPPALAERIGALPLPPYVRRPADSADEQRYQTVYADESKRSAVAAPTAGLHFTPQVLNRLQSDGHKVFDLTLSVGLGTFRPIETEKVEDHPMHAEEYFLTPETKGILRDGSARRLAIGTTCVRAIEHYLGKEDLRPAESTRAEAKLFIRPPHSFLGVDHLLTNFHLPGSTLLCLVGAFLTPSEKEGISRLKEVYAEAIERDYRFFSYGDAMLIV

SEQ ID NO: 69619 - protein, 362 aa, Opitutus sp.
  misc_feature (1)..(362): tr|A0A2T6D1W0|A0A2T6D1W0_9BACT S-adenosylmethionine:tRN A ribosyltransferase-isomerase OS=Opitutus sp. ER46 OX= 2161864 GN=queA PE=3 SV=1
MPPLATDLFDYVLPPHLIAQTPAAKRDASRLLVVDRAAHTFAHHHFADLPQFLRAGDTLFRNNAAVLPARLHARRPTGGAVECFLLRPTDDDRTWRCLVKPGRRLPVDATFAHPDGAFTGRIVAREADGAAIVRFTTPGNEPITAVANRVGDVPLPPYISRPDAIAPQQRATDLERYQTVYANTARQVAVAAPTAGLHFTPELLATLAAQGVGTAEMTLHVGLGTFKPISTDTVEEHQIHRELYEVPVATQHALFPPRSGRRVAVGTTSVRTIEDFLARNAAPLERDVVAEAGLFIYPPRAFRGVDALITNFHQPRSTLMCLVASFLAPGNTDGIAWLRELYAEAIAREYRFFSYGDAMLIL

SEQ ID NO: 69620 - protein, 396 aa, Opitutus sp.
  misc_feature (1)..(396): tr|A0A1H1LAW3|A0A1H1LAW3_9BACT S-adenosylmethionine:tRN A ribosyltransferase-isomerase OS=Opitutus sp. GAS368 O X=1882749 GN=queA PE=3 SV=1
MLTDLFDYPLPDRLIAQQPAGRRDASRLLVVHRREHRIEHRHFRDLPEYLRTGDCLFRNNAAVIPARLHATRPTGGQVECLLLRPAWSAGDPAREGPSAAGSPRLQGKEPATEWWCLVRPGKKLSVGATFALEGFFTATVREKTDDGLVRVAFTTRESDILAVANRIGEMPLPPYIAGHDNDAARAIDRERYQTVYADRAHQVAAAAPTAGLHFTPELLTRLAAQGITTADLTLHVGLGTFRPIATARVEEHPIHREVYEIPATTQQALLATKGRRIAVGTTSVRTIEDFLVRQPDAARWSGLTSRRSERVGVNALHPDQPYLAEADIFIYPPRDFRGVDALITNFHQPRSTLLCLVSAFLVPGSADGIAWLKEIYAEAVAREYRFFSYGDAMLIL

SEQ ID NO: 69621 - protein, 398 aa, Opitutus terrae
  misc_feature (1)..(398): tr|B1ZMP2|B1ZMP2_OPITP S-adenosylmethionine:tRNA ribosy ltransferase-isomerase OS=Opitutus terrae (strain DSM 1 1246 / JCM 15787 / PB90-1) OX=452637 GN=queA PE=3 SV=1
MPLALRVPPLPTDLFDYELPPRLIAQTPAERRDRSRLLVIDRATRKLAHHTFAELPKFLRAGDTLFRNNAAVLPARLHARRPTGGEVECFLLQQEPTAGSGTGVPPVIQPAEAIQSSRAGRPCHEIWRCLIKPGRRLAVGATFAHPSKAFTGEILEKHADGTAQVRFTTSDHRPITAVANELGDVPLPPYIERDPHAPDHDRQRQLDLSRYQTVYANAARQVAVAAPTAGLHFTPELLAALTAMGVRTADVTLHVGLGTFQPISTATIEEHRIHRELYEIPASTQRALFPPLTGRRIAVGTTSVRTIEDFLSQHSTPRPEEAAHVAEAGIFIYPPREFCGVDALITNFHQPRSTLLCLVSAFLTPGSTDGIAWIREIYAEAIAREYRFFSYGDAMLIL

SEQ ID NO: 69622 - protein, 342 aa, Orbus hercynius
  misc_feature (1)..(342): tr|A0A495RAD7|A0A495RAD7_9GAMM S-adenosylmethionine:tRN A ribosyltransferase-isomerase OS=Orbus hercynius OX=59 3135 GN=queA PE=3 SV=1
MQLSDFHFDLPNELIARYPAQTRSECRLLSLDGKTGQVTHGIFTDIIAQLQPGDLLVFNNTRVIPARVYGRKQSGGKIEILVERLLDNHRVLAHIKASKSPKVGTELLLGEQEQVNVTMVARHDTLFELQFPDDVLTILNQIGHIPLPPYIDRPDDEQDREVYQTVYNKVPGAVAAPTAGLHFDQPLLDVLKQKGVELAFVTLHVGAGTFQPVRVDVIEEHIMHAEYAQVSQEVVDAVVACKARGNKVVAVGTTSVRALESAAQQTGQIAPFFADTRIFIYPGYQFNVIDALITNFHLPESTLIMLVSAFAGYDNTMHAYQQAVAERYRFFSYGDAMFISKK

SEQ ID NO: 69623 - protein, 341 aa, Orenia marismortui
  misc_feature (1)..(341): tr|A0A4R8GXW3|A0A4R8GXW3_9FIRM S-adenosylmethionine:tRN A ribosyltransferase-isomerase OS=Orenia marismortui OX =46469 GN=queA PE=3 SV=1
MKVKDFDFELPEELIAQEPMEPRDESRLMVINKTEDKIEDKIFKEIIDYFEPGDTLVRNNTKVIPARLFGHKEKTGGKVEVLLLNQVKLDQWETLVRANGNVKIGTRIVFGNEELVAEVKEMTDFGGRVVEFEYDGVFEEILDQLGNMPLPPYITKELDDADKYQTVYAKKRGAAAAPTAGLHFTDNLLAQIKDKGVNIVDVTLHVGLGTFRPVKVDTIEEHDMHSEYYEISKEAAQVINETKKRGNKVFSVGTTSTRTLETVADENGKVKASKGWTDIFIYPGYEFKLVDALITNFHLPQSTLVMLVSAFAGKDLTMRAYQQAVEEEYRFYSFGDGMLII

SEQ ID NO: 69624 - protein, 340 aa, Orenia metallireducens
  misc_feature (1)..(340): tr|A0A285G6U0|A0A285G6U0_9FIRM S-adenosylmethionine:tRN A ribosyltransferase-isomerase OS=Orenia metallireducen s OX=1413210 GN=queA PE=3 SV=1
MKVKDFDFELPEELIAQEPMEPRDESRLMVINRAEERIEGKIFKEIVDYFQPGDTLVRNNTKVIPARLFGQKETGAKVEVLLLTQAELGVWEALVRPGRKLKLGTRVIFGNGELVGEIKGRTDFGGRVIKFEYEGTFEAVLDKLGEMPLPPYITKELDKSEKYQTVYAKKRGAAAAPTAGLHFTDELLAKIEAKGVNIVDITLHVGLGTFRPVSVDTIEEHDMHSEYYEVSEEAAQIINETKKQGNRVFSVGTTSTRTLETVATKDGRIKAGKGWTDIFIYPGYEFKAVDALITNFHLPQSTLVMLVSAFAGQELTMKAYEQAVEQNYRFYSFGDGMLIL

SEQ ID NO: 69625 - protein, 341 aa, Orenia metallireducens
  misc_feature (1)..(341): tr|A0A1C0A4X8|A0A1C0A4X8_9FIRM S-adenosylmethionine:tRN A ribosyltransferase-isomerase OS=Orenia metallireducen s OX=1413210 GN=queA PE=3 SV=1
MKVKDFDFELPEELIAQEPMEPRDKSRLMVINRAEEKIEGRIFKEIIDYFQPGDTLVRNNTKVIPARLFGRKEETGGKVEVLLLTQVELGEWEALVRPGRKLKLGTRVVFGNGELVGEIKDRTDFGGRVIKFEYEGTFEAVLDKLGKMPLPPYITKELDKSDKYQTVYAKKRGAAAAPTAGLHFTDELLAKIEAKGVNIVDITLHVGLGTFRPVSVDTIEEHHMHSEYYEVSEEAAKIINEAKERGNRVFSVGTTSTRTLETVATEKGRVEAGKGWTDIFIYPGYQFKAVDALITNFHLPQSTLVMLVSAFAGQELTMKAYEQAVEQKYRFYSFGDGMLIL

SEQ ID NO: 69626 - protein, 341 aa, Oribacterium asaccharolyticum
  misc_feature (1)..(341): tr|G9WVF5|G9WVF5_9FIRM S-adenosylmethionine:tRNA ribosy ltransferase-isomerase OS=Oribacterium asaccharolyticum ACB7 OX=796944 GN=queA PE=3 SV=1
MNTKDFYYDLPEELIAQDPLLKRSASRLLVMDRKSGKIEHKHFEDVLSYLREGDCLVLNNTKVIPARLHGVKTETGAHVEVLLLTRLTDKSWECIVRPGKKLRVGAEIIFAENLLSGTVIECKEDGNRVVEFHFEGIFEEILDKLGEMPLPPYITKQLEDKTRYNTVYAKEEGSAAAPTAGLHWTKGLLEKVQEKGIKIAYVTLHVGLGTFRPVKVEDVEKHHMHSELYIIDKETADLINSTKKAGGRIICTGTTSCRTIESNADENGVLHPGSAWTDIFIYPGYRFKVMDGLITNFHLPESTLIMLVSAFSTRENVLHAYQEAVRERYRFFSFGDAMLIN

SEQ ID NO: 69627 - protein, 341 aa, Oribacterium parvum
  misc_feature (1)..(341): tr|G9WK28|G9WK28_9FIRM S-adenosylmethionine:tRNA ribosy ltransferase-isomerase OS=Oribacterium parvum ACB1 OX=7 96943 GN=queA PE=3 SV=1
MNTKDFYYDLPEELIAQDPLLKRSASRLLVMDRKSGEIEHKHFEDVLSYLREGDCLVLNNTKVIPARLHGVKAGTGAHVEVLLLTRLTDKSWECIVRPGKKLRVGAEIIFAENLLSGTVIECKEDGNRIIEFHFEGIFEEILDKLGEMPLPPYITKQLSDKTRYNTVYAKEEGSAAAPTAGLHWTKELLEKVQEKGVKIAYVTLHVGLGTFRPVKVEDVEKHHMHSELYIIDKETADLINSTKKAGGRIICTGTTSCRTIESNADENGVLHPGSAWTDIFIYPGYRFKVMDGLITNFHLPESTLIMLVSAFSNRENVLHAYEEAVRKRYRFFSFGDAMFLI

SEQ ID NO: 69628 - protein, 207 aa, Oribacterium sinus
  misc_feature (1)..(207): tr|C2L1C5|C2L1C5_9FIRM S-adenosylmethionine:tRNA ribosy ltransferase-isomerase (Fragment) OS=Oribacterium sinus F0268 OX=585501 GN=HMPREF6123_2544 PE=3 SV=1
SGIFEEVLDQLGEMPLPPYITHKLEDRTRYNTVYAKEEGSAAAPTAGLHWTKELLEQCEAKGVEILRITLHVGLGTFRPVKMEEVEKHHMHSEYYSVSQEVAEKIEASKKRGGRVICTGTTSCRALESAARESGKIEAKSGWTDIFIYPGFSFKVMDALITNFHLPESTLLMLVSALSSREKILHAYEEAVKEKYRFFSFGDAMFIH

SEQ ID NO: 69629 - protein, 132 aa, Oribacterium sinus
  misc_feature (1)..(132): tr|C2L1C6|C2L1C6_9FIRM S-adenosylmethionine:tRNA ribosy ltransferase-isomerase (Fragment) OS=Oribacterium sinus F0268 OX=585501 GN=HMPREF6123_2545 PE=3 SV=1
MNTKDFYYDLPEELIAQDPLLNRSSSRLMLLNKETGEIEHKHFYDILDYLHPGDCLVLNETKVIPARLYGVKEDTGAQVEVLLLHRKDKEHWECLVKPGKKLKPGARISFGDGRLKAEIVDILEEGNRLIRF

SEQ ID NO: 69630 - protein, 341 aa, Oribacterium sp.
  misc_feature (1)..(341): tr|F5T7N3|F5T7N3_9FIRM S-adenosylmethionine:tRNA ribosy ltransferase-isomerase OS=Oribacterium sp. oral taxon 1 08 str. F0425 OX=904296 GN=queA PE=3 SV=1
MNTKDFYYDLPEELIAQDPLLKRSASRLLVMDRKSGEIEHKHFEDVLSYLREGDCLVLNNTKVIPARLHGVKAETGAHVEVLLLTRLTDKNWECIVRPGKKLRVGAEIVFAENLLSGTVIECKEDGNRVIEFHFEGIFEEILDKLGEMPLPPYITKQLEDKTRYNTVYAKEEGSAAAPTAGLHWTKELLEKVQEKGVKIAYVTLHVGLGTFRPVKVEDVEKHHMHSELYIVDKETADLINSTKKAGGRIICTGTTSCRTIESNADENGVLHPRSAWTDIFIYPGYRFKVMDGLITNFHLPESTLIMLVSAFSNRENVLHAYQEAVRERYRFFSFGDAMLIL

SEQ ID NO: 69631 - protein, 346 aa, Oribacterium sp.
  misc_feature (1)..(346): tr|A0A1S9BS68|A0A1S9BS68_9FIRM S-adenosylmethionine:tRN A ribosyltransferase-isomerase OS=Oribacterium sp. C9 O X=1943579 GN=queA PE=3 SV=1
METKDFYYDLPEELIAQDPLEKRSDSRLLLVDKTTGNIEHKHFYNIIDYLHKGDCLVINDTKVIPARLHGVKEETGAHIEVLLLQRKSATDWECLVKPGKKMRNGARVSFGEGLLKGEVIDTIDDGNRIIRFEFEGIWEEVLDKLGEMPIPPYIHHQLKERERYNTVYAKNDGSAAAPTAGLHWTKELLQAVKDKGVEIAHVTLHVGLGTFRPVKADKIEEHHMHSEFYIIEQSEADKINKAHAEGGRVICTGTTSCRTIESAALPDGTIPATSGWTSIFIYPGYKFKCMDALITNFHLPESTLVMLVSAFAGREHVLNAYNAAVREKYRFFSFGDACFFADFKND

SEQ ID NO: 69632 - protein, 361 aa, Oricola cellulosilytica
  misc_feature (1)..(361): tr|A0A4R0P8F7|A0A4R0P8F7_9RHIZ S-adenosylmethionine:tRN A ribosyltransferase-isomerase OS=Oricola cellulosilyti ca OX=1429082 GN=queA PE=3 SV=1
MRVDSFDFELPDERIAVRPAVPRDSARMLVVKPGEALSDSTVLQIPELLRAGDVLVFNDTKVIPAQLEGVRTRSDGGTARIGATLHLRTAPDRWKAFIRGAKKLKTGDRITFDAREAAEDETLDGVVHAKGEDGEAEIAFNRTGADLDAALAVFGHIPLPPYIASKRDDDDRDREDYQTIYAREQGAVAAPTAGLHFTERLFEALDQAGIIRTFVTLHVGAGTFLPVKADDTKDHRMHAEIGEINTETADMLNKARANGGRVVSVGTTSLRLLESAARADGSVAAWAGPTDIFITPGYRFKAVDILITNFHLPRSTLFMLVAAFSGLETMRGAYQHAIDARYRFYSYGDASMIFPATDERL

SEQ ID NO: 69633 - protein, 359 aa, Oricola sp.
  misc_feature (1)..(359): tr|A0A3M8GXD7|A0A3M8GXD7_9RHIZ S-adenosylmethionine:tRN A ribosyltransferase-isomerase OS=Oricola sp. OX=197995 0 GN=queA PE=3 SV=1
MRVDEFDFDLPEERIALRPAEPRDAARMLVVRDTGLTDAGVMDLPSFLSAGDLMVFNDTRVIPAQLEGTRERDGQIASIGATLHMREGPDRWKAFVRGAKKLRVGDRIRFGETGDACLAGVLDATVAEKAEGGEVTLTFDLAGPDLDAAIALAGHIPLPPYIASKRADDERDRTDYQTVYAREDGAVAAPTAGLHFTDRLFAKLDKAGVNRAFVTLHVGAGTFLPVKAEDTDDHVMHAEIGHVSDETAALINQTRARGGRIVSVGTTSLRLLESAADEDGNVRPFAGATDIFITPGYRFRAVDVLMTNFHLPRSTLMMLVSAFAGMEPMRAAYAHAIETGYRFYSYGDSSLLFRNDGDG

SEQ ID NO: 69634 - protein, 339 aa, Ornatilinea apprima
  misc_feature (1)..(339): tr|A0A0P6Y2K7|A0A0P6Y2K7_9CHLR S-adenosylmethionine:tRN A ribosyltransferase-isomerase OS=Ornatilinea apprima O X=1134406 GN=queA PE=3 SV=1
MKTSDFDYDLPEEYIAQTPVEPRHASRLLVLHRASGELEHKQFWQIGEYLRPGDLLVINRTRVIPARLYAHKETGGKVELLLLRRVDELRWEALVGGKRMLPGKKVKLEDGLTAVIEAELDGARRMIRFEEAVEGHLERLGHMPLPPYIHERLDDPERYQTVYSQTPGSAAAPTAGLHFTPELIAQLEQQGVAFAGVTLHVGLDTFQPVHEDDPREHQIHTEWCELGEETAAAIRKTKQSGGRVIAVGTTSVRTLESAARHAKADEIVSPFAGPTDLFILPGYTFRAVDVMITNFHLPRSTLLMLVSAFAGRERVLAAYEIAKQHGYRFFSFGDAMLLD

SEQ ID NO: 69635 - protein, 341 aa, Ornithinibacillus halophilus
  misc_feature (1)..(341): tr|A0A1M5DG40|A0A1M5DG40_9BACI S-adenosylmethionine:tRN A ribosyltransferase-isomerase OS=Ornithinibacillus hal ophilus OX=930117 GN=queA PE=3 SV=1
MNIEDFDFDLPEELIAQTPLKDRTSSRLLVLNRDKKQVEHRHFKDIKAYLKPGDCLVLNDTRVLPARLYGVKEDTGAKVEVLLLKQEENDTWEVLAKPAKKIKEGTVLLFGDGKLKATCIGTKEHGGRILDFAYEGIFYEVLDELGEMPLPPYIKEQLPERERYQTVYAKEEGSAAAPTAGLHFTTQLLEEIKEMGVTVTFITLHVGLGTFRPVSVDNIDEHEMHAEFYQMSEETAETINRVKESGGRVISVGTTSTRTLETIARDHGRMVASSGWTDIFIYPPYELKAIDGLITNFHLPKSTLIMLVSAFVDRETVLSAYEEAVKEKYRFFSFGDAMLIL

SEQ ID NO: 69636 - protein, 342 aa, Ornithinibacillus sp.
  misc_feature (1)..(342): tr|A0A3C1I3M4|A0A3C1I3M4_9BACI S-adenosylmethionine:tRN A ribosyltransferase-isomerase OS=Ornithinibacillus sp. OX=1898027 GN=queA PE=3 SV=1
MNIEDFDFDLPEELIAQTPLKDRSASKLMVLHRDVEEIEHKHFTDIKSFLKKGDCLVLNNTKVLPARLYGIKEDTGAKVEVLLLKQVEGDTWEVLAKPAKRLKEGTKLIFGEGKLTATCTETLEHGGRLLDFAYDGIFYEVLDELGEMPLPPYIKEQLPEKDRYQTVYAKEEGSAAAPTAGLHFTEQLLAEIKEMGVTVAFITLHVGLGTFRPVSVENIDEHKMHSEFYVMTQETAETLTKTKENGGRIISVGTTSTRTLETIARDNNGKLVESSGWTDIFIYPGFEFKAIDGLITNFHLPKSTLIMLVSAFSNREFILKAYNEAVKEKYRFFSFGDAMFII

SEQ ID NO: 69637 - protein, 352 aa, Ornithinicoccus hortensis
  misc_feature (1)..(352): tr|A0A542YWB8|A0A542YWB8_9MICO S-adenosylmethionine:tRN A ribosyltransferase-isomerase OS=Ornithinicoccus horte nsis OX=82346 GN=FB467_3572 PE=3 SV=1
MTALSTRPATRFRSPGDMTAPAPPETRGLARDEVRLLVGTREGITHTRFRSLPDHLRAGDLVVVNNSATLAAQVDGDHAGTGPVVVHVATPLDDGSWVVEVRSAPAAAEPVLDLSAGDVLQVHGVTLTLLAPYPHEGSSPSGAGNRLWRVAPEGGLADVLDRHGRPISYGYLDRAYPLSAYQTVFGHLPGSAEMPSAGRPFTDALVTRLVRAGVGVAPITLHTGVSSQEVGEGPQAERFAVPEVTARQVNTVRLTGGRVIAVGTTVARALESAVTSGGRVVGDSGWTDRVITPDDPARVIDGLITGWHDPEASHLLLVESVAGPELTQRAHDAAVAEGYHWHEFGDSALLLP

SEQ ID NO: 69638 - protein, 349 aa, Ornithobacterium rhinotracheale
  misc_feature (1)..(349): tr|I3ZXE5|I3ZXE5_ORNRL S-adenosylmethionine:tRNA ribosy ltransferase-isomerase OS=Ornithobacterium rhinotrachea le (strain ATCC 51463 / DSM 15997 / CCUG 23171 / CIP 10 4009 / LMG 9086) OX=867902 GN=queA PE=3 SV=1
MKTSDFDFKLPEKLLADRPSRFRDEAKLMVLHRDTQTIEHREFKDLIEYFDEDDVLIRNNTKVFPARLYGNKEKTGAKIEVFLLRELDPETRLWDVLVDPARKIRIGNKLFFGDDDSLVAEVVDNTTSRGRTLRFLFDGNYEEYRAKLKELGTTPLPKYIKREADKEDEERYQTIYATEEGAVAAPTAGLHFSKHLLKRLEIKGVDFAEITLHVGLGTFSPVQVEDLTKHKMESERVIIPASTADRVNKALEDGKRVCAVGTTSMRAIESAVSANKRLNPYEGWTNKYIHPPYDFSIANCMVTNFHTPKSTLLMMISAFAGHDFVMKAYKEAVKKEYKFYSYGDAMLIL

SEQ ID NO: 69639 - protein, 349 aa, Ornithobacterium rhinotracheale
  misc_feature (1)..(349): tr|A0A3R5USD0|A0A3R5USD0_9FLAO S-adenosylmethionine:tRN A ribosyltransferase-isomerase OS=Ornithobacterium rhin otracheale OX=28251 GN=queA PE=3 SV=1
MKTSDFDFKLPEKLLADRPSRFRDEAKLMVLHRDTQTIEHREFKDLIEYFDEDDVLIRNNTKVFPARLYGNKEKTGAKIEVFLLRELDPETKLWDVLVDPARKIRIGNKLFFGDDESLVAEVVDNTTSRGRTLRFLFDGTYEEYRAKLKELGTTPLPKYIKREADKEDEERYQTIYATEEGAVAAPTAGLHFSKHLLKRLEIKGVDFTEITLHVGLGTFSPVQVEDLTKHKMESERVIIPQATAERVNKALEDKKRVCAIGTTSMRAIESAVSANKRLNPYEGWTNKYIHPPYDFSIANSMVTNFHTPKSTLLMMISAFAGHDFVMKAYKEAVKKEYKFYSYGDAMLIL

SEQ ID NO: 69640 - protein, 360 aa, Orrella dioscoreae
  misc_feature (1)..(360): tr|A0A1C3K456|A0A1C3K456_9BURK S-adenosylmethionine:tRN A ribosyltransferase-isomerase OS=Orrella dioscoreae OX =1851544 GN=queA PE=3 SV=1
MPPTYTVNDFDYDLPPELIAQTPAPTRGGSRLLHLDPKGDLHDRQFAELGRLLRPDDLLIFNDTRVIPARLTGHKATGGKVEVLVERITEDNRALAHVRASKSPPAGTTLRLADAFDVTVLGREGELFDLRFPSAVLGLLATHGATPLPPYITHAPDAEDVSRYQTVYAREPGAVAAPTAGLHFDEAMLDALAAQGIQRAFVTLHVGAGTFQPVRVQNLDEHIMHAEWYTVPPETVAAIARTRAAGGRVLAIGTTSVRALESAAAQAALAAKAGDDAARAALSRRQLAGPADGDTRLFITPGFSYRIVDALLTNFHLPQSTLLMLVSALAGVDPIRRAYRHAVAERYRFFSYGDAMLIET

SEQ ID NO: 69641 - protein, 358 aa, Oryzihumus leptocrescens
  misc_feature (1)..(358): tr|A0A542Z847|A0A542Z847_9MICO S-adenosylmethionine:tRN A ribosyltransferase-isomerase OS=Oryzihumus leptocresc ens OX=297536 GN=FB474_4118 PE=3 SV=1
MSLAAEPELVFSVPEGALATEPPEARGLRRDEVRLLVADGCGLSHARFHDLGRFLRAGDVLVVNTSATLPAALPARRGLVEITVHFAAEPQVGTWLVELRPGPRADGPLRDGREGERLDLPDGGVLRLLAPYPDPLAEQPRIWRARVSLPLPTDEFLVAHGAPIAYAYVPGAWPISAYQTVFARDPGSAEMPSAGRPFSAELVSDLVAAGVLIAPVTLHTGVSSLEPGEGPLPERYAVPEGSAALVNLARARGGRVVAVGTTATRALETVAAPDGTVAAGAGWTDLVLGPDRPARAVDGVVSGWHQPGASHLLLLEAVAGPDVVRRAYAEAVRERYLWHEFGDSALLLSEGACGELGS

SEQ ID NO: 69642 - protein, 390 aa, Oryzisolibacter propanilivorax
  misc_feature (1)..(390): tr|A0A1G9SDS0|A0A1G9SDS0_9BURK S-adenosylmethionine:tRN A ribosyltransferase-isomerase OS=Oryzisolibacter propa nilivorax OX=1527607 GN=queA PE=3 SV=1
MTCDKDAICDNRAHFFAAPPPLRMPDTHRPFTLSDFDFALPEALIAQHPAPERSASRLLDGRGAQPVDRIFRALPELLAPGDLLVFNDTRVVRARIFGEKASGGKLELLIERVLDGGQVVAHMKVSKKPQPGAVLHLAGGRARGGFDALLLGRWPNADGPLFRLALQPPAGESPWELMERHGHLPLPPYIARQQSGGNDPDATEDAERYQTVFADKPGAVAAPTAALHFDAGVLAALAARGIERASVTLHVGAGTFQPVKTENLAEHRMHSEWYDIPPATLAALERCRQRGGRVVAVGTTTVRTLESWAQSGRATGDTSIFITPGFAFQVVDLLVTNFHLPRSTLMMLVSALSGYEHVMALYRHAVAEGYRFFSYGDAMLLQRQDLLLKK

SEQ ID NO: 69643 - protein, 356 aa, Oryzomicrobium terrae
  misc_feature (1)..(356): tr|A0A5C1EA80|A0A5C1EA80_9RHOO S-adenosylmethionine:tRN A ribosyltransferase-isomerase OS=Oryzomicrobium terrae OX=1735038 GN=queA PE=3 SV=1
MSLTVDDFDFPLPPELIAQHPAAQRTASRLLHVDGGALSDRQFTDLPSLLAPGDLLVFNDTRVIKARFFGAKESGGAVEVLVERIVEPHRALAQVRASKSPKPGTRLLLENSFGVTVTGREGEFFVLELPGAASGSGPDFWQLTEAHGRLPLPPYISHGAEAEDESRYQTVYARAPGAVAAPTAGLHFDEPLLERLKEMGVEQAFLTLHVGAGTFQPVRVTNIADHHMHSERFEIPEATAAAIAATRARGGRVVAVGTTSLRALESAALQGGREDGTVPAGGAETDIFITPGYQFRVVDRLVTNFHLPKSTLLMLVAALAGFDTIRAAYAHAVEQRYRFFSYGDAMLLERAAPPQA

SEQ ID NO: 69644 - protein, 391 aa, Oscillatoria acuminata
  misc_feature (1)..(391): tr|K9TSA5|K9TSA5_9CYAN S-adenosylmethionine:tRNA ribosy ltransferase-isomerase OS=Oscillatoria acuminata PCC 63 04 OX=56110 GN=queA PE=3 SV=1
MFPNQPDFETVASSVNAINSLTHSQPEGDRTLSAYDYDLPEERIAQNPVTPRDNSRLLVVDSPTSHQHRRFRDLPELLEPGDLLVLNNTRVMPARLYGYKSTGTPVEVLLLEEQEENQWLGLVKPGRRLKPGALIQFPVPDTPEGEPESQSTLQAKVLATDEATGGRILQFEATPGFSVRELLESYGQVPLPPYITQSVASPDQYQTVYAEQSGSAAAPTAGLHFTEELLDRLEAKGINRAFVTLHVGVGTFRPVEVEDVTRHQMHQEWVQVPKETVEKIRETKARGGRVIAVGTTGVRSLEGAAVSGELQPFCGKTDLFIYPGYQWRVVDGLITNFHLPRSSLLMLVSALIGRDRLLGLYREAIAQEYRFYSFGDAMIILPSAKTEISAS

SEQ ID NO: 69645 - protein, 379 aa, Oscillatoria nigroviridis
  misc_feature (1)..(379): tr|K9VGU0|K9VGU0_9CYAN S-adenosylmethionine:tRNA ribosy ltransferase-isomerase OS=Oscillatoria nigro-viridis PC C 7112 OX=179408 GN=queA PE=3 SV=1
MTEMDWSLDGYDYELPPSRIAQNPVVPRDSSRLLAVDSPSSHQHRIFRNLPDLLQPGDLLVLNNTRVLPARLYGHKPNGPAVEILLMEERQHNCWLALVKPGKRLKLGSKIEFDPIAPACEDSTTAPCCCLPDAAMPHRRRLTATVIERDDATGGRLLEFDIPKDENLAKFLDEYGHVPLPPYIENSQASAEQYQTVYAERLGAVAAPTAGLHFTEELFCRLEQRGIEKTFVTLHVGVGTFRPVEVADVTAHKMHGEWVEVPPATVEKIRETQARGGRIVAVGTTAVRALEGAAAASGDFSLQPFCGPTNLFIYPGYRWRVVEGMITNFHLPRSTLMMMVSAMIGRPRLLDLYREAIEHQYRFYSFGDAMLILPTATKD

SEQ ID NO: 69646 - protein, 370 aa, Oscillatoriales cyanobacterium
  misc_feature (1)..(370): tr|A0A1C0VRR7|A0A1C0VRR7_9CYAN S-adenosylmethionine:tRN A ribosyltransferase-isomerase OS=Oscillatoriales cyano bacterium USR001 OX=1880991 GN=queA PE=3 SV=1
MIEINLSLDLKLEAYNYELPPERIAQNPVIPRDSSRLLVVDSPTTHRHCIFRELPDFLQPGDLLVLNNTRVLPARLRGHKPNGSRVEVLLMEEKEDNCWLALVKPGKRLKPGAQIEFEPLETGVSSNSQGLSATVLAREEGTGGRYLQFEVPDGMSLIQLLPVYGHVPLPPYIRNSQSLGEQYQTVYAEKLGAIAAPTAGLHFTDELFKRLQEKGIEKAFVTLHVGVGTFRPVEVEDVTAHQMHREWVEVSAETVAKIRQTQAKGGRIIAVGTTAVRSLEGVAAWAQKQNLPSIEAFCGYVDLFIYPSYEWRVVEGLITNFHLPCSSLLMLVSAMIGRRRLFDLYEDAIAQQYRFYSFGDAMLILPEGNI

SEQ ID NO: 69647 - protein, 381 aa, Oscillatoriales cyanobacterium
  misc_feature (1)..(381): tr|A0A1J5GLR7|A0A1J5GLR7_9CYAN S-adenosylmethionine:tRN A ribosyltransferase-isomerase OS=Oscillatoriales cyano bacterium CG2_30_40_61 OX=1805291 GN=queA PE=3 SV=1
MRKMDQLDYQLESYNYELPEARIAQNPVVPRDHSRLLVVDSPDSHRHCRFKDLPDFLRPGDLLVLNNTRVLPARLYGRKSSGATVEVLLLEEKQHNCWLALVKPGKKFKPGSVIEFELNPLSKNNFNCQTLRATVLETDEETGGRVLKFEIPPGKSLIPFLEAFGNIPFPPYVTETEALPEQYQTIYAERSGAVAAPTAGLHFTEELFQRLQLKGIDQTFLTLHVGVGTFRPVEVDNIIDHQMHGEWIEVPAATLEKIEKTKASGGRVIAVGTTSARALEGAAIALSNTTETHQESTVTGYCGKTDIFIYPGYKWQIIDGLITNFHLPKSSLLMLVSALIGRERLLNLYQHILEEPANEFGQQYRFYSFGDAMLILPESVL

SEQ ID NO: 69648 - protein, 341 aa, Oscillibacter sp.
  misc_feature (1)..(341): tr|A0A352RKQ5|A0A352RKQ5_9FIRM S-adenosylmethionine:tRN A ribosyltransferase-isomerase OS=Oscillibacter sp. OX= 1945593 GN=queA PE=3 SV=1
MKTKDFDYYLPEELIAQTPLEKRDESRLMCLDKETGELSHHHFYELPDFLNPGDCLILNNSRVLPARLLGQRLPGGGACEVLLLIDRGDKTWECIVRPGKHLRKGAKMQFGNGELKAEVVDVLPDGNRMVKFDFEGIFLEVLEHLGKMPLPPYIKEELQDQERYQTVYSKVNGSAAAPTAGLHFTPELLEKIQAKGVNIGYVTLHVGLGTFRPVKEDDIEQHDMHSEYCVIPPETATLINETKARGGRVICVGTTSCRTLESWAQEDGHMEPSAGWTSIYIYPGYRFKVMDALVTNFHLPQSTLIMLVSALAGREHVLHAYEEAVKERYRFFSFGDAMFVS

SEQ ID NO: 69649 - protein, 341 aa, Oscillibacter sp.
  misc_feature (1)..(341): tr|A0A316TAJ9|A0A316TAJ9_9FIRM S-adenosylmethionine:tRN A ribosyltransferase-isomerase OS=Oscillibacter sp. OX= 1945593 GN=queA PE=3 SV=1
MKTSDFNYELPPELIAQTPIQRRDASRLLVLDKNTGAWQHRHFYDLPEYLRPGDCLILNNSRVLPARLLGHRLPGGGACEVLLLIDRGQKTWECLVRPGKRMRTGAKLSFGHGELTAEVVEELPGGNRLVRFDYEGIFLEVLEKLGKMPLPPYIKEELQDQERYQTVYSKVNGSAAAPTAGLHFTQELLERVTAMGVKIGYVTLHVGLGTFRPVKEDEIEGHEMHSEYCIIPQETADLINETRKNGGRVICVGTTSCRTIESWAAEDGTMTASAGWTDIFIYPGYRFKVMDALITNFHLPESTLIMLVSALAGREHILAAYREAVREKYRFFSFGDAMFIQ

SEQ ID NO: 69650 - protein, 341 aa, Oscillibacter valericigenes
  misc_feature (1)..(341): tr|G4KPA8|G4KPA8_OSCVS S-adenosylmethionine:tRNA ribosy ltransferase-isomerase OS=Oscillibacter valericigenes ( strain DSM 18026 / NBRC 101213 / Sjm18-20) OX=693746 GN =queA PE=3 SV=1
MKTSDFYYDLPKELIAQTPIEKRDASRLMTLDKTTGAWEHHHFYELPDFLTEKDCLILNDSRVLPARLLGRRLPGGGACEVLLLVDKGEGVWECLVRPGKKMRPGAQVSFGDGELTGEIIDEVEDGNRLVKFHYEGIFLEVLERLGKMPLPPYIKEELQDQERYQTVYSRELGSAAAPTAGLHFTRELLEKIAAKGVGIGYVTLHVGLGTFRPVKEEEITDHEMHSEYCIISQEVADLINRTKAGGGRVVCVGTTSCRTVESWAGEDGTMKAKSGWTGIYIYPGYKFKVTDALITNFHLPESTLIMLVSALAGREHILAAYGEAVKERYRFFSFGDAMFIH

SEQ ID NO: 69651 - protein, 345 aa, Osedax symbiont
  misc_feature (1)..(345): tr|S6I154|S6I154_9GAMM S-adenosylmethionine:tRNA ribosy ltransferase-isomerase OS=Osedax symbiont Rs2 OX=133003 5 GN=queA PE=3 SV=1
MQVSDFSFKLPDELIASFPLQQRSASRLLCLDGNSGALEHRQFTDLLDLLEPGDLLVFNNTRVIPARLFGQKESGGKVELLIERVTGDKTALAHVRSSRSPKPGAKLFFEGDIQSTVEGRQGNLFELSFQIEGSLIAALEQHGHMPLPPYMNREDQLEDRERYQTVYNEKPGAVAAPTAGLHFDEQLLQKIKDKGVESAFVTLHVGAGTFQPVKVESVTEHVMHAEYIEVSEQVCQQVKATKARGGRVIAVGTTSVRCLESAAAGGEIAPCSGDTSIFIYPGYKYLVVDRLVTNFHLPESTLLMLVSAFAGFDNTINAYQQAVANKYRFFSYGDAMFITPTTVNK

SEQ ID NO: 69652 - protein, 341 aa, Osedax symbiont
  misc_feature (1)..(341): tr|S6HIL1|S6HIL1_9GAMM S-adenosylmethionine:tRNA ribosy ltransferase-isomerase OS=Osedax symbiont Rs1 OX=133003 6 GN=queA PE=3 SV=1
MQVSDFSFDLPEELIASFPLEKRSASRLLCLDGKSGELQHRQFSDLVDLLQPGDLLVFNDTRVIPARLFGKKETGGKVELLIERVTAERAALAHVKSSRSPKVGTVLFFEGGIQATVVGRKGNLFELTFQIEGSLINALELHGHMPLPPYMNRADQLEDRERYQTVYNHKPGAVAAPTAGLHFDLELIEEIKAKGVDTAFVTLHVGAGTFQPVKVETVTEHVMHAEYIEVSEEVCRQVKQTKANGGRVIAVGTTSVRCLESAAAGGEISAMCGDTSIFIYPGYEYRVVDRLVTNFHLPESTLLMLVSAFAGFEHTIHAYQQAVVEKYRFFSYGDAMFITPR

SEQ ID NO: 69653 - protein, 68 aa, Osedax symbiont
  misc_feature (1)..(68): tr|A0A1Y5HU70|A0A1Y5HU70_9BACT S-adenosylmethionine:tRN A ribosyltransferase-isomerase (Fragment) OS='Osedax' s ymbiont bacterium Rs2_46_30_T18 OX=1856298 GN=A9R01_016 05 PE=3 SV=1
FIYPGYKYLVVDRLVTNFHLPESTLLMLVSAFAGFDNTINAYNQAVANKYRFFSYGDAMFITPTTVNK

SEQ ID NO: 69654 - protein, 362 aa, Otariodibacter oris
  misc_feature (1)..(362): tr|A0A420XIB5|A0A420XIB5_9PAST S-adenosylmethionine:tRN A ribosyltransferase-isomerase OS=Otariodibacter oris O X=1032623 GN=queA PE=3 SV=1
MLVTDFHFDLPDELIARYPTKERSASRLLYLNGETGEYQDQKFTDLLSHINEGDLLIFNNTRVIPARLYGKKASGGKLEVLIERVLDEKRCLAHIRSSKAPKIDSEIILGEDKLGEGNGLKAIMIARHDALFELQFEADKPLFDLLQNAGHIPLPPYIDRPDEETDQERYQTVYSKVLGAVAAPTAGLHFDNVMLEKLKQKGVDTAFVTLHVGAGTFQPVRVETIEDHKMHSEYAEVSPEVVEKIKATKAKGKRVICVGTTSVRSIESAAQAAEKEGKDIIVPFYSDTSIFLYPGKKFNIVDALVTNFHLPESTLIMLVSAFAGYRHCMNAYQHAVEEKYRFFSYGDAMFITKNPNALNDRP

SEQ ID NO: 69655 - protein, 355 aa, Ottowia oryzae
  misc_feature (1)..(355): tr|A0A2S0MD49|A0A2S0MD49_9BURK S-adenosylmethionine:tRN A ribosyltransferase-isomerase OS=Ottowia oryzae OX=210 9914 GN=queA PE=3 SV=1
MTHFTTSDFDFALPPELIAQHPAAERSASRLLHGSGPQPVDRVFRDLPALLNTGDLLVFNDTQVVNARLFGEKPSGGKLELLVERVLADGTVAAHMKVSKKPLPGARLRMAGGFEAELLGRWPNADGPLFHLRFSGDAYELMALHGHVPLPPYIERAQAGDAATGDTPARREDQARYQTVFAKHPGAVAAPTAALHFDEALLAALDARGVQRAAVTLHVGAGTFQPVKTEAIDQHVMHFERYRVPPETQAAIAACRARGGRVVAVGTTSVRTLESWAASGQAEGDTNIFITPGFRFQVVDALITNFHLPRSTLMMLVSALAGHAHIMALYRHAIAQRYRFFSYGDAMWLERAAQA

SEQ ID NO: 69656 - protein, 342 aa, Ottowia sp.
  misc_feature (1)..(342): tr|A0A5C7W4C2|A0A5C7W4C2_9BURK S-adenosylmethionine:tRN A ribosyltransferase-isomerase OS=Ottowia sp. OX=189895 6 GN=queA PE=3 SV=1
MRTFTTSDFDFALPPELIAQHPAPERSGSRLLDGSGAAPVDRTFRDLPTLLREGDLLVFNDTQVVKARLFGEKPSGGKLELLIERVLPDGTVAAHMKVSKKPRAGTVLRMAGGFEAELLGRWPEPQGPLFHLRLSGDAYALMAAYGHVPLPPYVTHADTAEDESRYQTVFAKNPGAVAAPTAALHFDDALLAAIDARGARRACVTLHVGAGTFQPVKTESLADHVMHRERYHVPPETVQAIADCRARGGRVVAVGTTSVRTLESWAASGEPSGDTGIFITPGFGFKVVDALITNFHLPRSTLMMLVSAFAGYERVMALYAHAVQQRYRFFSYGDAMWLLRSV

SEQ ID NO: 69657 - protein, 354 aa, Ottowia sp.
  misc_feature (1)..(354): tr|A0A5C8J5G7|A0A5C8J5G7_9BURK S-adenosylmethionine:tRN A ribosyltransferase-isomerase OS=Ottowia sp. GY511 OX= 2603274 GN=queA PE=3 SV=1
MRTFTTSDFDFALPPELIAQHPAAERSASRLLDGSGPTPVDRVFRELPTLMRAGDLLVFNDTQVVKARLFGEKATGGKLELLIERVLPDGTVAAHMKVSKKPPVGALLHMDGGATAELLGRWPDAQGPLFHLRLSQDAYQLMAAHGHMPLPPYIERNQAHADPDAAEDAERYQTVFAKNPGAVAAPTAALHFDEAVLAALDARGVQRAAVTLHVGAGTFQPVKSDHIADHVMHRERYHVPPATQQAIADCRARGGRVVAVGTTSVRTLESWAQRGEPSGDTGIFITPGYDWQVVDALITNFHLPRSTLMMLVSAFSGYDHIMALYRHAIAERYRFFSYGDAMWLVRQSAPSPTA

SEQ ID NO: 69658 - protein, 405 aa, Owenweeksia hongkongensis
  misc_feature (1)..(405): tr|G8R6N5|G8R6N5_OWEHD S-adenosylmethionine:tRNA ribosy ltransferase-isomerase OS=Owenweeksia hongkongensis (st rain DSM 17368 / CIP 108786 / JCM 12287 / NRRL B-23963 / UST20020801) OX=926562 GN=Oweho_0156 PE=3 SV=1
MEQDVKNIRIEEYNYPLPDERIAKYPVSPRDTSKLLIYEDGNIREDQYKHLLKYLPRDSFLLFNQTRVVQARLKFPKNETTTIEVFCLEPAERMDIQQAMQAKSPLRYKCLVGGARKWKTGKLSIELEDGTALYAEKIDRDNGSFIIEFSWDSDCHFADILEKAGKTPLPPYLNRDAEDADKSTYQTLFAKQNGSVAAPTAGLHFTEALLQELKDCGVEEAFITLHVGAGTFRPVSTETVAEHDMHYEEFFIDKKLMDSLLDNLDRPIIPVGTTSLRALESIYWLGVKILKSGIPDDSYVITQWEPYSGEKLPSPLEALQAVAYEMSIKNLEILTAKTQLIIAPGYEHQICSGLLTNFHQPKSTLLLLVSSFVGPKWKDIYNYALDHDFRFLSYGDGCLILKPKK

SEQ ID NO: 69659 - protein, 351 aa, Owenweeksia hongkongensis
  misc_feature (1)..(351): tr|G8R2F4|G8R2F4_OWEHD S-adenosylmethionine:tRNA ribosy ltransferase-isomerase OS=Owenweeksia hongkongensis (st rain DSM 17368 / CIP 108786 / JCM 12287 / NRRL B-23963 / UST20020801) OX=926562 GN=queA PE=3 SV=1
MKMKLSHFTYDLPKELIADRPTPHRDDSRLMVVNRKAGTIEHKMFNEVLDYFDDGDIMVLNNTKVFPARMYGNKEKTGARIEVFLLRELNGESRLWDVLVDPARKIRIGNKLYFGEDDSLVAEVIDNTTSRGRTLRFLYDGSYEEFRAKLAELGETPLPKYIGREPDEEDVDRYQTIFAKHEGAVAAPVAGLHFSKQLMKRMEIKGVDFAELTLHVGLGTFRPVEVEDLSKHKMDSEQFWIYDETARKVNKSIDAKKKVCAVGTTAMRAMESSVSTDGHLNQFDGWTNKFIFPPYEFEVANCMITNFHPPQSTLMMMTAAFGGYDLIMKAYKEAIKEKYRFLSYGDAMLII

SEQ ID NO: 69660 - protein, 349 aa, Owenweeksia sp.
  misc_feature (1)..(349): tr|A0A1Z8LFB4|A0A1Z8LFB4_9FLAO S-adenosylmethionine:tRN A ribosyltransferase-isomerase OS=Owenweeksia sp. TMED1 4 OX=1986609 GN=queA PE=3 SV=1
MKLSHFAYKLPENQIAQYPTDYRDDSRLMIVHRESGKIEHKEFKNLVDYFDPGDLMVMNNTKVFPARMWGNKEKTGALIEVFLLRELNAESRLWDVLVDPARKIRIGNKLYFGDDDSLVAEVIDNTTSRGRTLRFLFDGSYEEFRNKLKEMGETPLPNYIKRPLEPEDSERYQSIFAKVEGAVAAPVASLHYSKHLLKRMEIKGVETAEITMHVGLGTFRLVEVEDLSKHKMESEQFWLYPETAKAINAAKARKNRVCAVGTSVIRSMESSMITDNRVKPTEAWTSKFLFPPYKFSIADSLITNFHGPQSTMLMLTSAFLGHELTMEVYKTAVKEKYRFLCYGDSLLMI

SEQ ID NO: 69661 - protein, 396 aa, Owenweeksia sp.
  misc_feature (1)..(396): tr|A0A1Z8L991|A0A1Z8L991_9FLAO S-adenosylmethionine:tRN A ribosyltransferase-isomerase OS=Owenweeksia sp. TMED1 4 OX=1986609 GN=CBB74_05400 PE=3 SV=1
MNFEKINVDQFNYSLPVEKIAQFPQENRDEGNLLIFWDEKIHHALIKELPNWITKLSHPNLILNDTKVIPARLIFSRGENVKPIEIFYMDPVNGSIEDAMQSKKSLKAWCKVRNSKKWKHNLILKRENLTAIKLTQNGNKFQILFSWNSEDNWSEILQKNGETPLPPYMKRPSNKNDNERYQTVFSKVEGSVAAPTAGLHLTSKMLNKIQKNSKINYVQLHIGAGTFQPISENTISKHEMHSEEVHFSIETIESLKENKDILAVGTTSARAIESLYWLSIELFNGNQEISDIYQWAPYKNYDKFLSRDESLIFLTNYMRRNKKKSLHFNTSIIIIPGYKFKFIDLILTNFHQPKSTLLLLIAAAIGNDWRKVYDYALENNYRFLSYGDACLLKIKK

SEQ ID NO: 69662 - protein, 343 aa, Oxalobacter formigenes
  misc_feature (1)..(343): tr|C3X620|C3X620_OXAFO S-adenosylmethionine:tRNA ribosy ltransferase-isomerase OS=Oxalobacter formigenes HOxBLS OX=556268 GN=queA PE=3 SV=1
MYSLSDFDFELPEELIAQFPLEKRSASRLLIARDEKLADSRFDHLIDYLDRDDLLVFNNTKVLKARFFGAKKTGGKIEILIERILDNRTALAKIRASKSPKENSLLLIDDELEVSVKGREGEFYVLHFPSDLFSILDHHGHLPLPPYIARTADAYDEKRYQTVFAKEPGAVAAPTAGLHFDEELMGKLEEKGIRSAYLTLHVGAGTFQPVRSENLDEHKMHTEWYTIPQETVYAVKTARENKRKVVAVGTTSLRALESASQTGQLVAGSNETSLFITPGYRFNTVDWLVTNFHLPKSTLLMLVSAFAGYELIRKAYAHAISQQYRFFSYGDAMLLQCRTGNSA

SEQ ID NO: 69663 - protein, 348 aa, Oxalobacter formigenes
  misc_feature (1)..(348): tr|C3XC99|C3XC99_OXAFO S-adenosylmethionine:tRNA ribosy ltransferase-isomerase OS=Oxalobacter formigenes OXCC13 OX=556269 GN=queA PE=3 SV=1
MACFGMYTLSDFDFDLPEELIAQFPLPERSASRLLLVDEKKIADSRFYHLIDHLSEGDLLVFNNTKVLKARFFGSKASGGKIEILIERILDNRNALAKIRASKSPKAGSIIRIDDEIDVSVTGRDGEFFILQFPSDIFKILEEHGHLPLPPYIERAADSFDEKRYQTVFARELGAVAAPTAGLHFDDELMEKLRQKGISFAYLTLHVGAGTFQPVRSENLSEHQMHTEWYTIPEETVEAVKTAQQGKHKVVGVGTTSLRALESASQTGKLKAGSNETSLFITPGYQFQTVDHLITNFHLPKSTLLMLVSAFAGYNLIKKAYAHAIAEKYRFFSYGDAMLLKCISHKNG

SEQ ID NO: 69664 - protein, 360 aa, Oxalobacter sp.
  misc_feature (1)..(360): tr|A0A3A6P072|A0A3A6P072_9BURK S-adenosylmethionine:tRN A ribosyltransferase-isomerase OS=Oxalobacter sp. OX=20 93374 GN=queA PE=3 SV=1
MYSLSDFDFDLPSELIAQAPLPDRCASRLLHVDGQRLIDRQFADLLDLVQPSDLLVFNDTRVIKARLFGAKATGGKIEVLIERLLDERTALAQVRASKSPHPHSTLRLSNAFDVTVGERAGEFFTLHFPSDALALIDQYGHMPLPPYIDRAANAADDARYQTVYAKHLGAVAAPTAGLHFDDALLQRLRDKGVEFATVTLHVGAGTFQPVRTENLTEHAMHSEWYTVPQATVDAVREAQASGRAVIAVGTTSLRALESASQSGILQAGSGDTALFITPGYAFRTVTRLITNFHLPKSTLLMLVSAFAGFDTIRRAYAHAIEQRYRFFSYGDAMLLSLQSTPPSPHPSPARGEGVNHYAQI

SEQ ID NO: 69665 - protein, 295 aa, Oxalobacteraceae bacterium
  misc_feature (1)..(295): tr|A0A4Q3HZD8|A0A4Q3HZD8_9BURK S-adenosylmethionine:tRN A ribosyltransferase-isomerase (Fragment) OS=Oxalobacte raceae bacterium OX=1871070 GN=queA PE=3 SV=1
NTRVIPARVFGQKASGGKLEILVERVLDSHRVLAHVRSSKSPKPGSMILIDGGGEAEMVARHDALFELRFNEEVLPLLDKVGHMPLPPYIDRPDDTADRERYQTVYAEKAGAVAAPTAGLHFDKALLAQIEAMGVQTAFVTLHVGAGTFQPVRVEKLEDHHMHKEWLEVSQDVVDAVQACKARGGRVVAVGTTSVRSLESAARDGVLKPFSGDTDIFIFPGRPFHVVDALVTNFHLPESTLLMLVSAFAGYPEAMAAYAAAVANEYRFFSYGDAMFITRNPAPRGPSEAAPGDQA

SEQ ID NO: 69666 - protein, 338 aa, Oxalobacteraceae bacterium
  misc_feature (1)..(338): tr|A0A3D6AEB1|A0A3D6AEB1_9BURK S-adenosylmethionine:tRN A ribosyltransferase-isomerase OS=Oxalobacteraceae bact erium OX=1871070 GN=queA PE=3 SV=1
MYSLSDFDFDLPPELIAQTPLASRSASRLLEVDGRKLVDRQFAEIVDLLSPGDLLVFNDTRVLKARFFGVKQSGGKVEVLIERILDNRTAHAQVRASKSPQPGSTIRLADAFEVTVGERAGEFYTLSFPSDVFELVEAHGRLPLPPYIEHAADEFDEERYQTVYAKQPGAVAAPTAGLHFDQDLLARLREKGVRMAFVTLHVGAGTFQPVRSENLAEHQMHSEWYTVPQETVEAVRAAQAAGRNVVAVGTTSMRALESASQSGNLQAGSADTRLFITPGYRFNTVTRLVTNFHLPKSTLLMLVSAFAGYDEIRAAYAHAIAQKYRFFSYGDAMLLSRR

SEQ ID NO: 69667 - protein, 341 aa, Oxobacter pfennigii
  misc_feature (1)..(341): tr|A0A0P8W8J4|A0A0P8W8J4_9CLOT S-adenosylmethionine:tRN A ribosyltransferase-isomerase OS=Oxobacter pfennigii O X=36849 GN=queA PE=3 SV=1
MILDDFDFFLPEELIAQEPLEKRDTSRLMVLDKNTGEIEHRVFKDIITYLKKGDCIVLNNTRVIPARLFGSKEGSGGKIEVLLLKRLEKDVWEVLVKPGKKAKSGANIIFGNGQLKGKVIDTTDEGGRIIRFEYEGIFEEVLDKLGEMPLPHYIKKQLKDKERYQTVYSKYEGSAAAPTAGLHFTKELLKEIEDSGVGIAYVTLHVGLGTFRPVKTEVIEEHHMHSEFYTIDDVNAEIINNAKKNKGRIISVGTTSTRTLETAADNEGRISAKSGWTDIFIYPGYKFKLVDCLITNFHLPKSTLIMLVSALAGRENVLNAYKTAVNEKYRFFSFGDAMFIR

SEQ ID NO: 69668 - protein, 353 aa, Pacificibacter marinus
  misc_feature (1)..(353): tr|A0A1Y5RL12|A0A1Y5RL12_9RHOB S-adenosylmethionine:tRN A ribosyltransferase-isomerase OS=Pacificibacter marinu s OX=658057 GN=queA PE=3 SV=1
MKLSDFDFDLPQTLIATRPAKPRSSARLLVATPTQITDGHVTDLVDWFRAGDRLVLNDTKVLPARLTGLRGRDTAQGYQEARVEVTLLEPQSTAGQWRALVKPLKKVKEGEDVRFSDDLSARLERKEDGAAFLTFNLSGDDFDTALNAAGAMPLPPYIEALRKADAQDKEDYQTVWAKTLGAVAAPTASLHFDAPLLEALKAKGVEITYVTLHVGAGTFLPVKVDNVDDHKMHAEWGEVSAQAATEIAQTKAAGGRVIPVGTTALRLIESAARPTGAIASFLGETDIFIRPGFEFHVTDALMTNFHLPKSTLMMLVSAVLGQERIRQIYDHAIDNGYRFFSYGDSSLLLPNEI

SEQ ID NO: 69669 - protein, 353 aa, Pacificibacter maritimus
  misc_feature (1)..(353): tr|A0A3N4UUG7|A0A3N4UUG7_9RHOB S-adenosylmethionine:tRN A ribosyltransferase-isomerase OS=Pacificibacter mariti mus OX=762213 GN=queA PE=3 SV=1
MQLSDFDFDLPNDLIATRPAKPRSSARLLVATPTRLVDGHVGDLLDWFQAGDRLVLNDTKVLPARLSGLRGRDTAQGYQEAKVEVTLLDPQATQGQWRALVKPLKKVKEGEVVTFSDRLRATLDSKQDGTALLTFNLTGDDFDHALNEAGAMPLPPYIEALRKADAQDKEDYQTVWAKNLGAVAAPTASLHFDEKLLADLRAKGVEFTYVTLHVGAGTFLPVKVDNVDDHKMHAEWGEVSADAATEIAATKAAGGRVIPVGTTALRLIETAARETGQIAPFVSDTDIFIRPGFTFHVADALMTNFHLPKSTLMMLVSAVLGQDRIKQVYDHAIAQKYRFFSYGDASLLLPKER

SEQ ID NO: 69670 - protein, 340 aa, Pacificimonas flava
  misc_feature (1)..(340): tr|A0A219B261|A0A219B261_9SPHN S-adenosylmethionine:tRN A ribosyltransferase-isomerase OS=Pacificimonas flava O X=1234595 GN=queA PE=3 SV=1
MRVSDFDFDLPEELIALRPAVPRDSARLLHATPDALADRTVIDLPDLLQPGDALVFNDTRVIPAQLTGRRGDATIGITLHKREDAVTWLAFLKNARRARLGDRIEISPTLAALVEEKSEKGVRLRFEADGPLEAEIAAAGTMPLPPYIASKRRIDERDGEDYQTMFARREGAVAAPTASLHFTPRLLEAIAARGVLTETLTLHVGAGTFLPVKAEDTEEHSMHAEWGELGADAAARLNEVRARGGRIVAAGTTSLRLLESAAGDDGLLSPFAGDTDIFITPGYRFRAVGGLMTNFHLPRSTLFMLVSALMGLERMHGVYDHAIKERYRFYSYGDSSLLMP

SEQ ID NO: 69671 - protein, 342 aa, Pacificimonas flava
  misc_feature (1)..(342): tr|M2SBE8|M2SBE8_9SPHN S-adenosylmethionine:tRNA ribosy ltransferase-isomerase OS=Pacificimonas flava OX=123459 5 GN=queA PE=3 SV=1
MRVSDFDFHLPDERIALRPASPRDAARLLHVQAGRMADRVVRDLPQLLQPGDVLVFNDTRVIPAQLSGRRGDARVGVTLHKREGQTDWLAFVKNAKRLRVGDTVTFSDALSAEVAEKRPDGSVAFRFQSDGPVEAAIAAAGTMPLPPYIAAKRDIDERDADDYQTMFAARDGAVAAPTAALHFTPELMAALAERGIASETLTLHVGAGTFLPVKADDTEEHRMHSEWGEIAPDAAERLNAARRAGGRLIAVGTTSLRLLESAAGADGMVRPFSGDTDIFITPGYRFRAVDGLMTNFHLPRSTLFMLVSALMGLDIMQAAYAHAIESGYRFYSYGDSSLLLPG

SEQ ID NO: 69672 - protein, 354 aa, Paenalcaligenes hominis
  misc_feature (1)..(354): tr|A0A1U9K1P8|A0A1U9K1P8_9BURK S-adenosylmethionine:tRN A ribosyltransferase-isomerase OS=Paenalcaligenes homin is OX=643674 GN=queA PE=3 SV=1
MSDSASLPLSLFDYHLPDELIAQHPAQTRTGSRLMHLDAQGQCHDHSFTELPHFLRAGDLLVFNNTQVIKARLHGQKESGGKVEVLIERIVNEHAALAHIRASKAPKPGTRLIFSEGDLVLTVTGRDDALFEVEFDQPALDALERFGALPLPPYITHNAEQTDEDRYQTVYAQHPGAVAAPTAGLHFDQPLLQHLQDQGVQIAFVTLHVGAGTFQPVRVEQITDHQMHAERYTVPAATLAAIAQTRAAGNRVIAVGTTSVRALESAAQPEKTQGILLSNGDIQGDTRIFITPGYQFHCIDALITNFHLPQSTLLMLVSALAGIEPIRAAYHHAVQMHYRFFSYGDAMFIEKSNS

SEQ ID NO: 69673 - protein, 344 aa, Paenibacillaceae bacterium
  misc_feature (1)..(344): tr|A0A2A6DZM6|A0A2A6DZM6_9BACL S-adenosylmethionine:tRN A ribosyltransferase-isomerase OS=Paenibacillaceae bact erium JTherm OX=1906605 GN=queA PE=3 SV=1
MNVDEFDYELPEELIAQEPLADRAGSRLLVLRKKSGEIAHERFRDLGKFLRPGDALILNDTRVIPARLYGRKTATGARVELLLLRPLGGDRWETLARPAKRLKAGTTVEFAEGDARMTAVVEREEDDGRRIVRFEYEGSFESLLERIGRVPLPPYIRKPLVDRDRYQTVYARRAGSAAAPTAGLHFTEEMLETLRSAGIRVGYVTLHVGLGTFRPVTATRVEDHRMHAEVYEVPAATAELVNTTRRDGGRVVAVGTTVVRTLESAAKPDGTVAAQSGETDLFIYPGYRFRAVDALITNFHLPKSTLLMLVCAFAGRNAVLEAYRQAVELRYRFFSFGDAMLIID

SEQ ID NO: 69674 - protein, 384 aa, Paenibacillaceae bacterium
  misc_feature (1)..(384): tr|A0A1Y3QBS3|A0A1Y3QBS3_9BACL S-adenosylmethionine:tRN A ribosyltransferase-isomerase OS=Paenibacillaceae bact erium ZCTH02-B3 OX=1861638 GN=queA PE=3 SV=1
MRTSDFDFELPERLIAQTPPAERGASRLLVLHRGTGAVEHRMFRDLAEYLRPGDTLVLNDTRVMPARLLGRKADTGAKAELLLLVRLEGDRWEVLAKPARKIRRGARLLFGAAEGRKAEEAAACGTGVDGTQAGGAEDGGAAAGPVRAEPDGRPLLAAVVEEEREAGLRVVRFEYEGVFQELLDRAGQVPLPPYIRGKLADPERYQTVYARHAGSAAAPTAGLHFTEEFLEELQGRGIRLCRITLHVGLGTFRPVTAERVEDHRMHAEWYSVGEEAARLLNETHARGGRIVAVGTTSVRTLETVARRFPEGAVEPCSGWTDIFIYPGHAFRLVDALLTNFHLPRSTLIMLVSAFAGREAVLAAYREAVRLEYRFFSFGDAMLIL

SEQ ID NO: 69675 - protein, 348 aa, Paenibacillus agaridevorans
  misc_feature (1)..(348): tr|A0A2R5EUJ8|A0A2R5EUJ8_9BACL S-adenosylmethionine:tRN A ribosyltransferase-isomerase OS=Paenibacillus agaride vorans OX=171404 GN=queA PE=3 SV=1
MNADWFDFELPEALIAQTPLQERTASRLLMLGKSTGEIRHGSFTDLAERLGPGDVLVLNNTRVLPARLVGAKMDTGAKAELLLLKQLGEDRWETLAKPAKRLKVGTVIGFGDNGGGEPLLLAEVASEGEMGARVVQFRYSGIFQELLDKLGDMPLPPYIKERLEERERYQTVYSKHQGSAAAPTAGLHFTESFLEQLQAKGVELAYVTLHVGLGTFRPMTAERVEDHEMHSEYYELDDENAAIIRTAKLQGRRIVAVGTTSARTLETVAGRFPVGELEACSGWTSIFIYPGYEFKLVDALLTNFHLPKSTLVMLVSALAGRDHIMRAYCEAVEREYRFFSFGDAMFIE

SEQ ID NO: 69676 - protein, 348 aa, Paenibacillus algorifonticola
  misc_feature (1)..(348): tr|A0A1I2AYU9|A0A1I2AYU9_9BACL S-adenosylmethionine:tRN A ribosyltransferase-isomerase OS=Paenibacillus algorif onticola OX=684063 GN=queA PE=3 SV=1
MNVEMFDFELPEHLIAQTPLLQRTSSRLLTLDRSNGAVNHESFTDLAQHLHAGDVLVLNDTRVLPARLIGAKADTGAKIELLLLKQLEGDRWEALAKPAKRMKIGAEVWFGDDGSGQPLLRAFVEEEGDMGGRTIRFAYSGIFQELLERLGEMPLPPYIRERLEEQERYQTVYAKHDGSAAAPTAGLHFTADFLKQLADKGVRIAYVTLHVGLGTFRPMSVDVVEEHVMHSEYYELSEETAALLGQAKAEGARIVAVGTTSARTLETVAARFEKETIQACSGWTDIFIFPGYSFKLVNALLTNFHLPKSTLVMLVSALAGRDAVMGAYAEAIREEYRFFSFGDAMFIY

SEQ ID NO: 69677 - protein, 348 aa, Paenibacillus alvei
  misc_feature (1)..(348): tr|S9U0X6|S9U0X6_PAEAL S-adenosylmethionine:tRNA ribosy ltransferase-isomerase OS=Paenibacillus alvei TS-15 OX= 1117108 GN=queA PE=3 SV=1
MNVDLYDFHLPEHLIAQTPLAVRTASRLLTLNRQTGEVEHHAFPEIIHYLQPGDLLVLNDTRVIPARLFGVKEDTGAKVEVLLLKQEENDCWEALVKPGKKVKLGTVVVFGDKLKAEVLEEREMGARLLRFTYEGIFNEILDELGQMPLPPYIKEQLDDRERYQTVYAKHEGSAAAPTAGLHFTKELLAEVENKGARIAYVTLHVGLGTFRPMSSDTIEEHVMHSEYYEVSAETARTINETKEQGGRIVAVGTTSARTLETVAGRFVGKAIEPCSGWTDIFIYPGYEFKLVNSLLTNFHLPKSTLVMLVSALAGREHIMAAYQEAIEQEYRFFSFGDAMFIYDNAPET

SEQ ID NO: 69678 - protein, 348 aa, Paenibacillus alvei
  misc_feature (1)..(348): tr|K5A8N6|K5A8N6_PAEA2 S-adenosylmethionine:tRNA ribosy ltransferase-isomerase OS=Paenibacillus alvei (strain A TCC 6344 / DSM 29 / NBRC 3343 / NCIMB 9371 / NCTC 6352) OX=1206781 GN=queA PE=3 SV=1
MNVDLFDFHLPEHLIAQTPLTDRTASRLLTLDRHTGKVEHHNFPEILSYLQPGDLLVLNDTRVIPARLFGVKEDTGAKVEVLLLKQEEDDCWEALVKPGKRVKVGMTVLFGDKLKAEVLEEREMGARLLRFTYEGIFNEILDELGQMPLPPYIKEQLNDRERYQTVYAKHEGSAAAPTAGLHFTKELLAEVEKKGVHVAYITLHVGLGTFRPMSSNTIEEHVMHSEYYEMSADTATIINETKQQDGRIVAVGTTSARTLETVAGRFDGKPIEPCSGWTDIFIYPGYEFKLVNSLLTNFHLPKSTLVMLVSALAGRDHIMAAYQEAIDQEYRFFSFGDAMFIYDHAQET

SEQ ID NO: 69679 - protein, 342 aa, Paenibacillus amylolyticus
  misc_feature (1)..(342): tr|A0A1R1DT38|A0A1R1DT38_PAEAM S-adenosylmethionine:tRN A ribosyltransferase-isomerase OS=Paenibacillus amyloly ticus OX=1451 GN=queA PE=3 SV=1
MNVNLYDFELPEQLIAQTPLLDRTASRLLTLNKDSGEINHQTFPDIIDFLNPGDTLILNDTRVLPARLFGTKEDTGAKAEVLLLKNVEGDKWEALVKPGKKLKAGSVIVFGDELKAIIEEEGEMGARTLTFTYDGIFQEILDRLGEMPLPPYIKETLDDRERYQTVYAKHEGSAAAPTAGLHFTDELLDQIRAKGVNVAFITLHVGLGTFRPMSVDVVEDHVMHEEYYSLSQETADLINQTKTNGHRVFAVGTTSCRTLETVGSKFENGILQASSGWTSIFIYPGYSFKVIDGMLTNFHLPKSTLVMLVSALAGREHIMQAYEEAIQEKYRFFSFGDAMLIY

SEQ ID NO: 69680 - protein, 342 aa, Paenibacillus amylolyticus
  misc_feature (1)..(342): tr|A0A1R1BJP3|A0A1R1BJP3_PAEAM S-adenosylmethionine:tRN A ribosyltransferase-isomerase OS=Paenibacillus amyloly ticus OX=1451 GN=queA PE=3 SV=1
MNVNLYDFELPEQLIAQTPLLDRTASRLLTLNKDSGEINHQTFPDIIDFLNSGDTLILNDTRVLPARLFGTKEDTGAKAEVLLLKNVEGDKWEALVKPGKKLKAGSVIVFGDELKAIIEEEGEMGARTLTFTYDGIFQEILDRLGEMPLPPYIKETLDDRERYQTVYAKHEGSAAAPTAGLHFTDELLNQIRAKGVNVAFITLHVGLGTFRPMSVDVVEDHVMHEEYYSLSQETADLINQTKENGHRVFAVGTTSCRTLETVGSKFENGILQASSGWTSIFIYPGYSFKVIDGMLTNFHLPKSTLVMLVSALAGREHIMQAYEEAIQEQYRFFSFGDAMLIY

SEQ ID NO: 69681 - protein, 342 aa, Paenibacillus anaericanus
  misc_feature (1)..(342): tr|A0A433Y4Q6|A0A433Y4Q6_9BACL S-adenosylmethionine:tRN A ribosyltransferase-isomerase OS=Paenibacillus anaeric anus OX=170367 GN=queA PE=3 SV=1
MNVDLYDFHLPEELIAQTPLVERSASRLLTLNKEDGSIKHHVFTDILDYLRPGDTLVLNDTRVIPARLFGIKEDTGAKAEVLLLKDVGNDRWEALVKPGKKLKNGAVIIFGDELKATIEAESDMGGRILKFSYEGIFNEILDRLGQMPLPPYIKEKLDDRERYQTVYSKVEGSAAAPTAGLHFTEELLSQVAEKGVDIAFVTLHVGLGTFRPMSVDRVEDHVMHDEYYILSQETADKLNETRARGGRVIAVGTTSARTLETVAQQCGTGPIVPSSGWTGIFIYPGYSFGLVNVMLTNFHLPKSTLVMLVSALAGREHIMKAYHEAIEQQYRFFSFGDAMLIY

SEQ ID NO: 69682 - protein, 342 aa, Paenibacillus antarcticus
  misc_feature (1)..(342): tr|A0A168JJG9|A0A168JJG9_9BACL S-adenosylmethionine:tRN A ribosyltransferase-isomerase OS=Paenibacillus antarct icus OX=253703 GN=queA PE=3 SV=1
MDVELYNFELPDELIAQTPLLERSSSRLLTLNKEDGKTEHHTFKDITEYLKSGDTLVLNDTRVIPARLFGVKEDTGAKAEVLLLKNLGEDRWEALVKPGKKLKQGNIIVFSDELKAVIESESDMGGRVLKFTYNGVFQEILDLLGQMPLPPYIKDKLDDRERYQTVYARHEGSAAAPTAGLHFTEELLDDIRAKGVSVAFITLHVGLGTFRPMSVERVEDHVMHEEYYSLSQETADLLNDTRQAGGRIIAVGTTTCRTLETVGQQCAGGPLKESSGWTSIFMFPGYEFTVVNALITNFHLPKSTLVMLVSALAGREHILEAYKQAVNERYRFFSFGDAMFIY

SEQ ID NO: 69683 - protein, 349 aa, Paenibacillus aquistagni
  misc_feature (1)..(349): tr|A0A1X7I1X9|A0A1X7I1X9_9BACL S-adenosylmethionine:tRN A ribosyltransferase-isomerase OS=Paenibacillus aquista gni OX=1852522 GN=queA PE=3 SV=1
MDVNQFDFYLPEQLIAQTPLADRTASRLLTLDRATGKVEHHQFTDIMNYLHPGDLIVLNDTRVIPARLYGIKADTGAKVEVLLLKQEEGDVWEALVKPARKLKVGTVVTFSEELRAVVTEEQDMGGRLLRFEYEGIFQEILDRLGEMPLPPYIKEQLQDRERYQTVYAKHEGSAAAPTAGLHFTEELLLAIQDKGVQIAPITLHVGLGTFRPMSVDNVEDHVMHAEYFEISQESASLIAKTKAEGGRIIAIGTTSARTLESAAQQFGGSAIEACSGWTDIFIYPGYPFKLVDALVTNFHLPKSTLVMLVSALAGREHIMKAYEAAVQEQYRFFSFGDAMFIYDSRFNSK

SEQ ID NO: 69684 - protein, 348 aa, Paenibacillus baekrokdamisoli
  misc_feature (1)..(348): tr|A0A3G9IK50|A0A3G9IK50_9BACL S-adenosylmethionine:tRN A ribosyltransferase-isomerase OS=Paenibacillus baekrok damisoli OX=1712516 GN=queA PE=3 SV=1
MNVDDFDFELPESLIAQTPLADRTSSRLLTLDRQSGQAGHHTFTELASMLQSGDTLVLNDTRVMPARLVGAKADTGARAELLLLKQLSGDRWETLAKPGKRLKIGAEIAFGDDGTGKPLLIATVVSEGDMGGREVEFRYTGIFQELLDRLGDMPLPPYIKERLDDRERYQTVYAKHEGSAAAPTAGLHFTQAFLEQLILKGIQVAYVTLHVGLGTFRPMSVDLIEEHKMHSEYYELSEQTAEILRATRERGGRIVAVGTTSARTLETAASRFPVGQIQACTGWTDIFIYPGYEFKLVDALLTNFHLPKSTLVMLVSALAGRSAVMNAYQEAINQEYRFFSFGDAMFIY

SEQ ID NO: 69685 - protein, 342 aa, Paenibacillus barcinonensis
  misc_feature (1)..(342): tr|A0A2V4VRZ1|A0A2V4VRZ1_PAEBA S-adenosylmethionine:tRN A ribosyltransferase-isomerase OS=Paenibacillus barcino nensis OX=198119 GN=queA PE=3 SV=1
MNVDLYNFELPEELIAQTPLLDRTASRLLTLNKETGDVAHHHFPHIINVLEPGDTLILNDTRVLPARLFGVKEDTGAKAEVLLLKNVEGDKWEALVKPGKKLRDGAVIVFSDELKAVINEVGEMGARTLTFEYNGIFQEILDRLGEMPLPPYIKETLDDRERYQTVYAKHEGSAAAPTAGLHFTDELLDQIRAKGVNIGFITLHVGLGTFRPMSVDVVEDHVMHEEYYSLSQETADLINQTKENGNKVYAVGTTSCRTLETVGSKFEDGMLQESSGWTSIFIYPGYSFKVIDGMLTNFHLPKSTLVMLVSALAGRENIMHAYAEAIKERYRFFSFGDAMLIY

SEQ ID NO: 69686 - protein, 342 aa, Paenibacillus barengoltzii
  misc_feature (1)..(342): tr|R9LIR2|R9LIR2_9BACL S-adenosylmethionine:tRNA ribosy ltransferase-isomerase OS=Paenibacillus barengoltzii G2 2 OX=1235795 GN=queA PE=3 SV=1
MNVDLYDFELPEELIAQTPLADRTASRLLTLNKQTGEIRHHKFSEILDYLQPGDTLVLNDTRVIPARLFGTKEGTGAKAEVLLLKNLGEDRWEALVKPGKKLKTGAVIVFGDELRATVESEGDMGERVLRFAYEGIFNEILDRLGQMPLPPYIKEKLDDRERYQTVYSKHEGSAAAPTAGLHFTEELLEQVRAKGVTIAFVTLHVGLGTFRPMSVDRVEDHVMHEEYYVLPQETADILNETKARGGRVIAVGTTSARTLETVAKQCEGGPIVKSSGWTGIFIYPGYQFGLVDALLTNFHLPKSTLVMLVSALAGRERILKAYQEAIDLKYRFFSFGDAMFIY

SEQ ID NO: 69687 - protein, 347 aa, Paenibacillus beijingensis
  misc_feature (1)..(347): tr|A0A0D5NLD6|A0A0D5NLD6_9BACL S-adenosylmethionine:tRN A ribosyltransferase-isomerase OS=Paenibacillus beijing ensis OX=1126833 GN=queA PE=3 SV=1
MKAEDFDFELPESLIAQTPLAERTASRLLTLDKDSGEIGHHVFTDLADYVQPGDTLVLNDTRVLPARLIGTKSDTGAKVELLLLKQLEGDRWETLVKPAKRVKIGASIRFGKDESGAPLLEAAVEEEGDMGARVIRFRYEGIFQELLDKLGEMPLPPYIKERLEDRERYQTVYSKHEGSAAAPTAGLHFTKPFLQQLENKGVSIAYVTLHVGLGTFRPMSAENVEEHVMHSEYYEIDEHNAALIRQTKQRGGRIVAVGTTSARTLETAAAKFPEGLQACSGWTDIFIYPGYTFKLVDALLTNFHLPKSTLVMLVSALAGRERIMAAYKEAVERQYRFFSFGDAMFIY

SEQ ID NO: 69688 - protein, 342 aa, Paenibacillus borealis
  misc_feature (1)..(342): tr|A0A089MVH5|A0A089MVH5_9BACL S-adenosylmethionine:tRN A ribosyltransferase-isomerase OS=Paenibacillus boreali s OX=160799 GN=queA PE=3 SV=1
MNVDNYDFNLPEELIAQTPLADRSSSRLLLVNKENGQLEHGHFTDILQQFRPGDTLVLNDTRVIPARLFGVKEDTGAKAEVLLLKNLGEDRWEALVKPGKKLKTGAVIIFSEELRAVIEDEADMGGRTLRFIYQGIFQEILDRLGSMPLPPYIKETLSDRERYQTVYARHEGSAAAPTAGLHFTKELLEQIAAIGVNIAYITLHVGLGTFRPMSVETVEEHVMHAEYYELSQETADMLNAARARGGRIIAVGTTSCRTLETAGRQAAGEPLKASSGWTDIFIYPGYEFTVVNALITNFHLPKSTLVMLVSALAGREHILAAYEEAIKQQYRFFSFGDAMFIY

SEQ ID NO: 69689 - protein, 342 aa, Paenibacillus borealis
  misc_feature (1)..(342): tr|A0A1R0YN14|A0A1R0YN14_9BACL S-adenosylmethionine:tRN A ribosyltransferase-isomerase OS=Paenibacillus boreali s OX=160799 GN=queA PE=3 SV=1
MNVDDYDFHLPEELIAQTPLSDRSASRLLLVNKENGELAHRHFTDILEQFQPGDTLVLNDTRVIPARLFGIKEDTGAKAEVLLLKNLGEDRWEALVKPGKKLKTGAVIIFSDELRAVIEDEADMGGRTLRFMYEGIFQEILDRLGTMPLPPYIKETLDDRERYQTVYARHEGSAAAPTAGLHFTKELLERIAAKGVNIAYITLHVGLGTFRPMSVEKVEEHVMHAEYFELSRQTAELLNDARAKGGRIIAVGTTSCRTLETVGNKFQGGQIEECSGWTDIFIYPGYAFTVVNALITNFHLPKSTLVMLVSALAGREQILAAYEEAIAQQYRFFSFGDAMFIY

SEQ ID NO: 69690 - protein, 342 aa, Paenibacillus bovis
  misc_feature (1)..(342): tr|A0A172ZK70|A0A172ZK70_9BACL S-adenosylmethionine:tRN A ribosyltransferase-isomerase OS=Paenibacillus bovis O X=1616788 GN=queA PE=3 SV=1
MKVDMYDFNLPEHLIAQVPLKERTASRLLTLNKTTGEIQHEHFADIINYFHEGDTLILNDTRVIPARLFGTKKDTGAKAEILLLTQLEGDRWEALVKPGKKIKAGAVIHFSDELEAVIEEEGDMGMRVLSFRYEGIFQEILDRLGEMPLPPYIKETLDDRERYQTVYAKNEGSAAAPTAGLHFTTELLDQIRAKGVQIGFVTLHVGLGTFRPMSAETIEEHVMHEEYYSLPAETAALLNETKARGGRVIAVGTTSARTLETVARDFQDRPLEAASGWTQIFIYPGHTFGLVDAMITNFHLPKSTLVMLVSALAGREHIMAAYHEAIEREYRFFSFGDAMFIY

SEQ ID NO: 69691 - protein, 348 aa, Paenibacillus catalpae
  misc_feature (1)..(348): tr|A0A1I1YZV2|A0A1I1YZV2_9BACL S-adenosylmethionine:tRN A ribosyltransferase-isomerase OS=Paenibacillus catalpa e OX=1045775 GN=queA PE=3 SV=1
MNVDLFDFELPEHLIAQTPLADRTASRLLALNKETGDIAHRTFTDLADYLQTGDVLVLNNTRVIPARLTGIKPDTGAKIELLLLKQLEGDRWEALAKPAKRMKVGAELWFGDNGSGEPLLRAVVEDEGDMGSRTIRFHYEGIFQELLDRLGEMPLPPYIKERLEERERYQTVYAKHEGSAAAPTAGLHFTKEFLQQLVDKGVKLAYVTLHVGLGTFRPMSVDKVEEHEMHSEYYELDEQNASIINEAKSSGARIIAVGTTSSRTLETVAARFEGGPIEACSGWTDIFIFPGYSFKLVDALLTNFHLPKSTLVMLVSALAGREAIMKAYGEAVREEYRFFSFGDAMFIY

SEQ ID NO: 69692 - protein, 348 aa, Paenibacillus cellulosilyticus
  misc_feature (1)..(348): tr|A0A2V2YGN4|A0A2V2YGN4_9BACL S-adenosylmethionine:tRN A ribosyltransferase-isomerase OS=Paenibacillus cellulo silyticus OX=375489 GN=queA PE=3 SV=1
MNVDLFDFELPEELIAQTPLLERTGSRLLTLNKQTGAVGHGTFLDIEQMLGEGDLLILNDTRVLPARLMGIKQDTGAKVELLLLKALGDNRWETLAKPAKRMKVGTVLAFGSVADGSPLLTAVVEEEGEHGGRVVRFEYEGIFNELLDRLGEMPLPPYIKEKLEDRERYQTVYAKHEGSAAAPTAGLHFTQDLLERLKDKGVRIGYITLHVGLGTFRPMSVDAVEDHVMHSEYYELSEETAQQLNETKARGGRIVAVGTTSARTLESVAQRFEGKELQACSGWTDIFIFPGYSFKLVDALLTNFHLPKSTLVMLVSAIAGREHIMEAYRQAVEQRYRFFSFGDAMFIY

SEQ ID NO: 69693 - protein, 373 aa, Paenibacillus chitinolyticus
  misc_feature (1)..(373): tr|A0A410X1Y4|A0A410X1Y4_9BACL S-adenosylmethionine:tRN A ribosyltransferase-isomerase OS=Paenibacillus chitino lyticus OX=79263 GN=queA PE=3 SV=1
MDVQDFDYDLPEELIAQTPLLERTQSRLMTLDKQSGAVGHHTFEQLADYLKAGDLLVMNDTRVIPARLFGVKADTGAKVELLLLKPLGEDRWEALARPGKRIKTGTELLFGVQPETAADGTPVVPKQAPLSAVVEAEGEMGARTVRFRYEGIFNEILDKLGEMPLPPYIKEQLPEKERYQTVYARHAGSAAAPTAGLHFTGDFLDKLKSRGVRLAFVTLHVGLGTFRPVSADKVEEHEMHAEYYELPQETADLINETTAAGGRIVAVGTTSTRTLETAARQSRAASEAQGGSVHTDSGKPYIRACSGWTSIFIYPGVEFQLVDAMLTNFHLPKSTLLMLISAMAGRESILNAYREAVERKYRFFSFGDAMFIY

SEQ ID NO: 69694 - protein, 373 aa, Paenibacillus contaminans
  misc_feature (1)..(373): tr|A0A329MPU6|A0A329MPU6_9BACL S-adenosylmethionine:tRN A ribosyltransferase-isomerase OS=Paenibacillus contami nans OX=450362 GN=queA PE=3 SV=1
MDVELFDFELPERLIAQTPLADRLQSRLLTLDKSTGAIGHRQFSDLIQYLQAGDVLVLNDTRVIPARLFGVKSDTGSKAEILLLKALGDDRWEALVKPGKRLKKGATVSFGIRGNETIGGAGASSSASEASVNEEPLLKAFIEEEGEMGIRVLRFTYKGIFNEILDRLGQMPLPPYIKEQLPADEKERYQTVYARNEGSAAAPTAGLHFTEPYLREIAAKGVEIAYVTLHVGLGTFRPVAVERVEEHTMHEEYFHVPQETADAVNRAKSAGRRVIAIGTTSARTLETAARISEADGLRPGTLKPCDGWTGIFIYPGVKLLAVDALLTNFHLPKSTLLMLISAIAGRESVLKAYREAVEQEYRFFSFGDAMFIY

SEQ ID NO: 69695 - protein, 342 aa, Paenibacillus crassostreae
  misc_feature (1)..(342): tr|A0A167CH55|A0A167CH55_9BACL S-adenosylmethionine:tRN A ribosyltransferase-isomerase OS=Paenibacillus crassos treae OX=1763538 GN=queA PE=3 SV=1
MDVELYNFDLPEELIAQTPLLDRSSSRLLTLSKEKGTIEHHSFKEITGYLKSGDTLVLNDTRVIPARLFGVKEETGAKAEILLLKNLGQDRWEVLVKPGKKLKQGNVITFSDELKAVIESEGEMGARVLAFSYQGIFHEILDRLGQMPLPPYIKDKLEDRERYQTVYARHEGSAAAPTAGLHFTDELLEEIRAKGVSVAFITLHVGLGTFRPMSVEKVEDHVMHEEYYSLSQETADLLNKTHQNGGRIIAVGTTSARTLETVGQKCAGGPLKESSGWTSIFMYPGYQFKVVDALITNFHLPKSTLVMLVSALAGREHILEAYQEAVKEKYRFFSFGDAMFIY

SEQ ID NO: 69696 - protein, 348 aa, Paenibacillus curdlanolyticus
  misc_feature (1)..(348): tr|E0IDX4|E0IDX4_9BACL S-adenosylmethionine:tRNA ribosy ltransferase-isomerase OS=Paenibacillus curdlanolyticus YK9 OX=717606 GN=queA PE=3 SV=1
MNVDLFDFELPEELIAQTPLVERTGSRLLTLNKRTGETQHGTFLDIEQYVQPGDLLVLNDTRVIPARLFGIKRDTGAKVELLLLKAIGDNRWEALAKPAKRLRIGTELAFGMDEAGEPLLRAVIEEEGEHGSRIVRFEYEGIFQELLDRLGEMPLPPYIKEKLDDRERYQTVYARHEGSAAAPTAGLHFTTELLEQLQRKGVGIAYVTLHVGLGTFRPMSVDTVEEHVMHSEYFELSETTAQQIVETKSRGGRIIAVGTTSARTLESAASMFTDGQVQACSGWTDIFIFPGYSFKLVDALLTNFHLPKSTLVMLVSALAGRDAIMQAYREAVALQYRFFSFGDAMLIY

SEQ ID NO: 69697 - protein, 348 aa, Paenibacillus darwinianus
  misc_feature (1)..(348): tr|A0A015LWS9|A0A015LWS9_9BACL S-adenosylmethionine:tRN A ribosyltransferase-isomerase OS=Paenibacillus darwini anus OX=1380763 GN=queA PE=3 SV=1
MNVNDFDFELPEELIAQTPLAERTASRLLALDKRSGEVAHRTFTDLKQYLRPGDTLVLNDTRVLPARLHGIKPDTGARIELLLLKQLEGDRWETLAKPAKRLRPGVELWFGDDGQGGPLLRATVESEGETGGRVVVFRYEGIFHELLDRLGEMPLPPYIRETLADRERYQTVYARHEGSAAAPTAGLHFTAAFLEELRTQGVNTAFITLHVGLGTFRPMSAERVEDHVMHAEYYQLDEANAALIRETRERGGRIVAVGTTSARTLETVAGRFGAGGVRACSGWTDIFIYPGYRFGLVDALLTNFHLPKSTLVMLVSALAGRATTLRAYAEAVERQYRFFSFGDAMFIY

SEQ ID NO: 69698 - protein, 345 aa, Paenibacillus dendritiformis
  misc_feature (1)..(345): tr|A0A4R5Z077|A0A4R5Z077_9BACL S-adenosylmethionine:tRN A ribosyltransferase-isomerase OS=Paenibacillus dendrit iformis OX=130049 GN=queA PE=3 SV=1
MDVNLFDFHLPEHLIAQTPLLDRTASRLLALNRRTGEVEHRTFPDIIEYLKPGDLLVLNDTRVIPARLYGVKPDTGGHVEVLLLKQEQDDMWEVLVKPAKRLKQGASVRFGDELTGTVIEEREMGARLIRFEYAGIFNEILDRLGQMPLPPYIKEQLNDRERYQTVYAKHEGSAAAPTAGLHFTNSILDQIRAAGVRIAMITLHVGLGTFRPMSADVVEEHVMHAEYYEMSEEAAALINETRSSGGRIIAVGTTSCRTLETVAGRYGAEPVAACSGWTDIFIYPGYEFRLVDSLLTNFHLPKSTLVMLVSAFAGREHIMAAYREAIEQEYRFFSFGDAMFIFTDD

SEQ ID NO: 69699 - protein, 345 aa, Paenibacillus dendritiformis
  misc_feature (1)..(345): tr|H3SNZ6|H3SNZ6_9BACL S-adenosylmethionine:tRNA ribosy ltransferase-isomerase OS=Paenibacillus dendritiformis C454 OX=1131935 GN=queA PE=3 SV=1
MDVNLFDFHLPEHLIAQTPLADRTASRLLALNRRTGEVEHRTFPDIIEYLKPGDLLVLNDTRVIPARLHGVKPDTGGHVEVLLLKQEQDDMWEVLVKPAKRLKQGASVRFGDELTGTVIEEREMGARLIRFEYAGIFNEILDRLGQMPLPPYIKEQLNDRERYQTVYAKHEGSAAAPTAGLHFTNSILEQIRAKGVRIAMITLHVGLGTFRPMSADVVEEHVMHAEYYEMSEEAAALINETRGSGGRIIAVGTTSCRTLETVAGRYGADPVAACSGWTDIFIYPGYEFRLVDSLLTNFHLPKSTLVMLVSAFAGREHIMAAYREAIEQEYRFFSFGDAMFIFKDD

SEQ ID NO: 69700 - protein, 342 aa, Paenibacillus donghaensis
  misc_feature (1)..(342): tr|A0A2Z2KST2|A0A2Z2KST2_9BACL S-adenosylmethionine:tRN A ribosyltransferase-isomerase OS=Paenibacillus donghae nsis OX=414771 GN=queA PE=3 SV=1
MDVELYDFHLPEELIAQTPLSDRSSSKLLLVNKETGQTDHRHFSDIVDYLQPGDTLVLNDTRVIPARLFGTKEDTGAKAEVLLLKNLGEDRWEALVKPGKKLKTGAVIIFGDELRAVVEGESDMGGRTLKFSYEGIFNEILDRLGNMPLPPYIKEALDDRERYQTVYARHEGSAAAPTAGLHFTEELLGQLQDKGVNIAYITLHVGLGTFRPMSVDKVEEHVMHSEYFMLSRETAELLNAAKARGSRIVAVGTTSCRTLETVGRQYAGGPLQECSGWTDIFIYPGYRFNVVDALITNFHLPKSTLVMLVSALAGREAILAAYAEAIEEQYRFFSFGDAMFIY

SEQ ID NO: 69701 - protein, 342 aa, Paenibacillus durus
  misc_feature (1)..(342): tr|A0A089HTI5|A0A089HTI5_PAEDU S-adenosylmethionine:tRN A ribosyltransferase-isomerase OS=Paenibacillus durus O X=44251 GN=queA PE=3 SV=1
MNVDLYNFHLPEELIAQTPLPDRSASRLLTLDKRSGRTVHRHFTDIIDELQPGDTLVLNDTRVIPARLFGIKEDTGAKAEVLLLKSLGEDRWDALVKPGKKLKTGAVISFGEELRAVIEEESDMGGRTLRFMYQGIFQEILDRLGTMPLPPYIKEKLDDRERYQTVYARHEGSAAAPTAGLHFTEDLLKQIQDKGVHIAYITLHVGLGTFRPMSVDTVEEHVMHSEYFMLPQETADMLNEARVKGSRIVAVGTTSCRTLETVGGMFGDGPLEACSGWTDIFIYPGYEFKLVNALITNFHLPKSTLVMLVSALAGREHILAAYQEAIQQKYRFFSFGDAMFIY

SEQ ID NO: 69702 - protein, 342 aa, Paenibacillus durus
  misc_feature (1)..(342): tr|A0A0F7FB58|A0A0F7FB58_PAEDU S-adenosylmethionine:tRN A ribosyltransferase-isomerase OS=Paenibacillus durus A TCC 35681 OX=1333534 GN=queA PE=3 SV=1
MNVDLYDFHLPEELIAQTPLPDRSASRLLTLDKRSGRTEHRHFTDIIDELQPGDTLVLNDTRVIPARLFGIKEDTGAKAEVLLLKNLSEDRWDALVKPGKKLKTGAVISFGEELRAVIEEESDMGGRTLRFMYQGIFQEILDRLGTMPLPPYIKEKLDDRERYQTVYARHEGSAAAPTAGLHFTEDLLKHIQDKGVRLAYITLHVGLGTFRPMSVDTVEEHVMHSEYFMLPQETADLLNEAKSKGSRIVAVGTTSCRTLETAGGMFGDGPLEACSGWTDIFIYPGYEFKLVNALITNFHLPKSTLVMLVSALAGREHILAAYQEAIRQKYRFFSFGDAMFIY

SEQ ID NO: 69703 - protein, 353 aa, Paenibacillus elgii
  misc_feature (1)..(353): tr|A0A2T6FZT5|A0A2T6FZT5_9BACL S-adenosylmethionine:tRN A ribosyltransferase-isomerase OS=Paenibacillus elgii O X=189691 GN=queA PE=3 SV=1
MQVDLFDYHLPESLIAQTPLPDRTASRLLTLDKQTGEIGHHTFEQLERYLEAGDVLVLNDTRVIPARLFGVKADTGAKAEVLLLKQLEGDRWEALVRPAKRLKTGTVLHFGGGAPTEAGGATEPPLLVATVESEGEMGSRVLRFSYEGIFNELLDRLGHMPLPPYIKEQLPERERYQTVYAKHEGSAAAPTAGLHFTQEYLNRLEQKGIQLAYVTLHVGLGTFRPVGVESVEQHEMHEEYYEVSAETAELVNAAKRKGGRVVAVGTTSARTLETAAGEDGMLQAGSGWTGIFIYPGYRFRIVDALLTNFHLPKSTLLMLISALAGRENVLAAYREAVEREYRFFSFGDAMFIH

SEQ ID NO: 69704 - protein, 353 aa, Paenibacillus elgii
  misc_feature (1)..(353): tr|A0A163ZG56|A0A163ZG56_9BACL S-adenosylmethionine:tRN A ribosyltransferase-isomerase OS=Paenibacillus elgii O X=189691 GN=queA PE=3 SV=1
MQVDLFDYHLPESLIAQTPLPDRTASRLLTLDKQTGEIGHHTFEQLEQYLEAGDVLVLNDTRVIPARLFGVKADTGAKAEVLLLKQLEGDRWEALVRPAKRLKTGTVLHFGGGAPTEAGGDTEPPLLVATVESEGEMGSRVLRFSYEGIFNELLDRLGHMPLPPYIKEQLPERERYQTVYAKHEGSAAAPTAGLHFTQEYLNWLEQKGIQLAYVTLHVGLGTFRPVGVESVEQHEMHEEYYEVSAETAELVNAAKRKGGRVVAVGTTSARTLETAAGEDGMLQAGSGWTGIFIYPGYRFRIVDALLTNFHLPKSTLLMLISALAGRENVLAAYREAVEREYRFFSFGDAMFIH

SEQ ID NO: 69705 - protein, 342 aa, Paenibacillus etheri
  misc_feature (1)..(342): tr|A0A0W1B3U8|A0A0W1B3U8_9BACL S-adenosylmethionine:tRN A ribosyltransferase-isomerase OS=Paenibacillus etheri OX=1306852 GN=queA PE=3 SV=1
MNVDAYDFHLPEELIAQAPLSDRSSSRLLLVNKEDGELAHRHFTDIINYFRPGDTLVLNDTRVIPARLFGVKEDTGAKAEVLLLKNLGEDRWEALVKPGKKLKTGAVIIFSDELRAVIEDEADMGGRTLRFIYQGIFQEILDRLGTMPLPPYIKETLDDRERYQTVYAKHEGSAAAPTAGLHFTKELLEQIEAKGVNIAYITLHVGLGTFRPMSVEKVEEHVMHSEFFVMSQETADTINATKEQGGRIIAVGTTSCRTLETVGRQCDGGPLVECSGWTDIFIYPGYKFSVVNALITNFHLPKSTLVMLVSALAGREHILAAYEEAIEQKYRFFSFGDAMFIY

SEQ ID NO: 69706 - protein, 343 aa, Paenibacillus faecis
  misc_feature (1)..(343): tr|A0A5D0CS41|A0A5D0CS41_9BACL S-adenosylmethionine:tRN A ribosyltransferase-isomerase OS=Paenibacillus faecis OX=862114 GN=queA PE=3 SV=1
MNVDLYDFELLEELIAQTPLAERTASRLLALNKRDGSIRHHSAFSEILEYLQPGDTLVLNDTRVIPARLFGVKEDTGAKAEVLLLKNLGEDRWEALVKPGKKLRTGAVIRFGEELQATIEQEGEMGGRVLRFSYQGIFNEILDRLGQMPLPPYIKEKLDDRERYQTVYSKHEGSAAAPTAGLHFTEELLDEIRNKGVDIAFVTLHVGLGTFRPMSVDRVEEHVMHEEYYVLPQETADLLNATKARGGRIIAVGTTSARTLETVAQKCGGGPVVESSGWTGIFIYPGYSFGLVDALITNFHLPKSTLVMLVSALAGRETILRAYREAVEHRYRFFSFGDAMFIY

SEQ ID NO: 69707 - protein, 361 aa, Paenibacillus ferrarius
  misc_feature (1)..(361): tr|A0A1V4HAY1|A0A1V4HAY1_9BACL S-adenosylmethionine:tRN A ribosyltransferase-isomerase OS=Paenibacillus ferrari us OX=1469647 GN=queA PE=3 SV=1
MDVQSFDFELPENLIAQTPLLNRTASRLLALNKQTGETTHQTFEQLIDYIEAGDLLVMNDTRVIPARLFGAKKDTGAKVELLLLKPLGDDRWEALVKPGKRMKLGAVAVFGLNMDSANPEEPLLTAEVVEEGEMGARVLQFSYTGIFNEILDRLGEMPLPPYIKEQLSERERYQTVYAKHEGSSAAPTAGLHFTEAYLDKLQAKGVRIAFVTLHVGLGTFRPVSVDTIEEHQMHSEYYVLSPETAALINETKANGRRVIAVGTTSARTLETAAGLSREQAGSAGTEPLHIEASQGWTSIFIYPGYQFGVVDALLTNFHLPKSTLLMLISALAGQSHVLKAYEEAVREQYRFFSFGDAMFIY

SEQ ID NO: 69708 - protein, 355 aa, Paenibacillus ginsengarvi
  misc_feature (1)..(355): tr|A0A3B0CII6|A0A3B0CII6_9BACL S-adenosylmethionine:tRN A ribosyltransferase-isomerase OS=Paenibacillus ginseng arvi OX=400777 GN=D7M11_08785 PE=3 SV=1
MEAASYTFELPVDRNAGAPPERRGVRRDRVRLLVQSRAGGELRHSSFHRLADHLRPGDCLVLNESRTIPASLKARRFAGDTYIDTVEVRLAKQISDGVWEALLLETEAANSSLLSLPSPAKLYAGETLRFASTLTATVERRAGSAFATLHFNMAGPDLFGAFYELGEPIRYEYTERPWQLDYYQTVYGTVPGSVEMPSAGRAFSWELLFGLRLRGVRIAYVQLHTGLSYLYGFRLDPAQNAESYAVSLEAAEAINRSKSDGGRIIAVGTTVVRCLEAAAGPDGVQAGAGQTSLYINESYPLRVTDGLISGFHEPEASHLHMLSAFIGLEELGRAYDEAIRAGYLWHEFGDVHLML

SEQ ID NO: 69709 - protein, 349 aa, Paenibacillus ginsengarvi
  misc_feature (1)..(349): tr|A0A3B0CCI1|A0A3B0CCI1_9BACL S-adenosylmethionine:tRN A ribosyltransferase-isomerase OS=Paenibacillus ginseng arvi OX=400777 GN=queA PE=3 SV=1
MDVNEFDFDLPERLIAQTPLLNRTTSRLLTLDKTSGATGHHTFGQLIDFLQAGDTLVLNDTRVIPARLFGVKADTGAQVELLLLKQLDGDRWEALARPAKRLKQGAVIRFGGAEADGGPDLQAVVEDEGEMGARVVRFEYEGIFQEILDRLGSMPLPPYIKEKLDDRERYQTVYARHPGSAAAPTAGLHFTPDYLDAIARKGVRIVTLTLHVGLGTFRPVAVSRVEEHTMHEEFYSVPAETAAALNAAKAEGRRIIAVGTTSARTLETVAGRFEVREIEACDGWSGIFIYPGYTFKLVDAMVTNFHLPKSTLVMLVSALAGSEQIRNAYQEAIKREYRFFSFGDAMFIY

SEQ ID NO: 69710 - protein, 342 aa, Paenibacillus glacialis
  misc_feature (1)..(342): tr|A0A168DGV6|A0A168DGV6_9BACL S-adenosylmethionine:tRN A ribosyltransferase-isomerase OS=Paenibacillus glacial is OX=494026 GN=queA PE=3 SV=1
MDVELYNFDLPEELIAQTPLLERSSSRLLTLNKEDGKTEHHTFKDITQYLKSGDTLVLNDTRVIPARLFGVKEDTGAKAEVLLLKNLGEDRWEALVKPGKKLKQGNIIVFSDELKAVIESESDMGGRVLKFTYNGVFQEILDRLGQMPLPPYIKDKLDDRERYQTVYARHEGSAAAPTAGLHFTEELLDAIRAKGVSVAFITLHVGLGTFRPMSVDRVEDHVMHEEYYSLSKETADLLNDTRRNGGRIIAVGTTTCRTLETVGRQCAGGSLKESNGWTSIFMFPGYEFTVVDALITNFHLPKSTLVMLVSALAGREHILEAYKQAVKEKYRFFSFGDAMFIY

SEQ ID NO: 69711 - protein, 343 aa, Paenibacillus glucanolyticus
  misc_feature (1)..(343): tr|A0A163KT45|A0A163KT45_9BACL S-adenosylmethionine:tRN A ribosyltransferase-isomerase OS=Paenibacillus glucano lyticus OX=59843 GN=queA PE=3 SV=1
MNVDLYDFELPEQLIAQTPLLDRSSSRLLTLNKESGQINHQTFADIIDSLNAGDTLVLNDTKVIPARLFGEKEDTGAKAEVLLLKSMGQDRWEALVKPGKKLKKGNVISFGDGKLKAVIEEEGEMGARTLSFSYKGIFQEILDELGQMPLPPYIKEKLDDRDRYQTVYAKHEGSAAAPTAGLHFTEALLEQIRAKGVDIAFITLHVGLGTFRPMSVDVVEDHVMHEEYYSLSQETADLLNETKRRGGRVIAVGTTSCRTLETVGSQMNGEPLRESSGWTSIFIYPGYSFTVVDALITNFHLPKSTLVMLVSALAGREHIMKAYKEAVEDKYRFFSFGDAMFIY

SEQ ID NO: 69712 - protein, 342 aa, Paenibacillus graminis
  misc_feature (1)..(342): tr|A0A089MBE2|A0A089MBE2_9BACL S-adenosylmethionine:tRN A ribosyltransferase-isomerase OS=Paenibacillus gramini s OX=189425 GN=queA PE=3 SV=1
MNVDDYDFHLPEELIAQTPLSDRSASRLLLVNKENGQLEHRHFTDILEQFQPGDTLVLNDTRVIPARLFGVKEDTGAKAEVLLLKNLGEDRWEALVKPGKKLKTGAVIIFSEELRAIIEDEADMGGRTLRFIYTGIFQEILDRLGSMPLPPYIKETLDDRERYQTVYAKHEGSAAAPTAGLHFTRELLEQIKAKGVTIAYITLHVGLGTFRPMSVEKVEEHVMHAEYFVLSQETADVLNAARARGGRIIAVGTTSCRTLETVGRQAEGGPIQECSGWTDIFIYPGYKFTVVNALITNFHLPKSTLVMLVSALAGRENILAAYEAAIQQQYRFFSFGDAMFIY

SEQ ID NO: 69713 - protein, 352 aa, Paenibacillus hemerocallicola
  misc_feature (1)..(352): tr|A0A5C4TEW4|A0A5C4TEW4_9BACL S-adenosylmethionine:tRN A ribosyltransferase-isomerase OS=Paenibacillus hemeroc allicola OX=1172614 GN=queA PE=3 SV=1
MDVNAFDFELPESLIAQTPLTDRTSSRLLTLDKSSGAIGHHTFGQLIDYLQAGDTLVLNDTRVIPARLFGVKADTGAQAELLLLKELGDDRWETLARPAKRLKKGTVIRFGGSGPQDSASDTLLEAVVEEEGEMGARIVRFRYSGIFREILDRLGSMPLPPYIKERLEDRERYQTVYARHPGSAAAPTAGLHFTPEYLETIARIGVNIVTVTLHVGLGTFRPVSVDRIEEHKMHEEFYSVPAETAAALNAAKAEGRRVVAVGTTSARTLETVAGRFGDKPIEACDGWSAIFMYPGYRFKIVDAMLTNFHLPKSTLVMLVSALAGTDRIRRAYQEAIEREYRFFSFGDAMFIY

SEQ ID NO: 69714 - protein, 353 aa, Paenibacillus hemerocallicola
  misc_feature (1)..(353): tr|A0A5C4TD84|A0A5C4TD84_9BACL S-adenosylmethionine:tRN A ribosyltransferase-isomerase OS=Paenibacillus hemeroc allicola OX=1172614 GN=FE784_07410 PE=3 SV=1
METVSTFAFELPDNRNAGSPPERRGLRRDRVRLMVQNRSDGTVSHSSFHRLADYLRPEDCLVFNESRTIPASLKAQRFIGNAGIESLEVRLARRVGESAWDALLLRTNGETGAASAVEPTDGETLRFSPSLHAETARRSSSPFVTLSFNRGGHELFGEFYALGEPVRYEYAEKPWELDYYQTVYGTVPGSVEMPSAGRAFTWEMLFGLRLKNIRLAFVQLHTGLSYLYGSRLDPAHNAESYAVSPEAADTINRAKRNGGRIIAVGTTVVRCLESAAAGNGLVRPGEDDTRLYIDESFPLRVADGLISGLHEPEASHLHMLSAFAGIGALRLAYAEAIRENYLWHEFGDTHLIL

SEQ ID NO: 69715 - protein, 347 aa, Paenibacillus herberti
  misc_feature (1)..(347): tr|A0A229NZR0|A0A229NZR0_9BACL S-adenosylmethionine:tRN A ribosyltransferase-isomerase OS=Paenibacillus herbert i OX=1619309 GN=queA PE=3 SV=1
MNVEQYDFNLPDKLIAQTPLADRTASRLLTLDKATGEIRDHAFRDLKQYLQAGDTLVVNDTRVIPARLLGLKEDTGAKAELLLLKQLHGDTWETLAKPAKKLKVGAVIVFGSGEDGEPLLRAVVEDEGEMGGRTIRFQYDGIFQELLDRLGEMPLPPYIKERLDDRERYQTVYSRQSGSAAAPTAGLHFTEEFLQELQEMGVEVAPLTLHVGLGTFRPISADTIEEHVMHSEYYELSEATAAKLQQTRERGGRIVAVGTTSARTLETVANRFPDGLQACSGWTDIFIYPGYQFRAVDALLTNFHLPKSTLVMLVSALAGRDAVLNAYKHAVREEYRFFSFGDAMFIY

SEQ ID NO: 69716 - protein, 343 aa, Paenibacillus ihbetae
  misc_feature (1)..(343): tr|A0A1B2DXE3|A0A1B2DXE3_9BACL S-adenosylmethionine:tRN A ribosyltransferase-isomerase OS=Paenibacillus ihbetae OX=1870820 GN=queA PE=3 SV=1
MNVDLYDFELPERLIAQTPLKERSASRLLALNKEDGGMSHGTFADIVGFLNPGDTLVLNDTKVIPARLFGEKEGTGAKAEVLLLKNLGEDRWEALVKPGKKLRQGSTISFGNGKLKAVIEEEGDMGARTLRFTYKGIFQEILDELGQMPLPPYIKEKLDDRDRYQTVYARNEGSAAAPTAGLHFTEALLDEIKAKGVNIAFITLHVGLGTFRPMSVERVEDHVMHEEYYSLSKETAELLNETKRRGGRVIAVGTTSCRTLETVGQAHKGGPLSESSGWTSIFIYPGYSFTVVDALITNFHLPKSTLVMLVSALAGREHILEAYREAVRQEYRFFSFGDAMFIY

SEQ ID NO: 69717 - protein, 342 aa, Paenibacillus illinoisensis
  misc_feature (1)..(342): tr|A0A2W0C1D5|A0A2W0C1D5_9BACL S-adenosylmethionine:tRN A ribosyltransferase-isomerase OS=Paenibacillus illinoi sensis OX=59845 GN=queA PE=3 SV=1
MNVNLYDFELPEQLIAQTPLVDRTASRLLTLNKENGEVNHRSFPDIINFLEPGDTLVLNDTRVLPARLFGTKEDTGAKAEVLLLKNVEGDRWEALVKPGKRLKAGSVIVFGDELKAVIDEEGEMGARTLTFSYNGIFQEILDRLGEMPLPPYIKETLDDRERYQTVYAKHEGSAAAPTAGLHFTDELLDQIRAKGVNVTFITLHVGLGTFRPMSVDVVEDHEMHEEYYSMSQETADLINETKKRGNRVFAVGTTSCRTLETVGSKFEDGELQESSGWTKIFIYPGYTFKVIDGMLTNFHLPKSTLVMLVSALAGREHIMHAYEQAIQEKYRFFSFGDAMLIY

SEQ ID NO: 69718 - protein, 342 aa, Paenibacillus jilunlii
  misc_feature (1)..(342): tr|A0A1G9V4V9|A0A1G9V4V9_9BACL S-adenosylmethionine:tRN A ribosyltransferase-isomerase OS=Paenibacillus jilunli i OX=682956 GN=queA PE=3 SV=1
MNVDDYDFHLPEELIAQTPLSDRSASRLLLVNKENGQLEHRHFTDILEQFQPGDTLVLNDTRVIPARLFGVKEDTGAKAEVLLLKSLGEDRWEALVKPGKKLKTGAVIIFSEELRAVIEDEADMGGRTLRFIYTGIFQEILDRLGSMPLPPYIKETLDDRERYQTVYAKHEGSAAAPTAGLHFTRELLEQIKAKGVTIAYITLHVGLGTFRPMSVEKVEEHVMHAEYYVLSRETADVLNAARARGGRIIAVGTTSCRTLETVGRQAEGGPIQECSGWTDIFIYPGYEFTVVNALITNFHLPKSTLVMLVSALAGRENILAAYEAAIQQHYRFFSFGDAMFIY

SEQ ID NO: 69719 - protein, 342 aa, Paenibacillus kribbensis
  misc_feature (1)..(342): tr|A0A222WKG6|A0A222WKG6_9BACL S-adenosylmethionine:tRN A ribosyltransferase-isomerase OS=Paenibacillus kribben sis OX=172713 GN=queA PE=3 SV=1
MNVNDYDFELPEALIAQTPLLERSASRLLTLNKNNGEVEHHTFSDIVQYLSPGDTLVLNDTRVIPARLFGIKEDTGAKAEVLLLKQLEGDRWEALVKPGKKLKKGAVIVFGDELKAVIEEEGDMGGRVLSFSYEGIFQEILDRLGQMPLPPYIKEQLDDRERYQTVYARHEGSAAAPTAGLHFTEQLLDQIREKGVSIAFVTLHVGLGTFRPMSVDTIEEHVMHEEYYSLSQETADILNATKARGGRVVAVGTTSCRTLETVGNTFADGVLQASSGWTQIFIYPGYEFRVVDAMITNFHLPKSTLVMLVSALAGRENIMHAYQEAIDREYRFFSFGDAMFIY

SEQ ID NO: 69720 - protein, 343 aa, Paenibacillus lactis
  misc_feature (1)..(343): tr|G4HPV6|G4HPV6_9BACL S-adenosylmethionine:tRNA ribosy ltransferase-isomerase OS=Paenibacillus lactis 154 OX=7 43719 GN=queA PE=3 SV=1
MNVDLYDFELPERLIAQTPLKERSASRLLALNKEDGAMSHGTFADIVGFLNPGDTLVLNDTKVIPARLFGEKEETGAKAEVLLLKNLGEDRWEALVKPGKKLRRGSTISFGNGKLKAVIEEEGEMGARTLRFTYKGIFQEILDELGQMPLPPYIKEKLDDRDRYQTVYARNEGSAAAPTAGLHFTEALLDEIKAKGVNIAFITLHVGLGTFRPMSVERVEDHVMHEEYYSLSKETAELLNETKRRGGRVIAVGTTSCRTLETVGQAHKGGPLSESSGWTSIFIYPGYSFTVVDALITNFHLPKSTLVMLVSALAGREHILEAYREAVRQEYRFFSFGDAMFIY

SEQ ID NO: 69721 - protein, 364 aa, Paenibacillus larvae
  misc_feature (1)..(364): tr|V9W8U3|V9W8U3_9BACL S-adenosylmethionine:tRNA ribosy ltransferase-isomerase OS=Paenibacillus larvae subsp. l arvae DSM 25430 OX=697284 GN=queA PE=3 SV=1
MDVESFDFELPEELIAQTPLSDRTQSRLMTLNKETGEIGHHTFKDLADYLKAGDLLVLNDTRVIPARLFGLKKDTGAKVELLLLKDLGDNRWEALVRPGKKIKTGAELVFGTQAEADEPVLSAIVEEEGEMGARIVRFSYRGIFNEILDRLGEMPLPPYIKEQLNDRERYQTVFAKHAGSAAAPTAGLHFTEEFLEGLRGQGVRIAFITLHVGLGTFRPVSVDRVEDHNIHAEYYILSEETARLVNETRAQGGRVIAVGTTSARTLETAAGLSHSQGYIDGEGRTLLHACSGWTSIFIYPGYEFRAVDGLLTNFHLPKSTLLMLVSALASRKYILHAYAEAVKNRYRFFSFGDAMFIYSNQSRK

SEQ ID NO: 69722 - protein, 364 aa, Paenibacillus larvae
  misc_feature (1)..(364): tr|A0A1U9YJ90|A0A1U9YJ90_9BACL S-adenosylmethionine:tRN A ribosyltransferase-isomerase OS=Paenibacillus larvae subsp. pulvifaciens OX=1477 GN=queA PE=3 SV=1
MDVESFDFELPEELIAQTPLSDRTQSRLMTLNKETGEIGHHTFKDLADYLKAGDLLVLNDTRVIPARLFGLKKDTGAKVELLLLKDLGDNRWEALVRPGKKIKTGAELVFGTQAEADEPVLSAIVEEEGEMGARIVRFSYRGIFNEILDRLGEMPLPPYIKEQLNDRERYQTVFAKHAGSAAAPTAGLHFTEEFLEGLRGQGVRIAFITLHVGLGTFRPVSVDRVEDHNIHAEYYILSEETARLVNETRAQGGRVIAVGTTSARTLETAAGLSHSQGYIDGEGRTLLHACSGWTSIFIYPGYEFRAVDGLLTNFHLPKSTLLMLVSALASRKYILHAYAEAVKNRYRFFSFGDAMFIYSSQSRK

SEQ ID NO: 69723 - protein, 343 aa, Paenibacillus lautus
  misc_feature (1)..(343): tr|A0A385TRN9|A0A385TRN9_PAELA S-adenosylmethionine:tRN A ribosyltransferase-isomerase OS=Paenibacillus lautus OX=1401 GN=queA PE=3 SV=1
MNVDLYDFELPEHLIAQTPLLDRSSSRLLTLNKESGQISHRTFADIIDSLNPGDTLVLNDTKVIPARLFGEKEDTGAKAEVLLLKNMGEDRWEALVKPGKKLKKGNVISFGDGKLKAVIEEEGEMGARILSFSYKGIFQEILDELGQMPLPPYIKEKLDDRDRYQTVYAKHEGSAAAPTAGLHFTEALLEQIRAKGVDIAFITLHVGLGTFRPMSVDQVEDHVMHEEYYSLSQETADLLNETKRRGGRVIAVGTTSCRTLETVGSQLKGEPLRESSGWTSIFIYPGYSFTVVDALITNFHLPKSTLVMLVSALAGREHIMNAYKEAVDKEYRFFSFGDAMFIY

SEQ ID NO: 69724 - protein, 343 aa, Paenibacillus lautus
  misc_feature (1)..(343): tr|A0A1R1B7E1|A0A1R1B7E1_PAELA S-adenosylmethionine:tRN A ribosyltransferase-isomerase OS=Paenibacillus lautus OX=1401 GN=queA PE=3 SV=1
MNVDLYDFELPEHLIAQTPLLDRSSSRLLTLDKENGYISHQTFADIIDSLNPGDTLVLNDTKVIPARLFGAKEDTGAKAEVLLLKNMGQDRWEALVKPGKKLKKGNVISFGDGKLKAIIEEEGEMGARILSFSYKGIFQEILDELGQMPLPPYIKEKLDDRDRYQTVYAKHEGSAAAPTAGLHFTEALLEQIQAKGVDIAFITLHVGLGTFRPMSVEQVEDHVMHEEYYSLSQETAELLNETKRRGGRVIAVGTTSCRTLETVGSALEGEPLRESSGWTSIFIYPGYAFTVVDALITNFHLPKSTLVMLVSALAGREHIMKAYKEAVEKEYRFFSFGDAMFIY

SEQ ID NO: 69725 - protein, 342 aa, Paenibacillus lentus
  misc_feature (1)..(342): tr|A0A3S8RUR5|A0A3S8RUR5_9BACL S-adenosylmethionine:tRN A ribosyltransferase-isomerase OS=Paenibacillus lentus OX=1338368 GN=queA PE=3 SV=1
MNVDLYDFDLPEELIAQTPLADRTASRLLTLNKSTGEVQHHMFPAILDYLQPGDTLVLNDTRVIPARLFGVKQDTGAKAEVLLLKDLGANRWEALVKPGKKLKTGAVITFGDELTATIESEGDMGERVLSFSYEGIFNEILDRLGQMPLPPYIKEKLDDRERYQTVYSKHEGSAAAPTAGLHFTKELLEQVRSKGVDIAFVTLHVGLGTFRPMSVEKVEEHVMHEEYYILSEETAKLLNETRQRGGRIIAVGTTSSRTLETVAGKCGDSPITAMSGWTDIFIYPGYTFKLVDALLTNFHLPKSTLVMLVSALAGREQLLNAYREAVEQKYRFFSFGDAMFIY

SEQ ID NO: 69726 - protein, 342 aa, Paenibacillus macerans
  misc_feature (1)..(342): tr|A0A090ZIR8|A0A090ZIR8_PAEMA S-adenosylmethionine:tRN A ribosyltransferase-isomerase OS=Paenibacillus maceran s OX=44252 GN=queA PE=3 SV=1
MNVDMYDFELPEELIAQTPLPERSASRLLTLNKETGEIRHHVFPDILDYLHPGDTLVLNDTRVIPARLFGVKQDTGAKAEVLLLKNLGEDRWEALVKPGKKLKTGAVIVFGDELRATVESEADMGERVLRFSYKGIFNEILDRLGQMPLPPYIKEKLDDRERYQTVYSKHEGSAAAPTAGLHFTEELLEQVRAKGVNIAFVTLHVGLGTFRPMAVERVEDHVMHEEYYVLPQETADIINQTKAKGGRVIAVGTTSARTLETVAQACKGGPIVRSSGWTGIFIYPGYEFGLVDAMLTNFHLPKSTLVMLVSALAGRDHIMAAYKEAIAMKYRFFSFGDAMFIY

SEQ ID NO: 69727 - protein, 342 aa, Paenibacillus macquariensis
  misc_feature (1)..(342): tr|A0A1N6YJD5|A0A1N6YJD5_9BACL S-adenosylmethionine:tRN A ribosyltransferase-isomerase OS=Paenibacillus macquar iensis OX=948756 GN=queA PE=3 SV=1
MDVELYNFDLPEELIAQTPLLERSSSRLLTLNKEDGKTEHHTFKDITEYLKSGDTLVLNDTRVIPARLFGVKEDTGAKAEVLLLKNLGDDRWEALVKPGKKLKQGNIIVFSDELKAVIESESDMGGRVLKFTYNGVFQEILDRLGQMPLPPYIKDKLDDRERYQTVYARHEGSAAAPTAGLHFTEELLDDIRAKGVSVAFITLHVGLGTFRPMSVERVEDHVMHEEYYSLSQETADLLNDTRRAGGRIIAVGTTTCRTLETVGQQCAGGPLKESSGWTSIFMFPGYEFTVVNALITNFHLPKSTLVMLVSALAGREHILEAYKEAVKEQYRFFSFGDAMFIY

SEQ ID NO: 69728 - protein, 342 aa, Paenibacillus macquariensis; identical to SEQ ID NO: 69727
  misc_feature (1)..(342): tr|A0A168BFE7|A0A168BFE7_PAEMC S-adenosylmethionine:tRN A ribosyltransferase-isomerase OS=Paenibacillus macquar iensis OX=1468 GN=queA PE=3 SV=1

SEQ ID NO: 69729 - protein, 348 aa, Paenibacillus montanisoli
  misc_feature (1)..(348): tr|A0A328U4W3|A0A328U4W3_9BACL S-adenosylmethionine:tRN A ribosyltransferase-isomerase OS=Paenibacillus montani soli OX=2081970 GN=queA PE=3 SV=1
MNVAEFDFDLPEHLIAQTPLSDRTSSRLLTLNRATGEVEHHTFTKLSELLQPGDTLILNDTRVMPARLMGIKSDTGAKVELLLLKQLSGDRWETLAKPGKRLRAGAQLSFGDDGTGEPLLRATIIAEGEQGAREIEFHYEGIFNELLDKLGEMPLPPYIKERLNDRERYQTVYAKHEGSAAAPTAGLHFTKPFLEQLQAKGVHIGYITLHVGLGTFRPMSVDTVEEHKMHAEYYELSEETAAMLQAAKDRGGRIVAVGTTSARTLETVAARFAYERLQACSGWTDIFIFPGYEFKLVNALLTNFHLPKSTLVMLVSALAGRSAIMKAYREAIEREYRFFSFGDAMFIY

SEQ ID NO: 69730 - protein, 352 aa, Paenibacillus mucilaginosus
  misc_feature (1)..(352): tr|F8FMX5|F8FMX5_PAEMK S-adenosylmethionine:tRNA ribosy ltransferase-isomerase OS=Paenibacillus mucilaginosus ( strain KNP414) OX=1036673 GN=queA PE=3 SV=1
MQVDLFDYHLPEELIAQTPLADRTASRLLTLSKTSGETAHHTFEDLEQYLQAGDVLVLNNTRVIPARLFGVKADTGAKAEILLLKQLEGDRWEALVKPGKRLREGAVIHFGVETGADGASQGEPLLKATVEETGAQGARVLRFEYEGIFNELLDRLGHMPLPPYIKEQLPERERYQTVYAKHEGSAAAPTAGLHFTEAFLHRLEQKGIQLAYVTLHVGLGTFRPVSAETVDEHDMHEEYYEVPQETAELVTAAKREGRRVVAVGTTSARTLETAAAEDGSLQACSGSTGIFIYPGYRFKAVDALLTNFHLPKSTLMMLISALAGRENVLAAYREAVERKYRFFSFGDAMFIY

SEQ ID NO: 69731 - protein, 352 aa, Paenibacillus mucilaginosus; identical to SEQ ID NO: 69730
  misc_feature (1)..(352): tr|H6NQF3|H6NQF3_9BACL S-adenosylmethionine:tRNA ribosy ltransferase-isomerase OS=Paenibacillus mucilaginosus 3 016 OX=1116391 GN=queA PE=3 SV=1

SEQ ID NO: 69732 - protein, 348 aa, Paenibacillus nanensis
  misc_feature (1)..(348): tr|A0A3A1UW62|A0A3A1UW62_9BACL S-adenosylmethionine:tRN A ribosyltransferase-isomerase OS=Paenibacillus nanensi s OX=393251 GN=queA PE=3 SV=1
MNVDWFDFHLPEELIAQTPLKERTASRLLMLDKTSGEISHGVFTDLEGKLREGDVLVLNNTRVIPARLMGMKKETGAKAELLLLKQLGENQWETLAKPAKKLKVGSVIVFGDDGTGNPLMEAEVLSEGEMGSRTIRFRYEGIFQELLDKLGEMPLPPYIKERLEERERYQTVYSKHEGSAAAPTAGLHFTEEFLHRLEQKGVKLAYVTLHVGLGTFRPMSVDTVEEHEMHSEYYELDEQNAELLNEAKRSGRRIVAVGTTSARTLETLANRFKDAPIESCSGWTSIFIYPGYQFQLVNALLTNFHLPKSTLVMLVSALAGRDTIMKAYREAIERRYRFFSFGDAMFIY

SEQ ID NO: 69733 - protein, 349 aa, Paenibacillus naphthalenovorans
  misc_feature (1)..(349): tr|A0A0U2UAH8|A0A0U2UAH8_9BACL S-adenosylmethionine:tRN A ribosyltransferase-isomerase OS=Paenibacillus naphtha lenovorans OX=162209 GN=queA PE=3 SV=1
MQVDLFDYDLPESLIAQTPLADRTASRLLTLDKRTGRIGHHRFEQLEQYLQAGDVLVLNDTRVIPARLFGVKADTGAKAEVLLLKPLEGDRWEALVRPAKRLKVGARLHFGGETGEQDSAPLLTATVESEGDMGSRVLQFSYKGIFNEILDRLGHMPLPPYIKEQLPEKERYQTVYAKHRGSAAAPTAGLHFTEEYLHRLEQKGIQLAYVTLHVGLGTFRPVSVENVEEHEMHKEYYEVSEKTAEVVNAARQKGGRVVAVGTTSARTLESAAREDGTLVSGKGWTGIFIYPGYPFRIVDALLTNFHLPKSTLLMLISALAGRERVLAAYKEAVEREYRFFSFGDAMFIY

SEQ ID NO: 69734 - protein, 342 aa, Paenibacillus nuruki
  misc_feature (1)..(342): tr|A0A1E3KYU6|A0A1E3KYU6_9BACL S-adenosylmethionine:tRN A ribosyltransferase-isomerase OS=Paenibacillus nuruki OX=1886670 GN=queA PE=3 SV=1
MKVDVYDFELPEHLIAQVPLQDRTASRLLTLNKQTGEVRHQHFGEILDYLHEGDTLILNDTRVIPARLFGIKRDTGAKAEVLLLTQLEGDRWEALVKPGKKLKKGAVIDFGGELEAVIEEESDMGMRVLSFRYEGIFQEILDRLGEMPLPPYIKEKLDDRERYQTVYAKHEGSAAAPTAGLHFTTELLEQIAAKGVQVGFVTLHVGLGTFRPMSVETIEEHVMHEEFYSLSAETAQLLNETKARGGRIIAVGTTSARTLETVAREAKGSLIEASSGWTQIFIYPGHEFGLVDAMVTNFHLPKSTLVMLVSALAGRDHIMNAYQQAVAEEYRFFSFGDAMFIY

SEQ ID NO: 69735 - protein, 342 aa, Paenibacillus odorifer
  misc_feature (1)..(342): tr|A0A1R0XGR4|A0A1R0XGR4_9BACL S-adenosylmethionine:tRN A ribosyltransferase-isomerase OS=Paenibacillus odorife r OX=189426 GN=queA PE=3 SV=1
MNVDAYDFHLPEELIAQTPLADRSASRLLLVNKEDGELAHRHFTDIIDYFNPGDTLVLNDTRVIPARLFGVKEDTGAKAEVLLLKNLGDDRWEALVKPGKKLKTGAVIIFSDELRAVIEDEADMGGRTLRFIYQGIFQEILDRLGTMPLPPYIKETLDDRERYQTVYARHEGSAAAPTAGLHFTQELLKQIEAKGVNIAYITLHVGLGTFRPMSVEKVEEHVMHSEYFVMSQETADTINATKARGGRIIAVGTTSCRTLETVGRQCEGGPLVECSGWTDIFIYPGYTFSVVNALITNFHLPKSTLVMLVSALAGREHILAAYEEAIEQKYRFFSFGDAMFIY

SEQ ID NO: 69736 - protein, 342 aa, Paenibacillus odorifer
  misc_feature (1)..(342): tr|A0A1R0YW10|A0A1R0YW10_9BACL S-adenosylmethionine:tRN A ribosyltransferase-isomerase OS=Paenibacillus odorife r OX=189426 GN=queA PE=3 SV=1
MNVDAYDFHLPEELIAQTPLADRSASRLLLVNKEDGELAHRHFTDIIDYFNPGDTLVLNDTRVIPARLFGVKEDTGAKAEVLLLKNLGDDRWEALVKPGKKLKTGAVIIFSDELRAVIEDEADMGGRTLRFIYQGIFQEILDRLGTMPLPPYIKETLDDRERYQTVYARHEGSAAAPTAGLHFTQQLLKQIEAKGVKIAYITLHVGLGTFRPMSVEKVEEHVMHSEYFVMSQETADTINATKARGGRIIAVGTTSCRTLETVGRQCEGGPLVECSGWTDIFIYPGYKFSVVNALITNFHLPKSTLVMLVSALAGREHILAAYEEAIEQKYRFFSFGDAMFIY

SEQ ID NO: 69737 - protein, 348 aa, Paenibacillus oryzae
  misc_feature (1)..(348): tr|A0A1A5YJM0|A0A1A5YJM0_9BACL S-adenosylmethionine:tRN A ribosyltransferase-isomerase OS=Paenibacillus oryzae OX=1844972 GN=queA PE=3 SV=1
MNVDWFDFELPEELIAQTPLADRTSSRLLSLNRASGKISHGGFTDLAELLQEGDVLVLNNTRVIPARLMGVKSDTGAKVELLLLKRLEGDTWEALAKPAKRLKTGTVIHFGDDGSGKPLMKAEIIAEGDMGSRHILFRYEGIFQELLDRLGEMPLPPYIKETLAERERYQTVYSRHEGSAAAPTAGLHFTEAFLDNLQKRGIQLAYVTLHVGLGTFRPMSAETVEEHEMHAEYYELDEENAAILEVARREGRRIVAVGTTSARTLETVASRFPDTPLEACSGWTSIFIYPGYTFKLVNALVTNFHLPKSTLVMLVSALAGRDAVMKAYSEAIQRQYRFFSFGDAMFIY

SEQ ID NO: 69738 - protein, 358 aa, Paenibacillus oryzisoli
  misc_feature (1)..(358): tr|A0A198A927|A0A198A927_9BACL S-adenosylmethionine:tRN A ribosyltransferase-isomerase OS=Paenibacillus oryziso li OX=1850517 GN=queA PE=3 SV=1
MEVQAFDFELPESLIAQTPLLERTASRLLTLNKETGETAHRTFEDLIAYVEAGDLLVMNDTRVIPARLFGMKKDTGAKVEILLLKPLGEDRWEALVKPGKRMQLGAVAVFGSSNEGGEPLLTAEVVEVGDMGARILQFRYKGIFNEILDQLGEMPLPPYIKEQLSERERYQTVYAKHEGSSAAPTAGLHFTAEYLERLKDRGVRLAFVTLHVGLGTFRPVSVDKIEDHQMHAEFYILSEETAALINETKSAGKRVIAVGTTSARTLETAAGLSREQSGYQEGQPLRIQPSQGWTSIFIYPGYSFGVVDVLLTNFHLPKSTLLMLISALAGKANIMRAYEEAVKEEYRFFSFGDAMLIY

SEQ ID NO: 69739 - protein, 342 aa, Paenibacillus pabuli
  misc_feature (1)..(342): tr|A0A327QM22|A0A327QM22_9BACL S-adenosylmethionine:tRN A ribosyltransferase-isomerase OS=Paenibacillus pabuli OX=1472 GN=queA PE=3 SV=1
MNVNLYDFELPEQLIAQTPLLDRTASRLLTLNKESGEVNHHTFPDIIDFLQPGDTLVLNDTRVLPARLFGTKEDTGAKAEVLLLKNVEGDRWEALVKPGKKLKAGSVIVFSDELRAVIDEEGEMGARLLTFSYDGIFQEILDRLGEMPLPPYIRETLDDRERYQTVYAKHEGSAAAPTAGLHFTEELLNRIRDKGVNVAFITLHVGLGTFRPMSVDNVEEHVMHEEYYSLSQETADLINETKKRGNRIFAVGTTSCRTLETVGSKFEDGQLQESSGWTKIFIYPGYTFKVIDGMLTNFHLPKSTLVMLVSALAGREQIMHAYEEAIKEQYRFFSFGDAMLIY

SEQ ID NO: 69740 - protein, 348 aa, Paenibacillus paeoniae
  misc_feature (1)..(348): tr|A0A371PIB2|A0A371PIB2_9BACL S-adenosylmethionine:tRN A ribosyltransferase-isomerase OS=Paenibacillus paeonia e OX=2292705 GN=queA PE=3 SV=1
MNVDWFDFDLPEELIAQTPLQDRTASRLLMLSKESGSTQHGIFTDLEEKLQEGDVLVLNNTRVIPARLLGVKKDTGAKAEILLLKQLGDDQWEALVKPGKRLKAGAVIVFGDDGSGAPLMEAEVLSEGDMGGRIIQFRYEGIFQELLDRLGEMPLPPYIKERLDERERYQTVYSRHDGSAAAPTAGLHFTESFLRKLEDKGVKLVYVTLHVGLGTFRPMSVDTVEEHEMHAEYYELDEANAALLNEAKVNGRRIVAVGTTSARTLETLAGRFGEGEIQACSGWTSIFIYPGYTFKLVNALLTNFHLPKSTLVMLVSALSGRDAIMKAYGEAIEHKYRFFSFGDAMFIY

SEQ ID NO: 69741 - protein, 347 aa, Paenibacillus pasadenensis
  misc_feature (1)..(347): tr|A0A2N5N9A6|A0A2N5N9A6_9BACL S-adenosylmethionine:tRN A ribosyltransferase-isomerase OS=Paenibacillus pasaden ensis OX=217090 GN=queA PE=3 SV=1
MNVEDYDFHLPEHLIAQTPLAERTASRLLTLDKKTGELGHHAFRDLKDYLRPGDTLVVNDTRVIPARLLGVKEDTGAKAELLLLKQLHGDTWETLAKPGKKLRTGAVVAFGEGENGQPLLRAVVEAEGEMGGRTVRFLYEGIFPELLDRLGEMPLPPYIKERLDDRERYQTVYSRQAGSAAAPTAGLHFSQSFLEELQQAGVEVAPLTLHVGLGTFRPISADTIEEHVMHSEYYELSEETAARLRRTRERGGRIVAVGTTSARTLETVAARFPDGLQACSGWTDIFIYPGYEFKAVDALLTNFHLPKSTLVMLVSALAGRENVLAAYEAAVREQYRFFSFGDAMFIY

SEQ ID NO: 69742 - protein, 359 aa, Paenibacillus pectinilyticus
  misc_feature (1)..(359): tr|A0A1C1A339|A0A1C1A339_9BACL S-adenosylmethionine:tRN A ribosyltransferase-isomerase OS=Paenibacillus pectini lyticus OX=512399 GN=queA PE=3 SV=1
MEVQAFDFDLPESLIAQTPLLDRTASRLLTLNKETGQTAHRTFEDLITYLEAGDLLVMNDTRVIPARLFGMKKDTGAKVELLLLKPLGEDRWEALVKPGKRMQLGAVAVFGTSMDEGDEPLLTAEVVEVGEMGARVLQFRYTGIFNEILDRLGEMPLPPYIKEQLSERERYQTVYAKHEGSSAAPTAGLHFTEAYLDKLQAKGIRLAFVTLHVGLGTFRPVSVDKIEDHQMHAEFYILSEETAAMINETKAAGKRVIAVGTTSARTLETAAGLAREQQSPEEGMPLIIQPSQGWTSIFIYPGYTFGVVDVLLTNFHLPKSTLLMLISALAGKANVMKAYEEAVKEEYRFFSFGDAMLIY

SEQ ID NO: 69743 - protein, 342 aa, Paenibacillus peoriae
  misc_feature (1)..(342): tr|A0A0K2FCE9|A0A0K2FCE9_9BACL S-adenosylmethionine:tRN A ribosyltransferase-isomerase OS=Paenibacillus peoriae OX=59893 GN=queA PE=3 SV=1
MNVNDYDFELPETLIAQTPLLDRSASRLLTLNKNNGEVGHHTFSDIVQYLQPGDTLVLNDTRVIPARLFGIKEDTGAKAEVLLLKQLQGDRWEALVKPGKKLKKGAVIVFGDELKAVIEEEGDMGGRVLSFSYDGIFQEILDRLGQMPLPPYIKEQLDDRERYQTVYARHEGSAAAPTAGLHFTEELLDQIKKKGVTVAFITLHVGLGTFRPMSVDTIEEHVMHEEYYSLSQETADVLNETKARGGRVVAVGTTSCRTLETVGNKFLDGVLEASSGWTQIFIYPGYEFRVVDAMITNFHLPKSTLVMLVSALAGRENIMHAYQEAIDRQYRFFSFGDAMFIY

SEQ ID NO: 69744 - protein, 342 aa, Paenibacillus peoriae
  misc_feature (1)..(342): tr|A0A2S6NY62|A0A2S6NY62_9BACL S-adenosylmethionine:tRN A ribosyltransferase-isomerase OS=Paenibacillus peoriae OX=59893 GN=queA PE=3 SV=1
MNVNDYDFELPETLIAQTPLLDRSASRLLTLNKNNGEVGHHTFSDIVQYLQPGDTLVLNDTRVIPARLFGIKEDTGAKAEVLLLKQLQGDRWEALVKPGKKLKKGAVIVFGDELKAVIEEEGDMGGRVLSFSYDGIFQEILDRLGQMPLPPYIKEQLDDRERYQTVYARHEGSAAAPTAGLHFTEELLDQIKKKGVTVAFITLHVGLGTFRPMSVDTIEEHVMHEEYYSLSQETADVLNETKARGGRVVAVGTTSCRTLETVGNKFLDGVLEASSGWTQIFIYPGYEFRVVDAMITNFHLPKSTLVMLVSALAGRENIMHGYQKAIDRQYRFFSFGDAMFIY

SEQ ID NO: 69745 - protein, 195 aa, Paenibacillus pini
  misc_feature (1)..(195): tr|W7YQ89|W7YQ89_9BACL S-adenosylmethionine:tRNA ribosy ltransferase-isomerase OS=Paenibacillus pini JCM 16418 OX=1236976 GN=JCM16418_725 PE=3 SV=1
MNVELYDFELPEELIAQTPLQDRTSSRLLTLNKESGAMAHHTFKDIVNELHAGDTLVLNDTRVIPARLFGLKEDTGAKAEVLLLKNLGEDRWEALVKPGKKLKVGSVIHFGDELKAVIEEESDMGGRVLSFTYEGIFQEILDRLGQMPLPPYIKEKLMIKNVTRRYILVMKALLRHRQQVYISRKNCSMKFVPKA

SEQ ID NO: 69746 - protein, 130 aa, Paenibacillus pini
  misc_feature (1)..(130): tr|W7YE38|W7YE38_9BACL S-adenosylmethionine:tRNA ribosy ltransferase-isomerase OS=Paenibacillus pini JCM 16418 OX=1236976 GN=JCM16418_726 PE=3 SV=1
MSVDRVEDHVMHAEYYSISQETVEVLNNARDKGGRIIAVGTTSCRTLETVGNRFPEGPLEACNGWTDIFMYPGYSFKVVNALITNFHLPKSTLVMLVSALAGREHILEAYQEAIDMEYRFFSFGDAMFIY

SEQ ID NO: 69747 - protein, 348 aa, Paenibacillus pinisoli
  misc_feature (1)..(348): tr|A0A3A6PSZ3|A0A3A6PSZ3_9BACL S-adenosylmethionine:tRN A ribosyltransferase-isomerase OS=Paenibacillus pinisol i OX=1276110 GN=queA PE=3 SV=1
MNVEWFDFDLPEELIAQTPLQDRTASRLLMLSKESGNTEHGGFTDLEAKLQAGDVLVLNNTRVIPARLLGIKKDTGAKAELLLLKQLGDDRWEALAKPGKKLKAGAVIVFGDDGNGTPLMEAEVLSEGDMGARIIQFRYEGIFQELLDRLGEMPLPPYIKERLDERERYQTVYSRHEGSAAAPTAGLHFTEDFLRKLEDKGVRLVYVTLHVGLGTFRPMSVDTVEEHEMHSEYYELDETNAELLNEARSNGRRIVAVGTTSARTLETLAGRFGDGALQACSGWTSIFIYPGYSFKLVNALLTNFHLPKSTLVMLVSALAGRDAIMKAYGEAIERRYRFFSFGDAMFIY

SEQ ID NO: 69748 - protein, 342 aa, Paenibacillus polymyxa; identical to SEQ ID NO: 69743
  misc_feature (1)..(342): tr|A0A509FXM3|A0A509FXM3_PAEPO S-adenosylmethionine:tRN A ribosyltransferase-isomerase OS=Paenibacillus polymyx a OX=1406 GN=queA PE=3 SV=1

SEQ ID NO: 69749 - protein, 342 aa, Paenibacillus polymyxa
  misc_feature (1)..(342): tr|A0A1D7MFB7|A0A1D7MFB7_PAEPO S-adenosylmethionine:tRN A ribosyltransferase-isomerase OS=Paenibacillus polymyx a OX=1406 GN=queA PE=3 SV=1
MNVNDYDFELPETLIAQTPLLDRSASRLLTLNKNNGKVGHHTFSDIVQYLQPGDTLVLNDTRVIPARLFGIKEDTGAKAEVLLLKQLQGDRWEALVKPGKKLKKGAVIVFGDELKAVIEEEGDMGGRVLSFSYDGIFQEILDRLGQMPLPPYIKEQLDDRERYQTVYARHEGSAAAPTAGLHFTEELLDQIKKKGVTVAFITLHVGLGTFRPMSVDTIEEHVMHEEYYSLSQETADVLNATKARGGRIVAVGTTSCRTLETVGNTFADGVLQASSGWTQIFIYPGYEFRVVDAMITNFHLPKSTLVMLVSALAGRENIMHAYQEAIDRQYRFFSFGDAMFIY

SEQ ID NO: 69750 - protein, 342 aa, Paenibacillus polysaccharolyticus
  misc_feature (1)..(342): tr|A0A1G5BV34|A0A1G5BV34_9BACL S-adenosylmethionine:tRN A ribosyltransferase-isomerase OS=Paenibacillus polysac charolyticus OX=582692 GN=queA PE=3 SV=1
MNVNLYDFELPEELIAQTPLLDRTASRLLTLNKETGEVAHHHFPHIIDVLQPGDTLILNDTRVLPARLFGTKADTGAKAEVLLLKNVEGDKWEALVKPGKKLRAGSVIVFSDELKAVINEVGEMGARTLTFEYNGIFQEILDRLGEMPLPPYIKETLDDRERYQTVYAKHEGSAAAPTAGLHFTDELLDQIRAKGVNIGFITLHVGLGTFRPMSVDMVEDHVMHEEYYSLSQETAELINQTKERGNKVFAVGTTSCRTLETVGSKFEDGVLQESSGWTSIFIYPGYSFKVIDGMLTNFHLPKSTLVMLVSALAGREHIMHAYEEAIKEKYRFFSFGDAMLIY

SEQ ID NO: 69751 - protein, 345 aa, Paenibacillus popilliae
  misc_feature (1)..(345): tr|M9LLE2|M9LLE2_PAEPP S-adenosylmethionine:tRNA ribosy ltransferase-isomerase OS=Paenibacillus popilliae ATCC 14706 OX=1212764 GN=queA PE=3 SV=1
MDVHLFDFDLPERLIAQTPLPDRTASRLLALNRRTGEVEHRTFPDMIEYLKPGDLLVLNDTRVIPARLYGVKPDTGGNVEVLLLKQEQDDIWEALVKPAKRLKKGATVRFGDELTGTVIEEREMGGRLIRFEYAGIFHEILDRLGQMPLPPYIKELLQDRERYQTVYAKHEGSAAAPTAGLHFTDSILEQIRAKEVGIARITLHVGLGTFRPMSADVIEEHVMHAEYYEMSEETAALINETRSLGGRIVAVGTTSCRTLETVAGRYGSEPVAACSGWTDIFIYPGYEFRLVDSLLTNFHLPKSTLVMLVSAFAGREHMMAAYREAIEQEYRFFSFGDAMLIFTDD

SEQ ID NO: 69752 - protein, 348 aa, Paenibacillus prosopidis
  misc_feature (1)..(348): tr|A0A368VLL1|A0A368VLL1_9BACL S-adenosylmethionine:tRN A ribosyltransferase-isomerase OS=Paenibacillus prosopi dis OX=630520 GN=queA PE=3 SV=1
MNVDWFDFELPERLIAQTPLPDRTASRLLALNKHTGEITHNTFTDLEQLVQAGDVLVLNNTRVIPARLTGMKSDTGAKIELLLLKQLGDDRWEALGKPAKRLKAGTALSFGDDGNGNPLLRAVIEQEGEMGGRTIRFEYEGIFQELLDRLGEMPLPPYIKERLEERERYQTVYSRHAGSAAAPTAGLHFTDEFLQRLQAKGVKLAYVTLHVGLGTFRPMSVELVEEHEMHAEYYELDEHNAQILNEAKQSGARIIAVGTTSSRTLETVAARFEDQPIQACNGWTSIFIFPGYKFKLVNALLTNFHLPKSTLVMLVSALAGRDAVMRAYEEAIAKEYRFFSFGDAMFIY

SEQ ID NO: 69753 - protein, 342 aa, Paenibacillus rhizosphaerae
  misc_feature (1)..(342): tr|A0A1R1DXA9|A0A1R1DXA9_9BACL S-adenosylmethionine:tRN A ribosyltransferase-isomerase OS=Paenibacillus rhizosp haerae OX=297318 GN=queA PE=3 SV=1
MNVDLYDFELPEELIAQTPLPERTASRLLTLNKQDGSIAHRTFKDIADELQPGDTLVLNDTRVIPARLFGVKEETGAKAEVLLLKNLQGDTWEALVKPGKKLKKGSVIRFGDELQAVIEDEGEMGERKLTFTYQGIFQEILDRLGQMPLPPYIKEKLDDKERYQTVYSKHEGSAAAPTAGLHFTEELLDQIRAKGVTVAFITLHVGLGTFRPMSVERVEDHVMHAEYYSVNQETADILNEARARGGRIVAVGTTSCRTLETIGTRFEGGLLEACSGWTDIFIYPGYTFKVVNALITNFHLPKSTLVMLVSALAGREHILNAYAEAVKERYRFFSFGDAMFIY

SEQ ID NO: 69754 - protein, 352 aa, Paenibacillus rigui
  misc_feature (1)..(352): tr|A0A229UTT1|A0A229UTT1_9BACL S-adenosylmethionine:tRN A ribosyltransferase-isomerase OS=Paenibacillus rigui O X=554312 GN=queA PE=3 SV=1
MQVEWFDYELPERLIAQTPLKDRTASRLLTLNKETGAIRHQTFESLIDYLEAGDVLVLNDTRVLPARLFGVKADTGAKAEVLLLKQLEGDRWEALVRPGKRLKAGSVIAFGAEEQGEGSKPLLTATVEEEREMGSRVLRFSYEGIFNELLDRLGHMPLPPYIKEQLPERERYQTVYAKHEGSAAAPTAGLHFTKSFLHRLEQKGIQLAYITLHVGLGTFRPVAVDHVESHTMHEEYYEVSAEAADRINAAKAGGHRVVAVGTTSARTLETAIRVSTQPGQLTACSGWTDIFIYPGVELKIVDALLTNFHLPKSTLLMLISALAGRERIMAAYKEAVEQEYRFFSFGDAMFIY

SEQ ID NO: 69755 - protein, 342 aa, Paenibacillus riograndensis
  misc_feature (1)..(342): tr|A0A0E3WIV8|A0A0E3WIV8_9BACL S-adenosylmethionine:tRN A ribosyltransferase-isomerase OS=Paenibacillus riogran densis SBR5 OX=1073571 GN=queA PE=3 SV=1
MNVDDYDFHLPEELIAQTPLSDRSASRLLLVNKENGQLEHRHFTDILEQFRPGDTLVLNDTRVIPARLFGVKEDTGAKAEVLLLKSLGEDRWEALVKPGKKLKTGAVIIFSEELKAVIEDEADMGGRTLRFIYTGIFQEILDRLGSMPLPPYIKETLDDRERYQTVYAKHEGSAAAPTAGLHFTRELLEQIKAKGVTIAYITLHVGLGTFRPMSVEKVEEHVMHAEYFVLSQETADMLNAARARGGRIIAVGTTSCRTLETAGRQAGGGPIQECSGWTDIFIYPGYTFTVVNALITNFHLPKSTLVMLVSALAGRENILAAYEAAIQQRYRFFSFGDAMFIY

SEQ ID NO: 69756 - protein, 342 aa, Paenibacillus riograndensis
  misc_feature (1)..(342): tr|A0A132U052|A0A132U052_9BACL S-adenosylmethionine:tRN A ribosyltransferase-isomerase OS=Paenibacillus riogran densis OX=483937 GN=queA PE=3 SV=1
MNVDDYDFHLPEELIAQTPLSDRSASRLLLVNKENGQLEHRHFTDILEQFRPGDTLVLNDTRVIPARLFGVKEDTGAKAEVLLLKSLGADRWEALVKPGKKLKSGAVIIFSEELRAVIEDESDMGGRTLRFIYTGIFQEILDRLGSMPLPPYIKETLDDRERYQTVYAKHEGSAAAPTAGLHFTRELLEQIKAKGVTIAYITLHVGLGTFRPMSVEKVEEHVMHAEYFVLSQETADMLNAARARGGRIIAVGTTSCRTLETAGRQAGGGPIQECSGWTDIFIYPGYTFTVVNALITNFHLPKSTLVMLVSALAGRENILAAYEAAIQQRYRFFSFGDAMFIY

SEQ ID NO: 69757 - protein, 342 aa, Paenibacillus sabinae
  misc_feature (1)..(342): tr|X5A2D6|X5A2D6_9BACL S-adenosylmethionine:tRNA ribosy ltransferase-isomerase OS=Paenibacillus sabinae T27 OX= 1268072 GN=queA PE=3 SV=1
MHVDLYDFHLPEELIAQTPLSDRSASRLLTLDMRSGKTEHRHFTDILEELRPGDTLVLNDTRVIPARLFGIKEDTGAKAEVLLLKSLDEDRWEALVKPGKKLKTGAVISFGEELRAVIEEESDMGGRTLRFMYNGIFQEILDRLGTMPLPPYIKEKLDDRERYQTVYARNEGSAAAPTAGLHFTEELLDKIKAKGVNLAYITLHVGLGTFRPMSVETVEEHVMHAEFFMLSQETADILNEAREKGSRIVAVGTTSCRTLETVGGMFKGEPLEACSGWTDIFIYPGYEFKLVDALITNFHLPKSTLVMLVSALAGRENILAAYQEAIEQKYRFFSFGDAMFIY

SEQ ID NO: 69758 - protein, 342 aa, Paenibacillus selenitireducens
  misc_feature (1)..(342): tr|A0A1T2XKH5|A0A1T2XKH5_9BACL S-adenosylmethionine:tRN A ribosyltransferase-isomerase OS=Paenibacillus selenit ireducens OX=1324314 GN=queA PE=3 SV=1
MNVDLYDFHLPEHLIAQTPLLNRTGSRLLTLEKATGNVEHHVFTDLINYLQPGDTLVLNDTRVIPARIMGSKPDTGAKMEVLLLKNVGEDRWEGLVKPAKRAKVGTVIQFSEELSATVESEGDMGARVLRFSYEGIFNEILDRLGQMPLPPYIKEQLDDQERYQTVYAKHEGSAAAPTAGLHFTSEFLELIQAKGVDIAYITLHVGLGTFRPMSVDRVEDHVMHEEYYSISEETASQLQAARDRGGRIVAVGTTSARTLETVGTRFGDEPIQACSGWTSIFIFPGYTFKLVNALLTNFHLPKSTLVMLVSALAGREHILNAYQEAIEQEYRFFSFGDAMFIY

SEQ ID NO: 69759 - protein, 342 aa, Paenibacillus silvae
  misc_feature (1)..(342): tr|A0A2W6NNY3|A0A2W6NNY3_9BACL S-adenosylmethionine:tRN A ribosyltransferase-isomerase OS=Paenibacillus silvae OX=1325358 GN=queA PE=3 SV=1
MNVDLYDFELPEELIAQTPLLDRTASRLLTLNKETGEVAHHHFPHILNVLEPGDTLILNDTRVLPARLFGTKEDTGAKAEVLLLKNVEGDKWEALVKPGKKLRDGAVIVFSDELKAVINEVGEMGARTLTFEYNGIFQEILDRLGEMPLPPYIKETLDDRERYQTVYAKHEGSAAAPTAGLHFTDELLDQIRAKGVNIGFITLHVGLGTFRPMSVDVVEDHVMHEEYYSLSQETADLINRTKERGNKVFAVGTTSCRTLETVGSKFEDGVLQESSGWTSIFIYPGYSFKVIDGMLTNFHLPKSTLVMLVSALAGRENIMHAYAEAIKERYRFFSFGDAMLIY

SEQ ID NO: 69760 - protein, 343 aa, Paenibacillus solani
  misc_feature (1)..(343): tr|A0A0M1P152|A0A0M1P152_9BACL S-adenosylmethionine:tRN A ribosyltransferase-isomerase OS=Paenibacillus solani OX=1705565 GN=queA PE=3 SV=1
MNVDLYDFELPEQLIAQTPLLDRSSSRLLTLNKENGHLRHQTFADIIDCLNPGDTLVLNDTKVIPARLFGEKEDTGAKAEVLLLKSMGQDRWEALVKPGKKLKKGNVISFGDGKLKAVIEEEGEMGARTLSFSYKGIFQEILDELGQMPLPPYIKEKLDDRDRYQTVYAKHEGSAAAPTAGLHFTETLLEQIRAKGVDIAFITLHVGLGTFRPMSVDQVEDHVMHEEYYSISQETAELLNETKRRGGRVIAVGTTSCRTLETVGSERNGEPLCESSGWTSIFIYPGYKFTVVDALITNFHLPKSTLVMLVSALAGREHIMKAYAEAVEKEYRFFSFGDAMFIY

SEQ ID NO: 69761 - protein, 342 aa, Paenibacillus sophorae
  misc_feature (1)..(342): tr|A0A1H8RER7|A0A1H8RER7_9BACL S-adenosylmethionine:tRN A ribosyltransferase-isomerase OS=Paenibacillus sophora e OX=1333845 GN=queA PE=3 SV=1
MNVDLYNFHLPEELIAQTPLPDRSASRLLTLDKRSGRTQHRHFTDIIDELQPGDTLVLNDTRVIPARLFGIKEDTGAKAEVLLLKSLGEDRWDALVKPGKKLKTGAVISFGEELRAVIEEESDMGGRTLRFMYEGIFQEILDRLGTMPLPPYIKEKLDDRERYQTVYARHEGSAAAPTAGLHFTEDLLKHIQDKGVRLAYITLHVGLGTFRPMSVDTVEEHVMHSEYFMLPQETADMLNEAKSKGSRIVAVGTTSCRTLETVGGMFGDGPLEACSGWTDIFIYPGYEFKLVNALITNFHLPKSTLVMLVSALAGREHILAAYQEAIQRKYRFFSFGDAMFIY

SEQ ID NO: 69762 - protein, 342 aa, Paenibacillus sp.
  misc_feature (1)..(342): tr|A0A1Q5XTH4|A0A1Q5XTH4_9BACL S-adenosylmethionine:tRN A ribosyltransferase-isomerase OS=Paenibacillus sp. P46 E OX=1349436 GN=queA PE=3 SV=1
MNVDDYDFHLPEELIAQTPLSDRSASRLLLVNKQNGQLEHRHFTDILDQFQPGDTLVLNDTRVIPARLFGVKEDTGAKAEVLLLKSLGEERWEALVKPGKKLKTGAVIIFSDELRAVIEDEADMGGRTLHFIYTGIFQEILDRLGSMPLPPYIKETLDDRERYQTVYAKHEGSAAAPTAGLHFTRELLEQIKAKGVTIAYITLHVGLGTFRPMSVEKVEEHVMHAEYFVLSKETADVLNAAKARGGRIIAVGTTSCRTLETVGRQSQGGPIEECSGWTDIFIYPGYKFTVVNALITNFHLPKSTLVMLVSALAGRENILTAYEAAIGQQYRFFSFGDAMFIY

SEQ ID NO: 69763 - protein, 342 aa, Paenibacillus sp.
  misc_feature (1)..(342): tr|A0A1I6RC39|A0A1I6RC39_9BACL S-adenosylmethionine:tRN A ribosyltransferase-isomerase OS=Paenibacillus sp. 453 mf OX=1761874 GN=queA PE=3 SV=1
MNVDLYDFELPESLIAQTPLKERSASRLLTLNKETGAMGHHTFTDIIDYLNPGDTLILNDTRVIPARLFGVKEDTGAKAEVLLLHNLGEDRWETLVKPGKKLKKGAVIRFGEELSATIEEESDMGGRVIRFSYDGIFQEILDRLGQMPLPPYIKEKLEDKERYQTVYAKHEGSAAAPTAGLHFTEELLERIQAKGISIGFITLHVGLGTFRPMSVDVVEEHVMHAEYYSLNQETADLINETKNRGGRVIAVGTTSCRTLETVGTQLEGKELTASSGWTDIFMYPGYEFKVVDALITNFHLPKSTLVMLVSALAGLENIMTAYKEAVNQEYRFFSFGDSMFIY

SEQ ID NO: 69764 - protein, 342 aa, Paenibacillus spiritus
  misc_feature (1)..(342): tr|A0A5J5GHV2|A0A5J5GHV2_9BACL tRNA preQ1(34) S-adenosy lmethionine ribosyltransferase-isomerase QueA OS=Paenib acillus spiritus OX=2496557 GN=queA PE=4 SV=1
MKVDLYDFDLPESLIAQTPLKERSASRLLMLDKSTGKTEHGVFTDIVDRLQPGDTLVLNDTRVIPARLFGVKEDTGAKAEVLLLQNLGEDRWEALVKPGKKLKTGSVIVFGDELSAVVEEEGEMGGRTIRFRYSGIFQEILDRLGTMPLPPYIKEKLDDRERYQTVYARHEGSAAAPTAGLHFTEELLKQIEAKGVTLAYITLHVGLGTFRPMSAETVEEHVMHAEYYSLSPETAEVLNQARAEGRRIVAVGTTSCRTLETVGTRFGKNPLEACSGWTDIFIYPGYEFKLVDALITNFHLPKSTLVMLVSALAGRESVLSAYREAVEMKYRFFSFGDAMFIY

SEQ ID NO: 69765 - protein, 342 aa, Paenibacillus stellifer
  misc_feature (1)..(342): tr|A0A089N8J6|A0A089N8J6_9BACL S-adenosylmethionine:tRN A ribosyltransferase-isomerase OS=Paenibacillus stellif er OX=169760 GN=queA PE=3 SV=1
MNVDLYDFDLPEELIAQTPLPDRSASRLLTLDKSSGVTEHRHFTDILTELKPGDTLVLNDTRVIPARLFGVKEDTGAKAEVLLLKNLGEDRWEALVKPGKKLKTGAVISFGEELQAVVEEESDMGGRTLRFMYQGIFQEILDRLGTMPLPPYIKEKLDDRERYQTVYAKNEGSAAAPTAGLHFTKELLKQIQDKGVRIAYITLHVGLGTFRPMSVETVEEHVMHAEFFMLSQETADMLNKARTEGGRIVAVGTTSCRTLETVGGMFGDGPLEACSGWTDIFIYPGYSFKLVDALITNFHLPKSTLVMLVSALAGREHILNAYKEAIRESYRFFSFGDAMFIY

SEQ ID NO: 69766 - protein, 348 aa, Paenibacillus swuensis
  misc_feature (1)..(348): tr|A0A172TJK4|A0A172TJK4_9BACL S-adenosylmethionine:tRN A ribosyltransferase-isomerase OS=Paenibacillus swuensi s OX=1178515 GN=queA PE=3 SV=1
MNVEQFDFDLPEELIAQTPLLQRTESRLLALNKRTGAIEHGTFTQLLNYLQSGDTLVLNDTRVLPARLLGVKADTGAKAEVLLLKNTEGDTWEALVKPGKRVKKGTVLHFGADSEAPLLLAEVTEEGEMGARTLRFEYQGIFHELLDQLGQMPLPPYIKEQLEDQERYQTVYAKHRGSAAAPTAGLHFTEAFLNEIRSRGVTIASVTLHVGLGTFRPVSAERVEEHEMHHEYYEVSQETAEVLNDTRVRGGRVVAVGTTSARTLETVARRYGDSAVQACSGWTNIFMYPGYEFQLVDALLTNFHLPKSTLVMLVSALAGRELTMKAYEAAIQERYRFFSFGDAMFIYE

SEQ ID NO: 69767 - protein, 342 aa, Paenibacillus taichungensis; identical to SEQ ID NO: 69739
  misc_feature (1)..(342): tr|A0A2V3RMN1|A0A2V3RMN1_9BACL S-adenosylmethionine:tRN A ribosyltransferase-isomerase OS=Paenibacillus taichun gensis OX=484184 GN=queA PE=3 SV=1

SEQ ID NO: 69768 - protein, 342 aa, Paenibacillus taichungensis
  misc_feature (1)..(342): tr|A0A329QRD2|A0A329QRD2_9BACL S-adenosylmethionine:tRN A ribosyltransferase-isomerase OS=Paenibacillus taichun gensis OX=484184 GN=queA PE=3 SV=1
MNVNLYDFELPEKLIAQTPLLDRTASRLLTLNKDSGEVNHHTFPDIIEFLQPGDTLVLNDTRVLPARLFGTKEDTGAKAEVLLLKNVEGDRWEALVKPGKKLKAGSVIVFSDELKAVIDEEGEMGARLLTFSYDGIFQEILDRLGEMPLPPYIRETLDDRERYQTVYAKHEGSAAAPTAGLHFTEELLNRIRDKGVNVAFITLHVGLGTFRPMSVDNVEEHVMHEEYYSLSQETADLINETKKRGNRIFAVGTTSCRTLETVGSKFEDGQLQESSGWTKIFIYPGYTFKVIDGMLTNFHLPKSTLVMLVSALAGREQIMHAYEEAIKEQYRFFSFGDAMLIY

SEQ ID NO: 69769 - protein, 348 aa, Paenibacillus taihuensis
  misc_feature (1)..(348): tr|A0A3D9QXE6|A0A3D9QXE6_9BACL S-adenosylmethionine:tRN A ribosyltransferase-isomerase OS=Paenibacillus taihuen sis OX=1156355 GN=queA PE=3 SV=1
MNVNDFDFELPEQLIAQTPLADRTASRLLTLSRATGEAGHHTFPYLAEMLQAGDTLILNDTRVMPARLMGVKSDTGAKVELLLLKQLEGDRWETLAKPGKRLKVGAQLSFGDDGNGEPLLRATVVAEGEMGGREIEFHYEGIFNELLDRLGEMPLPPYIKERLDDRERYQTVYAKHEGSAAAPTAGLHFTKEFLAQLQAKGVQIGYITLHVGLGTFRPMSVDTVEEHTMHSEYYELSEETAAMLRDAKARGGRIVAVGTTSCRTLETVASRFTYEDIRACSGWTDIFIFPGYEFKLVNALLTNFHLPKSTLVMLVSALAGRSAVMNAYKEAIEQEYRFFSFGDAMFIY

SEQ ID NO: 69770 - protein, 342 aa, Paenibacillus terrae
  misc_feature (1)..(342): tr|G7VTC6|G7VTC6_PAETH S-adenosylmethionine:tRNA ribosy ltransferase-isomerase OS=Paenibacillus terrae (strain HPL-003) OX=985665 GN=queA PE=3 SV=1
MNVNDYDFELPETLIAQTPLLDRSASRLLTLSKGSGEVGHHTFSDIVQYLQPGDTLVLNDTRVIPARLFGIKEDTGAKAEVLLLKQLEGDRWEALVKPGKKLKKGAVIVFGDELKAVIEEEGDMGGRVLSFSYEGIFQEILDRLGQMPLPPYIKEQLDDRERYQTVYARHEGSAAAPTAGLHFTEELLDRIREKGVSIAFVTLHVGLGTFRPMSVDTIEEHVMHEEYYSLSQETADVLNETKARGGRVVAVGTTSCRTLETVGNTFGDGLLQASSGWTQIFIYPGYEFRVVDAMITNFHLPKSTLVMLVSALAGRENIMHAYQEAIDREYRFFSFGDAMFIY

SEQ ID NO: 69771 - protein, 342 aa, Paenibacillus terrae
  misc_feature (1)..(342): tr|A0A4U2PNZ0|A0A4U2PNZ0_9BACL S-adenosylmethionine:tRN A ribosyltransferase-isomerase OS=Paenibacillus terrae OX=159743 GN=queA PE=3 SV=1
MNVNDYDFELPETLIAQTPLLDRSSSRLLTLSKGSGEVGHHTFSDIVQYLQPGDTLVLNDTRVIPARLFGIKEDTGAKAEVLLLKQLEGDRWEALVKPGKKLKKGAVIVFGDELKAVIEEEGDMGGRVLSFSYEGIFQEILDRLGLMPLPPYIKEQLDDRERYQTVYARHEGSAAAPTAGLHFTEELLDRIREKGVSIAFVTLHVGLGTFRPMSVDTIEEHVMHEEYYSLSQETADVLNETKARGGRVVAVGTTSCRTLETVGNTFGDGLLQASSGWTQIFIYPGYEFRVVDAMITNFHLPKSTLVMLVSALAGKENIMHAYQEAIDREYRFFSFGDAMFIY

SEQ ID NO: 69772 - protein, 342 aa, Paenibacillus thermophilus
  misc_feature (1)..(342): tr|A0A388MT95|A0A388MT95_9BACL S-adenosylmethionine:tRN A ribosyltransferase-isomerase OS=Paenibacillus thermop hilus OX=1181891 GN=queA PE=3 SV=1
MNVDMYDFELPEELIAQTPLPERSASRLLTLNKETGEIRHHVFPDILDYLHPGDTLVLNDTRVIPARLFGVKQDTGAKAEVLLLKNLGEDRWEALVKPGKKLKTGAVIVFGDELRATVESEADMGERVLRFSYKGIFNEILDRLGQMPLPPYIKEKLDDRERYQTVYSKHEGSAAAPTAGLHFTEELLEQVRAKGVNIAFVTLHVGLGTFRPMSVERVEDHVMHEEYYVLPQETADIINQTKAKGGRVIAVGTTSTRTLETVAQACKGGPIVRSSGWTGIFIYPGYEFGLVDAMLTNFHLPKSTLVMLVSALAGRDHIMAAYKEAIAMKYRFFSFGDAMFIY

SEQ ID NO: 69773 - protein, 345 aa, Paenibacillus thiaminolyticus
  misc_feature (1)..(345): tr|A0A378X8S6|A0A378X8S6_PANTH S-adenosylmethionine:tRN A ribosyltransferase-isomerase OS=Paenibacillus thiamin olyticus OX=49283 GN=queA PE=3 SV=1
MDVNLFDFHLPERLIAQTPLPDRTASRLLALNRRTGEVEHRTFPDIIEYLKPGDLLVLNDTRVIPARLFGVKPDTGGHVEVLLLKQEQDDIWEVLAKPAKRLKKGATVRFGDELTGTVIEEREMGARLLRFEYAGIFNEILDRLGEMPLPPYIKEQLNDRERYQTVYAQHEGSAAAPTAGLHFTNKILEQIRARGVRIAMITLHVGLGTFRPMSADVVEEHVMHAEYYEMSEQTAALINETRSSGGRIIAVGTTSCRTLETVAGRYGAEPVAACSGWTDIFIYPGYEFRLVDSLLTNFHLPKSTLVMLVSAFAGRDHIMAAYREAIEQDYRFFSFGDAMFIFADD

SEQ ID NO: 69774 - protein, 345 aa, Paenibacillus thiaminolyticus
  misc_feature (1)..(345): tr|A0A515LZ03|A0A515LZ03_PANTH S-adenosylmethionine:tRN A ribosyltransferase-isomerase OS=Paenibacillus thiamin olyticus OX=49283 GN=queA PE=3 SV=1
MDVNLFDFHLPERLIAQTPLPDRTASRLLALNRRTGEVEHRTFPDIIEYLKPGDLLVLNDTRVIPARLFGVKPDTGGHVEVLLLKQEQDDIWEVLVKPAKRLKKGATVRFGDELTGTVIEEREMGARLLRFEYAGIFNEILDRLGEMPLPPYIKEQLNDRERYQTVYAQHEGSAAAPTAGLHFTNNILEQIRAKGVRIAMITLHVGLGTFRPMSADVVEEHVMHAEYYEMSEQTAALINETRNSGGRIIAVGTTSCRTLETVAGRYGAEPVAACSGWTDIFIYPGYEFRLVDSLLTNFHLPKSTLVMLVSAFAGRDHIMAAYREAIEQDYRFFSFGDAMFIFADD

SEQ ID NO: 69775 - protein, 353 aa, Paenibacillus tianmuensis
  misc_feature (1)..(353): tr|A0A1G4QPG2|A0A1G4QPG2_9BACL S-adenosylmethionine:tRN A ribosyltransferase-isomerase OS=Paenibacillus tianmue nsis OX=624147 GN=queA PE=3 SV=1
MQVDFFDYHLPESLIAQTPLPDRTASRLLTLEKRTGEIGHHKFEQLERYLEAGDVLVLNDTRVIPARLFGVKADTGAKAEVLLLKPLEGDRWEALVRPAKRLKTGTVLHFGGGAPSEADRGAEPPLLVATVESEGDMGSRVLRFSYEGIFNELLDRLGHMPLPPYIKEQLPERERYQTVYAKHQGSAAAPTAGLHFTQDYLNRLEQKGIQLAYVTLHVGLGTFRPVGAETVEQHEMHEEYYEVSAETANLVNAVKRKGGRVVAVGTTSARTLETAAGEDGTLQAGSGWTGIFIYPGYRFRIVGALLTNFHLPKSTLLMLISALAGRENVLAAYREAVEREYRFFSFGDAMFIH

SEQ ID NO: 69776 - protein, 342 aa, Paenibacillus typhae
  misc_feature (1)..(342): tr|A0A1G8IC91|A0A1G8IC91_9BACL S-adenosylmethionine:tRN A ribosyltransferase-isomerase OS=Paenibacillus typhae OX=1174501 GN=queA PE=3 SV=1
MNVEDYDFHLPEELIAQTPLLDRSASRLLMVDKENGQIQHRHFTDILEQFQPGDTLVLNDTRVIPARLFGVKEDTGAKAEVLLLKSLGEDRWEALVKPGKKLKNGAVIVFSDELKAVIEEEADMGGRTLRFIYKGIFQEILDRLGSMPLPPYIKETLDDRERYQTVYARHEGSAAAPTAGLHFTKELLEQIAAKGVNIAYITLHVGLGTFRPMSVDKVEEHVMHAEYYMLSQETADLLNEARSRGGRIIAVGTTSCRTLETVGRQAAGGPLTACSGWTDIFIYPGYQFTVVNALITNFHLPKSTLVMLVSALAGREHILAAYEEAIKEHYRFFSFGDAMFIY

SEQ ID NO: 69777 - protein, 353 aa, Paenibacillus tyrfis
  misc_feature (1)..(353): tr|A0A081NWV3|A0A081NWV3_9BACL S-adenosylmethionine:tRN A ribosyltransferase-isomerase OS=Paenibacillus tyrfis OX=1501230 GN=queA PE=3 SV=1
MQVDLFDYHLPESLIAQTPLPDRTASRLLTLDKRTGEIGHHTFEQLERYLEAGDVLVLNDTRVIPARLFGVKADTGAKAEVLLLKQLEGDCWEALVRPAKRLKTGTVLHFGGGAPSEAGGDAEPPLLVATVESEGDMGSRALRFSYEGIFNELLDRLGHMPLPPYIKEQLPERERYQTVYAKHQGSAAAPTAGLHFTQDYLNRLEQKGIQLAYVTLHVGLGTFRPVGVETVEQHEMHEEYYEVSAETAELVNAVKRKGGRVVAVGTTSARTLETAAGEDGMLQAGSGWTGIFIYPGYRFRIVDALLTNFHLPKSTLLMLISALAGRENVLAAYREAVEREYRFFSFGDAMFIH

SEQ ID NO: 69778 - protein, 343 aa, Paenibacillus uliginis
  misc_feature (1)..(343): tr|A0A1X7HLV2|A0A1X7HLV2_9BACL S-adenosylmethionine:tRN A ribosyltransferase-isomerase OS=Paenibacillus uligini s N3/975 OX=1313296 GN=queA PE=3 SV=1
MNVDLYDFELPEHLIAQTPLLDRSSSRLLTVSKEDGALSHQVFGDIVNYLRPGDTLVLNDTKVIPARLFGAKEDTGAKAEVLLLKALGEDRWEALVKPGKRLKKGSVITFGEGKLRAIIDEEGELGARVLSFSYDGIFQEILDSLGQMPLPPYIKEKLDDRDRYQTVYAKHEGSAAAPTAGLHFTEELLDCIRKQGVDIAFITLHVGLGTFRPMSVDQVEDHVMHEEYYVLSQETADLLNETKSRGGRVIAVGTTSCRTLETVGNQCQGGLLRESSGWTSIFIYPGYEFKVVDALITNFHLPKSTLVMLVSALAGRDHILEAYKEAVEREYRFFSFGDAMFIY

SEQ ID NO: 69779 - protein, 343 aa, Paenibacillus vortex; identical to SEQ ID NO: 69711
  misc_feature (1)..(343): tr|A0A2R9SX21|A0A2R9SX21_9BACL S-adenosylmethionine:tRN A ribosyltransferase-isomerase OS=Paenibacillus vortex V453 OX=715225 GN=queA PE=3 SV=1

SEQ ID NO: 69780 - protein, 357 aa, Paenibacillus whitsoniae
  misc_feature (1)..(357): tr|A0A3S0A2W4|A0A3S0A2W4_9BACL S-adenosylmethionine:tRN A ribosyltransferase-isomerase OS=Paenibacillus whitson iae OX=2496558 GN=queA PE=3 SV=1
MDVQAFDFELPEALIAQTPLQNRTASRLLTLNKATGETAHRSFENLIDYLEAGDLLVMNDTRVIPARLFGTKKETGAKVELLLLKQLGEDRWEALVKPGKRMQLGAVAEFGKDDAGQPLLTAEVVEVGDMGARVLQFSYTGIFNEILDRLGEMPLPPYIKEQLPEKERYQTVYAKHEGSAAAPTAGLHFTQEYLDRIQAKGVRLAFVTLHVGLGTFRPVSVDKIEDHQMHAEYYILSQETADLINETKRSGKRIIAVGTTSCRTLETAAGISREQGGGKNGEPLAIQPSQGWTSIFIYPGYDFGIVDALLTNFHLPKSTLLMLISALAGQDYIMRAYEEAVREQYRFFSFGDAMLIY

SEQ ID NO: 69781 - protein, 342 aa, Paenibacillus wynnii
  misc_feature (1)..(342): tr|A0A098M8A4|A0A098M8A4_9BACL S-adenosylmethionine:tRN A ribosyltransferase-isomerase OS=Paenibacillus wynnii OX=268407 GN=queA PE=3 SV=1
MNVDAYDFYLPEELIAQTPLPDRSSSRLLTVNRQNGDMSHRHFTDIVDELQAGDTLVLNDTRVIPARLFGIKEDTGAKAEVLLLKDLGDDRWEALVKPGKKLKTGAVIVFGEELRAVVEEEEDMGGRTLRFIYKGIFQEILDRLGTMPLPPYIKETLDDRERYQTVYARHEGSAAAPTAGLHFTKELMEQLTAKGVNITYITLHVGLGTFRPMSVERVEEHVMHAEYFSFSQETADILNAAMNRGSRIIAVGTTSCRTLETVGNLCEGGPLKECNGWTDIFIYPGYSFKVVNALITNFHLPKSTLVMLVSALAGRDHILDAYKEAIAEKYRFFSFGDAMFIY

SEQ ID NO: 69782 - protein, 352 aa, Paenibacillus xerothermodurans
  misc_feature (1)..(352): tr|A0A2W1N3X1|A0A2W1N3X1_9BACL S-adenosylmethionine:tRN A ribosyltransferase-isomerase OS=Paenibacillus xerothe rmodurans OX=1977292 GN=queA PE=3 SV=1
MQVDEFDYELPESLIAQTPLKDRTASRLLTLNKTDGTVKHQSFSELIDYLQAGDVLVLNDTRVLPARLFGVKPDTGAKAEVLLLKQLEGDRWEALVRPGKRMKTGAVIVFGGTGDTGAETPLLTATVEEEGELGGRVLRFEYNGIFQELLDRLGHMPLPPYIKEQLPERERYQTVYAKHEGSAAAPTAGLHFTKEYLEEIERKGIRLAYVTLHVGLGTFRPVSVDEVESHHMHEEYYEVGEEAAKLINDAKAGGHRVVAVGTTSARTLETAARESEVPGTIQPCSGWTGIFIYPGYSFLIVDALLTNFHLPKSTLLMLISALAGKDRVLAAYREAVERKYRFFSFGDAMFIY

SEQ ID NO: 69783 - protein, 342 aa, Paenibacillus xylanexedens
  misc_feature (1)..(342): tr|A0A3N6BZP7|A0A3N6BZP7_9BACL S-adenosylmethionine:tRN A ribosyltransferase-isomerase OS=Paenibacillus xylanex edens OX=528191 GN=queA PE=3 SV=1
MNVNLYDFELPEQLIAQTPLLDRTASRLLTLNKDSGEINHQTFPDIIDFLNPGDTLILNDTRVLPARLFGTKEDTGAKAEVLLLKNVEGDKWEALVKPGKKLKAGSVIVFGDELKAIIEEEGEMGARTLTFTYDGIFQEILDRLGEMPLPPYIKETLDDRERYQTVYAKHEGSAAAPTAGLHFTDELLDQIRAKGVNVAFITLHVGLGTFRPMSVDVVEDHVMHEEYYSLSQETADLINQTKENGHRVFAVGTTSCRTLETVGSKFENGILQASSGWTSIFIYPGYSFKVIDGMLTNFHLPKSTLVMLVSALAGREHIMQAYEEAIQEKYRFFSFGDAMLIY

SEQ ID NO: 69784 - protein, 342 aa, Paenibacillus xylanexedens
  misc_feature (1)..(342): tr|A0A1L5LVF1|A0A1L5LVF1_9BACL S-adenosylmethionine:tRN A ribosyltransferase-isomerase OS=Paenibacillus xylanex edens OX=528191 GN=queA PE=3 SV=1
MNVNLYDFELPEQLIAQTPLLDRTASRLLTLNKDSGEINHQTFPDIIDFLNPGDTLILNDTRVLPARLFGTKEDTGAKAEVLLLKNVEGDKWEALVKPGKKLKAGSVIVFGDELKAIIEEEGEMGARTLTFTYDGIFQEILDRLGEMPLPPYIKETLDDRERYQTVYAKHEGSAAAPTAGLHFTDDLLDQIRAKGVNVAFITLHVGLGTFRPMSVDVVEDHVMHEEYYSLSQETADLINQTKENGHRVFAVGTTSCRTLETVGSKFENGILQASSGWTSIFIYPGYSFKVIDGMLTNFHLPKSTLVMLVSALAGREHIMQAYEEAIQEKYRFFSFGDAMLIY

SEQ ID NO: 69785 - protein, 342 aa, Paenibacillus yonginensis
  misc_feature (1)..(342): tr|A0A1B1N220|A0A1B1N220_9BACL S-adenosylmethionine:tRN A ribosyltransferase-isomerase OS=Paenibacillus yongine nsis OX=1462996 GN=queA PE=3 SV=1
MDVELYDFELPEHLIAQTPLLDRTASRLLTLNKETGHIEHHQFSHILEELKPGDTLVLNDTRVLPARLFGTKEDTGAKAEVLLLKNLSGDKWETLVKPGKKLKKGSVIVFGDELKAVVEEEGEMGGRVLNFQYSGIFNEILDRLGQMPLPPYIKEKLEDKERYQTVYARHEGSAAAPTAGLHFTQELLDQIKAKGVTIAFVTLHVGLGTFRPMSVDRVEDHVMHEEYYILPQETADILNETKARGGRVVAVGTTSARTLETVAGKCEDGKIVKSSGWTGIFIYPGYQFRLVDCLITNFHLPKSTLVMLVSALAGRERILKAYQEAIEREYRFFSFGDAMLIY

SEQ ID NO: 69786 - protein, 338 aa, Paeniclostridium sordellii
  misc_feature (1)..(338): tr|T0E6Z9|T0E6Z9_PAESO S-adenosylmethionine:tRNA ribosy ltransferase-isomerase OS=Paeniclostridium sordellii AT CC 9714 OX=1292036 GN=queA PE=3 SV=1
MKTSDFYFDLPEELIAQTPLEDRSNSRLMVLDKETGDIEHKIFKNIIDYLNPGDCLVLNNTRVIPARLIGEKVDTGGKIEFLLLKRTDKDIWQALVKPGKRAKVGTKFSFGNGKLIGEVVGLAEEGSRLVKFYYEGIFEEVLDELGNMPLPPYITERLQERERYQTVYSKHNGSAAAPTAGLHFTEELLEKIKAKGVDIAFVTLHVGLGTFRPVKVDDVLDHEMHSEYYMVEKEAADKINKAKKNGNKVICVGTTSCRTVESASNENGEISEISGWTNIFIYPGYKFKVVDRLITNFHLPESTLIMLVSALSSKDAVLNAYCKAVEENIDSLVLGMLC

SEQ ID NO: 69787 - protein, 341 aa, Paeniclostridium sordellii
  misc_feature (1)..(341): tr|A0A0C7PVU7|A0A0C7PVU7_PAESO S-adenosylmethionine:tRN A ribosyltransferase-isomerase OS=Paeniclostridium sord ellii OX=1505 GN=queA PE=3 SV=1
MKTSDFYFDLPEELIAQTPLEDRSNSRLMVLDKETGDIEHKIFKNIIDYLNPGDCLVLNNTRVIPARLIGEKVDTGGKIEFLLLKRTDKDIWQALVKPGKRAKVGTKFSFGNGKLIGEVVGLAEEGSRLVKFYYEGIFEEVLDELGNMPLPPYITERLQERERYQTVYSKHNGSAAAPTAGLHFTEELLEKIKAKGVDIAFVTLHVGLGTFRPVKVDDVLDHEMHSEYYMVEKEAADKINKAKKNGNKVICVGTTSCRTVESASNENGEISETSGWTNIFIYPGYKFKVVDRLITNFHLPESTLIMLVSALSSKDAVLNAYCKAVEEKYRFFSFGDAMLIK

SEQ ID NO: 69788 - protein, 350 aa, Paenimaribius caenipelagi
  misc_feature (1)..(350): tr|A0A547Q9K7|A0A547Q9K7_9RHOB S-adenosylmethionine:tRN A ribosyltransferase-isomerase OS=Paenimaribius caenipe lagi OX=2489174 GN=queA PE=3 SV=1
MRLSDFDFDLPDDLIATRPARPRSSARMLVSEGGRLTDASVIDLPRWLQPGDRLVLNDTKVIPARLSGLRHREGGSGARIEATLLEPRADGTWQALIKPLKRVRDGEEIVFSHQLSARLEGRGDGAAFLRFNLVGDDFDAALAEAGAMPLPPYIAAKRPADTQDKEDYQTVWARAPGAVAAPTASLHFDDALLAALAQRGVAFTHVTLHVGAGTFLPVKVDDISEHKMHAEWGEVTEAAAAEIMATRAAGGRIIPVGTTALRLIESAATSPGAIKAWRGDTDIFITPGFRFQLADGLMTNFHLPKSTLMMLVSALMGVEEIRALYAHAIESRYRFFSYGDASLLLPAGSR

SEQ ID NO: 69789 - protein, 355 aa, Paenirhodobacter enshiensis
  misc_feature (1)..(355): tr|A0A086Y0K4|A0A086Y0K4_9RHOB S-adenosylmethionine:tRN A ribosyltransferase-isomerase OS=Paenirhodobacter ensh iensis OX=1105367 GN=queA PE=3 SV=1
MKLEDFDFHLPEGLIATRPARPRTAARLLLAEGDRITDRHVYDLVDIFQPGDRLILNNTKVIPARLTGTRTRATGQGEVSAKIEVTLLEPGADGSWSALAKPLRKLKPGETVVFSDTLSAEVTEIAEAQLRLKFNLTGPDFDAALNAAGAMPLPPYIAALRAPDEADKTDYQTVFARHSGAVAAPTASLHFTRELLEAIHAKGVEFTEVTLHVGAGTFLPVKVDDVEKHHMHSEWGEVTEQAAAEMNATRAAGGRIIPVGTTALRLIESAAAEDGTMRPFRGTTDIFIYPGYRFRMTDALMTNFHLPKSTLVMLVSALMGTERIRRIYAHAVETGYRFFSYGDSSLLIPGPRARD

SEQ ID NO: 69790 - protein, 352 aa, Paenisporosarcina antarctica
  misc_feature (1)..(352): tr|A0A4P6ZZ28|A0A4P6ZZ28_9BACL S-adenosylmethionine:tRN A ribosyltransferase-isomerase OS=Paenisporosarcina ant arctica OX=417367 GN=queA PE=3 SV=1
MQVKDFDFQLPEELIAQTPLADRTSSKLLVLDKDSGEISHHTFKDIVNEFQAGDCLVLNDTRVLPARLLGVKEETGANIEILLLKQTEEDVWETLVKPAKRVKIGTMVSFGEGLLRAQCVGEADHGGRLFKFTYEGIFYEILDQLGEMPLPPYIREKLDDQDRYQTVFAKERGSAAAPTAGLHFTDVLLDEIRSNGVEVVFLTLHVGLGTFRPMSVESIDDHEMHSEFYRLSKETVETINRVKESGGRIISVGTTSTRTLETVANKFNGQLKEDSGWTSIFIFPGYEFLCIDGLITNFHLPKSTLVMLVSALTSRDKILHAYEQAVEHQYRFFSFGDAMFIRPSANQKGVRA

SEQ ID NO: 69791 - protein, 346 aa, Paenisporosarcina quisquiliarum
  misc_feature (1)..(346): tr|A0A1H7YWA5|A0A1H7YWA5_9BACL S-adenosylmethionine:tRN A ribosyltransferase-isomerase OS=Paenisporosarcina qui squiliarum OX=365346 GN=queA PE=3 SV=1
MRVEDFDFELPEELIAQTPLLDRTSSKLLIADFEKQSYTHTHFKEILNELNEGDCLVLNDTKVMPARLMGMKEETGANVEVLLLTQIEGDHWETLVKPAKRVKIGTEITFGEGLLKAVCTGIKDHGGRIFRFEYKGVFFEVLDQLGEMPLPPYIHEKLENKDRYQTVYAKEQGSAAAPTAGLHFTDALLDEIRLKGVKIAFVTLHVGLGTFRPVSVDSIDDHEMHSEFYRITQETADVINKVKAIGGKVVAVGTTSTRTLETVATKYDGQLQADSGWTSIFIYPGYEFKCIDGMITNFHLPKSTLVMLVSALTSRDFILGAYKEAVDLKYRFFSFGDAMFIKGRNY

SEQ ID NO: 69792 - protein, 352 aa, Paenisporosarcina sp.
  misc_feature (1)..(352): tr|A0A2T6KBM0|A0A2T6KBM0_9BACL S-adenosylmethionine:tRN A ribosyltransferase-isomerase OS=Paenisporosarcina sp. OV554 OX=2135694 GN=queA PE=3 SV=1
MQVEDFDFHLPEELIAQTPLADRTSSKLLVLDKDSGEVSHHTFKDILHEFQAGDCLVLNDTRVLPARLMGIKEETGANIEILLLKQTEEDVWETLVKPSKRVKIGTVVSFGEGLLRAQCVGEANHGGRLFKFTYEGIFYEILDQLGDMPLPPYIREKLDDKDRYQTVFAKERGSAAAPTAGLHFTDELLDDIKSMGVEVVFITLHVGLGTFRPVSVDSIDDHEMHSEFYRLSKETADTINRVKAAGGRVISVGTTSTRTLETVANKFNGQLQEDSDWTSIFIFPGYEFKCIDGLITNFHLPKSTLVMLVSALTSRDKILHAYEQAITHNYRFFSFGDAMFIRPSANQKGVRA

SEQ ID NO: 69793 - protein, 352 aa, Paenisporosarcina sp.
  misc_feature (1)..(352): tr|S2XWG1|S2XWG1_9BACL S-adenosylmethionine:tRNA ribosy ltransferase-isomerase OS=Paenisporosarcina sp. HGH0030 OX=1078085 GN=queA PE=3 SV=1
MQVEDFDFYLPEELIAQTPLADRTSSKLLVLDKDSGEVTHHTFKHIVDEFQAGDCLVLNDTRVLPARLMGVKEETGANIELLLLKQTEEDVWESLVKPAKRVKIGTVVSFGEGLLRAECVGEANHGGRLFKFTYDGIFYEILDQLGDMPLPPYIREKLDDKDRYQTVFAKERGSAAAPTAGLHFTDDLLNEIRAKGVEVVFITLHVGLGTFRPVSVDSIDDHEMHSEFYRLSQETADTINRVKTSGGRIISVGTTSTRTLETVANKFNGQLQEDNGWTSIFIFPGYEFKCIDGLITNFHLPKSTLVMLVSALTSRDKILNAYKQAVNHQYRFFSFGDAMFIRPSANQKGVRA

SEQ ID NO: 69794 - protein, 363 aa, Pajaroellobacter abortibovis
  misc_feature (1)..(363): tr|A0A1L6MWB5|A0A1L6MWB5_9DELT S-adenosylmethionine:tRN A ribosyltransferase-isomerase OS=Pajaroellobacter abor tibovis OX=1882918 GN=queA PE=3 SV=1
MHVSDFHYDLSEDLIAQTPLPEREKGRLLYIPPARGPFVHSVIRDLTRFIPQGSLVITNDTRVIPARLHGRKKQTGGAVEILLLHPTEKNDFALRGPQEEKWQAIGKASNPIQAGTHVEISPDLLIIVERKEAGGVLEIKIQSQGKMTVTQAIQAYGKTPLPPYIKRPLHPNDPIDYQTIFAKSEGAVAAPTAGLHFTPALVQQLHAHGCTLMSLSLHIGLGTFQPVTADDFNQHPMHAERLHIPLDTITSLLRAKQEKNPIVAIGTTVVRALESAASTILGEKCTSPIEQETRLLIQPGYRFRMADMLFTNFHLPRSTLLALVCAFGGKERVLAAYREAVTQRYRFYSYGDAMLLSRSASSW

SEQ ID NO: 69795 - protein, 351 aa, Palleronia abyssalis
  misc_feature (1)..(351): tr|A0A2R8BUA2|A0A2R8BUA2_9RHOB S-adenosylmethionine:tRN A ribosyltransferase-isomerase OS=Palleronia abyssalis OX=1501240 GN=queA PE=3 SV=1
MRLSDFDFDLPDDLIAVRPARPRSSARMLVAQGARITDAHAYDLPDWLRPGDRLVLNDTKVIPARLTGRRVRDGGEGAKIEVTLLEPRAEGTWTALLKPLKKVRDGEVVWFSEGFSATVEGRDSGQATLRFNLDGDDFDAALAAAGAMPLPPYIAAKRAADVADREDYQTVWARHQGAVAAPTASLHFDEALLQALADRGVGFTHVTLHVGAGTFLPVKVDDIRDHKMHAEWGEVSQQAAAEIMETKRRGGRVIPVGTTALRLIETAATDHGVIAPWHGNTDIFITPGFSFRIADALMTNFHLPKSTLMMLVSAFLGVDEIRAVYDHAIAQCYRFVSYGDASLLIPEDRPA

SEQ ID NO: 69796 - protein, 361 aa, Palleronia marisminoris
  misc_feature (1)..(361): tr|A0A1Y5RHF3|A0A1Y5RHF3_9RHOB S-adenosylmethionine:tRN A ribosyltransferase-isomerase OS=Palleronia marisminor is OX=315423 GN=queA PE=3 SV=1
MRLSDFDFDLPDDLIATRPARPRSSARLLVAEGCRITDAVVSDLPDWLRPGDRLVLNDTKVIPARLSGTRHRDGNAARVEATLLEPKADGTWGALLKPLKKVHDGEEILFSDALSAVVEGRGDGQARLRFNLAGEDFDAALADAGAMPLPPYIAAKRAADAQDREDYQTVWAKHQGAVAAPTASLHFDDALLDALRDRGVAFTHVTLHVGAGTFLPVKVDDIADHKMHAEWGEVGAEAAAEIMETIRAGGRIIPVGTTALRLIETAATAPREIAAWTGETDIFITPGFRFRVADALMTNFHLPKSTLMMLVSAFLGTDEIRRVYGHAIAERYRFFSYGDASLLLPGSEDGDRMRNADTNDA

SEQ ID NO: 69797 - protein, 405 aa, Paludibacter jiangxiensis
  misc_feature (1)..(405): tr|A0A161L7R0|A0A161L7R0_9BACT S-adenosylmethionine:tRN A ribosyltransferase-isomerase OS=Paludibacter jiangxie nsis OX=681398 GN=queA PE=3 SV=1
MTRRPQQIDIDEYNYLLPDERIAKFPLAERDASKLLIYNKGNISESRFRNLVDYLPEKTLLVRNNTRVVQARVLFFKETGARIEVFCLEPHSPSDYAVAFQQREQCEWTCMIGNLKKWKEGALTRRFEVDGTSVTLTAERIDSSGLSHTVKFSWDSPSLTFADILEDVGELPIPPYLNRETEESDKETYQTVYAKIEGSVAAPTAGLHFTDAVLEDLEKHAIRSTEVTLHVGAGTFQPVKSKSIGDHTMHSEMISVTKDTLEELLRNLGSIVAVGTTSVRTLESLYFLGRQLILSPDTFQFQVKQWEPYNSTALYPSTEEALSALIDYMNAHKLQKLNAATQIIIAPGYKFRLISGMITNFHQPKSTLLLLISAFVGADWKKIYNYAFDNEFRFLSYGDSSLLLP

SEQ ID NO: 69798 - protein, 349 aa, Paludibacter jiangxiensis
  misc_feature (1)..(349): tr|A0A170YJ41|A0A170YJ41_9BACT S-adenosylmethionine:tRN A ribosyltransferase-isomerase OS=Paludibacter jiangxie nsis OX=681398 GN=queA PE=3 SV=1
MKLSQFKYKLPDELIALYPTKHRDESRLLVLHRKTGEIEHRTFNDILEYYNDQDVFVFNDTRVFPARLYGTKDNSEAKIEVFLLRELNHDLRMWDVLVDPARKIRVGNKLYFGENNLLVAEVIDNTTSRGRTVRFLYDGSYEEFRKTLYELGETPLPRFIKRDVEPEDETRYQTIFAKNEGAVVAPTAGLHFSRELLKRLEILGIDFAYVTLHAGLCNYREIDVEDLTKHKVDSEQMLVNQDAVGIINHAKDTNRKVCAVGTTVMRALETCACTNGTIKPYDGWTSKFIFPPYDFGVADSMIANFHLPYSPLLMLTCAFGGYDQVMGAYQKAVQEGYRFGIYGDAMLII

SEQ ID NO: 69799 - protein, 349 aa, Paludibacter propionicigenes
  misc_feature (1)..(349): tr|E4T3U4|E4T3U4_PALPW S-adenosylmethionine:tRNA ribosy ltransferase-isomerase OS=Paludibacter propionicigenes (strain DSM 17365 / JCM 13257 / WB4) OX=694427 GN=queA PE=3 SV=1
MKLSKFKFKLPDELIAQYPSKHRDESRLMVVHRKTGEIEHRAFKDVLEYFNENDLFIFNDTKVFPARLYGNKEKTGAQIEVFLLRELNHEMRLWDVLVEPARKIRIGNKLYFGEDDSIVAEVIDNTTSRGRTLRFLFDGTHDEFKKGLYSLGETPLPRNITREVEPEDADRFQTIFAKNEGAVSAPAAGMHFSRELLKRMEIKGIDSAYVTSHMSLGNFREIDVEDLTKHKMDSEQMSVSVETVKKVNEAQLANRNICAVGVTVMRALETVVGTEGKIKPYDGWTNKFIFPPYDFTVANSMITNFHLPYSTLIMLTAAFGDYDLIMKAYEIAVKEEYRFGVYGDAMLII

SEQ ID NO: 69800 - protein, 410 aa, Paludibacter propionicigenes
  misc_feature (1)..(410): tr|E4T4Q2|E4T4Q2_PALPW S-adenosylmethionine:tRNA ribosy ltransferase-isomerase OS=Paludibacter propionicigenes (strain DSM 17365 / JCM 13257 / WB4) OX=694427 GN=queA PE=3 SV=1
MNKTTQNAPIYIDEYDYSLPDERIAKYPLAQRDSSKLLLYKNGNIGESQFSKIADFLPENALLVYNNTRVIQARLIFHKNTGARIEVFCLEPLNPADYAQSLGATSECVWKCMVGNLKKWKEGLLSKTIAFDGKTCTFEAELLHTEGNTHSIHFRWDNADIHFADILEKAGELPIPPYLHRKTEESDLTSYQTVYSKIKGSVAAPTAGLHFTPEVFESLKPKLIETEELTLHVGAGTFQPVKTRDIAEHHMHTEIISVKRSTIVHLQQKLGNIIAVGTTSVRTLESLYFIGAMLQQDAVSEIAEKGFHVPQWAPYEGKMEISTYDALQNILDYLDKNKLTTLHADTQIMIKPGYEFHLIDGMVTNFHQPKSTLLLLVSAFVNGNWREIYHYALSNNFRFLSYGDSSLLMK

SEQ ID NO: 69801 - protein, 265 aa, Paludibacter sp.
  misc_feature (1)..(265): tr|A0A2G6QXN1|A0A2G6QXN1_9BACT S-adenosylmethionine:tRN A ribosyltransferase-isomerase (Fragment) OS=Paludibact er sp. OX=1898105 GN=CR965_01670 PE=3 SV=1
RELNPETHLWDVLVEPARKIRIGNKLYFGESENIVAEVIDNTTNRGRTLRFLYDGDHETFKRELYELGETPLPLSITRPVEPEDEANFQTIFAKNEGAIAAPAAGLHFSRELFKRMEIKGVESTFLTSHMNLGNFRGIDVEDLTKHKMDSEQIFINPETTETINKAKDDGVNVCAIGASVMRALETVVGTEGKIKSFEGWTNKFIFPEYEFGVAHSMVSNFNFPCSIFYMMASAFGGYKYVKKAYSIAVEEKYRFGVYGDALLIV

SEQ ID NO: 69802 - protein, 420 aa, Paludibacter sp.
  misc_feature (1)..(420): tr|A0A1M3MDZ8|A0A1M3MDZ8_9BACT S-adenosylmethionine:tRN A ribosyltransferase-isomerase OS=Paludibacter sp. 47-1 7 OX=1895899 GN=queA PE=3 SV=1
MSIGEYDYPLPDARIAKYPLQQRDASKLLIFSQGAVREDIFRNAAEYLPPGSLLVYNNTRVIRARMVFRKATGARIEVFCLEPAEPADYALSLGATGRCSWNCMIGNLKKWKGDDLWRELEIDGRRVQLKATRMEQAGNPPAAVQDESRNISSHRILFEWDNNNLCFADLLEQSGELPIPPYLNRPTEERDHESYQTVYSKIKGSVAAPTAGLHFTPEVLNDLRSKNIATEELTLHVGAGTFQPVKTDDVADHEMHAEVISVRRSTVERLLQHPGNIIAVGTTSVRTLESLYYLGVQLHEQGSGTARQEEKSTPNLLRVGQWDPYLRNPTLSTDDALRAILKHLDRNQLSSLQAQTQIMIRPGFRFRIIKGMFTNFHQPKSTLLLLVSAFTGAHWKTIYDYALANDFRFLSYGDSSLLLS

SEQ ID NO: 69803 - protein, 341 aa, Paludibacterium purpuratum
  misc_feature (1)..(341): tr|A0A4R7AZ48|A0A4R7AZ48_9NEIS S-adenosylmethionine:tRN A ribosyltransferase-isomerase OS=Paludibacterium purpu ratum OX=1144873 GN=queA PE=3 SV=1
MHISEFDYFLPERLIAQHPPTERGASRMLHVDGGALDDLMFADFFDQVQSGDVMVFNDTRVIKARLFGEKASGGQVEALIERVLDDHVALAHVRASKSPKPGTQLTFAGRWQAEMVERVGDLFKLRFLADTPLFDILAESGKLPLPPYIDRGADGEDDERYQTVYAREQGAVAAPTAGLHFTEEMLARLADKGVKLCRVTLHVGAGTFQPVRVDDIHEHKMHSEIYEIPETTRVEIAAARAAGRQVLAVGTTSLRALESAAQSGQLVAGRGETDIFITPGYRFRVVDRLLTNFHLPKSTLLMLVSAFAGMDTIRAAYLHAVAHEYRFFSYGDAMLLEKQRI

SEQ ID NO: 69804 - protein, 343 aa, Paludifilum halophilum
  misc_feature (1)..(343): tr|A0A235BCB8|A0A235BCB8_9BACL S-adenosylmethionine:tRN A ribosyltransferase-isomerase OS=Paludifilum halophilu m OX=1642702 GN=queA PE=3 SV=1
MDVSLFQFDLPEELIAQHPAPERSGSRLMVVDRAEEMIAHRRFTDLPEYLRPGDVLVLNDTRVRPSRLIGRKEETGARIEILLLNPLGKDRWETLVKPAKRIKKGTVVDFGEGKLKAVAEEESEVAGGRIFRLEYDVDDLESLLNELGEMPLPPYIREKLEEPERYQTVYSRRLGSAAAPTAGLHFTPELLKQVEQEGVEVASLTLHVGLGTFRPVTAERVEEHRMHAEYYELGGESAQKIRRAKREGRRVIAVGTTSVRTLETVHRRFGEIRPCNGWTDIFIYPGYTYRAVDAILTNFHLPQSTLLMMVSAFATRELILRAYRKAVEERYRFFSFGDAMLIL

SEQ ID NO: 69805 - protein, 138 aa, Paludisphaera borealis
  misc_feature (1)..(138): tr|A0A1U7CYU4|A0A1U7CYU4_9BACT S-adenosylmethionine:tRN A ribosyltransferase-isomerase OS=Paludisphaera boreali s OX=1387353 GN=queA PE=3 SV=1
MHVGVGTFRPIEAETLDAHVMHAEWAEIDAETAAILRDQRARGGRIVAVGTTSARTLETASASGTIQPFQGRTNLFIRPGHGFHAVDVLLTNFHLPRSSLLVLVSSLAGLDLMRRAYAEAVRERYRFFSYGDAMLIIS

SEQ ID NO: 69806 - protein, 341 aa, Panacagrimonas perspica
  misc_feature (1)..(341): tr|A0A4R7PBH9|A0A4R7PBH9_9GAMM S-adenosylmethionine:tRN A ribosyltransferase-isomerase OS=Panacagrimonas perspi ca OX=381431 GN=queA PE=3 SV=1
MKTSDFHYELPPELIAQLPAAERSASRLLHVGSELRDLRMTQLPDLLRAGDLLVFNDTRVLKARLQGRKDTGGRVEILVERVLGEREMRAQLGVSKTPKPGAFLHVDGEAGRLEVLGRDESFFHLRLEGDGTLHELLERAGRLPLPPYIRHDPDADDAERYQTVFAREPGAVAAPTAGLHFDTPLLAALEHRGVRTATLTLHVGAGTFQPVRVDDLSEHRMHAERYRIGQDLATRIADTRAVGGRIVAVGTTSVRALESAAEADGSLRVGEGETRIFITPGYRFRAVDALVTNFHLPESTLLMLVSAFGGIERMRAAYRHAVEQRYRFFSYGDAMLIEPSA

SEQ ID NO: 69807 - protein, 410 aa, Panacibacter ginsenosidivorans
  misc_feature (1)..(410): tr|A0A5B8V6N6|A0A5B8V6N6_9BACT S-adenosylmethionine:tRN A ribosyltransferase-isomerase OS=Panacibacter ginsenos idivorans OX=1813871 GN=FRZ67_06015 PE=3 SV=1
MHPKRLFIKDFLYKLPEERIAKYPLPQRDESKLLVYKDQSITEDTYYNLEKYIPGNSLLIFNNTKVVEARLLFQKSTGSIIEIFCLEPADIYADITTAMLQKGKVLWKCLIGGAKKWKDEPVIKIIKNDLKEFKFTAKKIEKFTDYFLIAFSWDDDSLSFAEVLHAAGSVPLPPYLNRTAEETDKERYQTIYAKYNGSVAAPTAGLHFTERLFQKLDQKNIQRDFVTLHVGAGTFKPVKAAIMEEHEMHTEFIDVRAALIENILQHIDKTVIAVGTTSLRTIESLYWLGVKTILNPTIYLESLQVYQWDAYDVDAENISAKDALQALLQWMKQHNLSSLITKTQIIIAPGYALKIAKALITNFHQPQSTLLLLVAAIIGDDWRRVYNYALENNFRFLSYGDGCLLYPVAV

SEQ ID NO: 69808 - protein, 349 aa, Panacibacter ginsenosidivorans
  misc_feature (1)..(349): tr|A0A5B8V7F1|A0A5B8V7F1_9BACT S-adenosylmethionine:tRN A ribosyltransferase-isomerase OS=Panacibacter ginsenos idivorans OX=1813871 GN=queA PE=3 SV=1
MKLSQFRFDLPLNLIAQNPTKRREDSRMMVVHRKTGNIENKHFKDILEYFDDKDVFVVNNTKVFPARMYGRKEKTGARIEVFLLRELNKPNRLWDVIVDPARKIRVGNKLYFGENDELVAEVIDNTTSRGRTIRFLWDNDDESFKKMLEFLGETPLPKYIKRKPDEEDRERYQTVYAKHEGAVAAPTAGLHFSQELIKRCEIKGIRFAEVTLHTGLGTFRPIEVEDLSKHKMDAEYYKIDEEACRIVNKAKETGHRICSIGTTTMRAMETSFTAQKLLKPSEGWTNIFIHPPYQFNVADSLVTNLHLPKTSLLIMVCAFAGYDLAMEAYKKAIKDKYRFFSYGDAMIVL

SEQ ID NO: 69809 - protein, 349 aa, Panacibacter sp.
  misc_feature (1)..(349): tr|A0A4U3KT71|A0A4U3KT71_9BACT S-adenosylmethionine:tRN A ribosyltransferase-isomerase OS=Panacibacter sp. 17mu d1-8 OX=2575867 GN=queA PE=3 SV=1
MKLSQFKFDLPLNLIAQHPTKRREDSRMMVIDRKTGNIENKHFRDILDYYDDKDVFVVNNTKVFPARMYGRKEKTGAKIEVFLLRELNKPNRLWDVIVDPARKIRVGNKLYFGDNDELVAEVIDNTTSRGRTIRFLWDNDEASFKQMLEFLGETPLPKYIKRKPDEEDKERFQTVYAKHEGAVAAPTAGLHFSRELIKRCEIKGIRFAELTLHTGLGTFRPIEVEDLSKHKMDAEYYRIDEEACKIVNKAKETGHRICSIGTTTMRAMETSFTAQQLLKPSEGWTNIFIHPPYKFNIADSLVTNIHLPKTSLLIMVCAFAGYDLTMEAYKKAIKDKYRFFSYGDAMLII

SEQ ID NO: 69810 - protein, 405 aa, Panacibacter sp.
  misc_feature (1)..(405): tr|A0A4U3KSH9|A0A4U3KSH9_9BACT S-adenosylmethionine:tRN A ribosyltransferase-isomerase OS=Panacibacter sp. 17mu d1-8 OX=2575867 GN=FC093_20560 PE=3 SV=1
MLPQEILIKEYTYHLPEERIAIHPLPERDRSKLLVYKSGKIDEHTYAQLADCLPADSLLVFNNTKVMAVRLHFTKHTGSTIELFCLEPADDYPDITTAMLQKGKVLWKCLVGGAKKWKEERLSCSKENMILTAKKVKQEKDYFIIEFEWNDTTLSFADVLQLLGTIPLPPYLNRVAEQEDEERYQTIYAKYNGSVAAPTAGLHFTENLFEKLQARGIQKDFVTLHVGAGTFKPVKTESIAEHDMHAEFIEVSTAFIEHLIQYLPKTIVAVGTTSLRTIESLYWMGVKVIGNENILAENISVMQWEAYHLPQDITPADALQSLLNWMKKMQIEKLITKTKILIAPGYQLRIAKALITNFHQPQSTLLLLIAAIVGDDWKRIYAYALANDFRFLSYGDGSLLWKREE

SEQ ID NO: 69811 - protein, 360 aa, Pandoraea apista
  misc_feature (1)..(360): tr|A0A0G4JGN8|A0A0G4JGN8_9BURK S-adenosylmethionine:tRN A ribosyltransferase-isomerase OS=Pandoraea apista OX=9 3218 GN=queA PE=3 SV=1
MYTLSDFDFDLPPELIAQTALAERTASRLLEVDGSVTPPHLYDRHFADLPGLLAPGDLLVFNDTRVIKARLFGQKASGGKIEVLVERVIDNRTALAQIRASKSPAPGTVLRLADAFDVTVGERVEPFYTLHFPEDCYTLLETYGRLPLPPYIEHDADAADETRYQTVYARNPGAVAAPTAGLHFDNALFARLDALGVQRAALTLHVGAGTFQPVRVENIGEHKMHSEWYEITPSLVDAVAATRARGGRVIAVGTTSMRALESAAQAALAAGGAPGTLRAGSAETDIFITPGYRFQLVDRLVTNFHLPKSTLLMLVSAFSGVETIRAAYRHAIEQRYRFFSYGDAMILSREELRDTPRAAA

SEQ ID NO: 69812 - protein, 360 aa, Pandoraea faecigallinarum
  misc_feature (1)..(360): tr|A0A0H3WXB1|A0A0H3WXB1_9BURK S-adenosylmethionine:tRN A ribosyltransferase-isomerase OS=Pandoraea faecigallin arum OX=656179 GN=queA PE=3 SV=1
MYTLSDFDFDLPPELIAQTALAERTASRLLEVDGSVTPPHLYDRHFADLPGLLAPGDLLVFNDTRVIKARLFGQKASCGKIEVLVERVVGTRTVLAQIRASKSPAPGTVLRLADAFEVTVGERVEPFYTLHFPADCYTLLETYGRLPLPPYIEHDADAADETRYQTVYARNPGAVAAPTAGLHFDDGLFARLDALGVERAALTLHVGAGTFQPVRVDNIGEHKMHSEWYEITPALVDAIAATRARGGRVIAVGTTSMRALESGAQAALANGGAPGALRAGSAETDIFITPGYRFQIVDRLITNFHLPKSTLLMLVSAFSGMETIRAAYRHAIEQRYRFFSYGDAMILSRVEIRHPPKAAA

SEQ ID NO: 69813 - protein, 360 aa, Pandoraea fibrosis
  misc_feature (1)..(360): tr|A0A0B3TGC6|A0A0B3TGC6_9BURK S-adenosylmethionine:tRN A ribosyltransferase-isomerase OS=Pandoraea fibrosis OX =1891094 GN=queA PE=3 SV=1
MYTLSDFDFDLPPELIAQTALAERTASRLLEVDGSVTPPHLYDRHFADLPGLLAPGDLLVFNDTRVIKARLFGQKASGGKIEVLVERVIDNRTALAQIRASKSPAPGTVLRLADAFEVTVGERVEPFYTLHFPEDCYTLLETYGRLPLPPYIEHDADAADETRYQTVYARNPGAVAAPTAGLHFDDALFARLDALGVQRAALTLHVGAGTFQPVRVENIGEHKMHSEWYEITPSLVDAVAATRARGGRVIAVGTTSMRALESAAQATLAAGGAPGTLRAGSAETDIFITPGYRFQLVERLVTNFHLPKSTLLMLVSAFSGVETIRAAYRHAIEQRYRFFSYGDAMILSRETLRDAPQAAA

SEQ ID NO: 69814 - protein, 360 aa, Pandoraea fibrosis
  misc_feature (1)..(360): tr|A0A5E4WWJ2|A0A5E4WWJ2_9BURK S-adenosylmethionine:tRN A ribosyltransferase-isomerase OS=Pandoraea fibrosis OX =1891094 GN=queA PE=3 SV=1
MYTLSDFDFDLPPELIAQTALAERTASRLLEVDGSVTPPHLYDRHFADLPGLLAPGDLLVFNDTRVIKARLFGQKASGGKIEVLVERVIDNRTALAQIRASKSPAPGTVLRLADAFEVTVGERVEPFYTLHFPEDCYTLLETYGRLPLPPYIEHDADAADETRYQTVYARNPGAVAAPTAGLHFDDALFARLDALGVQRAALTLHVGAGTFQPVRVENIGEHKMHSEWYEITPSLVDAVAATRARGGRVIAVGTTSMRALESAAQATLAAGGAPGTLRAGSAETDIFITPGYRFQLVERLVTNFHLPKSTLLMLVSAFSGVETIRAAYRHAIEQRYRFFSYGDAMILSRETLRDTPKAAA

SEQ ID NO: 69815 - protein, 360 aa, Pandoraea norimbergensis
  misc_feature (1)..(360): tr|A0A0U2IZ70|A0A0U2IZ70_9BURK S-adenosylmethionine:tRN A ribosyltransferase-isomerase OS=Pandoraea norimbergen sis OX=93219 GN=queA PE=3 SV=1
MYTLSDFDFDLPPELIAQTALAERSASRLLEVDGSVTPPHLYDRRFADLPGLLAPGDLLVFNDTRVIKARLFGQKASGGKIEVLVERVIDSTTVLAQIRASKSPGPGTVLRLADAFEVTVGARVDQFYTLHFPSDCYPLLETYGRLPLPPYIAHEADAGDETRYQTVYARNPGAVAAPTAGLHFDDALFERLDALGVQRATLTLHVGAGTFQPVRVENLGEHKMHSEWYEITPELVEAIAATRARGGRVIAVGTTSMRALESAAQATLAAGGEAGTLRAGSTETDIFITPGYRFQLVDRMITNFHLPKSTLLMLVSAFSGMETIRAAYRHAIEQRYRFFSYGDAMILSRVEMHEAPRAAA

SEQ ID NO: 69816 - protein, 360 aa, Pandoraea oxalativorans
  misc_feature (1)..(360): tr|A0A0E3U6L1|A0A0E3U6L1_9BURK S-adenosylmethionine:tRN A ribosyltransferase-isomerase OS=Pandoraea oxalativora ns OX=573737 GN=queA PE=3 SV=1
MYTLSDFDFDLPPELIAQTALTERSASRLLEVDGSVTPPHLYDRSFVDLPGLLAPGDLLVFNDTRVIKARLFGQKASGGKIEVLVERVIDNRTVLAQIRASKSPAPGTTLRLADAFDVMVGERVEPFYTLHFPEDCYTLLETYGRLPLPPYIEHDADAADETRYQTVYARNPGAVAAPTAGLHFDDALFARLDALGVQRATLTLHVGAGTFQPVRVDNIGEHKMHSEWYEITPALVDAIAATRARGGRVIAVGTTSMRALESGAQATLAAGGAPGTLRAGSAETDIFITPGYRFQLVDRLVTNFHLPKSTLLMLVSAFSGMETIRAAYRHAIEQRYRFFSYGDAMILSRVEIRDTPKAAA

SEQ ID NO: 69817 - protein, 360 aa, Pandoraea pnomenusa
  misc_feature (1)..(360): tr|A0A5E5AL34|A0A5E5AL34_9BURK S-adenosylmethionine:tRN A ribosyltransferase-isomerase OS=Pandoraea pnomenusa O X=93220 GN=queA PE=3 SV=1
MYTLSDFDFDLPPELIAQTALAERTASRLLEVDGSVTPPHLYDRRFADLPGLLAPGDLLVFNDTRVIKARLFGQKASGGKIEVLVERVIDSRTALAQIRASKRPGPGTVLRLADAFDVTVGERVEPFYTLHFPDDCYTLLETYGRLPLPPYIEHDADAADETRYQTVYARNPGAVAAPTAGLHFDDSLFARLDALGVQRATLTLHVGAGTFQPVRVENIDEHKMHAEWYEITPELVQAIAATRARGGRVIAVGTTSMRALESAAQAALVVGDAPGTLRAGSAETDIFITPGYRFQVVDRLITNFHLPKSTLLMLVSAFSGMETIRAAYRHAIEQRYRFFSYGDAMILSRVEMHDAPLAAA

SEQ ID NO: 69818 - protein, 360 aa, Pandoraea pnomenusa
  misc_feature (1)..(360): tr|A0A514AU69|A0A514AU69_9BURK S-adenosylmethionine:tRN A ribosyltransferase-isomerase OS=Pandoraea pnomenusa O X=93220 GN=queA PE=3 SV=1
MYTLSDFDFDLPPELIAQTALAERTASRLLEVDGSVTPPHLYDRRFADLPGLLAPGDLLVFNDTRVIKARLFGQKASGGKIEVLVERVIDSRTALAQIRASKRPGPGTVLRLADAFDVTVGERVEPFYTLHFPDDCYTLLETYGRLPLPPYIEHDADAADETRYQTVYARNPGAVAAPTAGLHFDDSLFARLDALGVQRATLTLHVGAGTFQPVRVENIDEHKMHAEWYEITPELVQAIAATRARGGRVIAVGTTSMRALESAAQAALVAGDAPGTLRAGSAETDIFITPGYRFQVVDRLITNFHLPKSTLLMLVSAFSGMETIRAAYRHAIEQRYRFFSYGDAMILSRVEMHDAPLAAA

SEQ ID NO: 69819 - protein, 360 aa, Pandoraea pulmonicola
  misc_feature (1)..(360): tr|A0A378Z2P6|A0A378Z2P6_9BURK S-adenosylmethionine:tRN A ribosyltransferase-isomerase OS=Pandoraea pulmonicola OX=93221 GN=queA PE=3 SV=1
MYTLSDFDFDLPPELIAQTALAERTASRLLEVDGRVTPPHLYDRHFADLPGLLAPGDLLVFNDTRVIKARLFGQKASGGKIEVLIERVIDNRTALAQIRASKSPAPGTVLRLADAFEVTVGERVEPFYTLHFPDDCYTLLETYGRLPLPPYITHDADAGDETRYQTVYARHPGAVAAPTAGLHFDDALFARLDALGVERATLTLHVGAGTFQPVRVENIGEHKMHAEWYEITPSLVNAIAAARARGGRVIAVGTTSMRALESGAQAALAAGAAPGSLRAGSAETDIFITPGYRFQLVDRLITNFHLPKSTLLMLVSAFSGMETIRAAYRHAIEQRYRFFSYGDAMILSREAVRHATKTAA

SEQ ID NO: 69820 - protein, 360 aa, Pandoraea sp.
  misc_feature (1)..(360): tr|A0A1Q4CIJ1|A0A1Q4CIJ1_9BURK S-adenosylmethionine:tRN A ribosyltransferase-isomerase OS=Pandoraea sp. 64-18 O X=1895806 GN=queA PE=3 SV=1
MYTLSDFDFDLPPELIAQTALTERTASRLLEVDGSVTPPHLYDRRFADLPSLLAPGDLLVFNDTRVIKARLFGQKASGGKIEVLVERVIDNRTVLAQIRASKSPTPGTVLHLADAFDVTVGERVEPFYTLHFPDDCYTLLETYGRLPLPPYIAHDADAADETRYQTVYARNPGAVAAPTAGLHFDDSLFAHLDALGVHRATLTLHVGAGTFQPVRVENIGEHKMHSEWYEITPSLVDAIAATRARGGRVVAVGTTSMRALESAAQATLAAGGAPGTLRAGSAETDIFITPGYHFQLVDRLITNFHLPKSTLLMLVSAFSGMETIRAAYRHAIEQRYRFFSYGDAMILSRVAPHDAPKAAA

SEQ ID NO: 69821 - protein, 361 aa, Pandoraea sp.
  misc_feature (1)..(361): tr|A0A522ERC3|A0A522ERC3_9BURK S-adenosylmethionine:tRN A ribosyltransferase-isomerase OS=Pandoraea sp. OX=1883 445 GN=queA PE=3 SV=1
MYTLSDFDFDLPGELIAQSALPQRSASRLLEVDACSDTPAPVLHDRNFSALPECLMPGDLLVFNDTKVLKARFFGQKASGGKVEVLIERVLDERTALAQIRASKSPGAGSTLRLADAFDVTVGERVEPFFTLHFPQDCYTLIEAHGRLPLPPYITHDATDYDETRYQTVFARHPGAVAAPTAALHFDDALLDQLDQRGIRRATLTLHVGAGTFQPVRVENIAEHRMHTEWYRLTQELLDAVAATRAAGGRVIAVGTTSMRALESAAQAALAAGQPPGTLQPGSAETDIFITPGYRFQVVDRLITNFHLPKSTLLMLVSAFSGIETIRAAYRHAIEQRYRFFSYGDAMLLTRQQSAAADSLQ

SEQ ID NO: 69822 - protein, 360 aa, Pandoraea sputorum
  misc_feature (1)..(360): tr|A0A5E5AUU7|A0A5E5AUU7_9BURK S-adenosylmethionine:tRN A ribosyltransferase-isomerase OS=Pandoraea sputorum OX =93222 GN=queA PE=3 SV=1
MYTLSDFDFDLPPELIAQTALTERTASRLLEVDGSVTPPHLYDRRFADLPGLLAPGDLLVFNDTRVIKARLFGQKASGGKIEVLVERVIDNRTVLAQIRASKSPAPGTVLHLADAFDVTVGERVEPFYTLHFPEDCYTLLETYGRLPLPPYIEHDADAADETRYQTVYARNPGAVAAPTAGLHFDDALFARLDALGVQRATLTLHVGAGTFQPVRVDNIGEHKMHSEWYEITPALVDAIAATRARGGRVIAVGTTSMRALESGAQATLAAGGAPGTLRAGSAETDIFITPGYRFQLVDRLVTNFHLPKSTLLMLVSAFSGMETIRAAYRHAIEQRYRFFSYGDAMILSRVEIQDTPKAAA

SEQ ID NO: 69823 - protein, 357 aa, Pandoraea sputorum
  misc_feature (1)..(357): tr|A0A5E5BJR9|A0A5E5BJR9_9BURK S-adenosylmethionine:tRN A ribosyltransferase-isomerase OS=Pandoraea sputorum OX =93222 GN=PSP31121_05588 PE=3 SV=1
MKTKLFDFDVTSRLMPDTPLPLRGKSRDDGRLVVLDRAADHIAHTHFPAILDYLHAGDLLVFNDSYVMPNALIFRAGQQQFPIIVHGSEPGGVYVIHVQSASCLPPGGLLTWVLNPALSAQLLSQQADGLWRARVSSAELLLGALEQYGSRQEETDNDGICTAPELWQRTPEHFRSVRAKTPGSLDIPSAGLHFSLDLLDRIRRKGVEIADITLHVGVSETFAVRHISADQVENHKVKAEYYNVGPEAAAQIGRAWREKRRIIAVGTTVMRTLESLEFDPRHGAVRAQSGWTDLYIYPGFNFRFVGALLTNLHQPRSSHIVLTSAFAGTDLTLRSYNEILNIGSYEFDMYGDSMLIV

SEQ ID NO: 69824 - protein, 355 aa, Pandoraea terrae
  misc_feature (1)..(355): tr|A0A5E4ZCW1|A0A5E4ZCW1_9BURK S-adenosylmethionine:tRN A ribosyltransferase-isomerase OS=Pandoraea terrae OX=1 537710 GN=queA PE=3 SV=1
MYTLSDFDFELPPELIAQTALADRTASRLLEVDGSTAPPCLTDRQFADLPACLAPGDLLVFNDTKVIKARLFGVKASGGKIEVLIERVLDNRTALAQIRASKSPPSGTTLRLADAFDVTVGERVEPFYTLHFPSDCYDLFETYGRLPLPPYITHDADAGDERRYQTVYARNPGAVAAPTAGLHFDDALFARLDAMGVGRATLTLHVGAGTFQPVRVDNIAEHKMHSEWYEITPALIDAVAAARAAGGRVIAVGTTSMRALESAAQAALAAGATPGTLHAGSRETDIFITPGYRFQIVDRLVTNFHLPKSTLLMLVSAFSGVDTIRAAYRHAIDAQYRFFSYGDAMLLSRVEPAAA

SEQ ID NO: 69825 - protein, 361 aa, Pandoraea thiooxydans
  misc_feature (1)..(361): tr|A0A0G3EVI7|A0A0G3EVI7_9BURK S-adenosylmethionine:tRN A ribosyltransferase-isomerase OS=Pandoraea thiooxydans OX=445709 GN=queA PE=3 SV=1
MYTLSDFDFDLPGELIAQSALPQRSASRLLEVDACSDTPAPVLHDRTFSALPECLTPGDLLVFNDTKVLKARFFGQKASGGKVEVLIERVLDERTALAQIRASKSPGPGSTLRLADAFDVTVGERVEPFFTLHFPQDCYALIEAHGRLPLPPYITHEATDYDETRYQTVFARHPGAVAAPTAALHFDDALLDQLDQRGIRRATLTLHVGAGTFQPVRVENIAEHQMHTEWYRLSPELLEAVTATRAAGGRVIAVGTTSMRALESAARAALAAGLPPGTLQPGSAETDIFITPGYRFQVVDRLITNFHLPKSTLMMLVSAFSGIETIRAAYRHAIEQRYRFFSYGDAMLLTRQQSAAADSLQ

SEQ ID NO: 69826 - protein, 360 aa, Pandoraea vervacti
  misc_feature (1)..(360): tr|A0A0C5KAH7|A0A0C5KAH7_9BURK S-adenosylmethionine:tRN A ribosyltransferase-isomerase OS=Pandoraea vervacti OX =656178 GN=queA PE=3 SV=1
MYTLSDFDFDLPPELIAQTALAQRTASRLLEVDGSVTPPHLYDRHFADLPGLLAPGDLLVFNDTRVIKARLFGQKASGGKIEVLVERVIDARTALAQIRASKSPAPGTVLRLADAFEVTVGERVEPFYTLHFPDDCYTLLEKYGRLPLPPYIEHDADAADETRYQTVYARNPGAVAAPTAGLHFDNDLFARLDTLEVQRATLTLHVGAGTFQPVRVDNIGEHKMHSEWYEITPALVDAIAATRARGGRVIAVGTTSMRALESGAQAVLAAGGAPGTLRAGSAETDIFITPGYRFQVVDRLITNFHLPKSTLLMLVSAFSGMETIRAAYRHAIEQRYRFFSYGDAMILSRVEMQDTPKAAA

SEQ ID NO: 69827 - protein, 372 aa, Pannonibacter indicus
  misc_feature (1)..(372): tr|A0A0K6HXX8|A0A0K6HXX8_9RHOB S-adenosylmethionine:tRN A ribosyltransferase-isomerase OS=Pannonibacter indicus OX=466044 GN=queA PE=3 SV=1
MRVDDFDFDLPPERIALRPARPRDAARMLLVRPQGGPVLEDRGVLDLPALLQPGDALVFNNTKVIPAQLEGTRQRGDAIATIGATLHLRAGADRWWAFVRPAKKLVPGDRVRFGSQSEGMACMAGVLDAAVAEKKDTGEVLLVFDLSGPDLDAAIHATGHIPLPPYIAAKRGEDAQDREDYQTIYAEKEGAVAAPTAGLHFTPRLFEMLDARGIERHTVTLHVGAGTFLPVKADDTDEHEMHAEWGEISGETAAALKAVRARGNKVVAVGTTSLRILESAAQGSGGLAAFRGETRIFITPGYRFRAIDALMTNFHLPRSTLFMLVSALSGLETMRAAYAHAIAGGYRFYSYGDSSLLFPAAGSIAAQDEIDR

SEQ ID NO: 69828 - protein, 372 aa, Pannonibacter phragmitetus
  misc_feature (1)..(372): tr|A0A0U3PMU2|A0A0U3PMU2_9RHOB S-adenosylmethionine:tRN A ribosyltransferase-isomerase OS=Pannonibacter phragmi tetus OX=121719 GN=queA PE=3 SV=1
MRVDDFDFDLPPERIALRPARPRDMARMLLVRPQGGPVLEDRGVLDLPALLQPGDALVFNNTKVIPAQLEGTRQRGEAIATIGATLHLRAGADRWWAFVRPAKKLVPGDRVRFGSQSEGMACMAGVLDATVAEKKDTGEVLFVFDLSGPDLDAAIHATGHIPLPPYIAAKRGEDAQDREDYQTIYAEKEGAVAAPTAGLHFTPRLFEMLDARGIERHTVTLHVGAGTFLPVKADDTDAHEMHAEWGEISGETAAALKTVRARGNKVVAVGTTSLRILESAAQGPGGLAAFRGETRIFITPGYRFRAIDALMTNFHLPRSTLFMLVSALSGLDTMRAAYAHAIADDYRFYSYGDSSLLFPAAGSIAAQDEIDR

SEQ ID NO: 69829 - protein, 400 aa, Pannonibacter phragmitetus
  misc_feature (1)..(400): tr|A0A378ZVB9|A0A378ZVB9_9RHOB S-adenosylmethionine:tRN A ribosyltransferase-isomerase OS=Pannonibacter phragmi tetus OX=121719 GN=queA PE=3 SV=1
MLRGRGGSDLPRPIACALAPTPLLKNRPMRVDDFDFDLPPERIALRPARPRDAARMLLVRPQGGPVLEDRGVLDLPALLQPGDALVFNNTKVIPAQLEGTRQRGEAIATIGATLHLRAGAGRWWAFVRPAKKLVPGDRVRFGAASEGVACMASVLDATVAEKKDTGEVLFVFDLSGPDLDAAIHATGHIPLPPYIAAKRGEDAQDREDYQTIYAEKEGAVAAPTAGLHFTPRLFEMLDARGIERHTVTLHVGAGTFLPVKADDTDEHEMHAEWGEISGETAAALKAVRARGNKVVAVGTTSLRILESAAQGPGGLAAFRGETRIFITPGYRFRAIDALMTNFHLPRSTLFMLVSALSGLETMRAAYAHAIADGYRFYSYGDSSLLFPAAGSIAAHDETDR

SEQ ID NO: 69830 - protein, 356 aa, Pantoea alhagi
  misc_feature (1)..(356): tr|A0A1W6B1D0|A0A1W6B1D0_9GAMM S-adenosylmethionine:tRN A ribosyltransferase-isomerase OS=Pantoea alhagi OX=189 1675 GN=queA PE=3 SV=1
MRVADFSFELPESLIAHYPQPQRSGCRLLSLNGPDGALSHGVFTDVLDKLNPGDLLVFNNTRVIPARVYGRKASGGKIEMLVERMLDDKRVLAHVRASKAPKPGAELLFGDDESVRATMIARHDALFEIQFDDERDVLDILNAIGHMPLPPYIDRPDEEADRELYQTVYSQKPGAVAAPTAGLHFDEPLLAALREKGVEMAFVTLHVGAGTFQPVRVDSIEDHIMHSEYAEVPQEVVDAVLACKARGNRVVAVGTTSVRSLESAAQAAQDALIAPFFDDTQIFIYPGYRYQIIDALITNFHLPESTLIMLVSAFAGYRHTMNAYREAVAEQYRFFSYGDAMFITRNPQAPEEKVGG

SEQ ID NO: 69831 - protein, 356 aa, Pantoea allii
  misc_feature (1)..(356): tr|A0A2V2BHV6|A0A2V2BHV6_9GAMM S-adenosylmethionine:tRN A ribosyltransferase-isomerase OS=Pantoea allii OX=5740 96 GN=queA PE=3 SV=1
MRVADFAFELPESLIAHYPQAQRSGCRLLSLDGTSGALSHGVFTDVLDKLQPGDLLVFNNTRVIPARVFGRKASGGKIEMLVERMLDDKRVLAHVRASKAPKPGAALLLGDDESVNATMVARHDALFEIAFEDDRAVLDILNSVGHMPLPPYIDRPDEEADRELYQTVYSARPGAVAAPTAGLHFDEPLIQALKDKGVEMAFVTLHVGAGTFQPVRVETIEEHHMHAEYAEVPQEVVDAVLACKARGNKVVAVGTTSVRSLESAAKASQDALIAPFFDDTQIFIYPGYEYQVIDALITNFHLPESTLIMLVSAFAGYQHTMAAYRAAVAEEYRFFSYGDAMFISKNPQAPREKVGA

SEQ ID NO: 69832 - protein, 356 aa, Pantoea allii
  misc_feature (1)..(356): tr|A0A4S3BKK6|A0A4S3BKK6_9GAMM S-adenosylmethionine:tRN A ribosyltransferase-isomerase OS=Pantoea allii OX=5740 96 GN=queA PE=3 SV=1
MRVADFAFELPESLIAHYPQAQRSGCRLLSLDGPSGAVSHGVFTDVLDKLNPGDLLVFNNTRVIPARVFGRKASGGKIEMLVERMLDDKRVLAHVRASKAPKPGAELLLGEDESVKATMVARHDALFEIVFDDERAVLDILNSVGHMPLPPYIDRPDEEADRELYQTVYSARPGAVAAPTAGLHFDEPLLQALKEKGIEMAFVTLHVGAGTFQPVRVETIEEHHMHAEYAEVPQEVVDAVLACKARGNKVVAVGTTSVRSLESAAKASHDALIAPFFDDTQIFIYPGYEYQVIDALITNFHLPESTLIMLVSAFAGYQHTMAAYRAAVAEQYRFFSYGDAMFISKNPQAPLEKVGD

SEQ ID NO: 69833 - protein, 356 aa, Pantoea ananas
  misc_feature (1)..(356): tr|A0A2S8A0B6|A0A2S8A0B6_PANAN S-adenosylmethionine:tRN A ribosyltransferase-isomerase OS=Pantoea ananas OX=553 GN=queA PE=3 SV=1
MRVADFAFELPESLIAHYPQAQRSGCRLLSLDGPSGALSHGVFTDVLDKLNPGDLLVFNNTRVIPARVFGRKASGGKIEMLVERMLDDKRVLAHVRASKAPKPGAELLLGEDESVKATMVARHDALFEIVFDDERAVLDILNSVGHMPLPPYIDRPDEEADRELYQTVYSARPGAVAAPTAGLHFDEPLLQALKEKGVEMAFVTLHVGAGTFQPVRVETIEEHHMHAEYAEVPQEVVDAVLACKARGNKVVAVGTTSVRSLESAAKASQDALIAPFFDDTQIFIYPGYEYQVIDALITNFHLPESTLIMLVSAFAGYQHTMAAYHAAVAEQYRFFSYGDAMFISKNPQAPLEKVGD

SEQ ID NO: 69834 - protein, 356 aa, Pantoea ananas
  misc_feature (1)..(356): tr|A0A2V2Y9A4|A0A2V2Y9A4_PANAN S-adenosylmethionine:tRN A ribosyltransferase-isomerase OS=Pantoea ananas OX=553 GN=queA PE=3 SV=1
MRVADFAFELPESLIAHYPQAQRSGCRLLSLDGPSGALAHGVFTDVLDKLQPGDLLVFNNTRVIPARVFGRKASGGKIEMLVERMLDDKRVLAHVRASKAPKPGAELLLGDDESVKATMVARHDALFEIAFEDDRAVLDILNSVGHMPLPPYIDRPDEEADRELYQTVYSARPGAVAAPTAGLHFDEPLIQALKDKGVEMAFVTLHVGAGTFQPVRVETIEEHHMHAEYAEVPQEVVDAVLACKARGNKVVAVGTTSVRSLESAAKASQDALIAPFFDDTQIFIYPGYEYQVIDALITNFHLPESTLIMLVSAFAGYQHTMAAYRAAVAEEYRFFSYGDAMFISKNPQAPLEKVGA

SEQ ID NO: 69835 - protein, 356 aa, Pantoea ananatis; identical to SEQ ID NO: 69834
  misc_feature (1)..(356): tr|A0A0H3KXJ1|A0A0H3KXJ1_PANAA S-adenosylmethionine:tRN A ribosyltransferase-isomerase OS=Pantoea ananatis (str ain AJ13355) OX=932677 GN=queA PE=3 SV=1

SEQ ID NO: 69836 - protein, 367 aa, Pantoea ananatis
  misc_feature (1)..(367): tr|D4GL83|D4GL83_PANAM S-adenosylmethionine:tRNA ribosy ltransferase-isomerase OS=Pantoea ananatis (strain LMG 20103) OX=706191 GN=queA PE=3 SV=1
MPPVFLSKKSFMRVADFAFELPESLIAHYPQAQRSGCRLLSLDGPSGALAHGVFTDVLDKLQPGDLLVFNNTRVIPARVFGRKASGGKIEMLVERMLDDKRVLAHVRASKAPKPGAELLLGDDESVKATMVARHDALFEIAFEDDRAVLDILNSVGHMPLPPYIDRPDEEADRELYQTVYSARPGAVAAPTAGLHFDEPLIQALKDKGVEMAFVTLHVGAGTFQPVRVETIEEHHMHAEYAEVPQEVVDAVLACKARGNKVVAVGTTSVRSLESAAKASQDALIAPFFDDTQIFIYPGYEYQVIDALITNFHLPESTLIMLVSAFAGYQHTMAAYRAAVAEEYRFFSYGDAMFISKNPQAPLEKVGA

SEQ ID NO: 69837 - protein, 356 aa, Pantoea anthophila
  misc_feature (1)..(356): tr|A0A506P6P1|A0A506P6P1_9GAMM S-adenosylmethionine:tRN A ribosyltransferase-isomerase OS=Pantoea anthophila OX =470931 GN=queA PE=3 SV=1
MRVADFAFELPESLIAHYPQAQRSGCRLLSLDGPSGALTHGVFTDVLDKLNPGDLLVFNNTRVIPARVFGRKASGGKIEMLVERMLDDKRVLAHVRASKAPKPGAALLLGEDESVKATMVARHDALFEIEFDDERAVLDILNSVGHMPLPPYIDRPDEEADRELYQTVYSARPGAVAAPTAGLHFDEPLLQALKEKGIEMAFVTLHVGAGTFQPVRVETIEEHHMHAEYAEVPQEVVDAVLACKARGNKVVAVGTTSVRSLESAAKASQDALIAPFFDDTQIFIYPGYEYQVIDALITNFHLPESTLIMLVSAFAGYQHTMAAYRAAVAEQYRFFSYGDAMFISKNPQAPLEKVGD

SEQ ID NO: 69838 - protein, 357 aa, Pantoea coffeiphila
  misc_feature (1)..(357): tr|A0A2S9IID9|A0A2S9IID9_9GAMM S-adenosylmethionine:tRN A ribosyltransferase-isomerase OS=Pantoea coffeiphila O X=1465635 GN=queA PE=3 SV=1
MRVADFSFELPESLIAHYPQAQRSGCRLLSLNGEDGALTHGVFTDLLDKLNPGDLLVFNNTRVIPARIFGRKASGGKIEVLIERMLDDKRVLAHVRSSKSPKPGSALLLGEDESVQATMTARHDTLFEIEFNDPRAVLDILNDIGHMPLPPYIDRPDEEVDRELYQTVYSQKPGAVAAPTAGLHFDEPLLAALREKGIETAFVTLHVGAGTFQPVRVDSIEDHIMHAEYAEVPQDVVDAVLACKARGNRVIAVGTTSVRSLESAAQAAGDALIAPFFGDTKIFIYPGYHYQVIDALVTNFHLPESTLIMLVSAFAGYKNTMHAYQQAVAQEYRFFSYGDAMFITRNSQACHEIPGQG

SEQ ID NO: 69839 - protein, 356 aa, Pantoea conspicua
  misc_feature (1)..(356): tr|A0A1X1BYG5|A0A1X1BYG5_9GAMM S-adenosylmethionine:tRN A ribosyltransferase-isomerase OS=Pantoea conspicua OX= 472705 GN=queA PE=3 SV=1
MRVADFAFELPESLIAHYPQAQRSGCRLLSLDGPSGALTHGVFTDVLDKLNPGDLLVFNNTRVIPARVFGRKASGGKIEMLVERMLDDKRVLAHVRASKAPKPGAALLLGEDESVKATMVARHDALFEIVFDDERAVLDILNSVGHMPLPPYIVRPDEEADRELYQTVYSARPGAVAAPTAGLHFDEPLLQALKEKGVEMAFVTLHVGAGTFQPVRVDNIEEHHMHAEYAEVPQEVVDAVLACKARGNKVVAVGTTSVRSLESAAKASQDALIAPFFDDTQIFIYPGYHYQVIDALITNFHLPESTLIMLVSAFAGYQHTMAAYRAAVAEQYRFFSYGDAMFISKNPQAPMEKVGD

SEQ ID NO: 69840 - protein, 356 aa, Pantoea cypripedii
  misc_feature (1)..(356): tr|A0A1X1ES26|A0A1X1ES26_PANCY S-adenosylmethionine:tRN A ribosyltransferase-isomerase OS=Pantoea cypripedii OX =55209 GN=queA PE=3 SV=1
MRVADFAFELPESLIAHYPQAQRSGCRLLSLDGPSGALSHGVFTDVLDKLNPGDLLVFNNTRVIPARVFGRKASGGKIEMLVERMLDDKRVLAHVRASKAPKPGTELLLGDDESVKATMVARHDALFEIVFEDDRAVLDILNSVGHMPLPPYIDRPDEDADRELYQTVYSARPGAVAAPTAGLHFDEPLLEALKAKGVEMAFVTLHVGAGTFQPVRVETIEDHTMHAEYAEVPQDVVDAVLACKARGNKVVAVGTTSVRSLESAAQASKDALIAPFFDDTQIFIYPGYQYQVIDALITNFHLPESTLIMLVSAFAGYQHTMAAYHAAVAEQYRFFSYGDAMFITRNMNAPDESVGI

SEQ ID NO: 69841 - protein, 356 aa, Pantoea deleyi
  misc_feature (1)..(356): tr|A0A506Q3E7|A0A506Q3E7_9GAMM S-adenosylmethionine:tRN A ribosyltransferase-isomerase OS=Pantoea deleyi OX=470 932 GN=queA PE=3 SV=1
MRVADFAFELPESLIAHYPQAQRSGCRLLSLEGPSGNLSHGVFTDVLDKLNPGDLLVFNNTRVIPARVFGRKASGGKIEMLVERMLDDKRVLAHVRASKAPKPGAELLLGEDESVKATMVARHDALFEIAFDDDRAVLDILSSVGHMPLPPYIDRPDEEADRELYQTVYSARPGAVAAPTAGLHFDEPLLQALKEKGVEMAFVTLHVGAGTFQPVRVETIEEHHMHAEYAEVPQEVVDAVLACKARGNRVVAVGTTSVRSLESAAKASQDALIAPFFDDTQIFIYPGYEYQVIDALITNFHLPESTLIMLVSAFAGYQHTMAAYRAAVAEQYRFFSYGDAMFISKNPQAPLEKVGD

SEQ ID NO: 69842 - protein, 356 aa, Pantoea dispersa
  misc_feature (1)..(356): tr|A0A518XAF6|A0A518XAF6_9GAMM S-adenosylmethionine:tRN A ribosyltransferase-isomerase OS=Pantoea dispersa OX=5 9814 GN=queA PE=3 SV=1
MRVADFAFELPESLIAHYPQAQRSGCRLLSLDGPSGALSHGVFTDVLDKLNPGDLLVFNNTRVIPARVYGRKASGGKIEMLVERMLDDKRVLAHVRASKAPKPGTELLLGDDESVRATMVARHDALFEIAFADDRAVLDILNSVGHMPLPPYIDRPDEEADRELYQTVYSARPGAVAAPTAGLHFDEPLLAALKAKGIEMAFVTLHVGAGTFQPVRVENINDHIMHSEYAEVPQDVVDAVLACKARGNKVVAVGTTSVRSLESAAQACQDGLIAPFFDDTQIFIYPGYHYQVIDALITNFHLPESTLIMLVSAFAGYKHTMAAYQSAVAEQYRFFSYGDAMYITRNPQAPDETVGA

SEQ ID NO: 69843 - protein, 356 aa, Pantoea dispersa
  misc_feature (1)..(356): tr|A0A437T8G3|A0A437T8G3_9GAMM S-adenosylmethionine:tRN A ribosyltransferase-isomerase OS=Pantoea dispersa OX=5 9814 GN=queA PE=3 SV=1
MRVADFAFELPESLIAHYPQAQRSGCRLLSLDGPSGALNHGVFTDVLDKLNPGDLLVFNNTRVIPARVYGRKASGGKIEMLVERMLDDKRVLAHVRASKAPKPGAELLLGDDESVKATMLARHDALFEIEFADDRAVLDILNSVGHMPLPPYIDRPDEEADRELYQTVYSARPGAVAAPTAGLHFDEPLLAALKAKGVEMAFVTLHVGAGTFQPVRVENINDHIMHSEYAEVPQDVVDAVLACKARGNKVVAVGTTSVRSLESAAQACQDGLIAPFFDDTQIFIYPGYHYQVIDALITNFHLPESTLIMLVSAFAGYQHTMAAYQSAVAEQYRFFSYGDAMYITRNPQAPDEIVGG

SEQ ID NO: 69844 - protein, 356 aa, Pantoea eucalypti; identical to SEQ ID NO: 69833
  misc_feature (1)..(356): tr|A0A506PSN3|A0A506PSN3_9GAMM S-adenosylmethionine:tRN A ribosyltransferase-isomerase OS=Pantoea eucalypti OX= 470933 GN=queA PE=3 SV=1

SEQ ID NO: 69845 - protein, 356 aa, Pantoea latae
  misc_feature (1)..(356): tr|A0A1V9DI44|A0A1V9DI44_9GAMM S-adenosylmethionine:tRN A ribosyltransferase-isomerase OS=Pantoea latae OX=1964 541 GN=queA PE=3 SV=1
MRVADFTFELPESLIAHYPQAQRSGCRLLSLDGPSGQLTHGVFTDVLEKLNPGDLLVFNNTRVIPARVFGRKASGGKIEMLVERMLDDKRVLAHVRASKAPKPGAQLLLGDDESVKATMVARHDTLFEIAFEDDRAVLDILNSVGHMPLPPYIDRPDEEADRELYQTVYSARPGAVAAPTAGLHFDEPLLAALRDKGVEMAFVTLHVGAGTFQPVRVDSIEEHVMHSEYAEVPQEVVDAVLACKARGNKVVAVGTTSVRSLESAAQASKEALIAPFFDDTQIFIYPGYQYQVIDALITNFHLPESTLIMLVSAFAGYQHTMAAYQAAVAEAYRFFSYGDAMFITKNPQAPTEKVGG

SEQ ID NO: 69846 - protein, 356 aa, Pantoea rodasii
  misc_feature (1)..(356): tr|A0A0B1R796|A0A0B1R796_9GAMM S-adenosylmethionine:tRN A ribosyltransferase-isomerase OS=Pantoea rodasii OX=10 76549 GN=queA PE=3 SV=1
MRVADFAFELPESLIAHYPQAQRSGCRLLALDGPSGALSHEVFTDVLDKLNPGDLLVFNNTRVIPARVYGRKASGGKIEMLVERMLDDKRVLAHVRASKAPKPGAELLLGDDESVTATMVARHDALFEIEFADDRAVLDILNSVGHMPLPPYIDRPDEEADRELYQTVYSARPGAVAAPTAGLHFDEPLLDALRAKGIEMAFVTLHVGAGTFQPVRVENINDHIMHSEYAEVPQDVVDAVLACKARGNKVVAVGTTSVRSLESAAKASQDALIAPFFDDTQIFIYPGYHYQVIDALITNFHLPESTLIMLVSAFAGYKNTMAAYQSAVAEQYRFFSYGDAMYITRNPQAPDEMVGA

SEQ ID NO: 69847 - protein, 356 aa, Pantoea rodasii
  misc_feature (1)..(356): tr|A0A2M9WAG2|A0A2M9WAG2_9GAMM S-adenosylmethionine:tRN A ribosyltransferase-isomerase OS=Pantoea rodasii OX=10 76549 GN=queA PE=3 SV=1
MRVADFAFELPESLIAHYPQAQRSGCRLLALDGPSGALGHEVFTDVLDKLNPGDLLVFNNTRVIPARVYGRKASGGKIEMLVERMLDDKRVLAHVRASKAPKPGAELLLGDDESVKATMVARHDTLFEIEFADDRAVLDILNSVGHMPLPPYIDRPDEEADRELYQTVYSARPGAVAAPTAGLHFDEPLLDALRAKGIEMAFVTLHVGAGTFQPVRVENINDHIMHSEYAEVPQDVVDAVLACKARGNKVVAVGTTSVRSLESAAKAAQDALIAPFFDDTQIFIYPGYHYQVIDALITNFHLPESTLIMLVSAFAGYKNTMAAYQSAVAEQYRFFSYGDAMYITRNPQAPDEVVGA

SEQ ID NO: 69848 - protein, 356 aa, Pantoea rwandensis
  misc_feature (1)..(356): tr|A0A1X1CU39|A0A1X1CU39_9GAMM S-adenosylmethionine:tRN A ribosyltransferase-isomerase OS=Pantoea rwandensis OX =1076550 GN=queA PE=3 SV=1
MRVADFAFELPESLIAHYPQAQRSGCRLLALDGPSGALSHEVFTDVLDKLNPGDLLVFNNTRVIPARVYGRKASGGKIEMLVERMLDDKRVLAHVRASKAPKPGAELLLGDDESVKATMVARHDTLFEIEFADDRAVLDILNSVGHMPLPPYIDRPDEEADRELYQTVYSARPGAVAAPTAGLHFDEPLLEALRAKGIEMAFVTLHVGAGTFQPVRVENINDHIMHSEYAEVPQDVVDAVLACKARGNKVVAVGTTSVRSLESAAKASQDALIAPFFDDTQIFIYPGYHYQVIDALITNFHLPESTLIMLVSAFAGYKNTMAAYQSAVAEQYRFFSYGDAMYITRNPQAPDEIVGA

SEQ ID NO: 69849 - protein, 356 aa, Pantoea sesami
  misc_feature (1)..(356): tr|A0A1M5LTA9|A0A1M5LTA9_9GAMM S-adenosylmethionine:tRN A ribosyltransferase-isomerase OS=Pantoea sesami OX=188 1110 GN=queA PE=3 SV=1
MRVADFSFELPESLIAHYPMPERSSCRLLSLDGPTGELTHGTFTDLLDKLNPGDLLVFNNTRVIPARLFGRKASGGKIEVLVERMLDDKRILAHIRASKAPKPGAELLLGDDESIKATMTARHDALFEVAFDDERTVLDILNAIGHMPLPPYIERPDEEADRELYQTVYSQKPGAVAAPTAGLHFDEPLLEKLRAKGVEMAFVTLHVGAGTFQPVRVDSIEDHIMHSEYAEVPQDVVDAVLAAKARGSRVVAVGTTSVRSLESAAQAAKSDLIEPFFGDTQIFIYPGYQYKVIDALVTNFHLPESTLIMLVSAFAGYQHTMAAYKSAVEQKYRFFSYGDAMFITYNPLALNERVGE

SEQ ID NO: 69850 - protein, 356 aa, Pantoea sp.
  misc_feature (1)..(356): tr|J2V573|J2V573_9GAMM S-adenosylmethionine:tRNA ribosy ltransferase-isomerase OS=Pantoea sp. YR343 OX=1144341 GN=queA PE=3 SV=1
MRVADFTFELPESLIAHYPQAQRSGCRLLSLDGPSGALSHGVFTDVMDKLNPGDLLVFNNTRVIPARVFGRKASGGKIEMLVERMLDDKRVLAHVRASKAPKPGAELLLGDDESVKATMVARHDTLFEIAFEDDRAVLDILNSVGHMPLPPYIDRPDEDADRELYQTVYGVRPGAVAAPTAGLHFDEPLLEALKVKGVEMAFVTLHVGAGTFQPVRVETIEDHIMHAEYAEVPQDVVDAVLACKARGNKVVAVGTTSVRSLESAAKASQDALIAPFFDDTQIFIYPGYHYQVIDALITNFHLPESTLIMLVSAFAGYQHTMAAYHSAVAEQYRFFSYGDAMYITRNPQAPDETVGA

SEQ ID NO: 69851 - protein, 356 aa, Pantoea sp.
  misc_feature (1)..(356): tr|A0A443I951|A0A443I951_9GAMM S-adenosylmethionine:tRN A ribosyltransferase-isomerase OS=Pantoea sp. LMG 27579 OX=1490476 GN=queA PE=3 SV=1
MRVADFSFVLPESLIAHYPQPQRSGCRLLSLDGPSGALTHGIFTDLLDKLNPGDLLVFNNTRVIPARIFGRKASGGKIEVLVERMLDDKRVLAHVRSSKSPKPGAELLLGEDENVRATMVARHDTLFEIVFDDTRAVLDILNAIGHMPLPPYIDRPDEDADRELYQTVYSQRPGAVAAPTAGLHFDEPLLAALREKGIEMAFVTLHVGAGTFQPVRVDSIEDHIMHAEYAEVPQDVVDAVLACKSRGNRVIAVGTTSVRSLESAAQAAKEALIAPFFDDTKIFIYPGYRYQVIDALVTNFHLPESTLIMLVSAFAGYRHTMYAYQQAVAEQYRFFSYGDAMFISHNPQALVEVVGN

SEQ ID NO: 69852 - protein, 356 aa, Pantoea stewartii
  misc_feature (1)..(356): tr|H3R877|H3R877_PANSE S-adenosylmethionine:tRNA ribosy ltransferase-isomerase OS=Pantoea stewartii subsp. stew artii DC283 OX=660596 GN=queA PE=3 SV=1
MRVADFAFDLPESLIAHYPQAQRSGCRLLSLDGPTGALTHGVFTDVLDKLQPGDLLVFNNTRVIPARVFGRKASGGKIEMLVERMLDDKRVLAHVRASKAPKPGAALLLGDDESVKATMVARHDALFEIAFDDDRDVLDILNRVGHMPLPPYIDRPDEEADRELYQTVYSARPGAVAAPTAGLHFDEPLLQALKDKGVEMAFVTLHVGAGTFQPVRVETIEDHHMHAEYAEVPQDVVDAVLACKARGNKVVAVGTTSVRSLESAAKASQDALIAPFFDDTQIFIYPGYEYQVIDALITNFHLPESTLIMLVSAFAGYQHTMAAYRAAVAEEYRFFSYGDAMFISKNPQAPLEKVGA

SEQ ID NO: 69853 - protein, 432 aa, Pantoea vagans
  misc_feature (1)..(432): tr|E1SF64|E1SF64_PANVC S-adenosylmethionine:tRNA ribosy ltransferase-isomerase OS=Pantoea vagans (strain C9-1) OX=712898 GN=queA PE=3 SV=1
MPSATGADQCWCGLPRTKSAIRLPSKELSASLARWRCARKFMPHYRLNCLCAASCSELVGFPLNCAACFCLRKNISMRVADFAFELPESLIAHYPQAQRSGCRLLSLDGPSGALSHGVFTDVLDKLNPGDLLVFNNTRVIPARVFGRKASGGKIEMLVERMLDDKRVLAHVRASKAPKPGAELLLGEDESVKATMVARHDALFEIAFDDERAVLDILNSVGHMPLPPYIDRPDEEADRELYQTVYSARPGAVAAPTAGLHFDEPLLQALKEKGIEMAFVTLHVGAGTFQPVRVETIEEHHMHAEYAEVPQEVVDAVLACKARGNKVVAVGTTSVRSLESAAKASQDALIAPFFDDTQIFIYPGYEYQVIDALITNFHLPESTLIMLVSAFAGYQHTMAAYHAAVAEQYRFFSYGDAMFISKNPQAPLEKVGD

SEQ ID NO: 69854 - protein, 356 aa, Pantoea vagans
  misc_feature (1)..(356): tr|A0A501SFL7|A0A501SFL7_9GAMM S-adenosylmethionine:tRN A ribosyltransferase-isomerase OS=Pantoea vagans OX=470 934 GN=queA PE=3 SV=1
MRVADFAFELPESLIAHYPQAQRSGCRLLSLDGPSGALSHGVFTDVLDKLNPGDLLVFNNTRVIPARVFGRKASGGKIEMLVERMLDDKRVLAHVRASKAPKPGAELLLGEDESVKATMVARHDALFEIVFDDERAVLDILNSVGHMPLPPYIDRPDEEADRELYQTVYSARPGAVAAPTAGLHFDEPLLQALKEKGVEMAFVTLHVGAGTFQPVRVETIEEHHMHEEYAEVPQEVVDAVLACKARGNKVVAVGTTSVRSLESAAKASQDALIAPFFDDTQIFIYPGYEYQVIDALITNFHLPESTLIMLVSAFAGYQHTMAAYHAAVAEQYRFFSYGDAMFISKNPQAPLEKVGD

SEQ ID NO: 69855 - protein, 356 aa, Pantoea wallisii
  misc_feature (1)..(356): tr|A0A1X1DCA1|A0A1X1DCA1_9GAMM S-adenosylmethionine:tRN A ribosyltransferase-isomerase OS=Pantoea wallisii OX=1 076551 GN=queA PE=3 SV=1
MRVADFAFELPESLIAHYPQAQRSGCRLLSLDGPSGALNHGVFTDVLDKLNPGDLLVFNNTRVIPARVYGRKASGGKIEMLVERMLDDKRVLAHVRASKAPKPGAELLLGDDESVKATMVARHDALFEIAFADDRAVLDILNSVGHMPLPPYIDRPDEEADRELYQTVYSARPGAVAAPTAGLHFDEPLLAALREKGVEMAFVTLHVGAGTFQPVRVENINDHIMHSEYAEVPQDVVDAVLACKARGNKVVAVGTTSVRSLESAAKACQDALLAPFFDDTQIFIYPGYHYQVIDALITNFHLPESTLIMLVSAFAGYKNTMAAYQSAVAEQYRFFSYGDAMYITRNPQAPDETVGS

SEQ ID NO: 69856 - protein, 341 aa, Papillibacter cinnamivorans
  misc_feature (1)..(341): tr|A0A1W2CGZ6|A0A1W2CGZ6_9FIRM S-adenosylmethionine:tRN A ribosyltransferase-isomerase OS=Papillibacter cinnami vorans DSM 12816 OX=1122930 GN=queA PE=3 SV=1
MKTSDFHFDLPPELIAQTPIANRDRSRLMTLDRETGETGHLFFYELPGLLRSGDCLVLNDSRVLPARLLGHREPGGGAVELVLLTDKGEGLWECLSRPGRKTRRGTELSFGDGMLRARVEEELPEGNRLVRFFHEGIFLEVLERLGTMPLPPYIRAELKDPERYQTVYSRQLGSAAAPTAGLHFTKELLGRLEARGIGLAYITLHVGLGTFRPVKVEDATKHHMHSEYCQIPAETARKVNETRARGGRILCVGTTSCRTLESFAAEDGSLSESSGWTDIFIYPGYRFKATDGLITNFHLPESTLIMLVSAFAGREHTLEAYRRAVEARYRFFSFGDAMLIL

SEQ ID NO: 69857 - protein, 406 aa, Parabacteroides acidifaciens
  misc_feature (1)..(406): tr|A0A3D8HD08|A0A3D8HD08_9BACT S-adenosylmethionine:tRN A ribosyltransferase-isomerase OS=Parabacteroides acidi faciens OX=2290935 GN=queA PE=3 SV=1
MTTKTQQIRIEDFDYPLPDERIAKFPLPKRDESKLLLYKEGKVGESIFKHITDYLPEGSLMVFNNTRVIQARLLFQKETGAKIEIFCLEPVEPHDYALVFQQTERCRWTCLVGNLKKWKEGLLTKMVQLDGETVTLKAEKLQTCGDSHLIEFSWDHPTCTFADLLDAAGVLPIPPYLNRETEKSDLQTYQTVYSKIKGSVAAPTAGLHFTPEVLVDIDAHGIGREELTLHVGAGTFKPVKSETIEGHEMHTEFISVRRSSIERIKQNLGKIIAVGTTSVRTLESLYYMGVTLASNPEATADELIVKQWMPYEETNNRLTADEALQNILDYLDRHQADKLVTATRIIIAPGYEFKIVRGIVTNFHQPKSTLLLLISAFVKGDWRNIYDYALAHDFRFLSYGDSSLLL

SEQ ID NO: 69858 - protein, 349 aa, Parabacteroides acidifaciens
  misc_feature (1)..(349): tr|A0A3D8HBW4|A0A3D8HBW4_9BACT S-adenosylmethionine:tRN A ribosyltransferase-isomerase OS=Parabacteroides acidi faciens OX=2290935 GN=queA PE=3 SV=1
MKLSKFKFNLPQELIALHPAKNRDESRLMVVNRKTGEIEHKVFKDLLDYFGKKDVFIFNNTKVFPARLYGNKEKTGARIEVFLLRELNEDLRLWDVLVDPARKIRIGNKLYFGEDDSMVAEVIDNTTSRGRTLRFLYDGNHDEFKKALYALGETPLPKYIDRPVEPEDEERYQNIFATEEGAVVAPAAGLHFSRELMKRLEIKDCQFTYLTLHSGLGNFREIDVEDLTKHKMDSEQMVVNADVVEVVNTAKDNGRQICAVGTSVMRAIETAVSTDGHLKEFEGWTNKFIFPPYDFSVASSMITNFHMPLSTLLMMTASFGGYEQIMDAYEVALKEKYSFGAYGDAMLIL

SEQ ID NO: 69859 - protein, 349 aa, Parabacteroides chartae
  misc_feature (1)..(349): tr|A0A1T5E0W5|A0A1T5E0W5_9BACT S-adenosylmethionine:tRN A ribosyltransferase-isomerase OS=Parabacteroides chart ae OX=1037355 GN=queA PE=3 SV=1
MKLSKFKFNLPSELIALQPAKNRDESRLMVVHRKTGEIEHRVFKDILEYFGPKDVFIFNNTKVFPARLYGNKEKTGARIEVFLLRELNEELRLWDVLVDPARKIRIGNKLYFGEDDSMVAEVIDNTTSRGRTLRFLFDGNHDEFKKALYALGETPLPKYIEREVEEDDEQRYQNIYASEEGAVVAPAAGLHFSRELMKRLEIKDCRFAFLTVHSGLGNFREIDVEDLTKHKMDSEQMVVNAEVVKTVNEAKDSNNQICAVGTSVMRAIETAVSTDGHLKEFEGWTNKFIFPPYDFSVATSMVTNFHMPLSTLLMMTASFGGYDLIMDAYDVALKEKYRFGAYGDAMLII

SEQ ID NO: 69860 - protein, 405 aa, Parabacteroides chartae
  misc_feature (1)..(405): tr|A0A1T5D547|A0A1T5D547_9BACT S-adenosylmethionine:tRN A ribosyltransferase-isomerase OS=Parabacteroides chart ae OX=1037355 GN=queA PE=3 SV=1
MTAKTEQIRIEEFNYPLPDERIAKFPLTKRDESKLLVYRNGKIDEAVFKQLSDYLPQGSMLVYNNTRVIQARMLFQKETGAQIEVFCLEPVIPHDYALVFQQTESCSWLCLVGNLKKWKEGALHKTIRMDDKEVVLSAERIKTTGDSHLVRFSWNNPQVTFAELLDAAGILPIPPYLHRETRESDLQTYQTVYSKIKGSVAAPTAGLHFTPEVLAGLDAKGFTREEVTLHVGAGTFKPVKSEVIGDHEMHTEFISVRRSAIENIRTNLGRIIAVGTTSVRTLESLYYMGRTLVNNPDATSEELVVTQWTPYHDTEEVTAHEALTALLDYLDRNQTDTLLSATQIMIAPGYEFKIVKGIITNFHQPKSTLLLLISAFVNGNWKSIYNYALDNDFRFLSYGDSSLLL

SEQ ID NO: 69861 - protein, 349 aa, Parabacteroides chinchillae
  misc_feature (1)..(349): tr|A0A1H5XBJ8|A0A1H5XBJ8_9BACT S-adenosylmethionine:tRN A ribosyltransferase-isomerase OS=Parabacteroides chinc hillae OX=871327 GN=queA PE=3 SV=1
MKLSKFKFNLPSEQIALHPTNNRDESRMMVVNRKTGEIEHHVFKDILNYFGEKDVFIFNNTKVFPARLYGNKEKTGARIEVFLLRELNEELRLWDVLVDPARKIRIGNKLYFGEDDSMVAEVIDNTTSRGRTLRFLYDGNHDEFKKALYALGETPLPKYIDRPVEADDEDRYQNIFATEEGAVVAPAAALHFSRELMKRLEIKDCRFAFLTLHSGLGNFREIDVEDLTKHKMDSEQMVVDTDVVNIVNTAKDDGHQICAVGTSVMRAVETAVSTDGHLKEFEGWTNKFIFPPYDFSVATSMVTNLHMPLSTLLMMTASFGGYDLIMDAYEVALKEGYRFGAYGDAMLIL

SEQ ID NO: 69862 - protein, 407 aa, Parabacteroides chinchillae
  misc_feature (1)..(407): tr|A0A1H5TCR4|A0A1H5TCR4_9BACT S-adenosylmethionine:tRN A ribosyltransferase-isomerase OS=Parabacteroides chinc hillae OX=871327 GN=SAMN05444001_10369 PE=3 SV=1
MATKTQQIRIEDYNYSLPDERIAKFPLPQRDESKLLLYRNGKISESIFKHITEYLPAGSLMVFNNTRVIQARLLFKKETGAQIEVFCLEPIEPHDYALVFQQTERCSWTCLVGNLKKWKEGLLSKTILINDTPVTLNAEKKHTCGDSHHIEFTWDNPSYTFADLLDAAGILPIPPYLHRETEKSDLQTYQTVYSKIKGSVAAPTAGLHFTPEVLADIDAHNIGREEVTLHVGAGTFKPVKSDTIEGHEMHTEFISVRRSSIERVKSNLGKIIAVGTTSVRTLESLYYIGVALANNPDASSDDLVVRQWMPYKEGNNRLTPTEALQNILDYLDSHHTDKLVTATQIIIAPGYEFKIVRGIVTNFHQPKSTLLLLISAFVQGNWKAIYDYALTHEFRFLSYGDSSLLIR

SEQ ID NO: 69863 - protein, 349 aa, Parabacteroides distasonis
  misc_feature (1)..(349): sp|A6LEL6|QUEA_PARD8 S-adenosylmethionine:tRNA ribosylt ransferase-isomerase OS=Parabacteroides distasonis (str ain ATCC 8503 / DSM 20701 / CIP 104284 / JCM 5825 / NCT C 11152) OX=435591 GN=queA PE=3 SV=1
MKLSKFKFNLPSELIALHPAKNRDESRLMVVHRDTGEIEHREFKDILDYYGKGDVFIFNNTKVFPARLYGNKEKTGARIEVFLLRELNEDLRLWDVLVDPARKIRIGNKLYFGEDDSMVAEVIDNTTSRGRTLRFLYDGNHDEFKKALYALGETPLPKYIEREVEPEDEDRYQNIFAAEEGAVVAPAAGLHFSRELMKRLEIKDCQFAFLTLHSGLGNFREIDVEDLTKHKMDSEQMVVNADVVDIVNKGKDEGHKVCAVGTSVMRAIETAVSTDGHLKEFEGWTNKFIFPPYDFSVATSMVTNFHMPLSTLLMMTASFGGYELIMDAYDIALKEKYRFGAYGDAMLIL

SEQ ID NO: 69864 - protein, 404 aa, Parabacteroides distasonis
  misc_feature (1)..(404): tr|A0A1Y4IEB4|A0A1Y4IEB4_9BACT S-adenosylmethionine:tRN A ribosyltransferase-isomerase OS=Parabacteroides dista sonis OX=823 GN=queA PE=3 SV=1
MKTQEIRIEDYNYSLPDERIAKFPLPKRDESKLLLYRNGEISESIFKHITDYLPQNTLMVFNNTRVIQARLLFQKETGARIEIFCLEPIEPHDYALIFQETRRCSWTCLVGNLKKWKEGTLSKTIFIKDEPVVLTADKKKSHGDTHLIEFIWDNEAYTFADILDAAGVLPIPPYLHRETEKSDLQTYQTVYSKIKGSVAAPTAGLHFTPEVLADIDARGIGREEVTLHVGAGTFKPVKSDTIEGHEMHTEFISVRRSSIERIKSNLGNIIAVGTTSVRTLESLYYMGVILDNNPEATSEDLVVKQWMPYDTNNNRLTAERSLQNILDYLDKHDADTLVTATQIIIAPGYEFKIVKGIVTNFHQPKSTLLLLISAFVKGNWKSIYEYALEHDFRFLSYGDSSLLL

SEQ ID NO: 69865 - protein, 405 aa, Parabacteroides goldsteinii
  misc_feature (1)..(405): tr|S0GR46|S0GR46_9BACT S-adenosylmethionine:tRNA ribosy ltransferase-isomerase OS=Parabacteroides goldsteinii d nLKV18 OX=1235789 GN=C803_02874 PE=3 SV=1
MVTKTQQISIEDYNYSLPDERIAKFPLPKRDESKLLLYRDGKVSESVFKHITDYLPEGSLMVFNNTRVIQARLLFQRATGAQIEVFCLDPAAPHDYELIFQQTEACNWICLIGNAKKWKEPVLSREITVAGQTVRLSAEKVQSYGETHQVRFSWDGGFSFAEVLDAAGELPIPPYLHRKTEESDLKTYQTVYSKIKGSVAAPTAGLHFTPEVLADLDAKGFGREELTLHVGAGTFKPVKSETIEGHEMHTEYISVRRSTIERVMQNFGKIIAVGTTSVRTLESLYYIGVTLATHPDATSEELVVRQWMPYEDANNRLTPTEALQNILDYLDKHQLNTLITATQIIIAPGYEFKVVKGIVTNFHQPKSTLLLLISAFVKGDWKNIYDYALGHDFRFLSYGDSSLLL

SEQ ID NO: 69866 - protein, 349 aa, Parabacteroides goldsteinii
  misc_feature (1)..(349): tr|A0A0J6CM36|A0A0J6CM36_9BACT S-adenosylmethionine:tRN A ribosyltransferase-isomerase OS=Parabacteroides golds teinii OX=328812 GN=queA PE=3 SV=1
MKLSKFKFNLPQELIALHPAKNRDESRLMVVHRNTGEIEHKVFKDLLEYFGEKDVFIFNNTKVFPARLYGNKEKTGARIEVFLLRELNEDLRLWDVLVDPARKIRIGNKLYFGEDDSMVAEVIDNTTSRGRTLRFLYDGNHDEFKKALYALGETPLPKYIDRPVEADDEDRYQNIFATEEGAVVAPAAGLHFSRELMKRLEIKDCRFAFLTVHSGLGNFREIDVEDLTKHKMDSEQMIVNGDVVSIVNEGKDDGRQICAVGTSVMRAIETAVSTDGHLKEFEGWTNKFIFPPYDFSVATSMITNFHMPLSTLLMMTASFGGYDLIMDAYEVALKEGYRFGAYGDAMLII

SEQ ID NO: 69867 - protein, 349 aa, Parabacteroides gordonii
  misc_feature (1)..(349): tr|A0A0F5JN62|A0A0F5JN62_9BACT S-adenosylmethionine:tRN A ribosyltransferase-isomerase OS=Parabacteroides gordo nii MS-1 = DSM 23371 OX=1203610 GN=queA PE=3 SV=1
MKLSKFKFNLPEDLIALHPAKNRDESRMMVVNRNTGEIEHKVFKDLLDYFGEKDVFIFNNTKVFPARLYGNKEKTGARIEVFLLRELNEDLRLWDVLVDPARKIRIGNKLYFGEDDSMVAEVIDNTTSRGRTLRFLYDGNHDEFKKALYALGETPLPKYIDRPVEPDDEDRYQNIFATEEGAVVAPAAGLHFSRELMKRLEIKDCRFAFLTVHSGLGNFREIDVEDLTKHKMDSEQMIVNGDVVDIVNKGKDDGRQICAVGTSVMRAIETAVSTDGHLKEFEGWTNKFIFPPYDFSVATSMITNFHMPLSTLLMMTASFGGYDLIMDAYEVALKEKYRFGAYGDAMLIL

SEQ ID NO: 69868 - protein, 405 aa, Parabacteroides gordonii
  misc_feature (1)..(405): tr|A0A0F5JC77|A0A0F5JC77_9BACT S-adenosylmethionine:tRN A ribosyltransferase-isomerase OS=Parabacteroides gordo nii MS-1 = DSM 23371 OX=1203610 GN=queA PE=3 SV=1
MVTKTQQISIEDYNYSLPDERIAKFPLPKRDESKLLLYRNGEVSESIFKQITEYLPEGSLMIFNNTRVIQARLLFQRATGAQIEVFCLDPSEPHDYELIFQETATCCWICLIGNAKKWKEPCLFREIEIDGQKVTLRAEKVQSYGETHQIRFSWDGGFSFAEVLDAAGELPIPPYLHRKTEESDLKTYQTVYSKIKGSVAAPTAGLHFTPEVLAELEAKGFGREELTLHVGAGTFKPVKSETIEGHEMHTEFISVRRSTIERVKQNLGKIIAVGTTSVRTLESLYYIGVALASNPEATSNELVVKQWMPYNEENNRLTPADALQNILDYLDKHQLKTLVTATQIIIAPGYEFKIVKGIVTNFHQPKSTLLLLISAFVKGDWKNIYDYALGHDFRFLSYGDSSLLL

SEQ ID NO: 69869 - protein, 406 aa, Parabacteroides johnsonii
  misc_feature (1)..(406): tr|K5ZM79|K5ZM79_9BACT S-adenosylmethionine:tRNA ribosy ltransferase-isomerase OS=Parabacteroides johnsonii CL0 2T12C29 OX=999419 GN=queA PE=3 SV=1
MTTQTQQIRIEDFDYPLPDERIAKFPLSKRDESKLLLYKEGKVSESIFKHITNYLPDGSLMVFNNTRVIQARLLFQKETGAKIEIFCLEPVEPHDYALVFQQTECCRWTCLVGNLKKWKEGFLKKEVQFGGETVILKAEKLQTCGDSHLIEFTWDHPTCTFADLLDAAGVLPIPPYLNRETEKSDLQTYQTVYSKIKGSVAAPTAGLHFTPEVLAAIDARGIGREELTLHVGAGTFKPVKSETIEGHEMHTEFISVRRSSIERIKNNLGKIIAVGTTSVRTLESLYYMGVTLASNPDATAEELIVKQWMPYDEMNNKLTAGEALQNILDYLDRHQADKLVTATRIIIAPGYEFKIVRGIVTNFHQPKSTLLLLISAFVKGDWKNIYDYALGHEFRFLSYGDSSLLL

SEQ ID NO: 69870 - protein, 349 aa, Parabacteroides johnsonii
  misc_feature (1)..(349): tr|K6A206|K6A206_9BACT S-adenosylmethionine:tRNA ribosy ltransferase-isomerase OS=Parabacteroides johnsonii CL0 2T12C29 OX=999419 GN=queA PE=3 SV=1
MKLSKFKFNLPQELIALHPAKNRDESRLMVVNRKTGEIEHKVFKDLLSYFGEKDVFIFNNTKVFPARLYGNKEKTGARIEVFLLRELNEDLRLWDVLVDPARKIRIGNKLYFGEDDSMVAEVIDNTTSRGRTLRFLYDGNHDEFKKALYALGETPLPKYIDRPVEPDDEDRYQNIFATEEGAVVAPAAGLHFSRELMKRLEIKDCQFAYLTLHSGLGNFREIDVEDLTKHKMDSEQMVVNGDVVNIVNTAKDNGRQICAVGTSVMRAIETAVSTDGHLKEFEGWTNKFIFPPYDFSVASSMITNFHMPLSTLLMMTASFGGYDLIMDAYEVALKEKYSFGAYGDAMLIL

SEQ ID NO: 69871 - protein, 406 aa, Parabacteroides merdae
  misc_feature (1)..(406): tr|A0A415P8U6|A0A415P8U6_9BACT S-adenosylmethionine:tRN A ribosyltransferase-isomerase OS=Parabacteroides merda e OX=46503 GN=queA PE=3 SV=1
MTIKTQQIRIEDFDYPLPDERIAKFPLPKRDESKLLLYKEGKVSESIFKHITDYLPEGSLMVFNNTRVIQARLLFQKETGAKIEIFCLEPVEPYDYALVFQQTECCRWTCLVGNLKKWKEGLLKKEVQLDGETVILKAEKLQTCGDSYLIEFTWDHPTCTFADLLDAAGVLPIPPYLNRETEKSDLQTYQTVYSKIKGSVAAPTAGLHFTPEVLAAIDAQGIGREELTLHVGAGTFKPVKSETIEGHEMHTEFISVRRSSIERIKNNLGKIIAVGTTSVRTLESLYYMGVTLASNPDATADELIVKQWMPYEETNNRLTADEALQNILDYLDRHQADKLVTATRIIIAPGYEFKIVRGIVTNFHQPKSTLLLLISAFVKGDWKNIYDYALRHDFRFLSYGDSSLLL

SEQ ID NO: 69872 - protein, 406 aa, Parabacteroides merdae
  misc_feature (1)..(406): tr|A0A3R5W5V1|A0A3R5W5V1_9BACT S-adenosylmethionine:tRN A ribosyltransferase-isomerase OS=Parabacteroides merda e OX=46503 GN=queA PE=3 SV=1
MTTKTQQIRIEDFDYPLPDERIAKFPLPKRDESKLLLYKEGKVSESIFKHITDYLPEGSLMVFNNTRVIQARLLFQKETGAKIEIFCLEPVEPHDYALVFQQTECCRWTCLVGNLKKWKEGLLKKEVQLDGETVILKAEKLQTCGDSYLIEFTWDHPTCTFADLLDAAGVLPIPPYLNRETEKSDLQTYQTVYSKIKGSVAAPTAGLHFTPEVLAAIDALGIGREELTLHVGAGTFKPVKSETIEGHEMHTEFISVRRSSIERIKNNLGKIIAVGTTSVRTLESLYYMGVTLASNPDATADELIVKQWMPYEETNNRLTADEALQNILDYLDRHQADKLVTATRIIIAPGYEFKIVRGIVTNFHQPKSTLLLLISAFVKGNWKNIYDYALRHDFRFLSYGDSSLLL

SEQ ID NO: 69873 - protein, 404 aa, Parabacteroides sp.
  misc_feature (1)..(404): tr|A0A3E4PHJ5|A0A3E4PHJ5_9BACT S-adenosylmethionine:tRN A ribosyltransferase-isomerase OS=Parabacteroides sp. 2 0_3 OX=469591 GN=queA PE=3 SV=1
MKTQEIRIEDYNYSLPDERIAKFPLPKRDESKLLLYRNGEISESIFKHISDYLPQNTLMVFNNTRVIQARLLFQKETGARIEIFCLEPIEPHDYALIFQETRRCSWTCLVGNLKKWKEGTLSKTIFIKDQPVVLTADKKKSHGDTHLIEFTWDNETYTFADILDAAGVLPIPPYLHRETEKSDLQTYQTVYSKIKGSVAAPTAGLHFTPEVLADIDARGIGREEVTLHVGAGTFKPVKSDTIEGHEMHTEFISVRRSSIERIKSNLGNIIAVGTTSVRTLESLYYMGVILDNNPEATSEDLVVKQWMPYDMNNNRLTTERSLQNILDYLDKHDADTLVTATQIIIAPGYEFKIVKGIVTNFHQPKSTLLLLISAFVKGNWKSIYEYALEHDFRFLSYGDSSLLL

SEQ ID NO: 69874 - protein, 349 aa, Parabacteroides sp.; identical to SEQ ID NO: 69863
  misc_feature (1)..(349): tr|C7XBF9|C7XBF9_9BACT S-adenosylmethionine:tRNA ribosy ltransferase-isomerase OS=Parabacteroides sp. D13 OX=56 3193 GN=queA PE=3 SV=1

SEQ ID NO: 69875 - protein, 352 aa, Paraburkholderia aromaticivorans
  misc_feature (1)..(352): tr|A0A248VFI1|A0A248VFI1_9BURK S-adenosylmethionine:tRN A ribosyltransferase-isomerase OS=Paraburkholderia arom aticivorans OX=2026199 GN=queA PE=3 SV=1
MLTLSDFDFDLPPQLIAQVALPERSASRLLEVANPAEAASPAHLIDRRFAELPDCIAPGDLLVFNDTKVLKARFLGQKASGGKIEVLVERLTGERTALAQIRASKSPQPGTTIRLADAFDVMVGERVEPFYTLHFPGDCLTLIEQFGRLPLPPYIEHDPDATDETRYQTVFAQNPGAVAAPTAGLHFDEALLARLDAQGVERATLTLHVGAGTFQPVRVENLAEHKMHSEWYHLPQSLADRIAATRARGNRVIAVGTTSMRALEAAARDAEAAGRPLAAASTETDIFITPGYKFRVVDRLVTNFHLPKSTLLMLVSAFAGVETIREAYRHAIEQRYRFFSYGDAMLLTRRDV

SEQ ID NO: 69876 - protein, 352 aa, Paraburkholderia aspalathi
  misc_feature (1)..(352): tr|A0A1I7EML1|A0A1I7EML1_9BURK S-adenosylmethionine:tRN A ribosyltransferase-isomerase OS=Paraburkholderia aspa lathi OX=1324617 GN=queA PE=3 SV=1
MFTLSDFDFDLPPELIAQVALPERSASRLLEVAHTADATDAAHLIDRRFAELPECIAPGDLLVFNDTKVLKARFLGQKASGGKIEVLVERLTGERTALAQIRASKSPQPGTTIRLADAFDVTVGERVEPFYTLHFPDDCLTLIEQFGRLPLPPYIEHDPDATDETRYQTVFAQNPGAVAAPTAGLHFDDALLARLDARGVERATLTLHVGAGTFQPVRVENLAEHKMHSEWYHLPQSLADKIAATRARGNRVIAVGTTSMRALEAAARDAEAAGRPLGAASTETDIFITPGYKFRVVDRLVTNFHLPKSTLLMLVSAFAGVETIREAYRHAIEQRYRFFSYGDAMLLTRRDA

SEQ ID NO: 69877 - protein, 353 aa, Paraburkholderia azotifigens
  misc_feature (1)..(353): tr|A0A5C6VTL8|A0A5C6VTL8_9BURK S-adenosylmethionine:tRN A ribosyltransferase-isomerase OS=Paraburkholderia azot ifigens OX=2057004 GN=queA PE=3 SV=1
MFTLSDFDFDLPPELIAQIALPERSASRLLEVNGQPTPATFTDRRFAELPDCIESGDLLVFNDTKVLKARFLGQKASGGKIEVLVERLTGERTALAQIRASKSPGPGTVLRLADAFDVTVGERVEPFYTLHFPDDCLTLIEQFGRLPLPPYIEHDPDAFDETRYQTVYAQNPGAVAAPTAGLHFDDSIFARLDAKGVERATLTLHVGAGTFQPVRVENIAEHKMHSEWYQLPQSLVDKIAATRARGNRVIAVGTTSMRALEAAARDAEAAGKPLAATSAETDIFITPGYRFRVVDRLVTNFHLPKSTLLMLVSAFAGIETIRAAYRHAIEERYRFFSYGDAMLLTRSEDALNA

SEQ ID NO: 69878 - protein, 356 aa, Paraburkholderia bryophila
  misc_feature (1)..(356): tr|A0A329BUR7|A0A329BUR7_9BURK S-adenosylmethionine:tRN A ribosyltransferase-isomerase OS=Paraburkholderia bryo phila OX=420952 GN=queA PE=3 SV=1
MFTLSDFDFDLPPELIAQVALPERSASRLLEVDNTADADHARLVDRRFAELPECIAPGDLLVFNDTKVLKARFLGQKASGGKVEVLVERLTGERTALAQIRASKSPQPGTTIRLADAFDVTLGERVEPFYTLHFPDDCLTLIEQFGRLPLPPYIEHDPDSTDETRYQTVFAQNPGAVAAPTAGLHFDNALLARLDAHGVERATLTLHVGAGTFQPVRVENLAEHKMHSEWYHLPQSLADKIAATRARGNRVIAVGTTSMRALEAAARDAAVAGRPLGAASTETDIFITPGYPFRVVDRLVTNFHLPKSTLLMLVSAFSGVETIRAAYRHAIEQRYRFFSYGDAMLLTRRDPTAETS

SEQ ID NO: 69879 - protein, 351 aa, Paraburkholderia caballeronis
  misc_feature (1)..(351): tr|A0A1H7I778|A0A1H7I778_9BURK S-adenosylmethionine:tRN A ribosyltransferase-isomerase OS=Paraburkholderia caba lleronis OX=416943 GN=queA PE=3 SV=1
MFKLSDFDFDLPAELIAQTALPERSASRLLEVDNLAQPPRLVDRRFAELPGCLAPGDLLVFNDTRVLKARFFGQKASGGKIEVLVERLTGARTALAQIRASKSPAPGTTLRLADAFDVTVGERVEPFYTLHFPDDCLTLIEQYGRLPLPPYITHDADATDETRYQTVFARNPGAVAAPTAGLHFDDALLARLDERGIERATLTLHVGAGTFQPVRVENIAEHQMHSEWYELPQSLVDRIAATRARGGRVVAVGTTSMRALEAAARDAENAGRPLAATAAETDIFITPGYRFRVVDRLVTNFHLPKSTLLMLVSAFAGMETIRAAYRHAIDERYRFFSYGDAMLLCRQEQAL

SEQ ID NO: 69880 - protein, 352 aa, Paraburkholderia caffeinilytica
  misc_feature (1)..(352): tr|A0A346BHM1|A0A346BHM1_9BURK S-adenosylmethionine:tRN A ribosyltransferase-isomerase OS=Paraburkholderia caff einilytica OX=1761016 GN=queA PE=3 SV=1
MFTLSDFDFDLPPELIAQVALPERSASRLLEVANTADAPDAARLIDRRFAELPECIAPGDLLVFNDTKVLKARFLGQKASGGKIEVLVERLTGERTALAQIRASKSPQPGTTIRLANAFDVTVGERVEPFYTLHFPDDCLTLIEQFGRLPLPPYIEHDPDATDETRYQTVFAQNPGAVAAPTAGLHFDDALLARLDARGVERATLTLHVGAGTFQPVRVENLAEHKMHSEWYHLPQSLADKIAATRARGNRVIAVGTTSMRALEAAARDAEAAGRPLGAASTETDIFITPGYPFRVVDRLVTNFHLPKSTLLMLVSAFAGVETIRAAYRHAIEQRYRFFSYGDAMLLTRRDV

SEQ ID NO: 69881 - protein, 355 aa, Paraburkholderia caledonica
  misc_feature (1)..(355): tr|A0A2Z5M8J6|A0A2Z5M8J6_9BURK S-adenosylmethionine:tRN A ribosyltransferase-isomerase OS=Paraburkholderia cale donica OX=134536 GN=queA PE=3 SV=1
MFKLSDFDFDLPPELIAQVALPERSASRLLQVDNAAHADGAARLVDRRFAELPECVSAGDLLVFNDTKVLKARFLGQKASGGKIEVLVERLTGERTALAQIRASKSPQEGTTIRLADAFDVTVGERVEPFYTLHFPDDCLTLIEQFGRLPLPPYIEHAPDSTDETRYQTVFAQNPGAVAAPTAGLHFDDALLARLDAAGVQRATLTLHVGAGTFQPVRVENLAEHKMHSEWYHLPQSLADKIAATKARGNRVLAVGTTSMRALEAAARDAEAAGRPLAAASTETDIFITPGYRFRVVDRLVTNFHLPKSTLLMLVSAFAGVETIRAAYRHAIEERYRFFSYGDAMLLTRRDDRAV

SEQ ID NO: 69882 - protein, 389 aa, Paraburkholderia caribensis
  misc_feature (1)..(389): tr|A0A0P0R7Z5|A0A0P0R7Z5_9BURK S-adenosylmethionine:tRN A ribosyltransferase-isomerase OS=Paraburkholderia cari bensis MBA4 OX=1323664 GN=queA PE=3 SV=1
MSRNHSRSTGAVVDAVESATRSSGGNPVKYRIKPVRMFTLSDFDFDLPPELIAQVALPERSASRLLEVNGQTSPATLADRRFADLPDCIESGDLLVFNDTKVLKARFIGQKASGGKIEVLIERLTGERTALAQIRASKSPGAGTVLRLADAFDVTVGERVEPFYTLHFPDDCLTLIEQFGRLPLPPYIEHDPDAFDETRYQTVYAQNPGAVAAPTAGLHFDDSIFARLDAKGVERATLTLHVGAGTFQPVRVENIAEHKMHSEWYRLPQSLVDKIAATKARGNRVIAVGTTSMRALEAAARDADAAGRPLAATSAETDIFITPGYRFRVVDRLVTNFHLPKSTLLMLVSAFAGIETIRAAYRHAIDERYRFFSYGDAMLLTRNDDALNA

SEQ ID NO: 69883 - protein, 353 aa, Paraburkholderia caribensis
  misc_feature (1)..(353): tr|A0A142YXP4|A0A142YXP4_9BURK S-adenosylmethionine:tRN A ribosyltransferase-isomerase OS=Paraburkholderia cari bensis OX=75105 GN=queA PE=3 SV=1
MFTLSDFDFDLPPELIAQVALPQRSASRLLEVNGQTSPATLADRRFADLPDCIESGDLLVFNDTKVLKARFIGQKASGGKIEVLIERLTGERTALAQIRASKSPGAGTVLRLADAFDVTVGERVEPFYTLHFPDDCLTLIEQFGRLPLPPYIEHDPDAFDETRYQTVYAQNPGAVAAPTAGLHFDDSIFARLDAKGVERATLTLHVGAGTFQPVRVENIAEHKMHSEWYQLPQSLVDRIAATKARGNRVIAVGTTSMRALEAAARDADAAGQPLAATSAETDIFITPGYRFRVVDRLVTNFHLPKSTLLMLVSAFAGIETIRAAYRHAIDERYRFFSYGDAMLLTRNDDALNA

SEQ ID NO: 69884 - protein, 353 aa, Paraburkholderia diazotrophica
  misc_feature (1)..(353): tr|A0A1H7D3R0|A0A1H7D3R0_9BURK S-adenosylmethionine:tRN A ribosyltransferase-isomerase OS=Paraburkholderia diaz otrophica OX=667676 GN=queA PE=3 SV=1
MFTLSDFDFDLPPELIAQVALPERSASRLLEVNGQTKPATFADRRFADLPDLIDAGDLLVFNDTKVLKARFLGQKASGGKIEVLVERLTGERTALAQIRASKSPGPGTTLRLADAFDVTVGERVEPFYTLHFPDDCLTLIEQFGRLPLPPYIEHDPDAFDETRYQTVYAQNPGAVAAPTAGLHFDDSIFARLDEKGVERATLTLHVGAGTFQPVRVENIAEHKMHSEWYQLPQSLADRIAATKARGNRVIAVGTTSMRALEAAARDAEAAGRPLAATSADTDIFITPGYGFRVVDRLVTNFHLPKSTLLMLVSAFAGIETIRAAYRHAIEERYRFFSYGDAMLLTRSDDALNA

SEQ ID NO: 69885 - protein, 352 aa, Paraburkholderia dipogonis
  misc_feature (1)..(352): tr|A0A4Y8N6J8|A0A4Y8N6J8_9BURK S-adenosylmethionine:tRN A ribosyltransferase-isomerase OS=Paraburkholderia dipo gonis OX=1211383 GN=queA PE=3 SV=1
MLTLSDFDFDLPPELIAQVALPERSASRLLEVDHPADAAGPARLIDRRFAELPECIAPGDLLVFNDTKVLKARFLGQKASGGKIEVLVERLTGERTALAQVRASKSPQPGTTIRLADAFDVTVGERVEPFYTLHFPNDCLTLIEQFGRLPLPPYIEHDPDSTDETRYQTVFAQNPGAVAAPTAGLHFDDALLGRLDEKGVERATLTLHVGAGTFQPVRVENLAEHKMHSEWYHLPQSLADKIAATRARGNRVIAVGTTSMRALEAAARDAEAAGRPLAAASTETDIFITPGYKFRVVDRLVTNFHLPKSTLLMLVSAFAGVETIRETYRHAIEQRYRFFSYGDAMLLTRRDA

SEQ ID NO: 69886 - protein, 353 aa, Paraburkholderia eburnea
  misc_feature (1)..(353): tr|A0A2S4MNZ3|A0A2S4MNZ3_9BURK S-adenosylmethionine:tRN A ribosyltransferase-isomerase OS=Paraburkholderia ebur nea OX=1189126 GN=queA PE=3 SV=1
MFKLSDFDFDLPEALIAQTALPERSASRLLVVDNAVQPARLTDRTFADLPACIAPGDLLVFNDTKVLKARFFGQKASGGKIEVLVERLTGARTALAQIRASKSPGPGTVLRLADAFDVTVGERVDPFYTLHFPDDCLTLIEQHGRLPLPPYITHDADASDETRYQTVFAQNPGAVAAPTAGLHFDDALLAKLDAMGVERATLTLHVGAGTFQPVRVENIAEHKMHSEWYQLPQSLVDKIAATRARGGRVIAVGTTSMRALEAAARDAAKENRPLAATQAETDIFITPGYRFRVVDRLVTNFHLPKSTLLMLVSAFAGIETIRAAYRHAIEERYRFFSYGDAMLLTRIEDALKA

SEQ ID NO: 69887 - protein, 350 aa, Paraburkholderia endofungorum
  misc_feature (1)..(350): tr|A0A2P5K9R6|A0A2P5K9R6_9BURK S-adenosylmethionine:tRN A ribosyltransferase-isomerase OS=Paraburkholderia endo fungorum OX=417203 GN=queA PE=3 SV=1
MYTLSDFDFNLPPELIAQHALPERSASRLLEVTPSGALLDHRFGELPACIEPGDLLVFNDTKVLKARFDGVKASGGRVEVLIERVTGLRTALAQIRASKRPAPGSTIRLAGAFDVSVGERVEPFHTLHFPHDCIELIDRYGRLPLPPYIEHSPDTYDEARYQTVFATTPGAVAAPTAGLHFDAPTLAALDARGVRRATLTLHVGAGTFQPVRTDDIAQHKMHSEWYHIPPALVEAIEATRAAGHSVIAVGTTSMRALEAAARDAERDGRELHAVHAETDIFITPGYQFRVIDRLVTNFHLPKSTLLMLVSAFAGVEPIRLAYRHAIAQRYRFFSYGDAMLLTRAASVAQP

SEQ ID NO: 69888 - protein, 349 aa, Paraburkholderia fungorum
  misc_feature (1)..(349): tr|A0A2N8QMI6|A0A2N8QMI6_9BURK S-adenosylmethionine:tRN A ribosyltransferase-isomerase OS=Paraburkholderia fung orum OX=134537 GN=queA PE=3 SV=1
MFTLSDFDFDLPPELIAQVALPERSASRLLEVDNTVNPARLTDRGFAELPECIAPGDLLVFNDTKVLKARFLGQKASGGKIEVLVERLTGERTALAQIRASKSPQPGTTIRLADAFDVTVGERVEPFYTLHFPDDCLTLIDQFGRLPLPPYIEHDPDSTDETRYQTVFAQNPGAVAAPTAGLHFDDALLARLNARGVERATLTLHVGAGTFQPVRVENIAEHKMHSEWYHLPQSLADKIAATRARGNRVIAVGTTSMRALEAAARDAEAAGRPLGAASTETDIFITPGYRFRVVDRLVTNFHLPKSTLLMLVSAFAGVDTIREAYRHAIEQRYRFFSYGDAMLLTRRDA

SEQ ID NO: 69889 - protein, 351 aa, Paraburkholderia fungorum
  misc_feature (1)..(351): tr|A0A1H0ZMX1|A0A1H0ZMX1_9BURK S-adenosylmethionine:tRN A ribosyltransferase-isomerase OS=Paraburkholderia fung orum OX=134537 GN=queA PE=3 SV=1
MLTLSDFDFDLPPELIAQVALPERSASRLLEVDNSVSADTARLIDRRFAELPECIAPGDLLVFNDTKVLKARFLGQKASGGKVEVLVERLTGERTALAQIRASKSPQPGTTIRLADAFDVTLGERVEPFYTLHFPDDCLTLIEQFGRLPLPPYIEHDPDSTDETRYQTVFAQNPGAVAAPTAGLHFDEALLAKLDAHGVERATLTLHVGAGTFQPVRVENLDEHKMHSEWYHLPQSLADKIAATKARGNRVIAVGTTSMRALEAAARDADAAGRPLGAASTETDIFITPGYKFRVVDRLVTNFHLPKSTLLMLVSAFAGVETIRAAYRHAIEQRYRFFSYGDAMLLTRRDD

SEQ ID NO: 69890 - protein, 352 aa, Paraburkholderia ginsengiterrae
  misc_feature (1)..(352): tr|A0A1A9N8L8|A0A1A9N8L8_9BURK S-adenosylmethionine:tRN A ribosyltransferase-isomerase OS=Paraburkholderia gins engiterrae OX=1462993 GN=queA PE=3 SV=1
MFTLSDFDFDLPPELIAQVALPERSASRLLEVDNTAGADGAARLIDRRFAELPECIEAGDLLVFNDTKVLKARFLGQKASGGKIEVLVERLTGERTALAQIRASKSPQPGTTIRLADAFDVTVGERVEPFYTLHFPGDCLTLIEQYGRLPLPPYIEHDPDSTDETRYQTVFAQNPGAVAAPTAGLHFDQALLAQLDAKGVERATLTLHVGAGTFQPVRVENLAEHKMHSEWYHLPQALADKIAATRASGNRVIAVGTTSMRALEAAARDAEAAGRPLAAASTETDIFITPGYRFRVVDRLVTNFHLPKSTLLMLVSAFAGVETIREAYRHAIEQRYRFFSYGDAMLLTRLDT

SEQ ID NO: 69891 - protein, 352 aa, Paraburkholderia graminis
  misc_feature (1)..(352): tr|B1FWH2|B1FWH2_PARG4 S-adenosylmethionine:tRNA ribosy ltransferase-isomerase OS=Paraburkholderia graminis (st rain ATCC 700544 / DSM 17151 / LMG 18924 / NCIMB 13744 / C4D1M) OX=396598 GN=queA PE=3 SV=1
MFTLSDFDFDLPPELIAQVALPERSASRLLQVDNAADADRAARLIDRRFAELPDCIAPGDLLVFNDTKVLKARFLGQKASGGKIEVLVERLTGERTALAQIRASKSPQPGTTIRLADAFDVTVGERVEPFYTLHFPADCLTLIEQFGRLPLPPYIEHDPDSIDEARYQTVYAQNPGAVAAPTAGLHFDDALFARLDAHGVERATLTLHVGAGTFQPVRVENLAEHKMHSEWYHLPQSLADKIAATKARGNRVIAVGTTSMRALEAAARDAEAAGRPLAATSTETDIFITPGYRFRVVDRLVTNFHLPKSTLLMLVSAFAGVETIRAAYRHAIEQRYRFFSYGDAMLLTRRDG

SEQ ID NO: 69892 - protein, 353 aa, Paraburkholderia hospita
  misc_feature (1)..(353): tr|A0A244DVD7|A0A244DVD7_9BURK S-adenosylmethionine:tRN A ribosyltransferase-isomerase OS=Paraburkholderia hosp ita OX=169430 GN=queA PE=3 SV=1
MFTLSDFDFDLPPELIAQVALPQRSASRLLEVNGQTSPATLADRRFADLPDCIESGDLLVFNDTKVLKARFIGQKASGGKIEVLIERLTGERTALAQIRASKSPAAGTTLRLADAFDVTVGERVEPFYTLHFPDDCLTLIEQFGRLPLPPYIEHDADAFDETRYQTVYAQNPGAVAAPTAGLHFDDSIFARLDAKGVERATLTLHVGAGTFQPVRVENIDEHKMHSEWYQLPQSLVDKIAATKARGNRVIAVGTTSMRALEAAARDADTAGRPLAATSAETDIFITPGYRFRVVDRLVTNFHLPKSTLLMLVSAFAGIETIRAAYRHAIDERYRFFSYGDAMLLTRNDDALNA

SEQ ID NO: 69893 - protein, 389 aa, Paraburkholderia hospita
  misc_feature (1)..(389): tr|A0A1H6NSV8|A0A1H6NSV8_9BURK S-adenosylmethionine:tRN A ribosyltransferase-isomerase OS=Paraburkholderia hosp ita OX=169430 GN=queA PE=3 SV=1
MSRNHSRSTGAVVDAVESAARSSGGNPVKYRIKPVRMFTLSDFDFDLPPELIAQVALPQRSASRLLEVNGQTSPATLADRRFADLPDCIESGDLLVFNDTKVLKARFIGQKASGGKIEVLIERLTGERTALAQIRASKSPAAGTTLRLADAFDVTVGERVEPFYTLHFPDDCLTLIEQFGRLPLPPYIEHDPDAFDETRYQTVYAQNPGAVAAPTAGLHFDDSIFARLDAKGVERATLTLHVGAGTFQPVRVENIDEHKMHSEWYQLPQSLVDKIAATKARGNRVIAVGTTSMRALEAAARDADAAGRPLAATSAETDIFITPGYCFRVVDRLVTNFHLPKSTLLMLVSAFAGIETIRAAYRHAIDERYRFFSYGDAMLLTRHDDALNA

SEQ ID NO: 69894 - protein, 349 aa, Paraburkholderia insulsa
  misc_feature (1)..(349): tr|A0A2T1APU1|A0A2T1APU1_9BURK S-adenosylmethionine:tRN A ribosyltransferase-isomerase OS=Paraburkholderia insu lsa OX=1441714 GN=queA PE=3 SV=1
MFTLSDFDFDLPPELIAQVALPERSASRLLEVDNTVSPARLTDRGFAELPECIAPGDLLVFNDTKVLKARFLGQKASGGKIEVLVERLTGERTALAQIRASKSPQPGTTIRLADAFDVTVGERVEPFYTLHFPDDCLTLIEQFGRLPLPPYIEHDPDSTDETRYQTVFAQNPGAVAAPTAGLHFDDALLARLDARGVERATLTLHVGAGTFQPVRVENIAEHKMHSEWYHLPQSLADKIAATRARGNRVIAVGTTSMRALEAAARDAEAAGRPLGAASTETDIFITPGYRFRVVDRLVTNFHLPKSTLLMLVSAFAGVDTIREAYRHAIEQRYRFFSYGDAMLLTRRDA

SEQ ID NO: 69895 - protein, 353 aa, Paraburkholderia megapolitana
  misc_feature (1)..(353): tr|A0A1I3G9D7|A0A1I3G9D7_9BURK S-adenosylmethionine:tRN A ribosyltransferase-isomerase OS=Paraburkholderia mega politana OX=420953 GN=queA PE=3 SV=1
MFTLSDFDFALPPELIAQTALPERSASRLLEVDGTRTPAHFTDRGFAELPNCIAPGDLLVFNDTKVLKARFLGQKASGGKIEVLIERLTGERTALAQIRASKTPVAGTTLRLADAFDVTVGERVEPFYTLHFPADCLTLIEQYGRLPLPPYIEHDPDATDETRYQTVFAQNPGAVAAPTAGLHFDDALLARLDERGVERATLTLHVGAGTFQPVRVENLSEHKMHSEWYALPQTLVEQIEATRRRGNRVIAVGTTSMRALEAAARDAEAAGRPLAATSAETDIFITPGYRFRVVDRLVTNFHLPKSTLLMLVSAFAGIETIRAAYRHAIEERYRFFSYGDAMLLTRTDDAAQN

SEQ ID NO: 69896 - protein, 371 aa, Paraburkholderia megapolitana
  misc_feature (1)..(371): tr|A0A1I3P4E7|A0A1I3P4E7_9BURK S-adenosylmethionine:tRN A ribosyltransferase-isomerase OS=Paraburkholderia mega politana OX=420953 GN=SAMN05192543_105629 PE=3 SV=1
MRAATVPIQRPRDARLLTVDRYGRIDEHPRTAFADLLRPGDCVIANDAATLPASLHGVHERSGNVIEVRLAGRTSLAGGDAMNRFSAIVFGTGDFHTLTEERAAPPDLHRGDRLRFGADGATIVRLLGHPRFVELHFDGDAAQVWRTLASHGKPVQYAHLADPLALWDVWTPIAAQPVAFEPPSAGFVLDWSTLDALHARGVPFATLTHAAGLSSTGDATLDQRLPLDEPYRIPVATAALVETTRARGGRVVAIGTTVVRALEHAAAIDGAVHPGDGTATQRIGPHTRLRAVDVIVSGTHEPDSSHYALLRAFADASTLARVTATLEAHRYRTHEFGDSMWVERSTDAVREEEHVYDERQGSWVAVPCDLS

SEQ ID NO: 69897 - protein, 352 aa, Paraburkholderia monticola
  misc_feature (1)..(352): tr|A0A149Q0P1|A0A149Q0P1_9BURK S-adenosylmethionine:tRN A ribosyltransferase-isomerase OS=Paraburkholderia mont icola OX=1399968 GN=queA PE=3 SV=1
MFTLSDFDFDLPPELIAQVALPERSASRLLDVDAAGAADGAARLIDRRFTELPECLAPGDLLVFNDTKVLKARFFGQKASGGKVEVLVERLTGERSALAQIRASKSPQAGTAIRLADAFDVTVGERVDQFYTLHFPADCLTLIEQYGRLPLPPYIEHDPDATDETRYQTVFAQNPGAVAAPTAGLHFDDALLARLDAHGVERATLTLHVGAGTFQPVRVENIAEHKMHSEWYHLPQALADKIAATKARGNRVIAVGTTSMRALEAAARDAEAAGHPLAAASAETDIFITPGYRFRVVDRLVTNFHLPKSTLLMLVSAFAGVETIRAAYRHAIEERYRFFSYGDAMLLTRRDA

SEQ ID NO: 69898 - protein, 349 aa, Paraburkholderia phenazinium
  misc_feature (1)..(349): tr|A0A1N6LIA3|A0A1N6LIA3_9BURK S-adenosylmethionine:tRN A ribosyltransferase-isomerase OS=Paraburkholderia phen azinium OX=60549 GN=queA PE=3 SV=1
MFTLSDFDFDLPPELIAQTALPERSASRLLEVDGLATPARLTDRRFAELPDCIAPGDLLVFNDTKVLKARFLGQKASGGKIEVLVERLTGERTALAQIRASKSPAPGTTLRLADAFDVTVGERVEPFYTLHFPEDCLTLIEQFGRLPLPPYIEHGPDATDETRYQTVFAQNPGAVAAPTAGLHFDDALLARLDARGVERATLTLHVGAGTFQPVRVENLAEHKMHSEWYQLPQTLVERIAATKARGNRVIAVGTTSMRALEAAARDAEAAGRPLAATAAETDIFITPGYRFRVVDRLVTNFHLPKSTLLMLVSAFAGIETIRAAYRHAIEERYRFFSYGDAMLLTRNDG

SEQ ID NO: 69899 - protein, 444 aa, Paraburkholderia phenazinium
  misc_feature (1)..(444): tr|A0A4R7RCK9|A0A4R7RCK9_9BURK S-adenosylmethionine:tRN A ribosyltransferase-isomerase OS=Paraburkholderia phen azinium OX=60549 GN=DFH20_2800 PE=3 SV=1
MTMRAATLLVQRPHDARLLVVDRHGHIEHRPRHAFVELLRPGDCVIANDAATLPASLHGIHRRSDAVIEIRLAGRQSLDPQDVKRFKAVVFGAGDFHTPTEARAAPPRLAPGDRVSFGKLEATIVRMLDHPRFVELQFHADAARIWEMLAQQGKPVQYAHLHEALALWDVWTPIAAQPVAFEPPSAGFVLDWRSIDALQARSIPFATLTHAAGLSSTGDAVLDQRLPLDEPYRIPAATAALIAATRARQGRVVAIGTTVVRALEHAASGNGVVHAGDGVATQRIGPQTQLRAVDVIVSGTHEPDTSHYALLRAFTDTLTLQGVTDELEAHRYRTHEFGDSVWIERRACVVQGARTSPLDPRERERCPTLGIGLADSHRKDSAMPAVPSSRPHRAGPTLRKVPTVSDELTPVAPSPDKETSHDTRNHPADHPDPAADRRPAKLAV

SEQ ID NO: 69900 - protein, 352 aa, Paraburkholderia phenoliruptrix
  misc_feature (1)..(352): tr|K0DKY6|K0DKY6_9BURK S-adenosylmethionine:tRNA ribosy ltransferase-isomerase OS=Paraburkholderia phenoliruptr ix BR3459a OX=1229205 GN=queA PE=3 SV=1
MFTLSDFDFDLPPELIAQVALPERSASRLLQVDNAADAERAARLVDRRFSELPDCISPGDLLVFNDTKVLKARFLGQKASGGKIEVLVERLTGERTALAQIRASKSPQPGTTIRLADAFDVTVGERVEPFYTLHFPADCLTLIEQHGRLPLPPYIEHDPDAVDETRYQTVYAQNPGAVAAPTAGLHFDESLFARLDAHGVERATLTLHVGAGTFQPVRVENLAEHKMHSEWYHLPQTLADKIAATKARGNRVIAVGTTSMRALEAAARDAEAAGRPLGAASTETDIFITPGYRFRVVDRLVTNFHLPKSTLLMLVSAFAGVETIRAAYRHAIEQRYRFFSYGDAMLLTRRDG

SEQ ID NO: 69901 - protein, 353 aa, Paraburkholderia phymatum
  misc_feature (1)..(353): sp|B2JGG8|QUEA_PARP8 S-adenosylmethionine:tRNA ribosylt ransferase-isomerase OS=Paraburkholderia phymatum (stra in DSM 17167 / CIP 108236 / LMG 21445 / STM815) OX=3910 38 GN=queA PE=3 SV=1
MFTLSDFDFDLPPELIAQTALPERSASRLLEVNGQTTPASFADRRFAELPECIQPGDLLVFNDTKVLKARFLGQKASGGKIEVLVERLTGERTALAQIRASKSPGPGTVLRLADAFDVTVGERVEPFYTLHFPDDCLTLIEQFGRLPLPPYIEHDPDAFDETRYQTVYAQNPGAVAAPTAGLHFDDSIFARLDAKGVERATLTLHVGAGTFQPVRVENIAEHKMHSEWYQLPQSLVDRIAATRARGNRVIAVGTTSMRALEAAARDADAAGKPLAATSAETDIFITPGYKFRVVDRLVTNFHLPKSTLLMLVSAFAGIETIRAAYRHAIDGRYRFFSYGDAMLLTRSEDALNA

SEQ ID NO: 69902 - protein, 352 aa, Paraburkholderia phytofirmans
  misc_feature (1)..(352): sp|B2SX83|QUEA_PARPJ S-adenosylmethionine:tRNA ribosylt ransferase-isomerase OS=Paraburkholderia phytofirmans ( strain DSM 17436 / LMG 22146 / PsJN) OX=398527 GN=queA PE=3 SV=1
MLTLSDFDFDLPPELIAQVALPERSASRLLEVDNPAGAAGPARLIDRRFAELPECIAPGDLLVFNDTKVLKARFLGQKASGGKIEVLVERLTGERTALAQIRASKSPQPGTTIRLADAFDVTVGERVEPFYTLHFPDDCLTLIEQFGRLPLPPYIEHDPDSTDETRYQTVFAQNPGAVAAPTAGLHFDDALLARLDEKGVERATLTLHVGAGTFQPVRVENLAEHKMHSEWYHLPQALADKIAATRARGNRVIAVGTTSMRALEAAARDAEAAGRPLAAASTETDIFITPGYKFRVVDRLVTNFHLPKSTLLMLVSAFAGVETIRETYRHAIEQRYRFFSYGDAMLLTRRDA

SEQ ID NO: 69903 - protein, 353 aa, Paraburkholderia piptadeniae
  misc_feature (1)..(353): tr|A0A1N7RLP2|A0A1N7RLP2_9BURK S-adenosylmethionine:tRN A ribosyltransferase-isomerase OS=Paraburkholderia pipt adeniae OX=1701573 GN=queA PE=3 SV=1
MFTLSDFDFDLPPELIAQVALPERSASRLLEVNGQTKPATFADRHFAELPELVDAGDLLVFNDTKVLKARFLGQKASGGKIEVLVERLTGERTALAQIRASKSPGPGTTLRLADAFEVTVGERVEPFYTLHFPGDCLTLIEQYGRLPLPPYIEHDPDAFDETRYQTVYAQNPGAVAAPTAGLHFDDSIFARLDEKGVERATLTLHVGAGTFQPVRVDNIAEHKMHSEWYQLPQSLVDRITATKARGNRVIAVGTTSMRALEAAARDAEAAGRPLAATSADTDIFITPGYRFRVVDRLVTNFHLPKSTLLMLVSAFAGIETIRAAYRHAIEERYRFFSYGDAMLLTRSDDALNA

SEQ ID NO: 69904 - protein, 350 aa, Paraburkholderia rhizosphaerae
  misc_feature (1)..(350): tr|A0A4R8LRY7|A0A4R8LRY7_9BURK S-adenosylmethionine:tRN A ribosyltransferase-isomerase OS=Paraburkholderia rhiz osphaerae OX=480658 GN=queA PE=3 SV=1
MFTLSDFDFALPPELIAQVALPERSASRLLEVDNRTRPATLVDRHFAELPGCIAPGDLLVFNDTKVLKARFPGHKASGGKIEVLIERLTGERTALAQIRASKSPAAGTQLRLADAFDVTVGERVEPFYTLHFPADCLTLIEQYGRLPLPPYIEHDADATDETRYQTVYAQNPGAVAAPTAGLHFDEALLARLDARGVERATLTLHVGAGTFQPVRVENIAEHKMHSEWYQLPQSLVDKIAATRARGGRVIAVGTTSMRALEAAARDAQSAGRPLAATSAETDIFITPGYRFRVVDRLVTNFHLPKSTLLMLVSAFAGIDTIRAAYQHAIQERYRFFSYGDAMLLTRSGDA

SEQ ID NO: 69905 - protein, 359 aa, Paraburkholderia rhizoxinica
  misc_feature (1)..(359): tr|E5AM67|E5AM67_PARRH S-adenosylmethionine:tRNA ribosy ltransferase-isomerase OS=Paraburkholderia rhizoxinica (strain DSM 19002 / CIP 109453 / HKI 454) OX=882378 GN= queA PE=3 SV=1
MPLRYPSHFMYTLSDFDFDLPPELIAQHALPERSASRLLEVTPSGALLDRHFGELPACLEPGDLLVFNDTKVLKARFDGIKASGGRVEVLIERVTGPRTALAQIRASKRPAPGSTIRLADAFDVTVGERVEPFHTLHFPHDCIELIDQHGRLPLPPYIEHTPDTYDEARYQTVFATTPGAVAAPTAGLHFDAPTLAALDARGVRRATLTLHVGAGTFQPVRTDDIAQHKMHSEWYNIPPALVEAIEATRAAKRSVIAVGTTSMRALEAAARDAERDGRELHAVRAETDIFITPGYPFRVIDRLVTNFHLPKSTLLMLVSAFAGVEPIRRAYRHAIAQRYRFFSYGDAMLLTRAASVAQR

SEQ ID NO: 69906 - protein, 352 aa, Paraburkholderia rhynchosiae
  misc_feature (1)..(352): tr|A0A2N7WY97|A0A2N7WY97_9BURK S-adenosylmethionine:tRN A ribosyltransferase-isomerase OS=Paraburkholderia rhyn chosiae OX=487049 GN=queA PE=3 SV=1
MFTLSDFDFDLPPELIAQVALPERSASRLLEVANTVDAGDTARLIDRRFAELPECIAAGDLLVFNDTKVLKARFLGQKASGGKVEVLVERLTGERTALAQIRASKSPQPGTMIRLADAFDVTVGERVEPFYTLHFPDDCLTLIEQFGRLPLPPYIEHDPDSTDETRYQTVFAQNPGAVAAPTAGLHFDDALLARLDAKGVERGTLTLHVGAGTFQPVRVENLSEHKMHSEWYHLPQSLADKIAATKARGNRVIAVGTTSMRALEAAARDAEAAGRPLAAASTETDIFITPGYRFRVVDRLVTNFHLPKSTLLMLVSAFAGVETIRAAYRHAIEQRYRFFSYGDAMLLTRRDG

SEQ ID NO: 69907 - protein, 365 aa, Paraburkholderia ribeironis
  misc_feature (1)..(365): tr|A0A1N7S913|A0A1N7S913_9BURK S-adenosylmethionine:tRN A ribosyltransferase-isomerase OS=Paraburkholderia ribe ironis OX=1247936 GN=BN2475_450070 PE=3 SV=1
MRAATLPIQRPDDARLLVVDGSGHIEHRARRALATFLRAYDCVIANDAATLPASLHGIHDRTGESIEVRLAGRPSLAADEVARFSAILFGAGDFHMQTEARAAPPALFPGDRLTLGPLTATVVRMLGHPRFVELRLHGSAVHIWHALALHGRPVQYAHLDSALALWDVWTPIAAQPVAFEPPSAGFVLDWRTIESLHARRISFATLTHAAGLSSTGDAGLDRCLPFDEPYRIPAATAALIEATRARQGRVVAIGTTVVRALEHAASVDGTVHAGDGIATQRIGPNTRLRIVDVVVSGAHEPGSSHYELLRAFADRATLARATAALEAHRYRTHEFGDSVWIERRKDDRQDAQVSAPCCCGQYATC

SEQ ID NO: 69908 - protein, 351 aa, Paraburkholderia ribeironis
  misc_feature (1)..(351): tr|A0A1N7S5K3|A0A1N7S5K3_9BURK S-adenosylmethionine:tRN A ribosyltransferase-isomerase OS=Paraburkholderia ribe ironis OX=1247936 GN=queA PE=3 SV=1
MFTLSDFDFDLPPELIAQVALSERSASRLLEVDNAGGADAARLIDRRFAELPECIAPGDLLVFNDTKVLKARFHGQKASGGKIEVLVERLTGERTALAQIRASKSPQPGTTIRLADAFDVTVGERVEPFYTLHFPGDCLTLIEQFGRLPLPPYIEHDPDATDETRYQTVFAQNPGAVAAPTAGLHFDDALLARLDERGVERATLTLHVGAGTFQPVRVENLAEHKMHSEWYHLPQSLADKIAATRARGNRVIAVGTTSMRALEAAARDAEAAGRPLAAASTETDIFITPGYRFRVVDRLVTNFHLPKSTLLMLVSAFAGVETIRAAYRHAIEQRYRFFSYGDAMLLTRRDA

SEQ ID NO: 69909 - protein, 357 aa, Paraburkholderia sacchari
  misc_feature (1)..(357): tr|A0A0A6QDP1|A0A0A6QDP1_9BURK S-adenosylmethionine:tRN A ribosyltransferase-isomerase OS=Paraburkholderia sacc hari OX=159450 GN=queA PE=3 SV=1
MFKLSDFDFDLPPELIAQTALPERSASRLLEVDNTARLPGQPARFTDRRFAELPACIAPGDLLVFNDTKVLKARFFGQKASGGKIEVLVERLTGARTALAQIRASKSPGQGTVLRLADAFDVTVGERVEPFYTLHFPDDCLTLIEQFGRLPLPPYITHDADANDETRYQTVFAQNPGAVAAPTAGLHFDDALLAQLDAQGVERATLTLHVGAGTFQPVRVENIADHTMHSEWYQLPQSLVDKISATRARGGRVIAVGTTSMRALEAAARDAANAGRELAATSAETDIFITPGYKFRVVDRLVTNFHLPKSTLLMLVSAFAGIETIRAAYRHAIEERYRFFSYGDAMLLTRTDDALNS

SEQ ID NO: 69910 - protein, 349 aa, Paraburkholderia sartisoli
  misc_feature (1)..(349): tr|A0A1H4DA61|A0A1H4DA61_9BURK S-adenosylmethionine:tRN A ribosyltransferase-isomerase OS=Paraburkholderia sart isoli OX=83784 GN=queA PE=3 SV=1
MFTLSDFDFVLPPELIAQTALPERSASRLLEVDGSSAPARFNDRGFAELPACIAPGDLLVFNDTKVLKARFLGQKASGGKIEVLVERLTGETTALAQIRASKSPAPGTTLRLADAFDVTVGERVEPFYTLHFPADCLTLIEQYGRLPLPPYIEHDPDATDETRYQTVFAQNPGAVAAPTAGLHFDTSLLARLDEKGIERATLTLHVGAGTFQPVRVENLDEHKMHSEWYQLPQTLVDRIAATRARGNRVIAVGTTSMRALEAAARSAEEAGRPLAATSAETDIFITPGYRFRIVDRLVTNFHLPKSTLLMLVSAFAGVDTIRAAYAHAIEERYRFFSYGDAMLLTRRDA

SEQ ID NO: 69911 - protein, 352 aa, Paraburkholderia sediminicola
  misc_feature (1)..(352): tr|A0A495GBH8|A0A495GBH8_9BURK S-adenosylmethionine:tRN A ribosyltransferase-isomerase OS=Paraburkholderia sedi minicola OX=458836 GN=queA PE=3 SV=1
MFTLSDFDFDLPPELIAQVALPERSASRLLEVANPADAADAARLIDRRFAELPECIAAGDLLVFNDTKVLKARFLGQKASGGKIEVLVERLTSERTALAQIRASKSPQPGTTIRLADAFDVTVGERVEPFYTLHFPDDCLTLIEQFGRLPLPPYIEHDPDATDETRYQTVFAQNPGAVAAPTAGLHFDNALLARLDAKGVERATLTLHVGAGTFQPVRVENLAEHKMHSEWYHLPQSLADKIAATRARGNRVIAVGTTSMRALEAAARDADAAGRPLGAASTETDIFITPGYKFRVVDRLVTNFHLPKSTLLMLVSAFAGVETIREAYRHAIEQRYRFFSYGDAMLLTRRDV

SEQ ID NO: 69912 - protein, 352 aa, Paraburkholderia sediminicola
  misc_feature (1)..(352): tr|A0A3R7KCX4|A0A3R7KCX4_9BURK S-adenosylmethionine:tRN A ribosyltransferase-isomerase OS=Paraburkholderia sedi minicola OX=458836 GN=queA PE=3 SV=1
MFTLSDFDFDLPPELIAQVALPERSASRLLEVANPADAADAARLIDRRFAELPECIAAGDLLVFNDTKVLKARFLGQKASGGKIEVLVERLTGERTALAQIRASKSPQPGTTIRLADAFDVTVGERVEPFYTLHFPDDCLTLIEQFGRLPLPPYIEHDPDSTDETRYQTVFAQNPGAVAAPTAGLHFDNALLARLDAKGVERATLTLHVGAGTFQPVRVENLAEHKMHSEWYHLPQSVADKIAATRARGNRVIAVGTTSMRALEAAARDADAAGRPLGAASTETDIFITPGYKFRVVDRLVTNFHLPKSTLLMLVSAFAGVETIREAYRHAIEQRYRFFSYGDAMLLTRRDV

SEQ ID NO: 69913 - protein, 353 aa, Paraburkholderia silvatlantica
  misc_feature (1)..(353): tr|A0A2U1AAS8|A0A2U1AAS8_9BURK S-adenosylmethionine:tRN A ribosyltransferase-isomerase OS=Paraburkholderia silv atlantica OX=321895 GN=queA PE=3 SV=1
MFKLSDFDFDLPEELIAQTALPERSASRLLEVDNTTQPARLTDRRFSDLPSRIAPGDLLVFNDTRVLKARFFGQKASGGKIEVLVERLTGARTALAQIRASKSPGPGTVLRLADAFEVTVGERVDPFYTLHFPDDCLTLIEQHGRLPLPPYITHDADASDETRYQTVFAQNPGAVAAPTAGLHFDDALLAQLDARGVERATLTLHVGAGTFQPVRVENIAEHKMHSEWYELPQSLVDKIAATRARGGRVIAVGTTSMRALEAAARDADRAGRALGATQAETDIFITPGYPFRVVDRLVTNFHLPKSTLLMLVSAFAGIETIRAAYRHAIAERYRFFSYGDAMLLTRTDDALNR

SEQ ID NO: 69914 - protein, 351 aa, Paraburkholderia sp.
  misc_feature (1)..(351): tr|A0A4R1J1Z2|A0A4R1J1Z2_9BURK S-adenosylmethionine:tRN A ribosyltransferase-isomerase OS=Paraburkholderia sp. BL8N3 OX=1938808 GN=queA PE=3 SV=1
MFTLSDFDFNLPPELIAQTALAERSASRLLEVDNRTSPATLTDRRFSELPGLIDAGDLLVFNDTKVLKARFLGKKASGGRIEVLIERLTGATTALAQIRASKSPAPGTTLTLADAFDVTVGERVEPFFTLHFPADCLTLIERYGRLPLPPYIEHDPDAVDETRYQTVYAANPGAVAAPTAGLHFDDALFAALDERGVARGTLTLHVGAGTFQPVRVENIAEHRMHSEWYELPQTLVDRIAATKARGNRVIAVGTTSMRALEAAARDAAVANRPLAAAAAETDIFITPGYEFRVVDRLITNFHLPKSTLLMLVSAFAGVETIREAYRHAIEARYRFFSYGDAMLLTRQSTGI

SEQ ID NO: 69915 - protein, 370 aa, Paraburkholderia sp.
  misc_feature (1)..(370): tr|A0A372K2Y2|A0A372K2Y2_9BURK S-adenosylmethionine:tRN A ribosyltransferase-isomerase OS=Paraburkholderia sp. DHOC27 OX=2303330 GN=D0B32_16540 PE=3 SV=1
MSLRAANLAIQRPHDARLLVVDQYGHIEHRPRTALIDLLREGDCVIANDAATLPASLAAIHERSGAPIEVRLAGRASLDPHDVQRFTAVLFGAGDFHTPTEARAAPPAVIEGDQLRLGSLRATVLCVLDHPRLVELRFEGNATSIWRTLAEQGKPVQYAHVPQALALWDVWTTIAAQPVAFESPSAGFVLDWQSVDAMRARGIDFATLTHAAGLSSTGDAALDTRLPFDEPYRIPPSTAQMIAATRARGGRVVAIGTTVVRALEHAARSDGIVHAGDGMATQQLGPGSILRVVDVIVSGTHEPDTSHYALLRAFTDTLTLQRASDELDAHRYRTHEFGDSVWIERRACAGRERHAKAFNNWSLTLPTEAI

SEQ ID NO: 69916 - protein, 352 aa, Paraburkholderia sprentiae
  misc_feature (1)..(352): tr|A0A1I9YHJ3|A0A1I9YHJ3_9BURK S-adenosylmethionine:tRN A ribosyltransferase-isomerase OS=Paraburkholderia spre ntiae WSM5005 OX=754502 GN=queA PE=3 SV=1
MFTLSDFDFDLPPELIAQVALPERSASRLLDVDAAGVADGAARLIDRRFTELPECVAPGDLLVFNDTKVLKARFFGQKASGGKIEVLVERLIGERSALAQVRASKSPQAGTTIRLADAFDVTVGERVDQFYTLHFPDDCLTLIEQYGRLPLPPYIEHDPDATDETRYQTVFAQNPGAVAAPTAGLHFDDALLARLDANGVERATLTLHVGAGTFQPVRVENIAEHKMHSEWYHLPQALADKIAATKARGNRVIAVGTTSMRALEAAARDAEAAGHPLAAASAETDIFITPGYRFRVVDRLVTNFHLPKSTLLMLVSAFAGVETIRAAYRHAIDERYRFFSYGDAMLLTRRDA

SEQ ID NO: 69917 - protein, 352 aa, Paraburkholderia susongensis
  misc_feature (1)..(352): tr|A0A1X7KMH2|A0A1X7KMH2_9BURK S-adenosylmethionine:tRN A ribosyltransferase-isomerase OS=Paraburkholderia suso ngensis OX=1515439 GN=queA PE=3 SV=1
MFTLSDFDFDLPPELIAQVALPERSASRLLDVDGTGRPDGAASLTDRHFTELPECIAPGDLLVFNDTKVLKARFFGVKASGGRIEVLVERLTGERTALAQIRASKSPQPGTTIRLADAFEVTVGERVDPFYTLHFPADCLTLIERYGRLPLPPYIEHDPDATDETRYQTVFAQNPGAVAAPTAGLHFDDALLAKLDARGVARATLTLHVGAGTFQPVRVEKIAEHKMHSEWYHLPQALADKIAATKARGNRVIAVGTTSMRALEAAARDADAAGRPLAAASAETDIFITPGYRFRVVDRLVTNFHLPKSTLLMLVSAFAGVETIRAAYRHAIEERYRFFSYGDAMLLTRRNV

SEQ ID NO: 69918 - protein, 353 aa, Paraburkholderia terrae
  misc_feature (1)..(353): tr|I5D1V2|I5D1V2_9BURK S-adenosylmethionine:tRNA ribosy ltransferase-isomerase OS=Paraburkholderia terrae BS001 OX=1171375 GN=queA PE=3 SV=1
MFTLSDFDFDLPPELIAQVALPQRSASRLLEVNGQTSPATLADRHFADLPDCIESGDLLVFNDTKVLKARFIGQKASGGKIEVLIERLTGERTALAQIRASKSPAAGTTLRLADAFDVTVGERVEPFYTLHFPDDCLTLIEQFGRLPLPPYIEHDPDAFDETRYQTVYAQNPGAVAAPTAGLHFDDSIFARLDAKGVERATLTLHVGAGTFQPVRVENIDEHKMHSEWYQLPQSLVDKIAATKARGNRVIAVGTTSMRALEAAARDADTAGRPLAATSAETDIFITPGYRFRVVDRLVTNFHLPKSTLLMLVSAFAGIETIRAAYRHAIDERYRFFSYGDAMLLTRNDDALNA

SEQ ID NO: 69919 - protein, 353 aa, Paraburkholderia terrae
  misc_feature (1)..(353): tr|A0A2I8ELY0|A0A2I8ELY0_9BURK S-adenosylmethionine:tRN A ribosyltransferase-isomerase OS=Paraburkholderia terr ae OX=311230 GN=queA PE=3 SV=1
MFTLSDFDFDLPPELIAQVALPQRSASRLLEVNGQTSPATLADRRFADLPDCIESGDLLVFNDTKVLKARFIGQKASGGKIEVLIERLTGERTALAQIRASKSPAAGTTLRLADAFDVTVGERVEPFYTLHFPDDCLTLIDQFGRLPLPPYIEHDPDAFDETRYQTVYAQNPGAVAAPTAGLHFDDSIFARLDAKGVERATLTLHVGAGTFQPVRVENIDEHKMHSEWYQLPQSLVDKIAATKARGNRVIAVGTTSMRALEAAARDADAAGRPLAATSAETDIFITPGYRFRVVDRLVTNFHLPKSTLLMLVSAFAGIETIRAAYRHAIDERYRFFSYGDAMLLTRHDDALNA

SEQ ID NO: 69920 - protein, 351 aa, Paraburkholderia terricola
  misc_feature (1)..(351): tr|A0A1M6MFP1|A0A1M6MFP1_9BURK S-adenosylmethionine:tRN A ribosyltransferase-isomerase OS=Paraburkholderia terr icola OX=169427 GN=queA PE=3 SV=1
MFTLSDFDFDLPPELIAQVALPERSASRLLEVDNPLDAGAARLIDRRFAELPDCIAAGDLLVFNDTKVLKARFLGQKASGGKVEVLVERLTGERTALAQIRASKSPQPGTTIRLADAFDVTVGERVEPFYTLHFPDDCLTLIEQHGRLPLPPYIEHDPDATDETRYQTVFAQNPGAVAAPTAGLHFDDALLAKLDAKGVQRATLTLHVGAGTFQPVRVENLAEHKMHSEWYHLPQSLADKIAATRERGNRVIAVGTTSMRALEAAARDAEAAGRPLAAASTETDIFITPGYKFRVVDRLVTNFHLPKSTLLMLVSAFAGVETIRKAYRHAIDERYRFFSYGDAMLLTRRDG

SEQ ID NO: 69921 - protein, 353 aa, Paraburkholderia tropica
  misc_feature (1)..(353): tr|A0A1A5X2J2|A0A1A5X2J2_9BURK S-adenosylmethionine:tRN A ribosyltransferase-isomerase OS=Paraburkholderia trop ica OX=92647 GN=queA PE=3 SV=1
MFKLSDFDFDLPEALIAQIALPERSASRLLEVDNSVQPARLTDRTVADLPACIAPGDLLVFNDTKVLKARFFGQKASGGKIEVLVERLTGARTALAQIRASKSPAPGTTLRLADAFDVTVGERVEPFYTLHFPDDCLTLIEQFGRLPLPPYITHDADAGDETRYQTVFAQNPGAVAAPTAGLHFDDALFAKLDAQGVERATLTLHVGAGTFQPVRVENIADHTMHSEWYQLPQSLVDKIAATRARGGRVIAVGTTSMRALEAAARDAEREGRPLAATQAETDIFITPGYQFRVVDRLVTNFHLPKSTLLMLVSAFAGIETIRAAYRHAIAERYRFFSYGDAMLLTRTADALKA

SEQ ID NO: 69922 - protein, 356 aa, Paraburkholderia tuberum
  misc_feature (1)..(356): tr|A0A1H1EME8|A0A1H1EME8_9BURK S-adenosylmethionine:tRN A ribosyltransferase-isomerase OS=Paraburkholderia tube rum OX=157910 GN=queA PE=3 SV=1
MFTLSDFDFDLPPELIAQVALPERSASRLLDVDAAGAADGAADGAARLIDRRFTELPECLAPGDLLVFNDTKVLKARFFGQKSSGGKIEVLVERLTGERSALAQIRASKSPQAGTTIRLADAFDVTVGERVDQFYTLHFPDDCLTMIEQYGRLPLPPYIEHDPDATDETRYQTVFAQNPGAVAAPTAGLHFDDTLLARLDALGIDRATLTLHVGAGTFQPVRVENIAEHKMHSEWYHLPQALADKIAATKARGNRVIAVGTTSMRALEAAARDAEAAGHPLGAASAETDIFITPGYRFRVVDRLVTNFHLPKSTLLMLVSAFAGVETIRAAYRHAIDERYRFFSYGDAMLLTRRDA

SEQ ID NO: 69923 - protein, 357 aa, Paraburkholderia unamae
  misc_feature (1)..(357): tr|A0A328XRB6|A0A328XRB6_9BURK S-adenosylmethionine:tRN A ribosyltransferase-isomerase OS=Paraburkholderia unam ae OX=219649 GN=queA PE=3 SV=1
MFKLSDFDFDLPEALIAQTALPERSASRLLEVDNAAPLPGEPARLTDRRFSDLPACLAPGDLLVFNDTKVLKARFFGQKASGGKIEVLVERLTGARTALAQIRASKSPGPGTVLRLADAFDVTVGERVDQFYTLHFPDDCLTLIEQYGRLPLPPYITHDADASDETRYQTVFAQNPGAVAAPTAGLHFDDALLAQLDAQGVERATLTLHVGAGTFQPVRVENIAEHKMHSEWYQLPQSLVDKIAATRARGGRVIAVGTTSMRALEAAARDAANENRELAATQAETDIFITPGYRFRVVDRLVTNFHLPKSTLLMLVSAFAGIETIRAAYRHAIAERYRFFSYGDAMLLTKTDDALNK

SEQ ID NO: 69924 - protein, 352 aa, Paraburkholderia xenovorans
  misc_feature (1)..(352): sp|Q145H9|QUEA_PARXL S-adenosylmethionine:tRNA ribosylt ransferase-isomerase OS=Paraburkholderia xenovorans (st rain LB400) OX=266265 GN=queA PE=3 SV=1
MLTLSDFDFDLPPELIAQVALPERSASRLLEVDNPAGATGPARLIDRRFAELPDCIAAGDLLVFNDTKVLKARFLGQKASGGKIEVLVERLTGERTALAQIRASKSPQPGTTIRLADAFDVTVGERVEPFYTLHFPADCLTLIEQFGRLPLPPYIEHDPDATDETRYQTVFAQNPGAVAAPTAGLHFDEALLARLDAAGVERATLTLHVGAGTFQPVRVENLAEHKMHSEWYHLPQSLADKIAATRARGNRVIAVGTTSMRALEAAARDAEAAGRPLAAASTETDIFITPGYRFRVVDRLVTNFHLPKSTLLMLVSAFAGVETIREAYRHAIEARYRFFSYGDAMLLTRRDA

SEQ ID NO: 69925 - protein, 355 aa, Paracandidimonas soli
  misc_feature (1)..(355): tr|A0A4R3V7U3|A0A4R3V7U3_9BURK S-adenosylmethionine:tRN A ribosyltransferase-isomerase OS=Paracandidimonas soli OX=1917182 GN=queA PE=3 SV=1
MTPSLDISQFDYELPQELIAQSPPPQRGDSRLLHLDSRGQLHDLQFPDLLSLLRPNDLLVFNDTRVIKARLLGRKASGGKVEVLIERITRSDQALAHVRSSKSPKPGTVLDLADAFQATVLGREGELFLLAFPEPVLDLLDRHGATPLPPYIEHAAGQEDEERYQTVYAREPGAVAAPTAGLHFSDALMEKIDALGVQKAFVTLHVGAGTFQPVRGAIEDHVMHSERFRVPADTLRKAQAARQAGGRVIAVGTTSVRSLESAAAVCSPEQLAAGAALPDSIEDDTRLFITPGYRYQWVDALITNFHLPQSTLLMLVSAFAGLEPIRRAYRHAVQSRYRFFSYGDAMFLESPDTIL

SEQ ID NO: 69926 - protein, 345 aa, Parachlamydia acanthamoebae
  misc_feature (1)..(345): tr|F8L074|F8L074_PARAV S-adenosylmethionine:tRNA ribosy ltransferase-isomerase OS=Parachlamydia acanthamoebae ( strain UV7) OX=765952 GN=queA PE=3 SV=1
MTNSPYHLSSYHFDLPQELIAQHPCTPRDHSRLMVVDRGSGILSEIPFYELADFLQKGDSLIFNNTKVIPARLLGKRLTGGQAEVFLKAQRSDGTWEVLVKPGKQLGLGSKVIFSETFSCEIVDVLPEGARCVRFFHEGDFNQVLEQHGKIPLPKYIKREPDVKEDGERYQTVYAAHPGAVAAPTAGLHFTQPLLNRITSKGVERIEVTLHVGLGTFLPIKVEDIRDHQMHDESFFISVQAAQQLNNPSSGRQICIGTTSCRALESAAGHSSIIQPGEYSTDIFISPGYQFRKMQALLTNFHLPCSSLLVLVSTFAGHELIREAYQKAVKEKFRFYSYGDAMLIL

SEQ ID NO: 69927 - protein, 362 aa, Parachlamydia acanthamoebae
  misc_feature (1)..(362): tr|A0A0C1E928|A0A0C1E928_9BACT S-adenosylmethionine:tRN A ribosyltransferase-isomerase OS=Parachlamydia acantha moebae OX=83552 GN=queA PE=3 SV=1
MGHLVSQMPFRPQKQNLMTNSPYHLSSYHFDLPQELIAQHPCTPRDHSRLMVVDRGSGILSEIPFYELADFLQKGDSLIFNNTKVIPARLLGKRLTGGQAEVFLKAQRSDGTWEVLVKPGKQLGLGSKVIFSETFSCEIVDVLPEGARCVRFFHEGDFNQVLEQHGKIPLPKYIKREPDVKEDGERYQTVYAAHPGAVAAPTAGLHFTQPLLNRITSKGVERIEVTLHVGLGTFLPIKVEDIRDHQMHDESFFISVQAAQQLNNPSSGRQICIGTTSCRALESAAGHSSIIQPGEYSTDIFISPGYQFRKMQALLTNFHLPCSSLLVLVSTFAGHELIREAYQKAVKEKFRFYSYGDAMLIL

SEQ ID NO: 69928 - protein, 345 aa, Parachlamydia sp.
  misc_feature (1)..(345): tr|A0A2H9SQI4|A0A2H9SQI4_9BACT S-adenosylmethionine:tRN A ribosyltransferase-isomerase OS=Parachlamydia sp. OX= 2052048 GN=queA PE=3 SV=1
MTNMPYQLSSYHFELPKELIAQHPCQPRDHSRLMIVDRAAGSLTEIPFFELPHLLEKGDRLVFNNTKVIPARLIGKRLTGGSAEVFLKEKRKDGTWEVLVKPGKQLGVGAKVIFGDSFFCEITEVLAEGSRYVRFFHEGDFEQVLAQYGQIPLPKYIKRDPSFKEDGESYQTVYAACPGAVAAPTAGLHFTKPLLNQLTQQGVEQIQITLHVGLGTFLPIKVSDIRQHQMHQESFIISPQAAEQLNQPNTGKQICVGTTSCRALEAAAAIAPTIEAGEYATDIFIAPGYQFHRVKSLLTNFHLPGSSLLVLVSAFAGHELIMEAYQKAVKEKFRFFSYGDAMLIL

SEQ ID NO: 69929 - protein, 341 aa, Paraclostridium benzoelyticum
  misc_feature (1)..(341): tr|A0A0M3DGW1|A0A0M3DGW1_9FIRM S-adenosylmethionine:tRN A ribosyltransferase-isomerase OS=Paraclostridium benzo elyticum OX=1629550 GN=queA PE=3 SV=1
MKTSDFYFDLPEELIAQTPLQDRSNSRLMILDRKTGDVEHKIFKDVIDYLNPGDCLVLNNTRVIPARLIGEKVDTGGKIEFLLLKRTEKDVWQALVKPGKRAKVGTKFSFGNGKLIGEVVGLAEEGSRLVKFYYEGIFEEVLDELGNMPLPPYITERLEERERYQTVYSKHNGSAAAPTAGLHFTNELLESIKAKGVDIAFVTLHVGLGTFRPVKVDDVLEHEMHSEYYIVDKEASEKINKAKKNGNKVICVGTTSCRTVESASNENGEIIESSGWTNIFIYPGYKFKIVDRLITNFHLPESTLIMLVSALVSKDAVLNAYNTAVKEKYRFFSFGDAMIIK

SEQ ID NO: 69930 - protein, 341 aa, Paraclostridium bifermentans
  misc_feature (1)..(341): tr|A0A1X2JGB1|A0A1X2JGB1_PARBF S-adenosylmethionine:tRN A ribosyltransferase-isomerase OS=Paraclostridium bifer mentans OX=1490 GN=queA PE=3 SV=1
MKTSDFYFDLPEELIAQTPLEDRSNSRLMVLDRETGDVEHKIFKDVIDYLNPGDCLVLNNTRVIPARLIGEKVDTGGKIEFLLLKRTEKDVWQALVKPGKRAKIGTKFSFGNGKLIGEVVGLAEEGSRLVKFYYEGIFEEVLDELGNMPLPPYITERLEERERYQTVYSKHNGSAAAPTAGLHFTNELLESIKAKGIDIAFVTLHVGLGTFRPVKVDDVLAHEMHSEYYMVDKEAAEKINRAKKNGNKVICVGTTSCRTVESASNENGEIVESSGWTNIFIYPGYKFKVVDRLITNFHLPESTLIMLVSALVSKDAVLNAYNTAVKEKYRFFSFGDAMIIK

SEQ ID NO: 69931 - protein, 341 aa, Paraclostridium bifermentans
  misc_feature (1)..(341): tr|T4VWY5|T4VWY5_PARBF S-adenosylmethionine:tRNA ribosy ltransferase-isomerase OS=Paraclostridium bifermentans ATCC 19299 OX=1233170 GN=queA PE=3 SV=1
MKTSDFYFDLPEELIAQTPLEDRSNSRLMVLDRKTGDVEHKIFKDVIDYLNPGDCLVLNNTRVIPARLIGEKVDTGGKIEFLLLKRTEKDVWQALVKPGKRAKIGTKFSFGNGKLIGEVVGLAEEGSRLVKFYYEGIFEEVLDELGNMPLPPYITERLEERERYQTVYSKHNGSAAAPTAGLHFTNELLESIKAKGIDIAFVTLHVGLGTFRPVKVDDVLAHEMHSEYYMVDKEAAEKINRAKKNGNKVICVGTTSCRTVESASNENGEIVESSGWTNIFIYPGYKFKVVDRLITNFHLPESTLIMLVSALVSKDAVLNAYNTAVKEKYRFFSFGDAMIIK

SEQ ID NO: 69932 - protein, 348 aa, Paracoccus aestuarii
  misc_feature (1)..(348): tr|A0A419A0B5|A0A419A0B5_9RHOB S-adenosylmethionine:tRN A ribosyltransferase-isomerase OS=Paracoccus aestuarii OX=453842 GN=queA PE=3 SV=1
MKLSDFDFDLPEGLIATRPARPRSAARLLLAQGGGIEDRIVADLPEILRPGDLLVLNDTRVIPARLTGTRTRATPQGDATARIEVTLLEPAAEGWQALAKPLRKLRAGEVIRFGQDLSAEVAEITEGGLRLVFDAQGEAFDAALNRVGAMPLPPYIAALRAPDDQDRDDYQTVWAARQGAVAAPTASLHFDAPLLEALAARGLEFAHVTLHVGAGTFLPVKVDDVTTHRMHSEWGEVSQDAADAINRARAEGRRVIPVGTTALRLIESAATGPGRIAAFRGTTDIFIYPGHHFRVTDGLMTNFHLPKSTLMMLVSALMGREKIREIYGHAVRERYRFFSYGDASLLIP

SEQ ID NO: 69933 - protein, 349 aa, Paracoccus alcaliphilus
  misc_feature (1)..(349): tr|A0A1H8FLJ1|A0A1H8FLJ1_9RHOB S-adenosylmethionine:tRN A ribosyltransferase-isomerase OS=Paracoccus alcaliphil us OX=34002 GN=queA PE=3 SV=1
MKLSDFDFDLPSDLIATRPARPRTSARLLLAEGGAGIEDRRVSDLPDILRPGDLLVLNDTRVIPARLTGQRHRQTVQGEVVARIEVTLLEPAADGWRALAKPLRKLREGEVIRFGDALSATVAGIAEGELQLRFDAQGDAFDTALQKVGAMPLPPYIAALRAPDEQDRHDYQTVWARHQGAVAAPTASLHFDQPLLDRLAAMGVGFARVTLHVGAGTFLPVKVEDVASHRMHAEWGEVLPDAADAINAARHEGRRVIAVGTTALRLIESAAVPGGRVAPFRGTTDIFIHPGYQFRVTDGLMTNFHLPKSTLLMLVSALMGPQRIRDIYDHAVGSGYRFFSYGDASLLIP

SEQ ID NO: 69934 - protein, 353 aa, Paracoccus alkenifer
  misc_feature (1)..(353): tr|A0A1H6L1N2|A0A1H6L1N2_9RHOB S-adenosylmethionine:tRN A ribosyltransferase-isomerase OS=Paracoccus alkenifer OX=65735 GN=queA PE=3 SV=1
MRLSDFDFDLPERLIATRPARPRSAARLLVARGDAITDAHVRDLPAFLRPGDLLVLNDTRVIPARLTGTRTRDSDAGPATARIEVTLLEPAPGGLWRALAKPLRKLREAEVIRFGDTLSARVDRIEDAALLLDFDAAGEAFDAALAQVGAMPLPPYIAALRPPDEQDRTDYQTVWAERPGAVAAPTASLHFDDALLGALAAMGVQTTRVTLHVGAGTFLPVKTDDISQHRMHAERGIVSAEAAAAINAARAEGRRVIPVGTTALRLIESAAAPDGRVAAYDGMTDIFIRPGHRFRVTDGLMTNFHLPKSTLMMLVSALMGVDPVRAIYSHAVNENYRFFSYGDASLLLPEETC

SEQ ID NO: 69935 - protein, 349 aa, Paracoccus aminophilus
  misc_feature (1)..(349): tr|S5YWL9|S5YWL9_PARAH S-adenosylmethionine:tRNA ribosy ltransferase-isomerase OS=Paracoccus aminophilus JCM 76 86 OX=1367847 GN=queA PE=3 SV=1
MKLDDFDFDLPEGLIATRPAQPRSAARLLVAEGPDLRDLQVHDLTRVLQPGDLLVLNDTKVIPARLTGKRDRMTAQGLVSAKIEVTLLEPDAAGNWRALAKPLRKLQPGERIIFSDQLSAEVVEIADAGLSLRFDAEGSAFEEELARVGAMPLPPYIAALRAPDEQDRTDYQTVWAKNSGAVAAPTASLHFDAPLLDALREMGVRFTYVTLHVGAGTFLPVKVDDVATHKMHAEWGEVSEAAAQAINAAKAEGARVIPVGTTALRLIESAASEDGRMQPFQGTTEIFIYPGYRFRVTDALMTNFHLPKSTLLMLVSALMGQERIREIYGHAVSSGYRFFSYGDASLLIP

SEQ ID NO: 69936 - protein, 351 aa, Paracoccus aminovorans
  misc_feature (1)..(351): tr|A0A1I3C0B4|A0A1I3C0B4_9RHOB S-adenosylmethionine:tRN A ribosyltransferase-isomerase OS=Paracoccus aminovoran s OX=34004 GN=queA PE=3 SV=1
MRLEDFDFHLPEALIATRPARPRSSARLLLAEGDAIRDLHVHDLAELLGPGDLLVLNDTKVIPARLTGTRTRRTAQGAAVAKVEITLLEPAADGWKALAKPLRKLKPGEVIRFSDALSAEVVEIAQAGLTLRFDAAGEAFDAALSRVGAMPLPPYIAALRPPDEADRTDYQTVWARHSGAVAAPTASLHFDEPLLAALRARGVRFAHVTLHVGAGTFLPVKVEDVTTHRMHGEWGEVTPEAAAAINATRAAGGRVIPVGTTALRLIESAAAEDGTVHPFRDVTEIFIYPGYRFRVTDALMTNFHLPRSTLLMLVSALMGRDRIRVVYRHAVESGYRFFSYGDASLLIPKRE

SEQ ID NO: 69937 - protein, 351 aa, Paracoccus bengalensis
  misc_feature (1)..(351): tr|A0A3D9X9W5|A0A3D9X9W5_9RHOB S-adenosylmethionine:tRN A ribosyltransferase-isomerase OS=Paracoccus bengalensi s OX=302403 GN=queA PE=3 SV=1
MKLDDFDFHLPEGLIATRPARPRTAARLLLALGDSIRDLHVRDLADLLGPGDLLVLNDTKVIPARLTGTRARPTPQGEAVAKVEVTLLEPAADGWKALAKPLRKLKPGEVIRFGEALSAEVAGISEGELTLRFDATGAAFDAALAQVGAMPLPPYIAALRAPDDADRQDYQTVWARRSGAVAAPTASLHFDDALLGQLAARGVRFAHVTLHVGAGTFLPVKVEDVTTHKMHGEWGEVTPEAAAAINATRAQGGRVIPVGTTALRLIESAADQDGIVHPFQGVTEIFIYPGYRFRVTDALITNFHLPKSTLLMLVSALMGQDRIRGIYHHAVESGYRFFSYGDASLLIPKDP

SEQ ID NO: 69938 - protein, 351 aa, Paracoccus chinensis
  misc_feature (1)..(351): tr|A0A1G9E3B0|A0A1G9E3B0_9RHOB S-adenosylmethionine:tRN A ribosyltransferase-isomerase OS=Paracoccus chinensis OX=525640 GN=queA PE=3 SV=1
MRLSDFDFELPEGLIATRPARPRSSARLLVAHGHSTTDARVSDLPSFLRPGDLLVLNDTRVIPARLTGTRTRDSAQGPATARIEVTLLEPAPGGQWQALAKPLRKLRQGEVIRFGEALSARVEAITDAGLTLSFDAEGEAFDAALAQVGAMPLPPYIAALRAPDDQDRTDYQTVWAERPGAVAAPTASLHFDEPLLASLEAMGVQRVHVTLHVGAGTFLPVKTDDVSQHRMHAERGIVTAEAAAAINAAKAEGRRVIPVGTTALRLIESAATEDGRIHPFDAQTDIFIRPGYRFRVTDGLMTNFHLPKSTLMMLVSALMGTERIRAIYAHAVHENYRFFSYGDASLLIPGD

SEQ ID NO: 69939 - protein, 352 aa, Paracoccus contaminans
  misc_feature (1)..(352): tr|A0A1W6CU71|A0A1W6CU71_9RHOB S-adenosylmethionine:tRN A ribosyltransferase-isomerase OS=Paracoccus contaminan s OX=1945662 GN=queA PE=3 SV=1
MRLSDFDFDLPEGLIATRPARPRTAARLLVAQGARMTDATVADLPQFLRAGDLLVLNDTRVIPARLNGTRGRATPQGEVSARIEITLMEPAPDGAWRALAKPLRKLRAGDRLHFAGRLSAMVEAIGEGDVTLRFDAEGEAFDAALAAVGAMPLPPYIAALRAPDEQDREDYQTVWARAPGAVAAPTASLHFDEALLTRLAGMGVGLAHVTLHVGAGTFLPVKTDDVSQHRMHAERGIVTPQAAAAIAGAKAEGRRVIAVGTTALRLIETAAAAGKIGPFDGSTDIFIRPGFRFHVADGLMTNFHLPRSTLMMLVSALMGPDRIRAIYAHAIAARYRFFSYGDASLLLPGVPC

SEQ ID NO: 69940 - protein, 353 aa, Paracoccus denitrificans
  misc_feature (1)..(353): tr|A0A2W4ZQL0|A0A2W4ZQL0_PARDE S-adenosylmethionine:tRN A ribosyltransferase-isomerase OS=Paracoccus denitrific ans OX=266 GN=queA PE=3 SV=1
MQLQDFDFDLPADLIATRPARPRSSARLLVAQGDDITDTTVAHLGDFLRPGDLLVLNDTRVIPARLTGTRSRSTPQGDATAKIEITLLEPAPGGLWRALAKPLRKLREEEVIRFGDRLTATVAAIAEGELTLQFDATGDDFDAALNAVGAMPLPPYIAAQRAPDDADRTDYQTVWARNSGAVAAPTASLHFDEGLLDDLRARGIQTTHVTLHVGAGTFLPVKVDDVTTHKMHAEWGEVTPAAAEAIATAKAEGRRVIPVGTTALRLIESAAQPTGQIAPFQGTTDIFIYPGFRFQVTDALMTNFHLPKSTLMMLVSALMGQDRVRAIYAHAVAQKYRFFSYGDASLLIPEVHR

SEQ ID NO: 69941 - protein, 352 aa, Paracoccus denitrificans
  misc_feature (1)..(352): tr|A0A533IEP4|A0A533IEP4_PARDE S-adenosylmethionine:tRN A ribosyltransferase-isomerase OS=Paracoccus denitrific ans OX=266 GN=queA PE=3 SV=1
MNLSDFDFHLPDGLIATRPARPRSAARLMLAEGSSISDRHVFDLPDILREGDLLVLNDTKVIPARLTGQRSRQTAQGEVSAKIEITLLEPVSNGWRALAKPLRKLKPGEVIRFGETLSARVAEMTETDLTLEFDATGDALDKALDQVGAMPLPPYIAALRAPDMADRTDYQTVWARNSGAVAAPTASLHFDDALLADLRARGIRFAHVTLHVGAGTFLPVKVEDVTTHKMHAEWGEITPEAATLINATRAAGGRVIPVGTTALRLIESAADVDGHVQPFAAATDIFIYPGYRFRVTDALMTNFHLPKSTLLMLVSALMGQDRIREIYRHAVDTGYRFFSYGDASLLIPEGSP

SEQ ID NO: 69942 - protein, 348 aa, Paracoccus gahaiensis
  misc_feature (1)..(348): tr|A0A4U0R5G3|A0A4U0R5G3_9RHOB S-adenosylmethionine:tRN A ribosyltransferase-isomerase OS=Paracoccus gahaiensis OX=1706839 GN=queA PE=3 SV=1
MKLSDFDFDLPAHLIATRPARPRSSARLLRAEGGRIEDRHVGDLPDILRPSDLLVLNDTKVIPARLSGTRTRQSAQGEVTARIEITLLEPAAEGWQALAKPLRKLRVGEVIRFGNALAATVAEIGEGGLRLVFDAVGEAFDAALNQVGAMPLPPYIAALRAPDDQDRQDYQTVWAARQGAAAAPTASLHFDAPLLAALRARGVEFVHVTLHVGAGTFLPVKVEDVTTHRMHAEWGEVDAAAAAAITRAKAEGRRVIPVGTTALRLIESAATGPGRVDPFRGTTDIFIYPGHHFRVTDGLMTNFHLPKSTLMMLVSALMGPEKIREIYGHAVGNGYRFFSYGDGSLLIP

SEQ ID NO: 69943 - protein, 348 aa, Paracoccus haeundaensis
  misc_feature (1)..(348): tr|A0A5C4R7J9|A0A5C4R7J9_9RHOB S-adenosylmethionine:tRN A ribosyltransferase-isomerase OS=Paracoccus haeundaens is OX=225362 GN=queA PE=3 SV=1
MKLSDFDFDLPADLIATRPAKPRSSARLLLAEGGAIADRHVGDLPQILRPGDLLVLNDTKVIPARLTGTRARQTPQGEAVARIEVTLLEPAAEGWQALAKPLRKLRVGEVIRFGDALSASVAEMTATGLRLVFDATGDAFDAALQQVGAMPLPPYIAALRAPDDQDRDDYQTVWAARQGAVAAPTASLHFDAPLLETLAAQGVQFVHVTLHVGAGTFLPVKVDDVTTHRMHAEWGEVSPEAAEAINRAKAEGRRVIPVGTTALRLIESAAPQVGRIAPFRGTTDIFIYPGYQFRVTDGLMTNFHLPKSTLLMLVSALMGSEKIREIYGHAVERGYRFFSYGDASLLIP

SEQ ID NO: 69944 - protein, 351 aa, Paracoccus halophilus
  misc_feature (1)..(351): tr|A0A099EZS6|A0A099EZS6_9RHOB S-adenosylmethionine:tRN A ribosyltransferase-isomerase OS=Paracoccus halophilus OX=376733 GN=queA PE=3 SV=1
MKLDDFDFHLPDSLIATRPARPRSSARLLLAQGARIRDLHVSDLADLLGPGDLLVLNDTRVIPARLSGKRVRRTPQGEAVAGIEVTLLEPVAGGWKALAKPLRKLKPGEVIRFADDLSAEVAGIGDGALTLRFDAEGQAFDAALARVGAMPLPPYIAALRAPDQADHEDYQTIWARRSGAVAAPTASLHFDRPLLDRLAEKGVRTTHVTLHVGAGTFLPVKVEDVTRHRMHGEWGEVTPGAAAAINETRAAGGRVIPVGTTALRLIESAADEDGRVRPYSGITEIFIYPGYRFRVTDALMTNFHLPKSTLLMLVSALMGQQRIREVYRHAVDSGYRFFSYGDASLLIPGDP

SEQ ID NO: 69945 - protein, 348 aa, Paracoccus hibiscisoli
  misc_feature (1)..(348): tr|A0A4U0QXH3|A0A4U0QXH3_9RHOB S-adenosylmethionine:tRN A ribosyltransferase-isomerase OS=Paracoccus hibiscisol i OX=2023261 GN=queA PE=3 SV=1
MKLTDFDFDLPEGLIATRPARPRSAARLLLAEGGTIADRHVGDLPQILRPGDLLVLNDTKVIPARLTGTRARQTPQGEAVARIEITLLEPAADGWQALAKPLRKLRVGEVIRFGDALTAEVAEMSATGLRLIFDATGEAFDAALQQVGAMPLPPYIAALRAPDDQDRDDYQTVWAAHQGAVAAPTASLHFDAPLLEALAARGVEFVHVTLHVGAGTFLPVKVDDVTTHRMHAEWGEVTPEAAAAINRAKAEGRRVIPVGTTALRLIESAAPEPGRIAPFRGTTDIFIYPGHHFRVTDGLMTNFHLPKSTLLMLVSALMGAEKIREIYGHAVRDGYRFFSYGDASLLIP

SEQ ID NO: 69946 - protein, 348 aa, Paracoccus homiensis
  misc_feature (1)..(348): tr|A0A1I0IX28|A0A1I0IX28_9RHOB S-adenosylmethionine:tRN A ribosyltransferase-isomerase OS=Paracoccus homiensis OX=364199 GN=queA PE=3 SV=1
MKLTDFDFDLPERLIATRPARPRSSARLLLAQNGGIADRHVHDLPQILQPGDLLVLNDTKVIPARLNGTRSRQTGQGEVTARIEVTLLEPAADGWQALAKPLRKLREGEVIRFGEALSAEVVQIGDGGLRLRFDATGDAFDAALRQVGAMPLPPYIASLRAPDEQDHQDYQTVWAERQGAVAAPTASLHFDAPLLDALADRGVEFVHVTLHVGAGTFLPVKVEDVTTHRMHAEWGEVTPEAAARINRAKAEGRRVIPVGTTALRLIESAATEDGRMQAFADTTDIFIYPGYQFRVTDGLMTNFHLPKSTLLMLVSALMGVQRIKDIYDHALDREYRFFSYGDASLLLP

SEQ ID NO: 69947 - protein, 352 aa, Paracoccus isoporae
  misc_feature (1)..(352): tr|A0A1G7E180|A0A1G7E180_9RHOB S-adenosylmethionine:tRN A ribosyltransferase-isomerase OS=Paracoccus isoporae O X=591205 GN=queA PE=3 SV=1
MKLSDFDFDLPEGLIATRPARPRSSARLLLADGDMLADRSVSDLPNILQPGDLLVLNDTKVIPARLSGRRTRISAQGAVTARVEITLLEPTAEGWRALARPLRKLKPGEIVQFGEALSAEILSISQTELLLRFDAEGDALDSALDQVGAMPLPPYIAAQRAPDEDDRTDYQTVWARRKGAVAAPTASLHFDDELLAALRARGVEFAYVTLHVGAGTFLPVKVEDVATHRMHAERGEVTAAAAAQINRTRAAGGRVIPVGTTALRLIESAADEDGTLRAFDADTDIFIYPGYRFRVTDALMTNFHLPKSTLLMLVSALMGKERIRRIYRHAVDNRYRFFSYGDASLLIPPRPE

SEQ ID NO: 69948 - protein, 349 aa, Paracoccus laeviglucosivorans
  misc_feature (1)..(349): tr|A0A521AMV6|A0A521AMV6_9RHOB S-adenosylmethionine:tRN A ribosyltransferase-isomerase OS=Paracoccus laevigluco sivorans OX=1197861 GN=queA PE=3 SV=1
MKLDDFDFDLPEGLIATRPARPRTSARLLVAKGDDLRDLHVRDLPDLLGPGDLLVLNDTKVIPARLTGHRTRHTPQGDATAKVEITLLEPQADGTWRALAKPLRKLKPGEVIRFGDTLSAEVAAMSDTDLSLRFDAVGEAFDAALAQVGAMPLPPYIAALRPPDEADRQDYQTVWAEKTGAVAAPTASLHFDDALLQALRDRGVRFTHVTLHVGAGTFLPVKVEDVTTHKMHGEWGEVTPEAAEAINATRANGGRIIPVGTTALRLIESAAAEDGTIAPYQGVTEIFIYPGYRFRVTDALMTNFHLPKSTLLMLVSALMGQDRIGTLYRHAVNSGYRFFSYGDASLLIP

SEQ ID NO: 69949 - protein, 351 aa, Paracoccus lutimaris
  misc_feature (1)..(351): tr|A0A368Z258|A0A368Z258_9RHOB S-adenosylmethionine:tRN A ribosyltransferase-isomerase OS=Paracoccus lutimaris OX=1490030 GN=queA PE=3 SV=1
MKLDDFDFHLPETLIATRPARPRSSARLLLAEGDATRDLHVHDLADLLGPGDLLVLNDTKVIPARLSGTRARQTPQGEAVARIEVTLLEPAADGWRALAKPLRKLKPGEVIRFSDRFSAEVTEIADGELTLRFDATGADFDAALARVGAMPLPPYIAALRAPDAADHQDYQTVWARRSGAVAAPTASLHFDADLLARLAQKGVRFTHVTLHVGAGTFLPVKVEDVTTHRMHGEWGEVTPEAAAIINETRRAGGRVIPVGTTALRLIESAADAGGRVHAFSGVTDIFIYPGYRFRVTDALMTNFHLPKSTLLMLVSALMGQDRIKALYRHAVESGYRFFSYGDASLLIPKGS

SEQ ID NO: 69950 - protein, 348 aa, Paracoccus mutanolyticus
  misc_feature (1)..(348): tr|A0A2Z4PGA7|A0A2Z4PGA7_9RHOB S-adenosylmethionine:tRN A ribosyltransferase-isomerase OS=Paracoccus mutanolyti cus OX=1499308 GN=queA PE=3 SV=1
MTLDDFDFDLPEGLIATRPARPRSSARLLAATGDSLRDLHVRDLPELLGPGDLLVLNDTRVIPARLTGTRSRATSQGEAVARVEITLLEPVADGWKALAKPLRKLKPGEVIRFGDALSAEVAGIGDGALVLRFDATGDAFDAALAQVGAMPLPPYIAALRAPDEADRQDYQTVWARRSGAVAAPTASLHFDEPLLAALRARGVRFAHVTLHVGAGTFLPVKVKDVTTHKMHGEWGEVTPEAAAAINETRAAGGRVIPVGTTALRLIESAATPDGRVQPFRGVTEIFIYPGYRFRVTDGLMTNFHLPKSTLLMLVSALMGQDRIRALYRHAVESGYRFFSYGDASLLVP

SEQ ID NO: 69951 - protein, 351 aa, Paracoccus pantotrophus
  misc_feature (1)..(351): tr|A0A1K1VF61|A0A1K1VF61_PARPN S-adenosylmethionine:tRN A ribosyltransferase-isomerase OS=Paracoccus pantotroph us OX=82367 GN=queA PE=3 SV=1
MKLDDFDFHLPEGLIATRPARPRTAARLLLAQGDSIRDLHVRDLADLLGPGDLLVLNDTKVIPARLTGTRARPTPQGEAVAKVEVTLLEPAADGWKALAKPLRKLKPGEVIRFGEALSAEVAGISEGELTLRFDATGAAFDAALAQVGAMPLPPYIAALRAPDDADRQDYQTVWARRSGAVAAPTASLHFDDALLGQLAARGVRFAHVTLHVGAGTFLPVKVEDVTTHKMHGEWGEVTPEAAAAINATRAQGGRVIPVGTTALRLIESAADQDGIVHPFQGVTEIFIYPGYRFRVTDALMTNFHLPKSTLLMLVSALMGQDRIRGIYHHAVESGYRFFSYGDASLLIPKDP

SEQ ID NO: 69952 - protein, 351 aa, Paracoccus pantotrophus
  misc_feature (1)..(351): tr|A0A1I5F5I0|A0A1I5F5I0_PARPN S-adenosylmethionine:tRN A ribosyltransferase-isomerase OS=Paracoccus pantotroph us OX=82367 GN=queA PE=3 SV=1
MKLDDFDFHLPEGLIATRPARPRTAARLLLAQGDSIRDLHVRDLVDLLGPGDLLVLNDTKVIPARLNGTRARQTPQGEAVAKVEVTLLEPAADGWKALAKPLRKLKPGEVIRFGAALSAEVAGISGGELTLRFDATGEAFDAALAQVGAMPLPPYIAALRAPDEADREDYQTVWARRSGAVAAPTASLHFDDALLERLAAKGVGFAHVTLHVGAGTFLPVKVEDVTTHKMHGEWGEVTPEAAAAINATRAQGGRVIPVGTTALRLIESAAAEDGTVHPFQGVTEIFIYPGYRFRVTDALMTNFHLPKSTLLMLVSALMGPDRIRGIYHHAVESGYRFFSYGDASLLIPKDP

SEQ ID NO: 69953 - protein, 352 aa, Paracoccus salipaludis
  misc_feature (1)..(352): tr|A0A2A2GMK5|A0A2A2GMK5_9RHOB S-adenosylmethionine:tRN A ribosyltransferase-isomerase OS=Paracoccus salipaludi s OX=2032623 GN=queA PE=3 SV=1
MRLSDFDFELPERLIATRPARPRSSARLLVARGDAITDARVSDLPSFLRSGDLLVLNDTRVIPARLTGTRTRDSAQGPATARIEVTLLEPAPGGHWQALAKPLRKLRQGEVIRFGEALSARVEAITEAGLTLSFDAEGEAFDAALAQVGAMPLPPYIAALRAPDEQDRTDYQTVWAERPGAVAAPTASLHFDEPLLDALDAMGVRRVHVTLHVGAGTFLPVKTDDVSRHRMHAERGIVTAEAAAAINAARAEGRRVIPVGTTALRLIESAASEDGLVHPFDAQTDIFIRPGYRFRVTDGLMTNFHLPKSTLMMLVSALMGTERIRAIYAHAVHENYRFFSYGDASLLLPRES

SEQ ID NO: 69954 - protein, 348 aa, Paracoccus saliphilus
  misc_feature (1)..(348): tr|A0A1N7KZY0|A0A1N7KZY0_9RHOB S-adenosylmethionine:tRN A ribosyltransferase-isomerase OS=Paracoccus saliphilus OX=405559 GN=queA PE=3 SV=1
MKLSDFDFDLPEELIATRPARPRSSARLLLAEADGIADRHVHDLPQILRPGDLLVLNDTKVIPARLTGTRTRQTGQGDAVAKIEVTLLEPAADGWQALAKPLRKLREGEVIRFGEALSAEIVEIADGGLRLRFDAEGDAFDAALTEVGAMPLPPYIASLRPPDEQDRQDYQTVWAHRQGAVAAPTASLHFDAPLLEALEARGIEFVHVTLHVGAGTFLPVKVEDVATHKMHAEWGEVSEAAAASINAAKKQGRRVIPVGTTALRLIESAATEEGRVRPFAATTEIFIYPGYHFRVSDGLMTNFHLPKSTLLMLVSALMGMDKIQRIYSHAVTREYRFFSYGDASLLLP

SEQ ID NO: 69955 - protein, 361 aa, Paracoccus sanguinis
  misc_feature (1)..(361): tr|A0A1H2RE43|A0A1H2RE43_9RHOB S-adenosylmethionine:tRN A ribosyltransferase-isomerase OS=Paracoccus sanguinis OX=1545044 GN=queA PE=3 SV=1
MQPADPPPLRLSDFDFDLPEGLIATRPARPRSAARLLVAQGDRITDATVADLPAFLRPGDLLVLNDTKVIPARLTGTRTRPTPQGDAVARIEVTLTEPTPEGGWKALVKPLRKLKPGEVIRFGDHLSARVTAIAEGEATLAFDAVGAAFDAALAEVGAMPLPPYIAALRAPDAQDRTDYQTVWARAAGAVAAPTASLHFDAPLLAQLARDGVEFVHVTLHVGAGTFLPVKTDDVSQHRMHAERGIVTPEAAAAIARARTEGRRVIAVGTTALRLIESAADADGTIRPFDGATDIFIRPGYRFRVTDGLMTNFHLPKSTLLMLVSALMGQDRIRAIYAHAIAARYRFFSYGDASLLLPEASC

SEQ ID NO: 69956 - protein, 361 aa, Paracoccus sanguinis
  misc_feature (1)..(361): tr|A0A099G2K3|A0A099G2K3_9RHOB S-adenosylmethionine:tRN A ribosyltransferase-isomerase OS=Paracoccus sanguinis OX=1545044 GN=queA PE=3 SV=1
MQPADPPPLRLSDFDFDLPEGLIATRPARPRSAARLLVAQGDRITDATVADLPGFLRPGDLLVLNDTKVIPARLTGTRTRPTPQGDAVARIEVTLTEPTPGGGWKALVKPLRKLKPGEVIRFGDHLSARVTAISEGEATLAFDATGAAFDAALAEVGAMPLPPYIAALRAPDAQDRTDYQTVWARAAGAVAAPTASLHFDAPLLAQLAQSGVELVHVTLHVGAGTFLPVKTDDVSQHRMHAERGLVTPEAAAAIARARTEGRRVIAVGTTALRLIESAADADGTIRPFDGATDIFIRPGYRFRVTDGLMTNFHLPKSTLLMLVSALMGQDRIRAIYAHAIAARYRFFSYGDASLLLPEASC

SEQ ID NO: 69957 - protein, 348 aa, Paracoccus sediminis
  misc_feature (1)..(348): tr|A0A238UX16|A0A238UX16_9RHOB S-adenosylmethionine:tRN A ribosyltransferase-isomerase OS=Paracoccus sediminis OX=1214787 GN=queA PE=3 SV=1
MKLSDFDFDLPPALIATRPVRPRSSARLLVAQASAIADHRVSDLPGILRAGDVLVLNDTQVIPARLTGTRARPTPQGEAVAGIEVTLLEPAAQGWRALARPLRKLRVGEVIRFGDALSAEVVEIAGGELLLRFDAHGDAFDAALAQVGAMPLPPYIAALRAPDDQDRDDYQTVWAARRGAVAAPTASLHFDADLLDRLAAQGVQFVHVTLHVGAGTFLPVKVDDVTTHRMHAEWGEVGADAAAAINRAKAEGRRVIPVGTTALRLIESAARPDGRIAPFRGTTDIFIYPGYRFRVTDGLMTNFHLPKSTLLMLVSALMGQDRIRRVYDHAVTQGYRFFSYGDASLLIP

SEQ ID NO: 69958 - protein, 352 aa, Paracoccus seriniphilus
  misc_feature (1)..(352): tr|A0A239PNU7|A0A239PNU7_9RHOB S-adenosylmethionine:tRN A ribosyltransferase-isomerase OS=Paracoccus seriniphil us OX=184748 GN=queA PE=3 SV=1
MKLSDFDFHLPESLIATRPARPRSSARLLLAQGEEICDRHVSDLPQILQPGDLLVLNDTKVIPARLAGTRTRVTPQGDAVARIEVTLLEPAASGWNALAKPLRKLREGEVIRFGDELSARVVEIADGGLRLAFDAEGDAFDAALNKVGAMPLPPYIAALRAPDARDHEDYQTVWAERQGAVAAPTASLHFDAPLLDALRARGVEFVHVTLHVGAGTFLPVKVEDVTTHRMHAEWGEVSAQAAAQINRAKSEGRRVIAVGTTALRLIESAATAEGRMQPFRDTTDIFIYPGYQFRVTDALMTNFHLPKSTLLMLVSALMGQEKIQKIYEHAVENGYRFFSYGDASLLIPECRI

SEQ ID NO: 69959 - protein, 348 aa, Paracoccus siganidrum
  misc_feature (1)..(348): tr|A0A418ZXZ9|A0A418ZXZ9_9RHOB S-adenosylmethionine:tRN A ribosyltransferase-isomerase OS=Paracoccus siganidrum OX=1276757 GN=queA PE=3 SV=1
MKLSDFDFDLPEGLIATRPARPRSSARLLLAEAGGIEDRRVSDLPGILRPGDLLVLNDTRVIPARLSGTRVRKTAQGEAVARIEVTLLEPAADGWQALARPLRKLREGEVIRFGAALSAEVVAIGEGALRLRFDAEGDAFDAALAEVGAMPLPPYIAALRAPDAQDLQDYQTVWAARQGAVAAPTASLHFDQPLLDGLAARGVEFAHVTLHVGAGTFLPVKVEDVTTHRMHAEWGEVSEAAAAAVNAARAEGRRVIAVGTTALRLVESAATPEGALRPFSGTTDIFIYPGHQFRVIDGLMTNFHLPKSTLLMLVSALMGQQRIREIYAHAVRSGYRFFSYGDASLLIP

SEQ ID NO: 69960 - protein, 387 aa, Paracoccus solventivorans
  misc_feature (1)..(387): tr|A0A1M7FPQ9|A0A1M7FPQ9_9RHOB S-adenosylmethionine:tRN A ribosyltransferase-isomerase OS=Paracoccus solventivo rans OX=53463 GN=queA PE=3 SV=1
MPGGGRDSGLVPPARAGLRGQAVDPARRRADNAIMRLSDFDFDLPERLIATRPARPRSAARLLVAQGDTITDAHVRDLPAFLRPGDLLVLNDTRVIPARLTGTRTRASEQGPATARIEVTLLEPAPGGRWRALAKPLRKLREGEVIRFGDALSARVDRIEDAALLLDFDAAGEAFDAALALVGAMPLPPYIAALRPPDEQDRTDYQTVWAERPGAVAAPTASLHFDDALLATLAAMGVQTTRVTLHVGAGTFLPVKTDDISQHRMHAERGIVSAAAAAAINAARAEGRRVIPVGTTALRLIESAAAPDGRVSPYDGMTDIFIRPGYRFRVTDGLMTNFHLPKSTLMMLVSALMGVDRVRAIYAHAVDQDYRFFSYGDASLLLPEAPC

SEQ ID NO: 69961 - protein, 348 aa, Paracoccus sp.
  misc_feature (1)..(348): tr|A0A3A3DI80|A0A3A3DI80_9RHOB S-adenosylmethionine:tRN A ribosyltransferase-isomerase OS=Paracoccus sp. JM45 O X=2283626 GN=queA PE=3 SV=1
MKLSDFDFDLPETLIATRPAKPRSSARLLLAQGDDIADRHVSDLPDILKAGDVLVLNDTKVIPARLTGQRHRASAQGDVTAKIEVTLLEPAAEGWRALAKPLRKLREGEVIHFGDALSATVAEIADGGLRLVFDATGDAFDEALAQVGAMPLPPYIATLRAPDEQDHQDYQTVWAANSGAVAAPTASLHFDAPLLQALKDKGVEFVHVTLHVGAGTFLPVKVEDVTTHRMHAEWGEVCADAAAAITRAKSEGRRVIPVGTTALRLIESAATEDGIVAPFQGTTDIFIYPGHHFRVTDALMTNFHLPKSTLMMLVSAVMGQEKIKSIYAHALARQYRFFSYGDASLLIP

SEQ ID NO: 69962 - protein, 358 aa, Paracoccus sp.
  misc_feature (1)..(358): tr|A0A2K9EKN5|A0A2K9EKN5_9RHOB S-adenosylmethionine:tRN A ribosyltransferase-isomerase OS=Paracoccus sp. BM15 O X=1529068 GN=queA PE=3 SV=1
MKLNDFDFDLPDALIATRPARPRSAARMLLAEGGVISDRHVFDLPQILQPGDLLVLNDTKVIPARLTGTRSRQTGQGEAVARVEITLLEPAADGWRALAKPLRKLREGEVIRFGQALSAEVAEIAGGELRLRFDAAGEAFDAALQQVGAMPLPPYIAAQRAPDQQDHQDYQTVWAARQGAVAAPTASLHFDAALLQALADRGVDFVHVTLHVGAGTFLPVKVEDVTTHRMHAEWGEVTADAAAQINAARAAGRRVIPVGTTALRLIESAATQDGRVEAFEGTTDIFIYPGYHFMVTDGLMTNFHLPKSTLLMLVSALMGVEKIQEIYDHAVHERYRFFSYGDASLLIPDGRFRAGIGD

SEQ ID NO: 69963 - protein, 353 aa, Paracoccus sphaerophysae
  misc_feature (1)..(353): tr|A0A099F2B3|A0A099F2B3_9RHOB S-adenosylmethionine:tRN A ribosyltransferase-isomerase OS=Paracoccus sphaerophy sae OX=690417 GN=queA PE=3 SV=1
MRLSDFDFHLPEGLIATRPARPRSAARLLVAQSDRIADAHVRDLPRFLRPGDLLVLNDTRVIPARLAGTRTRATPQGDAVAKIEVTLTEPAAGGDWHALARPLRKLKPGERIRFDDALSAEVVALSETGLTLRFDSAGQDFDATLARVGAMPLPPYIAALRAPDDQDRTDYQTVWARHSGAVAAPTASLHFDDDLLAALRGMGVEFAHVTLHVGAGTFLPVKTDDVSQHRMHAERGIVTPAAAAAITTARAEGRRVIAVGTTALRLIESAAGPDGTVRPFDGETDIFIRPGHAFRVTDGLMTNFHLPKSTLLMLVSALMGRDRIRAIYAHAVNESYRFFSYGDASLLLPEESC

SEQ ID NO: 69964 - protein, 351 aa, Paracoccus sulfuroxidans
  misc_feature (1)..(351): tr|A0A562NSB5|A0A562NSB5_9RHOB S-adenosylmethionine:tRN A ribosyltransferase-isomerase OS=Paracoccus sulfuroxid ans OX=384678 GN=queA PE=3 SV=1
MRMKLDDFDFDLPEGLIATRPARPRSSARLLLAQSGGMRDLHVHDLVDLLGPGDLLVLNDTRVIPARLSGTRSRMTPQGEAVARIEITLLEPTPEGDWRALAKPLRKLKPGETVRFGEALSAEVTRIGDAELTLRFDQSGEGFERALSEVGAMPLPPYIAALRAPDEADRTDYQTVWARNSGAVAAPTASLHFDADLLEKLKARGVQFVHVTLHVGAGTFLPVKVEDVTTHKMHAEWGEITEEAARLINQTRASGGRVIPVGTTALRLIESAASEDGIVHPFRDTTQIFIYPGYRFRVTDGLMTNFHLPKSTLLMLVSALMGQDQIRDIYRHAVDSGYRFFSYGDASLLIP

SEQ ID NO: 69965 - protein, 351 aa, Paracoccus thiocyanatus
  misc_feature (1)..(351): tr|A0A3D8PEA5|A0A3D8PEA5_9RHOB S-adenosylmethionine:tRN A ribosyltransferase-isomerase OS=Paracoccus thiocyanat us OX=34006 GN=queA PE=3 SV=1
MKLDDFDFHLPEGLIATRPARPRSSARLLLAQGDSIRDLHVRDLSDLLGPGDLLVLNDTKVIPARLTGTRARPTPQGEAVAKVEVTLLEPAADGWRALAKPLRKLKPGEVIRFGEALSATVARIAQGELTLRFDATGEAFDAALAQVGAMPLPPYIAALRPPDEADRQDYQTVWARHSGAVAAPTASLHFDDALLARLAARGVGFAHVTLHVGAGTFLPVKVEDVTTHKMHGEWGEVTPQAAAAINATRAQGGRVIPVGTTALRLIESAARPDGTVHPFQGVTEIFIYPGYRFRVTDALMTNFHLPKSTLLMLVSALMGRDRIRGIYRHAVESGYRFFSYGDASLLIPKDP

SEQ ID NO: 69966 - protein, 351 aa, Paracoccus thiocyanatus
  misc_feature (1)..(351): tr|A0A1N6RAE5|A0A1N6RAE5_9RHOB S-adenosylmethionine:tRN A ribosyltransferase-isomerase OS=Paracoccus thiocyanat us OX=34006 GN=queA PE=3 SV=1
MKLDDFDFHLPEGLIATRPARPRSSARLLLAQGDSIRDLHVRDLSDLLGPGDLLVLNDTKVIPARLTGTRSRPTPQGEAVAKVEVTLLEPAADGWRALAKPLRKLKPGEVIRFGEALSATVARIAQGELTLRFDATGEAFDAALAQVGAMPLPPYIAALRPPDEADRQDYQTVWARRSGAVAAPTASLHFDDALLAQLAARGVRFAHVTLHVGAGTFLPVKVEDVTTHKMHGEWGEVTPQAAAAINATRAQGGRVIPVGTTALRLIESAADPDGTVRPFQGVTEIFIYPGYRFRVTDALMTNFHLPKSTLLMLVSALMGQDRIRGIYRHAVESGYRFFSYGDASLLIPKDP

SEQ ID NO: 69967 - protein, 348 aa, Paracoccus tibetensis
  misc_feature (1)..(348): tr|A0A1G5BP71|A0A1G5BP71_9RHOB S-adenosylmethionine:tRN A ribosyltransferase-isomerase OS=Paracoccus tibetensis OX=336292 GN=queA PE=3 SV=1
MQLSDFDFDLPEDLIATRPARPRSAARLLHLAGDAMTDRRVSDLPQILQPGDVLVLNDTKVIPARLTGTRTRAGAAGEGVARIEVTLLEPAATGWRALAKPLRKLRAGEVIVFGPQLSAEVAEIAEGELRLVFAALGDAFDAALAEVGAMPLPPYIASLRAPDEADKDDYQTVWAARQGAVAAPTASLHFDAPLLAALAARGVQFVHVTLHVGAGTFLPVKVDDVTTHRMHAEWGEVSAEAAAAINRAKTEGRRVIPVGTTALRLIESAASGEGRIAAFEGTTDIFIYPGFRFRIADGLMTNFHLPRSTLMMLVSALMGRERIMAAYAHAIAQRYRFFSYGDASLLIP

SEQ ID NO: 69968 - protein, 351 aa, Paracoccus versutus
  misc_feature (1)..(351): tr|A0A099FQ48|A0A099FQ48_PARVE S-adenosylmethionine:tRN A ribosyltransferase-isomerase OS=Paracoccus versutus O X=34007 GN=queA PE=3 SV=1
MKLDDFDFHLPEGLIATRPARPRTAARLLLAQGDSIRDLHVRDLADLLGPGDLLVLNDTKVIPARLTGTRARPTPQGEAVAKVEVTLLEPAADGWKALAKPLRKLKPGEVIRFGEALSAEVAGISEGELTLRFDATGAAFDAALAQVGAMPLPPYIAALRAPDDADRQDYQTVWARRSGAVAAPTASLHFDDALLGQLAARGVRFAHVTLHVGAGTFLPVKVEDVTTHKMHGEWGEVTPEAAAAINATRAQGGRVIPVGTTALRLIESAAAPDGIVHPFQGVTEIFIYPGYRFRVTDALMTNFHLPKSTLLMLVSALMGQDRIRGIYHHAVESGYRFFSYGDASLLIPKDP

SEQ ID NO: 69969 - protein, 370 aa, Paracoccus yeei
  misc_feature (1)..(370): tr|A0A386UI31|A0A386UI31_9RHOB S-adenosylmethionine:tRN A ribosyltransferase-isomerase OS=Paracoccus yeei OX=14 7645 GN=queA PE=3 SV=1
MTFLLDHPGQLDPVARRGQNPAMTLDDFDFDLPEGLIATRPARPRSSARLLAATGDSLRDLHVRDLPELLGPGDLLVLNDTRVIPARLTGTRSRATPQGEAVARVEITLLEPVADGWKALAKPLRKLKPGEVIRFGDALSAEVAEIGDGALVLRFDATGDAFDAALAQVGAMPLPPYIAALRAPDEADRQDYQTVWARRSGAVAAPTASLHFDEPLLAALRARGVRFAHVTLHVGAGTFLPVKVKDVTTHKMHGEWGEVTPEAAAAINETRAAGGRVIPVGTTALRLIESAATPDGRVQPFRGVTEIFIYPGYRFRVTDGLMTNFHLPRSTLLMLVSALMGQDRIRRIYRHAVDSGYRFFSYGDASLLVP

SEQ ID NO: 69970 - protein, 348 aa, Paracoccus yeei
  misc_feature (1)..(348): tr|A0A1V0GXP6|A0A1V0GXP6_9RHOB S-adenosylmethionine:tRN A ribosyltransferase-isomerase OS=Paracoccus yeei OX=14 7645 GN=queA PE=3 SV=1
MTLDDFDFDLPEGLIATRPARPRSSARLLAATGDSLRDLHVRDLPELLGPGDLLVLNDTRVIPARLTGTRSRATPQGEAVARVEITLLEPVADGWKALAKPLRKLKPGEVIRFGDALSAEVAAIGDGALVLRFDATGDAFDAALAQVGAMPLPPYIAALRAPDEADRQDYQTVWARRSGAVAAPTASLHFDEPLLAALRARGVRFAHVTLHVGAGTFLPVKVKDVTTHKMHGEWGEVTPEAAAAINETRAAGGRVIPVGTTALRLIESAATPDGRVQPFRGVTEIFIYPGYPFRVTDGLMTNFHLPRSTLLMLVSALMGQDRIRRIYRHAVDSGYRFFSYGDASLLVP

SEQ ID NO: 69971 - protein, 348 aa, Paracoccus zhejiangensis
  misc_feature (1)..(348): tr|A0A2H5EU44|A0A2H5EU44_9RHOB S-adenosylmethionine:tRN A ribosyltransferase-isomerase OS=Paracoccus zhejiangen sis OX=1077935 GN=queA PE=3 SV=1
MKLSDFDFDLPEGLIATRPARPRSSARLLLAEGGAMADRHVFDLPSILRPGDLLVLNDTKVIPARLTGSRTRQTGQGEVTAKIEVTLLEPAADGWRALAKPLRKLRAGEVIRFGEALSAEVAEIGEAELRLRFDATGDAFDAALGQVGAMPLPPYIAAQRAPDAQDHQDYQTVWAARQGAVAAPTASLHFDEDLLKALAARGVGFTHVTLHVGAGTFLPVKVEDVTTHRMHAEWGEVSPEAAAAITAAKAEGRRVIPVGTTALRLIESAAVADGRVEPFRQTTDIFIYPGHHFRVTDGLMTNFHLPKSTLLMLVSALMGAEKIKEIYAHAVNERYRFFSYGDASLLIP

SEQ ID NO: 69972 - protein, 357 aa, Paracraurococcus sp.
  misc_feature (1)..(357): tr|A0A4R4DPQ8|A0A4R4DPQ8_9PROT S-adenosylmethionine:tRN A ribosyltransferase-isomerase OS=Paracraurococcus sp. NE82 OX=2527868 GN=queA PE=3 SV=1
MRTEDFNFALPERLIAQEPARPRDAARLLVVRPDRLDDRGVRDLPGLLGPGDVMVVNDTRVIPARLHGRRGEAAIEIMLNRAEEGSTVWEALVRNARRLRPGDVIAIEGAADLPCRVVSREGGTARLDFGPDPALLAAALERAGEIPLPPYIARPEGPRPEDRADYQTLFAARPGAVAAPTASLHFTPELVAALEARGVQRATVTLHVGAGTFLPLRAEDPRAHTLHAEWGEVTEAAAALINAARPAGGRIVAIGTTALRLLETAARGGKDGVDDPLRPVRPFRGLTDIFLLPGHRFRAADLLMTNFHLPKSTLFMLVSAFAGTARMRAAYAHAIAEEYRFYSYGDGSLLFRAEEPA

SEQ ID NO: 69973 - protein, 361 aa, Paraeggerthella hongkongensis
  misc_feature (1)..(361): tr|A0A3N0B1F2|A0A3N0B1F2_9ACTN S-adenosylmethionine:tRN A ribosyltransferase-isomerase OS=Paraeggerthella hongk ongensis OX=230658 GN=queA PE=3 SV=1
MKTSDFDYNLPPELIAQEPAAERDGCRMLVMDRATGALEDRIFRDIAEYLRPGDLLVANETRVMPARLLGAKRGTGGAAEVFLLREITGREPRTNASALWEVLVRPGKRLKPGTGATVDFLDPDGNVALSAEIVDWAEGAQKGERLARLTTTLPSLDEALHAVGHTPLPPYIKNYAGDEELYQTVYSRRESSAAAPTAGLHFTPELIKHLKEQGVRWETVELEVGLDTFRTVDEDDPAQHVIHTEFYTVPERTVEAIAETRRQGGRVVAVGTTSVRSLESAWNPQAGAVTPREREATSLYLLPGSEFHVVDALVTNFHVPKSTLMMLVSAFSSRENVMAAYEHAIAERYRLLSFGDAMFIQ

SEQ ID NO: 69974 - protein, 361 aa, Paraeggerthella hongkongensis
  misc_feature (1)..(361): tr|A0A369LH91|A0A369LH91_9ACTN S-adenosylmethionine:tRN A ribosyltransferase-isomerase OS=Paraeggerthella hongk ongensis OX=230658 GN=queA PE=3 SV=1
MKTSDFDYNLPPELIAQEPAVERDGCRMLVMDRATGALEDRIFRDIAEYLRPGDLLVANETRVMPARLLGAKRGTGGAAEVFLLREITGREPRTNASALWEVLVRPGKRLKPGTGAVVDFLDPDGNVALSAEIVDWAEGAQKGERLARLTTTLPSLDEALHAVGHTPLPPYIKNYAGDEELYQTVYSRRESSAAAPTAGLHFTPELIKRLKEQGVRWETVELEVGLDTFRTVDEDDPAQHVIHTEFYTVPERTVEAIAETRRQGGRIVAVGTTSVRSLESAWNPQAGTVTPREREATSLYLLPGSEFHVVDALVTNFHVPKSTLMMLVSAFSSRENVMAAYEHAIAERYRLLSFGDAMFIQ

SEQ ID NO: 69975 - protein, 416 aa, Parafilimonas terrae
  misc_feature (1)..(416): tr|A0A1I5Z9V2|A0A1I5Z9V2_9BACT S-adenosylmethionine:tRN A ribosyltransferase-isomerase OS=Parafilimonas terrae OX=1465490 GN=queA PE=3 SV=1
MSISPKQLQIKDFDYDLPDEKIAKHPLAKRDASKLLIYKNGEIKTDNFIHLSNYLPEGSLIIFNNTKVVEARLLFKKTTGTTIEIFCLEPADDYADITTAMLQHKKVLWKCLIGNAKKWKDEILVKKILHNGKEIELSVKKISRQGENFIIEFSWNDEQLSFAEILHTGGVIPLPPYMHRDADDEDKKRYQTVYAKHDGSVAAPTAGLHFTGNVFERLSAKNIQRDFVTLHVGAGTFKPVKTETIEAHEMHSEFFEVSVELIEKLINASNQNIIAVGTTSLRTLESLYWMGVKISQQSTVNGQQNITIDDITIHQWDVYELNDENISFEDALHALLEWMKANNLNKLIAKTQIIIAPPYKLKVADILITNFHQPKSTLLLLVAAVIGNDWKKVYDYALNNNFRFLSYGDSCLFFAL

SEQ ID NO: 69976 - protein, 349 aa, Parafilimonas terrae
  misc_feature (1)..(349): tr|A0A1I5S724|A0A1I5S724_9BACT S-adenosylmethionine:tRN A ribosyltransferase-isomerase OS=Parafilimonas terrae OX=1465490 GN=queA PE=3 SV=1
MKLSQFRFDLPLNLIAQNPTKRREDSRMMVVHRQTGQLENKHFKDILDYFDDKDVFVVNNTKVFPARMYGRKEKTGARIEVFLLRELNKPNRLWDVIVDPARKIRVGNKLYFGENDELVAEVIDNTTSRGRTIRFLWEGDDASFRNMLEFLGETPLPKYIKRKPDEEDKERYQTVYAKNEGAVAAPTAGFHFSRELIKRCEIKGIRFAELTLHTGLGTFRPIEVEDLSKHKMDAEYYRIDEECCQIVNKAKETSHRICSIGTTTMRAMETSFTAQKLLKPSEGWTNIFIHPPYNFNVADSLVTNFHLPKTSLLIMACAFAGYDLIIEAYKKAIKDKYRFFSYGDAMLII

SEQ ID NO: 69977 - protein, 342 aa, Parageobacillus caldoxylosilyticus
  misc_feature (1)..(342): tr|A0A023DA00|A0A023DA00_9BACI S-adenosylmethionine:tRN A ribosyltransferase-isomerase OS=Parageobacillus caldo xylosilyticus NBRC 107762 OX=1220594 GN=queA PE=3 SV=1
MKIDLFDFELPEELIAQTPLPNRDASRLMVLNKKTGEIHHETFRNIISYLREGDCLVLNDTRVMPARLYGEKTDTGANIEVLLLKQLEGDRWETLVKPAKRVKVGTEITFGDGRLKAVCVDTLEHGGRVLEFSYQGIFYEVLEQLGEMPLPPYIKEKLEDPERYQTVYAREVGSAAAPTAGLHFTKPLLDDIRAKGVHIAFITLHVGLGTFRPVSVENIEEHDMHAEFYQMPGETAQLLNEVRQQGGRIIAVGTTSTRTLETIATRHDGKFVAESGWTDIFIYPGYEFKGIDGLVTNFHLPKSTLIMLVSALAGRENILHAYHVAVKERYRFFSFGDAMLII

SEQ ID NO: 69978 - protein, 342 aa, Parageobacillus caldoxylosilyticus
  misc_feature (1)..(342): tr|A0A150LSJ7|A0A150LSJ7_9BACI S-adenosylmethionine:tRN A ribosyltransferase-isomerase OS=Parageobacillus caldo xylosilyticus OX=81408 GN=queA PE=3 SV=1
MKIDLFDFELPEELIAQTPLPNRDASRLMVLNKKTGEIRHETFRNIISYLREGDCLVLNDTRVMPARLYGEKTDTGANIEVLLLKQLEGDRWETLVKPAKRVKVGTEITFGDGRLKAVCVDTLEHGGRVLEFSYQGIFYEVLEQLGEMPLPPYIKEKLEDPERYQTVYAREVGSAAAPTAGLHFTKPLLDDIRAKGVHIAFITLHVGLGTFRPVSVENIEEHDMHAEFYQMPEETAQLLNEVRQQGGRIIAVGTTSTRTLETIATRHDGKFVAESGWTDIFIYPGYEFKGIDGLVTNFHLPKSTLIMLVSALAGRENILHAYHVAVKERYRFFSFGDAMLII

SEQ ID NO: 69979 - protein, 342 aa, Parageobacillus genomosp.
  misc_feature (1)..(342): tr|A0A023CLW4|A0A023CLW4_9BACI S-adenosylmethionine:tRN A ribosyltransferase-isomerase OS=Parageobacillus genom osp. 1 OX=1295642 GN=queA PE=3 SV=1
MKIDLFDFELPEELIAQTPLSNRDASRLMVLNKKTGEIRHEAFRNIISYLHKGDCLVLNDTRVMPARLYGEKTDTGANIEVLLLKQLEGDRWETLVKPAKRVKVGTEITFGDGRLKAVCIDTLEHGGRILEFSYQGIFYEVLEQLGEMPLPPYIKEKLEDPERYQTVYAREVGSAAAPTAGLHFTAQLLDDIRAKGVHIAFITLHVGLGTFRPVSVENIEEHDMHAEFYQMSEETAQLLNEVRQQGGRIIAVGTTSTRTLETIATRHNGKFVAESGWTDIFIYPGYEFKGIDGLVTNFHLPKSTLIMLVSALAGRENILHAYHVAVKERYRFFSFGDAMLII

SEQ ID NO: 69980 - protein, 342 aa, Parageobacillus thermantarcticus
  misc_feature (1)..(342): tr|A0A1I0SGN9|A0A1I0SGN9_9BACI S-adenosylmethionine:tRN A ribosyltransferase-isomerase OS=Parageobacillus therm antarcticus OX=186116 GN=queA PE=3 SV=1
MKIDLFDFDLPEELIAQTPLPNRDASRLMVLDKKTGEIRHETFRNILSYLREGDCLVLNDTRVMPARLYGEKEDTGANIEVLLLKQLEGDRWETLVKPAKRVKVGTTIIFGDGRLKATCVNTLEHGGRILQFSYRGIFYEVLEQLGEMPLPPYIKEKLDDPERYQTVYAREIGSAAAPTAGLHFTEQLLDDIRAKGVHIAFITLHVGLGTFRPVNVENIEEHDMHAEFYQMTEETARLLNEVRRQGGRIIAVGTTSTRTLETIATRHNGTFVAESGWTDIFIYPGYEFKAIDGLVTNFHLPKSTLIMLVSALAGRENILRAYNVAVKERYRFFSFGDAMLII

SEQ ID NO: 69981 - protein, 342 aa, Parageobacillus thermoglucosidasius
  misc_feature (1)..(342): tr|A0A1B7KWD0|A0A1B7KWD0_PARTM S-adenosylmethionine:tRN A ribosyltransferase-isomerase OS=Parageobacillus therm oglucosidasius OX=1426 GN=queA PE=3 SV=1
MKIDLFDFNLPEELIAQTPLPNRDASRLMVLDKKTGEIRHETFRNILSYLREGDCLVLNDTRVMPARLYGEKEDTGANIEVLLLKQLEGDRWETLVKPARRVKDGTKIIFGDGRLKATCVDTLEHGGRVLQFSYRGIFYEVLEQLGEMPLPPYIKEKLDDPERYQTVYAREIGSAAAPTAGLHFTEQLLDDIRAKGVHIAFITLHVGLGTFRPVNVENIEEHDMHAEFYQMTEETAQLLNETRRQGGRIIAVGTTSTRTLETIAARHNGTFVAESGWTDIFIYPGYEFKAIDGLVTNFHLPKSTLIMLVSALAGRENILRAYNVAVKERYRFFSFGDAMLII

SEQ ID NO: 69982 - protein, 342 aa, Parageobacillus thermoglucosidasius
  misc_feature (1)..(342): tr|A0A369X081|A0A369X081_PARTM S-adenosylmethionine:tRN A ribosyltransferase-isomerase OS=Parageobacillus therm oglucosidasius OX=1426 GN=queA PE=3 SV=1
MKIDLFDFDLPEELIAQTPLPNRDASRLMVLDKKTGEIHHETFRNILSYLREGDCLVLNDTRVMPARLYGEKENTGAHIEVLLLKQLEGDRWETLVKPAKRVKAGTKIIFGDGRLQATCVDTLEHGGRVLQFSYRGIFYEVLEQLGEMPLPPYIKEKLADPERYQTVYAREIGSAAAPTAGLHFTEQLLDDIRAKGVHIAFITLHVGLGTFRPVNVENIEEHDMHAEFYQMTEATAQLLNETKRQGGRIIAVGTTSTRTLETIAARHDGTFVAESGWTDIFIYPGYEFKAIDGLVTNFHLPKSTLIMLVSALAGRENILHAYNVAVKERYRFFSFGDAMLII

SEQ ID NO: 69983 - protein, 342 aa, Parageobacillus toebii
  misc_feature (1)..(342): tr|A0A3D8LXH1|A0A3D8LXH1_9BACI S-adenosylmethionine:tRN A ribosyltransferase-isomerase OS=Parageobacillus toebi i OX=153151 GN=queA PE=3 SV=1
MKIDLFDFDLPEELIAQTPLLNRDASRLMVLDKKTGEIRHETFRNILSYLHEGDCLVLNDTRVMPARLYGEKENTGANIEVLLLKQLEGDRWETLVKPAKRVKVGTEITFGDGRLKATCVDTLEHGGRILEFSYQGIFYEVLEQLGEMPLPPYIKEKLDDPERYQTVYAREVGSAAAPTAGLHFTEQLLDDIRAKGVHIAFITLHVGLGTFRPVSVENIEEHDMHAEFYQMTEETARLLNEVRQQGGRIIAVGTTSTRTLETIASKHNGAFVAESGWTDIFIYPGYEFKAIDGLVTNFHLPKSTLIMLVSALAGRENILRAYNAAVKERYRFFSFGDAMLII

SEQ ID NO: 69984 - protein, 342 aa, Parageobacillus toebii
  misc_feature (1)..(342): tr|A0A3M0EUY4|A0A3M0EUY4_9BACI S-adenosylmethionine:tRN A ribosyltransferase-isomerase OS=Parageobacillus toebi i NBRC 107807 OX=1223503 GN=queA PE=3 SV=1
MKIDLFDFELPEELIAQTPLLNRDASRLMVLDKKTGEIHHETFRNILSYLHKGDCLVLNDTRVMPARLYGEKENTGANIEVLLLKQLEGDRWETLVKPAKRVKVGTEITFGDGRLKATCVDTLEHGGRILEFSYQGIFYEVLEQLGEMPLPPYIKEKLDDPERYQTVYAREVGSAAAPTAGLHFTEQLLDDIRAKGVHIAFITLHVGLGTFRPVNVENIEEHDMHAEFYQMTEKTARLLNEVRQQGGRIIAVGTTSTRTLETIASKHNGAFAAESGWTDIFIYPGYEFKAIDGLVTNFHLPKSTLIMLVSALAGRENILRAYNAAVKERYRFFSFGDAMLII

SEQ ID NO: 69985 - protein, 350 aa, Paraglaciecola agarilytica
  misc_feature (1)..(350): tr|K6WW17|K6WW17_9ALTE S-adenosylmethionine:tRNA ribosy ltransferase-isomerase OS=Paraglaciecola agarilytica NO 2 OX=1125747 GN=queA PE=3 SV=1
MKVSEFQFDLPEALIARYPTKERTASRLMHLAKTGLSHLQFTDVVDLINPGDLLIFNNTRVIPARLLGQKASGGKVEVLIERIVDEHHVLAHVRASKSPKEGSQLLLEDKVEMEMVGRQDALFKLKLLNPEPILEILEQYGHMPLPPYIDRPDEESDKERYQTVYNEKPGAVAAPTAGLHFDDAILQKLKDKGVSTEFVTLHVGAGTFQPVRVDNILEHQMHSEYAEVPQNVIDAIAKTKAAGKRVIAVGTTSVRSLESAAKAASSNGTELAPFFSDTDIFIYPGYQFQVVDAMLTNFHLSESTLIMLVSAFAGKENVMSAYQEAIAQQYRFFSYGDAMFIEKNQPANRD

SEQ ID NO: 69986 - protein, 349 aa, Paraglaciecola arctica
  misc_feature (1)..(349): tr|K6YYX2|K6YYX2_9ALTE S-adenosylmethionine:tRNA ribosy ltransferase-isomerase OS=Paraglaciecola arctica BSs201 35 OX=493475 GN=queA PE=3 SV=1
MKLSDFQFDLPENLIARYPTAQRSSSRLMHLNGNSGEVNHKQFTDIVELIDQGDLLIFNNTRVIPARLLGQKESGGKVEVLIERVLDEHRVLAHVRASKSPKVGSKLILEGKVQAKMVARHDALFELVFLNDEPVLALLEEFGHMPLPPYIDRPDEDSDKERYQTVYNQVPGAVAAPTAGLHFDEDVLQMLKSKGVKSEFVTLHVGAGTFQPVRVDNILEHQMHSEYAEVSQQVVDAILATKAAGKRVIAVGTTSVRSIESAAHASLKAGTELAPFLSDTDIFIYPGYEFQLVDAMLTNFHLSESTLLMLVSAFCGKENIENAYQQAIDQEYRFFSYGDAMFLEKKVGQ

SEQ ID NO: 69987 - protein, 348 aa, Paraglaciecola hydrolytica
  misc_feature (1)..(348): tr|A0A136A025|A0A136A025_9ALTE S-adenosylmethionine:tRN A ribosyltransferase-isomerase OS=Paraglaciecola hydrol ytica OX=1799789 GN=queA PE=3 SV=1
MKLADFRFDLPEHLIARYPTTERTASRLMHLKGNGGEVVHRQFQDIVNLIEPGDLLVFNNTRVIPARLLGQKVSGGKVEVLVERVLDEQRVLAHVRASKAPKVGSLLILESSIQVEMLARHDALFELKFLTQEPVLEVLEQFGHMPLPPYIDRPDEDSDKERYQTVYNQVPGAVAAPTAGLHFDQALLETLKNRGVNTAFVTLHVGAGTFQPVRVDNILEHQMHAEYAEVPQNVVDAVLQTKAAGKRVIAVGTTSVRSLESAAQASLKAGNKLSPFFADTSIFIYPGYQFQLVDALLTNFHLSESTLLMLVSAFAGKQHIFAAYGQAIAEQYRFFSYGDAMFIEKRTD

SEQ ID NO: 69988 - protein, 346 aa, Paraglaciecola mesophila
  misc_feature (1)..(346): tr|K6Z0K9|K6Z0K9_9ALTE S-adenosylmethionine:tRNA ribosy ltransferase-isomerase OS=Paraglaciecola mesophila KMM 241 OX=1128912 GN=queA PE=3 SV=1
MKVSEFQFDLPEALIARYPTKERTASRLMHLATTGLSHLQFTDVVNLINPGDLLIFNNTRVIPARLLGQKASGGKVEVLIERIIDEHHVLAHVRASKSPKEGTQLLLEDKVEMEMVGRQDALFTLKLLNPEPILEILEQYGHMPLPPYIDRPDEESDKERYQTVYNEKPGAVAAPTAGLHFDDVILKQLRDKGVNTEFVTLHVGAGTFQPVRVDNILEHQMHSEYAEVPQNVVDAIAKTKAAGKRVIAVGTTSVRSLESAAKAALENGTALAPFFSDTDIFIYPGYKFQVIDAMLTNFHLSESTLIMLVSAFAGKENVMRAYQEAIAQQYRFFSYGDAMFIEKNQD

SEQ ID NO: 69989 - protein, 346 aa, Paraglaciecola polaris
  misc_feature (1)..(346): tr|K6ZVF2|K6ZVF2_9ALTE S-adenosylmethionine:tRNA ribosy ltransferase-isomerase OS=Paraglaciecola polaris LMG 21 857 OX=1129793 GN=queA PE=3 SV=1
MKVSEFQFDLPEALIARYPTKERTASRLLHLSPDGLSHLQFTDVLSLINPGDLLIFNNTRVIPARLLGQKASGGKVEVLIERIIDDHHVLAHVRASKSPKEGTRLLLESSVQMEMVGRQDALFELKLLNSEPILEVLEQYGHMPLPPYIDRPDEASDKERYQTVYNQKPGAVAAPTAGLHFDDAILKQLQDKGVNTEFVTLHVGAGTFQPVRVDNILEHKMHSEYAEVPESVVNAIAKTKAAGKRVIAVGTTSVRSLESAAQAAIKDGTGLAPFFSDTDIFIYPGYQFQVVDAMLTNFHLSESTLIMLVSAFAGKENVMNAYQAAIAQQYRFFSYGDAMFIEKNQS

SEQ ID NO: 69990 - protein, 348 aa, Paraglaciecola psychrophila
  misc_feature (1)..(348): tr|K7AVN1|K7AVN1_9ALTE S-adenosylmethionine:tRNA ribosy ltransferase-isomerase OS=Paraglaciecola psychrophila 1 70 OX=1129794 GN=queA PE=3 SV=1
MKLSDFHFDLPENLIARYPTEKRSSSRLMHLNSNKGEVVHKQFSDIVELIDEGDLLIFNNTRVIPARLLGQKESGGKVEVLIERVLDEHRVLAHVRASKSPKVGSKLILEGVVQAEMVARHDALFELKFLNDEPVLSLLEQFGHMPLPPYIDRPDEDSDKERYQTVYNKVPGAVAAPTAGLHFDEDILKILKDKGVKSEFVTLHVGAGTFQPVRVDNILEHKMHSEYAEVSQQVVDAILATRAAGKRVVAVGTTSVRSIESAAQASLKAGTELAPFLSDTDIFIYPGYEFQLVDAMLTNFHLSESTLLMLVSAFCGKENIESAYQQAIEQEYRFFSYGDAMFLERKER

SEQ ID NO: 69991 - protein, 350 aa, Paraglaciecola sp.
  misc_feature (1)..(350): tr|A0A2N1CUF7|A0A2N1CUF7_9ALTE S-adenosylmethionine:tRN A ribosyltransferase-isomerase OS=Paraglaciecola sp. MB -3u-78 OX=2058332 GN=queA PE=3 SV=1
MKLSDFHFDLPENLIARYPTEKRSSSRLMHLCGNNGDVVHKQFTHIVELIDEGDLLIFNNTRVIPARLLGQKESGGKVEVLIERVLDEHRVLAHVRASKSPKVGSKLILEGFVQAEMVARHEALFELRFLNDAPVLSLLEQFGHMPLPPYIDRPDEDSDKERYQTVYNKVPGAVAAPTAGLHFDEDILKMLKEKGVKSEFVTLHVGAGTFQPVRVDNILEHQMHSEYAEVSQQVVDAILATKAAGKRVIAVGTTSVRSIESAAQASLKAGTELVPFISDTDIFIYPGYEFQLVDAMLTNFHLSESTLLMLVSAFCGKQNIESAYQQAIEQEYRFFSYGDAMFLEKKLACS

SEQ ID NO: 69992 - protein, 356 aa, Parahaliea aestuarii
  misc_feature (1)..(356): tr|A0A5C8ZVS3|A0A5C8ZVS3_9GAMM S-adenosylmethionine:tRN A ribosyltransferase-isomerase OS=Parahaliea aestuarii OX=1852021 GN=queA PE=3 SV=1
MKRSDFTYHLPPELIAQHPLAERSASRLLCLDGASGELAHRQFPDLLAQLRPDDLLVFNNTRVIPARLWGQKETGGRLEILIERLTGIDTALAHIRSSKSPKPGSRILLSTEPGGEPGPFSLEVTERVGALFALKAPEGEPLSEILQVIGHMPLPPYIERPDDAEDQGRYQTVFAEREGAVAAPTAGLHFSDELLAAIEARGVRRAFVTLHVAAGTFQPVREENIEDHPMHAEYLEVSAETCEAVAETRRRGGRVVAVGTTAVRSLETASQASGEPQPYCGDTDIFIYPGYRFRAVDAMVTNFHLSESTLLMLVSAFVGRECILAAYREAIAERYRFFSYGDAMFITAGPESGRLS

SEQ ID NO: 69993 - protein, 364 aa, Parahaliea aestuarii
  misc_feature (1)..(364): tr|A0A5C9A5G6|A0A5C9A5G6_9GAMM S-adenosylmethionine:tRN A ribosyltransferase-isomerase OS=Parahaliea aestuarii OX=1852021 GN=queA PE=3 SV=1
MKRSDFAYHLPPELIAQHPLAERSGSRLLCLDGQSGDLAHRQFPELLDQLQPDDLLVFNNTRVIPARLWGQKETGGKLEILVERLTGIDMALAHIRCSKSPKPGSRILLSTAEGGEPGPFTLEVTERVGALFGLKTPEGQPLSEILQVIGHMPLPPYIERPDDAEDQGRYQTVYAEREGAVAAPTAGLHFTDDLLAAIDARGIRRAFVTLHVAAGTFQPVRTEEIEDHPMHAEYLEVDEATCAAVAETRRRGGRVIAVGTTAVRSLETASQASGEPRPYCGDTDIFIYPGYRFRAVDAMVTNFHLSESTLLMLVSAFVGRETMLAAYAEAIAQRYRFFSYGDAMFITAGPQAGRRPDPEQGNDA

SEQ ID NO: 69994 - protein, 374 aa, Paralcaligenes ureilyticus
  misc_feature (1)..(374): tr|A0A4V2UZC5|A0A4V2UZC5_9BURK S-adenosylmethionine:tRN A ribosyltransferase-isomerase OS=Paralcaligenes ureily ticus OX=627131 GN=queA PE=3 SV=1
MATTRAALTTQACLRARPQLQDLRVNHRLELSQFDYELPPELIAQTPAPERTGSRLLHLDAAGALHDRQFTHLPELLKPNDLLVFNDTRVIKARLRGHKESGGKVEALIESITQPRVALAHVRASKSPRPGSVLIMAEAFNVKVLGRQGELFELEFPERVLDLLDRYGSTPLPPYITHAAQPQDEERYQTVYAREPGAVAAPTAGLHFDTAMLARLAAQGIGESFVTLHVGAGTFQPVRVENLDEHIMHSEHYSVSAQTLQQIRATRAAGGRVIAVGTTSVRALESAAQHAGQDSSAEVSPIEGDTRLFITPGYRFQIIDALITNFHLPQSTLLMLISALAGMDPIRRAYAHAIQSRYRFFSYGDAMFIETPQP

SEQ ID NO: 69995 - protein, 342 aa, Paraliobacillus ryukyuensis
  misc_feature (1)..(342): tr|A0A366EG27|A0A366EG27_9BACI S-adenosylmethionine:tRN A ribosyltransferase-isomerase OS=Paraliobacillus ryuky uensis OX=200904 GN=queA PE=3 SV=1
MNINDFDFDLPEELIAQTPLKDRSSSRLLVMNREDQALSHHTFSDIIDYIGKGDCLVLNDTKVLPARLYGSKKDTGAKVEVLLLHQESDDDWEVLVKPAKKIKEGTEIVFGDGKLTAICLEEKEHGGRTLRFHYHGIFLEVLNELGEMPLPPYIKEQLPDQERYQTVYAREEGSAAAPTAGLHFTTTLLEQLKQKGVQVVFLTLHVGLGTFRPVSVDTVEEHDMHAEFYHMSQETADVINQVKANGGRVISVGTTSTRTLETIARDNDGNLVEASGWTDIFIYPPYQFQAVDGLITNFHLPKSTLVMLVSALAGRDFVLKAYHEAIEQRYRFFSFGDAMLIL

SEQ ID NO: 69996 - protein, 342 aa, Paraliobacillus sp.
  misc_feature (1)..(342): tr|A0A0U1KLT6|A0A0U1KLT6_9BACI S-adenosylmethionine:tRN A ribosyltransferase-isomerase OS=Paraliobacillus sp. P M-2 OX=1462524 GN=queA PE=3 SV=1
MNINDFNFELPEQLIAQTPLKDRTSSKLLVMERQSQTISHHRFNDIIDYIQPGDCLVLNDTKVLPARLYGSKKDTGAKIEVLLLHQIEGDEWEVLVKPAKKIKIGSKITFGDDKLTAICTEEKEHGGRILQFSYHGIFLEVLNELGEMPLPPYIKEQLPDQERYQTVYAREEGSAAAPTAGLHFTNELLAQLKEKGIKIVFLTLHVGLGTFRPVSVDTIEAHDMHAEFYHMPQETADTINQVKQDGGKVISVGTTSTRTLETIARDNNGELVAASGWTDIFIYPPYQFRAVDGLITNFHLPKSTLVMLVSAFATRDFIMEAYHEAIKKDYRFFSFGDAMLIL

SEQ ID NO: 69997 - protein, 341 aa, Paramaledivibacter caminithermalis
  misc_feature (1)..(341): tr|A0A1M6QUE5|A0A1M6QUE5_9CLOT S-adenosylmethionine:tRN A ribosyltransferase-isomerase OS=Paramaledivibacter ca minithermalis DSM 15212 OX=1121301 GN=queA PE=3 SV=1
MKTSDFYFDLPEELIAQVPLKERDKSRLMVLNKENGEIRHRNFTDILDYLRQGDCLVLNDTRVIPARLFGVKDTGANVEFLLLKRIDKNRWQTLVKPGKRAKLGSRFVFGNNDELTGEIVDLAEEGTRIIEFKYEGIFEEVLDELGNMPLPPYITEKLEDKERYQTVYSKNTGSAAAPTAGLHFTETLLNKIRDRGVKIAYITLHVGLGTFRPVKTENILEHKMHSEFYMVSKDAAELINATKVSGGKIISVGTTATRTLETVGTNDGLIREGNGWTDIFIYPGYEFKVIDGLLTNFHLPESTLIMLVSSLAGRENVLKAYNEAVKERYRFFSFGDAMLVI

SEQ ID NO: 69998 - protein, 358 aa, Paramesorhizobium deserti
  misc_feature (1)..(358): tr|A0A135HWJ4|A0A135HWJ4_9RHIZ S-adenosylmethionine:tRN A ribosyltransferase-isomerase OS=Paramesorhizobium des erti OX=1494590 GN=queA PE=3 SV=1
MRVDLFDFDLPEERIALRPMEPRDHARLLVVQPGSPFADRRVDNLPDLLQPGDALVFNDTKVIPAQLEGIRERDGTVAQISATLHMRVGPDRWKAFLRPGKRVKEGERIRFGHGGSSCFLGTLDATVAEKGEAGEALLVFDLSGAMLDEAVAAAGHIPLPPYIASKRPDDQRDRTDYQTVYAREEGAVAAPTAGLHFTPSLLETLKQRGIEEHFVTLHVGAGTFLPVKADDTSEHKMHAEIGHVSEETAQALNRVRERGGRIVCVGTTSLRLLESAADENGVIQPWSGATDIFITPGYRFRAVDLLMTNFHLPRSTLFMLVSAFSGMDTMRAAYEHAIREDYRFYSYGDASLLLRAPS

SEQ ID NO: 69999 - protein, 349 aa, Paramuribaculum intestinale
  misc_feature (1)..(349): tr|A0A2V1J0S2|A0A2V1J0S2_9BACT S-adenosylmethionine:tRN A ribosyltransferase-isomerase OS=Paramuribaculum intes tinale OX=2094151 GN=queA PE=3 SV=1
MKLSQFRFKLPEELIAQHASEHRDEARMMVVHRASGEIEHRVFKDIINYFVDGDIFVFNDTKVFPARLYGNKEKTGAKIEVSLLRELNAENKLWDVLVEPARKIRIGNKLYFGDDDSMVAEVIDNTTSRGRTLRFLYDGDHDEFKEALFKLGQTLLPEYIKREPEEEDAERYQTIYADKEGAVVAPAAGLHFSRELLKRMEIKGIHQAFLTVHSGLGNFREIDVEDLTKHRMDSEQMEVSQALVDMVNGVKDNDHRVCAVGTSVLRGIASAVSMGGHMKTYSGWTNKFIFPPYDFTVTDALVTNFHMPYSIMLMMTTAFGGYDLVMKAYDEAISEKYRFGAYGDAMLIL

SEQ ID NO: 70000 - protein, 406 aa, Paramuribaculum intestinale
  misc_feature (1)..(406): tr|A0A2V1J3C1|A0A2V1J3C1_9BACT S-adenosylmethionine:tRN A ribosyltransferase-isomerase OS=Paramuribaculum intes tinale OX=2094151 GN=queA PE=3 SV=1
MTDPRLISIEAFDYPLPDGLIARHPLAVRDTCRLLVRHGDGSLEERVFADIAQLLSSDDMLVMNNTKVINARLRFRKGGGDQGARIEVFCLEPVAPADYERSFASRIGCSWRCFVGNSKKWKEGSVTMNVDVAGEGTVVLTARRLRHEGASSVIGFEWDNDSVTFSQIIEAAGELPIPPYLNRDTEESDLTDYQTVYSRIQGSVAAPTAGLHFTPALFESLRQRGVELRELTLHVGAGTFQPVKSETIGGHPMHSEFISVGIGLIEELARTDRRVVAVGTTSVRTLESLYWLGVRASRGESLDELPQWYPYDGHPTAMSRNEAMGCLLDRLRKDGSDVLTADTRIIIAPGYRYRVVDAMVTNFHQPKSTLLLLVSAFTGGDWRRMYDLAMEREFRFLSYGDACLLL

SEQ ID NO: 70001 - protein, 349 aa, Parapedobacter composti
  misc_feature (1)..(349): tr|A0A1I1KJG0|A0A1I1KJG0_9SPHI S-adenosylmethionine:tRN A ribosyltransferase-isomerase OS=Parapedobacter compos ti OX=623281 GN=queA PE=3 SV=1
MKLSQFKFNLPESLIAYEPTDNRDESRLMVLDRKTGKIEHKIFKDILNYFDDKDVMILNNTKVFPARMYGNKEKTGATIEVFLLRELNKELRLWDVLVDPARKIRVGNKLYFGENDLLVAEVVDNTTSRGRTIRFLFDGTDEEFRRNIELLGETPLPKYIKRKATPEDKFRYQTIFAKHEGAVAAPTAGLHFSRELMKRLELKGVEFAEITLHVGLGTFRPVEVEDLTKHKMDSEQFIISEEAAKTVNKAIDSKRRVCAVGTTSMRAIESSVSADRHLKPANDWTSKFIYPPYDFSIANSMITNFHTPESTLLVMIAAFGGYEHVMNAYEVAVKEKYRFYSYGDAMLIV

SEQ ID NO: 70002 - protein, 349 aa, Parapedobacter indicus
  misc_feature (1)..(349): tr|A0A1I3QZY6|A0A1I3QZY6_9SPHI S-adenosylmethionine:tRN A ribosyltransferase-isomerase OS=Parapedobacter indicu s OX=1477437 GN=queA PE=3 SV=1
MKLSQFKFNLPESLIANEPTESRDESRLMVLDRKTGKIEHKIFKDILNYFDDKDVMILNNTKVFPARMYGNKEKTGATIEVFLLRELNKELRLWDVLVDPARKIRVGNKLYFGDDDLLVAEVVDNTTSRGRTIRFLFDGTDEEFRRNIEILGETPLPKYIKRKATPEDKFRYQTIFAKHEGAVAAPTAGLHFSRELMKRLELKGVEFAEITLHVGLGTFRQVEVEDLTKHKMDSEQFIIPEESATMVNKAIDAKRRVCAVGTTSMRAIESSVSADKHLKPANEWTSKFIYPPYEFSIANTMVTNFHTPESTLLVMIAAFGGYEHVMNAYEIAVKEKYRFYSYGDAMLII

SEQ ID NO: 70003 - protein, 349 aa, Parapedobacter koreensis
  misc_feature (1)..(349): tr|A0A1H7LYR0|A0A1H7LYR0_9SPHI S-adenosylmethionine:tRN A ribosyltransferase-isomerase OS=Parapedobacter koreen sis OX=332977 GN=queA PE=3 SV=1
MKLSQFKFNLPESLIAYEPTENRDESRLMVLDRKTGKIEHKIFKDILNYFDDKDVMILNNTKVFPARMYGNKEKTGATIEVFLLRELNKELRLWDVLVDPARKIRVGNKLYFGDDDLLVAEVVDNTTSRGRTIRFLFDGTDEEFRRNIEILGETPLPKYIKRRATPEDKFRYQTIFAKHEGAVAAPTAGLHFSRELMKRLELKGVEFAEVTLHVGLGTFRQVEVEDLTKHKMDSEQFIVPEEAAKVVNKAIDAKKRVCAVGTTSMRAIESSVSADKHLKPASEWTSKFIYPPYDFSIANSMVTNFHTPESTLLVMIAAFGGYEHVMNAYEVAVKEKYRFYSYGDAMLII

SEQ ID NO: 70004 - protein, 349 aa, Parapedobacter luteus
  misc_feature (1)..(349): tr|A0A1T5F068|A0A1T5F068_9SPHI S-adenosylmethionine:tRN A ribosyltransferase-isomerase OS=Parapedobacter luteus OX=623280 GN=queA PE=3 SV=1
MKLSQFKFNLPESLIAYEPTESRDESRLMVLDRKTGKIEHKIFKDILNYFDDKDVMILNNTKVFPARMYGNKEKTGATIEVFLLRELNKELRLWDVLVDPARKIRVGNKLYFGDDDLLVAEVVDNTTSRGRTIRFLFDGTDEEFRRNIEILGETPLPKYIKRRATPEDKFRYQTIFAKHEGAVAAPTAGLHFSRELMKRLELKGVEFAEITLHVGLGTFRQVEVEDLTKHKMDSEQFVIPEEAARIVNQAIDAKKRVCAVGTTSMRAIESSVSADKHLKPANEWTSKFIYPPYDFSIANSMVTNFHTPESTLLVMIAAFGGYENVMNAYEIAVKEKYRFYSYGDAMLII

SEQ ID NO: 70005 - protein, 349 aa, Parapedobacter sp.
  misc_feature (1)..(349): tr|A0A3N7GSC2|A0A3N7GSC2_9SPHI S-adenosylmethionine:tRN A ribosyltransferase-isomerase OS=Parapedobacter sp. OX =1958893 GN=queA PE=3 SV=1
MKLSQFKFNLPESLIAYEPTESRDESRLMVLDRKTGKIEHKIFKDILNYFDDKDVMILNNTKVFPARMYGNKEKTGATIEVFLLRELNKELRLWDVLVDPARKIRVGNKLYFGDDDLLVAEVVDNTTSRGRTIRFLFDGTDEEFRRNIEILGETPLPKYIKRKATPEDKFRYQTIFAKHEGAVAAPTAGLHFSRELMKRLELKGVEFAEITLHVGLGTFRQVEVEDLTKHKMDSEQFIIPEEAARTVNKAIDAKRRVCAVGTTSMRAIESSVSADKHLKPANEWTSKFIYPPYDFSIANSMITNFHTPESTLLVMIAAFGGYENVMNAYEIAVKEKYRFYSYGDAMLII

SEQ ID NO: 70006 - protein, 398 aa, Paraperlucidibaca baekdonensis
  misc_feature (1)..(398): tr|A0A3E0H5S3|A0A3E0H5S3_9GAMM S-adenosylmethionine:tRN A ribosyltransferase-isomerase OS=Paraperlucidibaca bae kdonensis OX=748120 GN=queA PE=3 SV=1
MQRRDFHFDLPDALIARYPLPERSASRLLCLNSRDGRVTHRQFRELPGLIAPGDLLVFNQSRVMPARLFAQKASGGQVEILIERLPTATTALTHVRASKSPKPGSTLVLSDGTVVRMAARAEALFVLEADEPWAGIMARIGEMPLPPYFQREAEASDDERYQTVYARDEGSVAAPTAGLHFDAGVMAALDARGIETAFVTLHVGAGTFQPVRADALEDHIMHAEWLTVSAEVVAAVQATRARGGRVIAVGTTSVRALESMAWASRGIDPEQWRVGQSQQSDNQPQPASVHPATDKAAVAAQLHEFAGDTRLFITPGYAWQIVDAMVTNFHLPESTLLMLVSAMAGREAVLAAYAEAIAQHYRFFSYGDAMWVTGPDWQAEPSATSSAPHAAAIHRDSL

SEQ ID NO: 70007 - protein, 352 aa, Paraphotobacterium marinum
  misc_feature (1)..(352): tr|A0A220VDS6|A0A220VDS6_9GAMM S-adenosylmethionine:tRN A ribosyltransferase-isomerase OS=Paraphotobacterium ma rinum OX=1755811 GN=queA PE=3 SV=1
MKRSKFFYELPKELIASKPAKHRTDSRLLMLDSNNEAIYHKNFVDVLDLVQPGDLLVFNNTKVMPARLFAVKETGGKVEILIERVLDNNKVLVHLKSSNTPKKDALIFIEADQNISLKMIERKEDLFILQFENKVNVFDTLEKFGHMPLPPYIERPDTDEDKNRYQTVYGEKVGAVAAPTAGLHFDQDLLDKLKEKGVNFSFVTLHVGAGTFKSVKSDDIEDHQMHSEYIDVSKDVVQQILNTKKNNKRIIAVGTTSVRALESAAKNSLKTLESFTGDTDIFIYPGYKFKVVDAMITNFHLPESTLLMLVSAFSGYQNIMEAYQKAIEKEYRFFSYGDAMFITKNDTHSSED

SEQ ID NO: 70008 - protein, 419 aa, Paraprevotella clara
  misc_feature (1)..(419): tr|G5SWK2|G5SWK2_9BACT S-adenosylmethionine:tRNA ribosy ltransferase-isomerase OS=Paraprevotella clara YIT 1184 0 OX=762968 GN=HMPREF9441_03775 PE=3 SV=1
MEETKHIQIKDFNYELPEERIAKFPLTERDQSKLLVYRHGTVGEDTFTSLPDYLPKGALMVFNNTKVIQARLHFHKDTGALIEVFCLEPVRPHDYALMFQQTGRCSWLCLVGNLKKWKSGSLSRPVEISGRSITLKATRGENRGTSHWIDFEWDDEQTTWAEILEAVGELPIPPYLNRETQESDKTTYQTVYSKIKGSVAAPTAGLHFTERVLADLDAHGIDREEVTLHVGAGTFKPVKSEEIAGHEMHTEYICVHRSTIEKLLAHGGACIAVGTTSVRTLESLYYIGVALDGNPDASEEELHVPQWMPYEYAARTRPSRSPDDGRPEALTTMQALQNVWDYLNRHELTALHTSTQIIIAPGYEYHIVRMMVTNFHQPQSTLLLLVSAFVHGDWRTIYDYALAHDFRFLSYGDSSLLIP

SEQ ID NO: 70009 - protein, 353 aa, Paraprevotella clara
  misc_feature (1)..(353): tr|A0A412U7P6|A0A412U7P6_9BACT S-adenosylmethionine:tRN A ribosyltransferase-isomerase OS=Paraprevotella clara OX=454154 GN=queA PE=3 SV=1
MKLSQFKFKLLEEQIAQYPAHHRDESRLMVLHKKSGDIEHRQYFKDILDYFDDKDVFIFNDTKVFPARLYGNKEKTGARIEVFLLRELNEDLRLWDVLVDPARKIRIGNKLYFGEDDSMVAEVIDNTTSRGRTLRFLYDGPHDEFKAALYALGEAPLPKHIVKRPAEPEDMERFQCIFARNEGAVTAPSSGLHFSRELMKRLEIKGVDFAYVTMHCGLGNFRDIDVEDLTKHKMDSEEMFVEADACRIVNAAKDGGHRVCAVGTTVQRVIETAVGTDGHLKEFTGWTNKFIFPPYEFNVADCMVANFYMPYSTLLMLTAAYGGYDLVMQGYKEALKEGYRFGTYGDAMLILND

SEQ ID NO: 70010 - protein, 431 aa, Paraprevotella xylaniphila
  misc_feature (1)..(431): tr|F3QTV3|F3QTV3_9BACT S-adenosylmethionine:tRNA ribosy ltransferase-isomerase OS=Paraprevotella xylaniphila YI T 11841 OX=762982 GN=HMPREF9442_01622 PE=3 SV=1
MPNFATLKQSTPMEETRHIQIKDFNYNLPEERIAKFPLTERDQSKLLVYRHGTVGEDTFTSLPDYLPQGALMVFNNTKVIQARLHFHKDTGALIEVFCLEPVRPHDYALMFQQTGRCSWLCLVGNLKKWKSGSLSCPVEIGGRSITLKATRGENRGTSHWIDFEWDDEQTTWAEILEAVGELPIPPYLNRETQESDKTTYQTVYSKIKGSVAAPTAGLHFTERVLADLDAHGIDREEVTLHVGAGTFKPVKSEEIAGHEMHTEYICVHRSTIEKLLAHGGACIAVGTTSVRTLESLYYIGVALNGNPDASEEELHVPQWMPYEYAARTRPVGSPDNGHPEALTTLQALQNVLDYLDRHGLTALHTSTQIIIAPGYEYHIVRMMVTNFHQPQSTLLLLVSAFVHGDWRTIYDYALAHDFRFLSYGDSSLLIP

SEQ ID NO: 70011 - protein, 353 aa, Paraprevotella xylaniphila
  misc_feature (1)..(353): tr|F3QVC2|F3QVC2_9BACT S-adenosylmethionine:tRNA ribosy ltransferase-isomerase OS=Paraprevotella xylaniphila YI T 11841 OX=762982 GN=queA PE=3 SV=1
MKLSQFKFKLPEEQIAQYPARHRDESRLMVLHKKSGDIEHREYFKDILDYFDDKDVFIFNDTKVFPARLYGNKEKTGARIEVFLLRELNEDLRLWDVLVDPARKIRIGNKLYFGEDDSMVAEVIDNTTSRGRTLRFLYDGPHDEFKAALYALGEAPLPKHIVKRPAEPEDMERFQCIFARNEGAVTAPSAGLHFSRELMKRLEIKGVNFAFVTMHCGLGCFRDIDVEDLTKHKMDSEEMFVGADACRIVNTAKEGGHRVCAVGTTVQRVLETAVGTDCNLKEFTGWTNKFIFPPYEFGVADCMVANFYMPYSTMLMLTAAYGGYDLVMQGYKEALKEGYRFGTYGDAMLILND

SEQ ID NO: 70012 - protein, 344 aa, Pararheinheimera mesophila
  misc_feature (1)..(344): tr|A0A3P3QIT4|A0A3P3QIT4_9GAMM S-adenosylmethionine:tRN A ribosyltransferase-isomerase OS=Pararheinheimera meso phila OX=1547515 GN=queA PE=3 SV=1
MQVKDFSFELPEQLIARFPKAERSSSRLLKMQRHTGELSHLVFTDLVAQLNSGDLLVFNNTRVIPARLFGQKQSGGKVEILVERVLDSQRFLAHVRASKAPKPETTILVDDTTKLKMLQRHDTLFELELLGDEPLLQMLERLGHMPLPPYIDRPDSDEDKQRYQTVYNQKPGAVAAPTAGLHFDEPLLAALKAKGVEFTYVTLHVGAGTFQPVRVDNVLDHQMHAEYIEVEQAVVDAITACKARGNRVVAVGTTSVRSLESAAQIALQQGKTLQPYSGDTKIFIYPGYQFQVIDGLVTNFHLPESTLIMLVSAFSQKDYVMHAYHTAIAQQYRFYSYGDAMLIL

SEQ ID NO: 70013 - protein, 344 aa, Pararheinheimera tangshanensis
  misc_feature (1)..(344): tr|A0A5C8LV60|A0A5C8LV60_9GAMM S-adenosylmethionine:tRN A ribosyltransferase-isomerase OS=Pararheinheimera tang shanensis OX=400153 GN=queA PE=3 SV=1
MQVKDFSFELPEQLIARFPKAERSSSRLLKMQRQTGELSHLVFTDLVAQLNSGDLLVFNNTRVIPARLFGQKESGGKVEILLERVLDSQRFLAHVRASKAPKPDTIILVDDNTKLKMLQRHDTLFELELLGDEPLLGMLDRLGHMPLPPYIDRPDSDEDKQRYQTVYNQKPGAVAAPTAGLHFDEPLLAALKAKGVEFAYVTLHVGAGTFQPVRVDNVLDHQMHAEYIEVDQAVVDAIHACKARGNRVVAVGTTSVRSLESAAQIALQQGKALQPYSGDTKIFIYPGYQFQVIDGLITNFHLPESTLIMLVSAFSQKDYVMRAYQTAIEQEYRFYSYGDAMLIL

SEQ ID NO: 70014 - protein, 366 aa, Pararhizobium polonicum
  misc_feature (1)..(366): tr|A0A1C7NYQ8|A0A1C7NYQ8_9RHIZ S-adenosylmethionine:tRN A ribosyltransferase-isomerase OS=Pararhizobium polonic um OX=1612624 GN=queA PE=3 SV=1
MRVDLFDFDLPEDNIALRPASPRDSARLLVVQPQSDEPLSDHGVMDLPSFLRPGDALVFNDTKVIPAQLEGLRRRGEDVVTEVSLTLHMRTAPDRWKAFARPAKRLKPGDRIEFGHGSNTCLMGSLDATVEEKGEAGEVTLRFDLSGPALDEAILAVGHIPLPPYIASKRPEDEKDRTDYQTVYAREQGAVAAPTAGLHFTDRLFAALDALGVERHFVTLHVGAGTFLPMKVDDTDDHVMHQEIGHVSAEAAERLNAVRARGGRIVCVGTTSLRLIESAAEENGDIRPWSGPTGIFITPGYRFRAVDMLMTNFHLPKSTLFMLVSAFSGMETMRRAYAHAIETGYRFYSYGDSSLLFRDAPMSETL

SEQ ID NO: 70015 - protein, 358 aa, Pararhizobium sp.
  misc_feature (1)..(358): tr|A0A506UAB7|A0A506UAB7_9RHIZ S-adenosylmethionine:tRN A ribosyltransferase-isomerase OS=Pararhizobium sp. BGM RC6574 OX=2590452 GN=queA PE=3 SV=1
MRVDLFDFELPDERIALRPASPRDTARQLVVRPGEPLEDRVVADLDTLLEPGDALVLNDTRVIPARLDGIRRRGEDARTHVQATLHMRTDGNTWKAFARPGKRIRAGDRIAFSGQEDGEGKLDAEVVEKGEAGEVTLRFGLAGGELDRAIAAAGHVPLPPYIASKRAEDASDIEDYQTVYARENGAVAAPTAGLHFTEDLFERLRVRGVSLHFVTLHVGAGTFLPVKADDTGDHRMHSEIGQVSEETAAALNAVRASGGRVVSVGTTSLRLLESAAREDGTLEPWSGATDIFITPGYRFRFVDVLMTNFHLPRSTLFMLVSAFSGLETMQAAYAHAIANGYRFYSYGDSNLLFRSEPS

SEQ ID NO: 70016 - protein, 348 aa, Pararhodobacter aggregans
  misc_feature (1)..(348): tr|A0A2T7UR63|A0A2T7UR63_9RHOB S-adenosylmethionine:tRN A ribosyltransferase-isomerase OS=Pararhodobacter aggre gans OX=404875 GN=queA PE=3 SV=1
MKLSDFDFDLPEDLIATRPMKPRPAARLLLAEGDAIADRHVRDLVDILRPGDRLVLNNTRVIPARLFGERLRDTKDGSGRAKVEVTLLNPEPSGGWRVLARPLRKLAPGDRLDFGAGLTAVVSGKDETEAVLAFDLTGPAFDAALEEAGRMPLPPYIESRRPADAQDREDYQPVFARERGAVAAPTASLHFDQPLLDALRAMGVDFTEVTLHVGAGTFLPVKVEDVTTHRMHAEWGEVTPEAAAQINVTKAAGGRVIPVGTTALRLIESAARSGRVEPWRGETDIFIYPGFTFHAANGLLTNFHLPKSTLLMLVSALMGAERIRAIYDHAVTERYRFFSYGDASLLLP

SEQ ID NO: 70017 - protein, 348 aa, Pararhodobacter sp.
  misc_feature (1)..(348): tr|A0A2T8HXD2|A0A2T8HXD2_9RHOB S-adenosylmethionine:tRN A ribosyltransferase-isomerase OS=Pararhodobacter sp. A M505 OX=2172121 GN=queA PE=3 SV=1
MRLSDFDFDLPEELIATRPVRPRPAARLLHVEGGAMVDRQVADLLDILRPGDRLILNNTKVIPARLFGERLRDTRDGSGRAKVEVTLIGPEGQGAWRALARPLRKLAAGDRIEFSEDLAAIVRGKSEGEAVLVFEQSGTDFDAALEAAGKMPLPPYIESRRPADAQDREDYQTVFARESGAVAAPTASLHFDDGLLAALRAKGVMMSEVTLHVGAGTFLPVKVEDVTTHKMHAEWGEVSEAAAEEINATRAQGGRVIAVGTTALRLIESAARSGRVESWRGETDIFIYPGFEFHATDGLMTNFHLPKSTLLMLVSALMGKGLMDAVYAHAIAERYRFFSYGDASLLIP

SEQ ID NO: 70018 - protein, 351 aa, Pararhodobacter sp.
  misc_feature (1)..(351): tr|A0A2U2CE54|A0A2U2CE54_9RHOB S-adenosylmethionine:tRN A ribosyltransferase-isomerase OS=Pararhodobacter sp. C IC4N-9 OX=2184063 GN=queA PE=3 SV=1
MKLSDFDFDLPEELIATRPVKPRPAARLLLAEGDTIADRHVRDLTQILQPGDRLVLNNTRVIPARLFGTRSRATKDGSGVARIEATLLNPDPSGGWRVLARPLRKLAPGDRVDFGAGLTATVSARDETEAVLDFDLKGPDFDAALDAAGRMPLPPYIESRRPADAQDAEDYQTVFARLRGAVAAPTASLHFDAALLDALKARGVAFTEVTLHVGAGTFLPVKVEDVKTHRMHAEWGEVTPDAADAINATKAAGGRVIPVGTTALRLIESAARSGRVEPWRGETDIFIYPGFEFHAADALMTNFHLPKSTLLMLVSALMGKERIDAIYAHAVASGYRFFSYGDASLLVPRRE

SEQ ID NO: 70019 - protein, 351 aa, Pararhodospirillum oryzae
  misc_feature (1)..(351): tr|A0A512H3V4|A0A512H3V4_9PROT S-adenosylmethionine:tRN A ribosyltransferase-isomerase OS=Pararhodospirillum or yzae OX=478448 GN=queA PE=3 SV=1
MRVDLFDFPLPRECIAVRPAVPRDSARLLRVPATGPFQDLGVRDLPGLLDPGDVLVVNDTRVIPARLKGRVGEGGVEVTLHLQEAPDRWRCFARPARKLTLGRVVTFAPDFTAEVVARGEGGEVVLSFNRAGPALTQALEAHGRLPLPPYMGREDDARDREDYQTTYASHDGAVAAPTAGLHLTPALFQALADRGVACEALTLHVGAGTFLPVTADDTADHVMHAERGILTPEVAGRLNQARAEGRRIVAVGTTVARLLESAADDAGVIHPFETTTRLFLVPGARFKVVDRLMTNFHLPRSTLFMLVSAFAGLGRMQAAYAHAIKAGYRFYSYGDACLLDRADLAAGDERA

SEQ ID NO: 70020 - protein, 478 aa, Pararhodospirillum photometricum
  misc_feature (1)..(478): tr|H6SQS3|H6SQS3_PARPM S-adenosylmethionine:tRNA ribosy ltransferase-isomerase OS=Pararhodospirillum photometri cum DSM 122 OX=1150469 GN=queA PE=3 SV=1
MTLSLSLPWATPKVMVPSKTRKKRSARRPSLNRVSPAANCPSWARSAKRSIKVGSSPRKNGWWSRVSRRSVSSAMVSPLSNRPTFRRPARRQRNSLSPPGAVLVKHTKWRVTRKTRLGRPDSFGAKAPGMRVDLFDFDLPRERIAVRPAEPREAARLLRVGPGAALQDLSVRDFPALLAPGDLLVLNDTRVIPARLKGRVGAGGVEVTLHFQEALDCWRCFAKPARKLTPGREILFAEDFRAVVESRGEGGEAVLRFNVAGAALMAALEAHGRLPLPPYMGREDDARDRTDYQTVYARVDGAVAAPTAGLHLTPALLDALAARGIGRVAVTLHVGAGTFLPVTADDTNDHRMHAERGVLTPEVAATINATRAAGGKIVAVGTTALRLLESAADDSGIVHPFDEATRLFLVPGARFKVVDRLLTNFHLPRSTLFMLVSAFAGLETMHAAYAHAIAAGYRFYSYGDTSLLSRAVAGSAAD

SEQ ID NO: 70021 - protein, 354 aa, Parasaccharibacter apium
  misc_feature (1)..(354): tr|A0A2C6IXL1|A0A2C6IXL1_9PROT S-adenosylmethionine:tRN A ribosyltransferase-isomerase OS=Parasaccharibacter ap ium OX=1510841 GN=queA PE=3 SV=1
MTDELSLYDFTLPRDSIATEPARPRDTARLLHVIPPALTGTEQARLTLHHIHNLPDLLKEGDLLIANNTEVIPAKMEARRGEARIGITLDRILPEGQWHALARNARKLRPHDTLHFEDDPVTATILTNEGDGAITLRFSVEGDAFDRFLERRAALALPPYIARPHGPTEADTHDYRTIFSRFRGAVAAPTAGLHFTNDVLKALTAKGIAQETLTLHVGAGTFLPVRSSIAEHKMHAEWGHIPPETAQRINETRARGGRIVAVGTTSLRLLESAADEHGLIHPWQGETSIFIKPGYRFRAVDALLTNFHLPRSTLFMLVCAFAGTDTMRHAYHYAITEGLRFYSYGDACLLERTP

SEQ ID NO: 70022 - protein, 354 aa, Parasaccharibacter apium
  misc_feature (1)..(354): tr|A0A2S4PG21|A0A2S4PG21_9PROT S-adenosylmethionine:tRN A ribosyltransferase-isomerase OS=Parasaccharibacter ap ium OX=1510841 GN=queA PE=3 SV=1
MTDDLSLFDFTLPRDHIATEPARPRDMAQLLHVVPPALAGTDDATLSLHRIRNLPELLKEGDLLVANDTEVIRAKMEARRGDAKIGITLDRILPEGQWHALARNARKLRPGDRLHFEDDPVTADVLTNEGDGAVTLRFSVEGDEFDDFLERRAALALPPYIARPNGPTEADNSDYRTIFSRFRGAVAAPTAGLHFTEELLEALAARGIQKQTLTLHVGAGTFLPVRSTIAEHKMHAEWGHIDEETARLINGTRANGGRVVAVGTTSLRLLESAADEQGIVHPWTGETSIFIRPGYRFRAVDALLTNFHLPRSTLFMLVCAFAGTETMRHAYHHAIAEGLRFYSYGDACLLERAP

SEQ ID NO: 70023 - protein, 345 aa, Parashewanella curva
  misc_feature (1)..(345): tr|A0A3L8PYY3|A0A3L8PYY3_9GAMM S-adenosylmethionine:tRN A ribosyltransferase-isomerase OS=Parashewanella curva OX=2338552 GN=queA PE=3 SV=1
MRVADFSFDLPDELIARYPTKERTASRLLTLDGNSGEVHDKCFTDLIDFIEAGDLMVFNNTRVIPARLFGQKATGGKLEILVERMLDDKRILAHVRSSKSPKVDAIIHLDNDYQMKMLARQEALFELELLSDRTVLEVLEEIGHMPLPPYIDRPDEDSDKERYQTVYNENPGAVAAPTAGLHFDDETLAKLKAKGVNTAFVTLHVGAGTFQPVRVDDIEDHVMHSEWANVPSDVVEQIKQTKAAGKRVIAVGTTSVRSLESAAKANEGEIAPFSADTDIFIYPGYEFFVVDAMVTNFHLPESTLIMLISAFAGKQPVMSAYQHAIEEKYRFFSYGDAMFITRKGK

SEQ ID NO: 70024 - protein, 345 aa, Parashewanella spongiae
  misc_feature (1)..(345): tr|A0A3A6TSH4|A0A3A6TSH4_9GAMM S-adenosylmethionine:tRN A ribosyltransferase-isomerase OS=Parashewanella spongi ae OX=342950 GN=queA PE=3 SV=1
MRVADFSFDLPDELIARYPTEQRSASRLLTLDGNTGQISDKQFNDLSDFIQPGDLMVFNNTRVIPARLFGQKSTGGKLEILVERMLDDKRILAHVRSSKSPKVDAIIDLDNGYQMKMLARHDTLFELELQSELTILEVLEEIGHMPLPPYIDRPDEDADKERYQTVYNETPGAVAAPTAGLHFDDEMLARLKDKGVNTAFVTLHVGAGTFQPVRVDNVLEHKMHSEWANVPQSVVDLIEQTKAAGNRIIAVGTTSVRSLESAARENDGKIAAYSSDTDIFIYPGYEFNVVDAMVTNFHLPESTLIMLISAFADQQLVMDAYQHAIKQKYRFFSYGDAMFITRKTK

SEQ ID NO: 70025 - protein, 358 aa, Parasphingopyxis lamellibrachiae
  misc_feature (1)..(358): tr|A0A3D9FDX7|A0A3D9FDX7_9SPHN S-adenosylmethionine:tRN A ribosyltransferase-isomerase OS=Parasphingopyxis lame llibrachiae OX=680125 GN=queA PE=3 SV=1
MRRWVPQRRTIRRNNRSVRVDLFDFALPEDRIALRPASPRDSARMLVLDGDAMVDRLVSDLPDCLRAGDILVFNDTRVIPAQLEGRRGEAKIGATLHKREGLRQWRAFIRNAKRIREGDRIDFGGEVAAIASDRGADGSFLLTFEGSEPVEILLERAGTMPLPPYIAGKRPTDDRDAADYQTMFAREKGAVAAPTAALHFTPELLTRLTAAGVDHVTLTLHVGAGTFLPMKADDSDDHVMHAEWGRIDTGTAKRLNAARAAGGRIIGVGTTSLRLLESAADEEGLIHPFEDDTAIFITPGYRFRAIDGLMTNFHLPRSTLFMLVSALMGRERMQSAYKHAIAEKYRFYSYGDASLLLP

SEQ ID NO: 70026 - protein, 341 aa, Parasporobacterium paucivorans
  misc_feature (1)..(341): tr|A0A1M6ER10|A0A1M6ER10_9FIRM S-adenosylmethionine:tRN A ribosyltransferase-isomerase OS=Parasporobacterium pa ucivorans DSM 15970 OX=1122934 GN=queA PE=3 SV=1
MNLHDYYYELPEELIAQDPLADRSGSRLLTVDRRTGETGHTIFRNIVDYLQEGDCLVLNNTKVLPARLFGVKEDTGAIIEVLLLTRKENNNWEVLVRPGKKARPGTRIVFGNGELKGEILEIVEEGNRLIHFEYEGIFEEILDKLGQMPLPPYIKHTLEDKTRYQTVYAKHEGSAAAPTAGLHFTRELLLEIERKGVTIANVTLHVGLGTFRPVKAENILEHHMHSEYFSIDEEEARLINRTKERGGRIVAVGTTSTRTLESAADENGFITAKSGWTEIFIYPGYEFKVIDALITNFHLPESTLLMLVSAFSSREVILRAYNEALENKYRFFSFGDAMLIY

SEQ ID NO: 70027 - protein, 354 aa, Parasutterella excrementihominis
  misc_feature (1)..(354): tr|R5EJI0|R5EJI0_9BURK S-adenosylmethionine:tRNA ribosy ltransferase-isomerase OS=Parasutterella excrementihomi nis CAG:233 OX=1263099 GN=queA PE=3 SV=1
METKEQHLSDFDFELPESLIAQYPLKDRAASRLLHVKPDGSVEDLHFRDILDLLKPGDLLVFNNTKVIKARLNGKKETGGVFEAMTERVTGTYEAISMMRASKAAKPGTILYFDHPEGKEPARAEVLGREGEFFRLRFDHPVLEVLDEYGKVPLPPYIQHAAEKSDESRYQTVYAKYPGAVAAPTAGLHFTDELLQQIRDKGCEEVFVTLHVGAGTFQPVRVENLSEHVMHSEWYSISPEAAEKINKAKTERRRVVCVGTTSLRTVEASASQNPEGKVRAESADTRLFIKPGYEFKVCDAMVTNFHLPKSTLVMLVIALCGRDEILSAYKHAVDEKYRFFSYGDACFLEQKVNQ

SEQ ID NO: 70028 - protein, 354 aa, Parasutterella excrementihominis
  misc_feature (1)..(354): tr|F3QH25|F3QH25_9BURK S-adenosylmethionine:tRNA ribosy ltransferase-isomerase OS=Parasutterella excrementihomi nis YIT 11859 OX=762966 GN=queA PE=3 SV=1
METKEQHLSDFDFELPESLIAQYPLKDRAASRLLHVKPDGSVEDLHFRDILNLLKPGDLLVFNNTKVIKARLNGKKETGGVFEAMTERVTGTYEAISMMRASKAAKPGTILYFDHPEGKEPARAEVLGREGEFFRLKFDHPVLEVLDEYGKVPLPPYIQHAAEKSDESRYQTVYAKYPGAVAAPTAGLHFTDELLQQIRDKGCEEVFVTLHVGAGTFQPVRVENLSEHVMHSEWYSISPEAAEKINKAKAEGRRVVCVGTTSLRTVEASASQNPEGKVRAESADTRLFIKPGYEFKVCDAMVTNFHLPKSTLVMLVSALCGRDEILAAYKHAVDEKYRFFSYGDACFLEQKVNQ

SEQ ID NO: 70029 - protein, 104 aa, Parcubacteria bacterium
  misc_feature (1)..(104): tr|A0A124FT21|A0A124FT21_9BACT S-adenosylmethionine:tRN A ribosyltransferase-isomerase OS=Parcubacteria bacteri um 34_609 OX=1641386 GN=XD85_0651 PE=3 SV=1
MKEEWYSISSENARIINQAILDKRRIVGVGTSVTRTLESAFVQDRVSEGTRWTNLFIYPGYQFQVLGALVTNFHLPRSTPLLLAAAFAGKDLLLKAYREAIHKN

SEQ ID NO: 70030 - protein, 156 aa, Parcubacteria bacterium
  misc_feature (1)..(156): tr|A0A101GSY7|A0A101GSY7_9BACT S-adenosylmethionine:tRN A ribosyltransferase-isomerase OS=Parcubacteria bacteri um 34_609 OX=1641386 GN=XD85_0652 PE=3 SV=1
MDITLFDFELPPSYIAQEPLKKRDDSKLMILDRKTGLVEHKKFFQIIDYLKPDDLLVLNDSKVVPVRLVGYKKKTGGKVEVLLIKSVSGYLWQVLLKPGRRTPPGTEIIFSSQLKGMVIGKDEKEGVYLLEIQVKGNFREILGKIGKMPTPPYIEG

SEQ ID NO: 70031 - protein, 367 aa, Parcubacteria group
  misc_feature (1)..(367): tr|A0A554KTJ0|A0A554KTJ0_9BACT S-adenosylmethionine:tRN A ribosyltransferase-isomerase OS=Parcubacteria group b acterium Gr01-1014_13 OX=2017175 GN=queA PE=3 SV=1
MLTSDFNYNLPKQLIAQIPLEPRDSSRLMVLDRETKKVEDKYFFDIVDYLQKGDLLVWNNTKVFKARLRGTLALDEQVIEVKEKINSSDKILNVGPVEIFLVKPMENNKVWKVLAKPGKKLRLGMKIVFAPDFSAQVLLKENDGTYLIEFAEDDMLVRAKANKYGEVPTPPYVETVSSSERYQTVYAKEEGSVAAPTAGFHFTPELIDKLKSKGVEFAEVTLHVGLGTFLPVKTDSLEEHLMHSEWVELTSKNTDLINAAKAEGRRVVAVGTTTVRALEGIALKFAGQTNVEPILRQYSGDINIFIYPGFKFKVVDALITNFHLPKSTLLMLVSAFIGNRELVLDCYQKAVEEKYRFFSFGDAMFVK

SEQ ID NO: 70032 - protein, 345 aa, Parcubacteria group
  misc_feature (1)..(345): tr|A0A1V5R2N8|A0A1V5R2N8_9BACT S-adenosylmethionine:tRN A ribosyltransferase-isomerase OS=Parcubacteria group b acterium ADurb.Bin326 OX=1852943 GN=queA PE=3 SV=1
MSNISKGKKKKLSLSDFDYVLPSELIAQEPIKPRDAARLLVLDKKSGKMMHQHFFDLPEILRPGDVLVFNNSKVIPARLYGTKPTGGKVEIFLLQPAGRGMWQCLVKGKVKTGEKITLAPKVIAESVKQLEDGREWLIKFNVNNKKLFSLGETPTPPYIKKKADLKDYQTVFAKTEGSVAASTAGLHFTKKLLHQLKQRGIKVEFVTLHVGLGTFASVETENILEHKMHSEWASIDAATAKRLVQAKSQGKRIIAVGTTASRVLESFADRSGAIKEQNGWTDIFIYPGYKFKFVDALITNFHLPKSTLLMLVSALASKKNIDQAYREAVRLKYKFFSFGDGMLIK

SEQ ID NO: 70033 - protein, 342 aa, Parendozoicomonas haliclonae
  misc_feature (1)..(342): tr|A0A1X7AEH0|A0A1X7AEH0_9GAMM S-adenosylmethionine:tRN A ribosyltransferase-isomerase OS=Parendozoicomonas hal iclonae OX=1960125 GN=queA PE=3 SV=1
MRVSDFHFELPDELIARYPMPERSASRLLVVEPETGQPVHRTFRDIINYLNPGDLLVLNNTRVIPARLFGQKESGGKIEVLVERVLDEHRVLAHVRSSKSPKPGARLLMEGGLEATMVERQDALFLLEFDGEEPVVHLLEQHGHMPLPPYITREDELGDRERYQTVYGEKKGAVAAPTAGLHFDEELLAEVEAKGINKAFVTLHVGAGTFQPVRVDDIKDHHMHSEYLEVSEEVVEAIKRTKANGGRVIAVGTTSVRSLETAARDGELKPYAGETDIFIYPGYTFNVVDALITNFHLPESTLLMLVSAFSGYDEIMNAYRVAIDERYRFFSYGDAMFLNRKG

SEQ ID NO: 70034 - protein, 408 aa, Parolsenella catena
  misc_feature (1)..(408): tr|A0A3G9KAX2|A0A3G9KAX2_9ACTN S-adenosylmethionine:tRN A ribosyltransferase-isomerase OS=Parolsenella catena O X=2003188 GN=queA PE=3 SV=1
MRTDDFDYPLPDELIAQAPADPRDSCRLLVLHRGGGAGVTGEAEAIADGGSVEHRHFYDIADYLEPGDLLVANKTRVMPARLVGRKAKTGGVAETLLLKRREDLDAMGHVWECLVNPGKRLKPGALIEYRAGGLHAPESSPVVLTGEVVDFVEDSKGGRLVRFEPKGEDPATGEPRTLDAAIHAAGHVPLPPYITSYEGDPEKYQTVYAMHEEHSAAAPTAGLHFTPELIERLKAKGIGWATVELEVGIDTFRLVEEDDPTQHVMHTERYHVTRDVIDAVHATKAAGHRVVAVGTTAVRSLESAFDAEAPAAEPPMVARGFAGREDSADTLGRGDIVVRENATTQLYLMPGSTYHVVDALITNFHVPRSTLMMLVSALATHDQIMDAYAAAMRERYRFLSFGDAMLIE

SEQ ID NO: 70035 - protein, 360 aa, Parvibacter caecicola
  misc_feature (1)..(360): tr|A0A3N0AD35|A0A3N0AD35_9ACTN S-adenosylmethionine:tRN A ribosyltransferase-isomerase OS=Parvibacter caecicola OX=747645 GN=queA PE=3 SV=1
MRTDDFDYPLPEELIAQEPWPVRDECRLLVMDRESGALQDRIFKDIAEYVRPGDVFVVNETRVRPARLLGQKRGSGGAAEVFLLREVLGQTPHGNQSALWEVLVRPGKRLKPGSGAVVDIPDAQGQVALSVEVVDWVEGGQKGERIARLSTALPSLDEALHAAGKTPLPPYIKEYNGDMELYQTVYSRRESSAAAPTAGLHFTPALIEAVQVAGAQWRTVELEVGLDTFRVVDEEDPAAHAIHTEFYSVSPETAAVVNEARDAGGRVIAVGTTSVRSLESAAAETGRVRPVDREATSLYILPGYQFKAVDALITNFHVPRSTLMMLVSAFSSRENVMAAYRHAIEQRYRMLSFGDAMFIC

SEQ ID NO: 70036 - protein, 350 aa, Parvibaculum lavamentivorans
  misc_feature (1)..(350): sp|A7HXM7|QUEA_PARL1 S-adenosylmethionine:tRNA ribosylt ransferase-isomerase OS=Parvibaculum lavamentivorans (s train DS-1 / DSM 13023 / NCIMB 13966) OX=402881 GN=queA PE=3 SV=1
MRVSDFDFDLPEELIALRPARPRDSARMLVIGPAENALADKSVSDLPSHLREGDILVFNDTKVIPARLFGTRRRGEASARIEVMLHKRESADEWRAFLRPAKKLNLSETIDFPGGLSAAVEEKGEGGEAGLRFSLSGPALDAAIAAAGEMPLPPYIARKRAADDEDVADYQTLHADEPGAVAAPTAGLHFTPALMAAIEARGVSTVRLTLHVGAGTFLPVTAEDTDTHKMHAERGEITEAEAAAINEARAKGGRIVAVGTTSLRLLESAVDEAGTVHPFRGETDIFITPGYRFRAVDVLMTNFHLPRSTLFMLVSALRSTEEMKRAYAHAVAEKYRFYSYGDACLIYGAS

SEQ ID NO: 70037 - protein, 356 aa, Parvibaculum sp.
  misc_feature (1)..(356): tr|A0A2E1EFV2|A0A2E1EFV2_9RHIZ S-adenosylmethionine:tRN A ribosyltransferase-isomerase OS=Parvibaculum sp. OX=2 024848 GN=queA PE=3 SV=1
MRVSDFDFELPENLIALRPARPRDAARLLVIGPEENALEDRIVRDLPSFLAPGDLLVFNDTKVIPARLFGTRTRGEASAKIEVMLHRRVSASEWRAFLRPAKKLNIGEEISFPGGLSATVEEKAEGGEAGLRFSASGPALDAAIAAAGEMPLPPYIARKRATDKEDLADYQTLYAAEPGAVAAPTAGLHFTPELMDALAARGVGTVRLTLHVGAGTFLPVTAEDTEEHRMHAEWGEISEEEAAAINEARAKGGRIVAVGTTSLRLLESAADAKGVVHPFAKETDIFITPGYRFRATDILMTNFHLPRSTLFMLVSALRSTDEMKRAYAHAVAAKYRFYSYGDACLIYGAPMNGTKT

SEQ ID NO: 70038 - protein, 356 aa, Parvibaculum sp.
  misc_feature (1)..(356): tr|A0A2D8RUM0|A0A2D8RUM0_9RHIZ S-adenosylmethionine:tRN A ribosyltransferase-isomerase OS=Parvibaculum sp. OX=2 024848 GN=queA PE=3 SV=1
MRVSDFDFELPEELIALRPARPRDAARLLVIGPAENALEDRTVSDLPSFLRAGDLLVFNDTKVIPARLFGTRTRGEASARIEVMLHRRVSADEWRAFLRPAKKLNTGEEIAFPGGFSATVEEKAEGGEAGLRFSLSGPALDAAIASAGEMPLPPYIARKRAPDDEDLADYQTLHAAEPGAVAAPTAGLHFTPALMAALDARGVSTVRLTLHVGAGTFLPVTAEDTDAHKMHAEWGEISGAEAATINEARARGGRIVAVGTTSLRLLESAADAKGVVHPFAKETDIFITPGYRFRATDILMTNFHLPRSTLFMLVSALRSTDEMKRAYAHAVASKYRFYSYGDATLIYRGLIYGSAE

SEQ ID NO: 70039 - protein, 361 aa, Parvibium lacunae
  misc_feature (1)..(361): tr|A0A368L1X6|A0A368L1X6_9BURK S-adenosylmethionine:tRN A ribosyltransferase-isomerase OS=Parvibium lacunae OX= 1888893 GN=queA PE=3 SV=1
MQLDDFDYFLPPELIAQYPLSHRSASRLLACPRDLDGHIGHQDLQFTDLPQFLQAGDVLVFNNTKVIPARLYGRKASGGQIEVLIERILNDHQAWTHIKASNAPPAGSMLHFEMGEVHFQADVLGRSGPESSLFHLRFHLPTEITNLYSLLEAYGELPLPPYITHTPDSQDKDRYQTVYASQPGAVAAPTAGLHFDTPLLEQLRKQGIHLAYLTLHVGAGTFQPVRVNTIAEHRMHSEWYHIPEDTAATIAAAKAQGRRVIAVGTTSMRSLEAACLRGQGAVCSGSAETDIFITPGFKFQAVDALITNFHLPKSTLLMLIAAFVGMDAMRAAYAHAIAQHYRFFSYGDAMYLERGPLPSSN

SEQ ID NO: 70040 - protein, 347 aa, Parvimonas micra
  misc_feature (1)..(347): tr|A8SLR6|A8SLR6_9FIRM S-adenosylmethionine:tRNA ribosy ltransferase-isomerase OS=Parvimonas micra ATCC 33270 O X=411465 GN=queA PE=3 SV=1
MNSLKTDDFDFELDESLIAQFPLKDRSSSKLLVVNRENFDLEHKNFKNIVDYIKKDDVLVINDTKVIPARLFGARPGKDEAIEVLLLKKHDDNTWETLVKPGKKMKIGSKVEFGNGKLLGEVVGISEEGERFVKFSYDGIFEEILDELGTMPLPPYIHEKLEERDRYQTVYAKHNGSAAAPTAGLHFTDELLKELQEKGVKIARVTLHVGLGTFRPVKVDNVLEHKMHDEYYEISEESVEIINSAKEKGNRIFAVGTTSVRTLETVYKKYGELVACKGNTDIFIYPGFEFKVVDCLITNFHLPKSTLIMLVSAFASKEIIMNAYNEATKNKYRFFSFGDAMLIKKEK

SEQ ID NO: 70041 - protein, 347 aa, Parvimonas micra
  misc_feature (1)..(347): tr|A0A0B4S226|A0A0B4S226_9FIRM S-adenosylmethionine:tRN A ribosyltransferase-isomerase OS=Parvimonas micra OX=3 3033 GN=queA PE=3 SV=1
MNSLKTDDFDFELDESLIAQFPLKDRSSSKLLVVNRENFDLEHKNFKNIVDYIKKDDVLVINDTKVIPARLFGARPGKDEAIEVLLLKKHEDNTWETLVKPGKKMKIGSKVEFGNGKLLGEVVGISEDGERFVKFSYDGIFEEILDELGTMPLPPYIHEKLEERDRYQTVYAKHNGSAAAPTAGLHFTDELLKELQEKGVKIARVTLHVGLGTFRPVKVDNVLEHKMHDEYYEISEESVEVINSAKEKGNRIFAVGTTSVRTLETVYKKFGKLVACKGNTDIFIYPGFEFKVVDCLITNFHLPKSTLIMLVSAFASKEIIMNAYNEATKKKYRFFSFGDAMLIKKEK

SEQ ID NO: 70042 - protein, 347 aa, Parvimonas sp.
  misc_feature (1)..(347): tr|F5TC23|F5TC23_9FIRM S-adenosylmethionine:tRNA ribosy ltransferase-isomerase OS=Parvimonas sp. oral taxon 110 str. F0139 OX=767100 GN=queA PE=3 SV=1
MNILKTDDFDFELDESLIAQFPLKDRSSSKLLVVNRENFDLEHKNFKNIVDYIKKDDVLVINDTKVIPARLFGARPGKEEAIEVLLLKKHEDNTWETLVKPGKKMKIGSKVEFGNGKLLGEVVGISEDGERFVKFSYDGIFEEILDELGTMPLPPYIHEKLEERDRYQTVYAKHNGSAAAPTAGLHFTDELLKELQEKGVKIARVTLHVGLGTFRPVKVDNVLEHKMHDEYYEISEETVEIINTAKEKGNRIFAVGTTSVRTLETVYKKYGKLVACKGNTDIFIYPGFEFKVVDCLITNFHLPKSTLIMLVSAFASKEIIMNAYNEATKNKYRFFSFGDAMLIKKEK

SEQ ID NO: 70043 - protein, 359 aa, Parvimonas sp.
  misc_feature (1)..(359): tr|A0A134AGC9|A0A134AGC9_9FIRM S-adenosylmethionine:tRN A ribosyltransferase-isomerase OS=Parvimonas sp. KA0006 7 OX=1588755 GN=queA PE=3 SV=1
MYFIFYIEGRELMKSLKTDDFDFELDESLIAQFPLKDRSSSKLLVVNRENFDLEHKVFKDIVEYINSGDVLVINDTKVIPARLFGSRPNKEEVIEVLLLKKHEDNTWETLVKPGKKMKIGSKVEFGNGKLVGEVVGISVDGERFVKFSYDGIFEEILDELGTMPLPPYIHEKLEEKNRYQTVYAKHNGSAAAPTAGLHFTDELLEKLKEKGVKIARVTLHVGLGTFRPVKVDNVLEHKMHEEYYEISKESVEIINSAKENGNRVFAVGTTSVRTLETVYKKYGKLVACNGDTDIFIYPGFEFGVVDCLITNFHLPKSTLIMLVSAFSSKEIIMNAYNEATKNRYRFFSFGDAMLIKKEK

SEQ ID NO: 70044 - protein, 356 aa, Parvularcula bermudensis
  misc_feature (1)..(356): tr|E0THV1|E0THV1_PARBH S-adenosylmethionine:tRNA ribosy ltransferase-isomerase OS=Parvularcula bermudensis (str ain ATCC BAA-594 / HTCC2503 / KCTC 12087) OX=314260 GN= queA PE=3 SV=1
MRVDLFDYDLPEEQIALVPPPERDGARLLIVPPNGPFGHDLIAHLAEHFGPSDVLILNDTKVIPATLAGMRPARDVGGGDPAGVGIDITLLKCLEERDDGVRWQAFVRPAKRVRAGDDIEIGPVTARVKRREGAEAVLHIPLTPSAFQSFLYDHGTMPLPPYIARKRAVEVSDQDRYQTVFGKRPGSVAAPTAGLHFTDRLLSAIAERGATILRVTLHVGAGTFLPITAADCTDHRMHSEWGEVSPPVAERLRAAKAGGERITCVGTTALRIVETAAQSGEVQAFAGETDIFITPGFSFQCADRLLTNFHLPRSTLLMLVSAFSGRERILSAYREAINEGYRFFSYGDACLLERVS

SEQ ID NO: 70045 - protein, 124 aa, Parvularcula sp.
  misc_feature (1)..(124): tr|A0A357LEI2|A0A357LEI2_9PROT S-adenosylmethionine:tRN A ribosyltransferase-isomerase (Fragment) OS=Parvularcu la sp. OX=1979207 GN=DEA50_10995 PE=3 SV=1
RDHRRPGGEITEDQAACINAARASGGRIVAVGTTSLRLLESAADEAGFIRPFTAETDIFITPGYRFRSVDALMTNFHLPRSTLFMLVCAFAGTETMKRAYAHAIDAGYRFYSYGDASLLERAVR

SEQ ID NO: 70046 - protein, 350 aa, Parvularcula sp.
  misc_feature (1)..(350): tr|A0A2E1XK93|A0A2E1XK93_9PROT S-adenosylmethionine:tRN A ribosyltransferase-isomerase OS=Parvularcula sp. OX=1 979207 GN=queA PE=3 SV=1
MRVDLFDFDLPPERIALSPAVPRDSARLLHVKPSGVEDRIVRDLPSLLRPGDLLVANDTKVIPAQLFGERPARESGGDPVSIEATLHKDLGGNRWRAFVRPAKRIREGDLIRFGEALSAEVVARDGAEAELQFDTGRDSFYAALDKAGVMPLPPYIARKRPAGEEDKASYQTMFAEEVGSVAAPTAGLHFTPALIAALRDKGVKQTTITLHVGAGTFLPVTAEDTADHKMHSEWGEITAEQAAAINTARGAGGRVIAVGTTSLRLLESAAAEGGTINPFAAETDIFITPGYRFKAVDMLMTNFHLPRSTLFMLVSAFAGTDAIKAAYAHAIEKQYRFYSYGDACLLERAS

SEQ ID NO: 70047 - protein, 363 aa, Pasteurella aerogenes
  misc_feature (1)..(363): tr|A0A448K211|A0A448K211_PASAE S-adenosylmethionine:tRN A ribosyltransferase-isomerase OS=Pasteurella aerogenes OX=749 GN=queA PE=3 SV=1
MHLSDFYFDLPDELIARYPKVERTSSRLLQLNGQNGELFHRTFSDVVDLINEGDLLIFNNTRVIPARIFGRKASGGKIEVLIERILTENRFLAHIRASKAPKEGAELILGEDKLGEEKGIKARMVSRHDALFEVEIAEKNTALLEILPQIGHMPLPPYIDRPDEEADKERYQTVYNKVPGAVAAPTAGLHFDQPLLEKLKAKGVNFAFVTLHVGAGTFQPVRVEHIEDHKMHAEYVEVPQEVVEAILATKAHGKRVIAVGTTSVRSIESAALFAEENQLNTLIAPFFSDTSIFIYPGKKFRVTDALITNFHLPESTLIMLVSAFAGYQHTMNAYKSAVENRYRFFSYGDAMFISKNPNVKGLE

SEQ ID NO: 70048 - protein, 363 aa, Pasteurella bettyae
  misc_feature (1)..(363): tr|I3DCE9|I3DCE9_9PAST S-adenosylmethionine:tRNA ribosy ltransferase-isomerase OS=Pasteurella bettyae CCUG 2042 OX=1095749 GN=queA PE=3 SV=1
MQLSDFYFDLPDELIARYPKIERTSSRLLQLNGETGELNHLVFNDVLDLINEGDLLIFNNTRVIPARMYGRKSSGGKIEVLIERVLTETRFLAHVRASKAPKEGAELILGEDKLGEGNGVKAIMIGRQDALFELEISEKGTALLDVLQKIGHMPLPPYIDRPDEDSDQERYQTVYNKVPGAVAAPTAGLHFDNTLLDKLKSKGVNFAFVTLHVGAGTFQPVRVENIEDHHMHAEYVEVSQEVVDAILATKANGKRVIAVGTTSVRSIESAALNAEQKASSQLIEPFFSDTSIFIYPGKKFRVIDCLITNFHLPESTLIMLVSAFAGYKNTMNAYKIAVENAYRFFSYGDAMFITKNHHVKGLD

SEQ ID NO: 70049 - protein, 363 aa, Pasteurella caecimuris
  misc_feature (1)..(363): tr|A0A4S2E2F0|A0A4S2E2F0_9PAST S-adenosylmethionine:tRN A ribosyltransferase-isomerase OS=Pasteurella caecimuri s OX=1796644 GN=queA PE=3 SV=1
MRVSDFHFDLPDELIARYPKKDRSSCRLLTLNGENGEISHRTFTDVFDLIDAGDLLIFNNTRVIPARMFGRKASGGKIEVLVERMLDEHRFLAHIRSSKSPKEGTELFLGEDKLGENKGIQAVMTARHDTLFEVELTDKSTALLTVLQQIGHMPLPPYIDRPDEEEDQECYQTVYNKVPGAVAAPTAGLHFDDELLAKLQAKGVNFEFVTLHVGAGTFQPVRVENIEDHIMHAEYVELSQEVCNAIIETKKAGKRVIAVGTTSVRSIETAALSAEENGNPDLIEPYFSDTSIFIYPGKKFRVVDVLITNFHLPESTLIMLVSAFAGFTHTMNAYKSAVENCYRFFSYGDAMFITKNARVKGLE

SEQ ID NO: 70050 - protein, 363 aa, Pasteurella canis
  misc_feature (1)..(363): tr|A0A379ESZ0|A0A379ESZ0_9PAST S-adenosylmethionine:tRN A ribosyltransferase-isomerase OS=Pasteurella canis OX= 753 GN=queA PE=3 SV=1
MRVADFHFNLPDELIARYPKTERTSSRLLQLNGENGELSHHTFADIIEQINPGDLLIFNNTRVIPARMFGRKASGGKVEVLVERILTDTRFLAHIRSSKAPKAGTELFLGEDKLGENNGIKMVMLDRHDTLFEVEIVEKQTTLLDVLQQIGHMPLPPYIDRPDEDADQERYQTVYNKVPGAVAAPTAGLHFDDELLAQLKTKGVNFAFVTLHVGAGTFQPVRVEQIEDHKMHAEYVEVPQDVCHAILETKQAGKRVIAVGTTSVRSVESAALNAEEQGSKQLIEPYFSDTSIFLYPGKPFRIVDCLITNFHLPESTLIMLVSAFAGYKHTMTAYQSAVENRYRFFSYGDAMFITKNPNVTGLD

SEQ ID NO: 70051 - protein, 363 aa, Pasteurella dagmatis
  misc_feature (1)..(363): tr|C9PPT6|C9PPT6_9PAST S-adenosylmethionine:tRNA ribosy ltransferase-isomerase OS=Pasteurella dagmatis ATCC 433 25 OX=667128 GN=queA PE=3 SV=1
MRVADFHFDLPDELIARYPKTERKSSRLLQLNGENGEISHRTFADVIDQINEGDLLIFNNTRVIPARMFGRKASGGKVEVLVERILTDTRFLAHVRSSKAPKEGAELWLGEDKLGENNGVKMTMVARHDTLFELEIAEKQTALLEVLQQIGHMPLPPYIDRPDEDADQERYQTVYNKVPGAVAAPTAGLHFDDELLAQLKAKGVNFAFVTLHVGAGTFQPVRVEHIEDHKMHAEYVEVPQEVCDAIIATKQAGKRVIAVGTTSVRSVESAALATEEKHSARLIEPYFSDTSIFIYPGKTFRVVDCLITNFHLPESTLIMLVSAFAGYKHTMQAYQSAVENRYRFFSYGDAMFITKNPNVKGLE

SEQ ID NO: 70052 - protein, 361 aa, Pasteurella langaaensis
  misc_feature (1)..(361): tr|A0A2U0SNS4|A0A2U0SNS4_9PAST S-adenosylmethionine:tRN A ribosyltransferase-isomerase OS=Pasteurella langaaens is DSM 22999 OX=1122935 GN=queA PE=3 SV=1
MAKTMLVSDFHFDLPDELIARYPKPERTASRLLQLNGENGEIFHRTFSDVLELINEGDLLVFNNTRVIPARMYGRKASGGKIEVLVERVLSETTFLAHVRSSKAPKTGAELILGEDKLGEGNGVRVNMLGRQDALFELEIADKSTALLEVLQKIGHMPLPPYIDRPDEEADQERYQTVYNKVPGAVAAPTAGLHFDNELLAKLKAKGVNFAFVTLHVGAGTFQPVRVDKIEDHHMHAEYVEVPQDVVDAILATKAAGKRVIAVGTTSVRSIESAALAAEEKGSAQIIEPFFADTSIFIYPGKKFRVIDCLITNFHLPESTLIMLVSAFAGYEHTMNAYKSAVENRYRFFSYGDSMFISKKS

SEQ ID NO: 70053 - protein, 363 aa, Pasteurella multocida
  misc_feature (1)..(363): tr|A0A0E3ZPH1|A0A0E3ZPH1_PASMD S-adenosylmethionine:tRN A ribosyltransferase-isomerase OS=Pasteurella multocida subsp. multocida OH4807 OX=1304873 GN=queA PE=3 SV=1
MRVADFNFDLPDELIARYPKTDRTSSRLLQLNGENGDISHRTFADILTLIDEGDLLIFNNTRVIPARMFGRKASGGKVEVLIERILTDTRFLAHIRSSKAPKENTTLFLGEDKLGENEGIKMIMVARHDTLFEVEIAEKQGALLDILQQIGHMPLPPYIDRPDEEADKERYQTVYNQVPGAVAAPTAGLHFDDDLLAKLKAKGVNFAFVTLHVGAGTFQPVRVEHIEDHKMHAEYVEVPQAVCDAIIATKQAGKRVIAVGTTSVRSVESAALAAEENGSAQLIMPYFSDTSIFIYPGKPFRIIDGLITNFHLPESTLIMLVSAFAGYKHTMAAYQQAVANRYRFFSYGDAMFITKNHHVTGLD

SEQ ID NO: 70054 - protein, 363 aa, Pasteurella multocida
  misc_feature (1)..(363): sp|P57832|QUEA_PASMU S-adenosylmethionine:tRNA ribosylt ransferase-isomerase OS=Pasteurella multocida (strain P m70) OX=272843 GN=queA PE=3 SV=1
MRVSDFYFDLPDELIARYPKPDRTASRLLQLNGENGEITHRTFADILDQIHEGDLLIFNNTRVIPARMFGRKASGGKVEVLVERILSDTRFLAHVRSSKAPKEGAELWLGEDKLGEHHGVKMIMVARHDTLFELEIAQKQTALLDVLQQIGHMPLPPYIDRPDEEADKERYQTVYNKVPGAVAAPTAGLHFDDALLAQLKAKGVNFAFVTLHVGAGTFQPVRVEQIEDHKMHAEYVEVPQEVCDAIIATKQAGKRVIAVGTTSVRSVESAALATEEKGEHALITPYFSDTSIFIYPGKTFRVVDCLITNFHLPESTLIMLVSAFAGYRHTMQAYQSAVENRYRFFSYGDAMFISKNPHVNGLD

SEQ ID NO: 70055 - protein, 361 aa, Pasteurella skyensis
  misc_feature (1)..(361): tr|A0A1H8AAS9|A0A1H8AAS9_9PAST S-adenosylmethionine:tRN A ribosyltransferase-isomerase OS=Pasteurella skyensis OX=97481 GN=queA PE=3 SV=1
MLLSDFHFDLPNELIARYPTKQRTASRLLYVNGETGQYSDQQFIDILDHINEGDLLIFNNTRVIPARLYGKKLSGGKLEVLVERVLDEHRCLAHIRCSKAPKEGSTIILGEDKLGEGKGFNATMVARHDTLFELRFEEVQPLFELLDRAGHMPLPPYIDRPDEETDQERYQTVYSKELGAVAAPTAGLHFDDELLTKLTQKGVQTAFVTLHVGAGTFQPVRVETIEDHKMHVEYAEVSQEVVDKILKTKANGKRVIAVGTTSVRSIESAAQQAEKSNQLIESFFSDTSIFIYPGKTFRVIDALLTNFHLPESTLIMLVSAFAGYSNCMQAYQHAVVQQYRFFSYGDAMFIDKNPNAINDVP

SEQ ID NO: 70056 - protein, 363 aa, Pasteurella sp.
  misc_feature (1)..(363): tr|A0A4Y9H4B1|A0A4Y9H4B1_9PAST S-adenosylmethionine:tRN A ribosyltransferase-isomerase OS=Pasteurella sp. WM03 OX=2558280 GN=queA PE=3 SV=1
MRVSDFHFDLPDELIARYPKADRSSCRLLTLNGENGEISHRTFTDVLDLIDEGDLLIFNNTRVIPARMFGRKASGGKIEVLVERMLDEHRFLAHIRSSKSPKEGTELFLGENKLGENKGIQAVMTARHDTLFEVELTDKSTSLLTVLQQIGHMPLPPYIDRPDEEADQECYQTVYSKVPGAVAAPTAGLHFDDELLAKLQAKGVNFEFVTLHVGAGTFQPVRVENIEEHIMHAEYVELSQEVCNAIIDTKKAGKRVIAVGTTSVRSIETAALSAEENGNPDLIEPYFSDTSIFIYPGKKFRVVDALITNFHLPESTLIMLVSAFSGFNHTMNAYKSAVENRYRFFSYGDAMFITKNTQVKGLE

SEQ ID NO: 70057 - protein, 362 aa, Pasteurella testudinis
  misc_feature (1)..(362): tr|A0A1W1V9V3|A0A1W1V9V3_9PAST S-adenosylmethionine:tRN A ribosyltransferase-isomerase OS=Pasteurella testudini s DSM 23072 OX=1122938 GN=queA PE=3 SV=1
MQVSDFHFELPDELIARYPKTERSSSRLLCLNGENGELQHRRFADVLELVNAGDLLVFNNTRVIPARMFGRKSSGGKLEVLVERVLGEKSCLAHVRASKAPQAGSQIILGEDKLGEGNGIVFVMKTRHDTLFELEVAGDTPLLAVLQQIGHIPLPPYIDRPDEEMDQERYQTVYNQVPGAVAAPTAGLHFDQPLLEKLKQKGVNFAFVTLHVGAGTFQPVRVEKVEDHHMHAEYVEVDEQTVAAILATKAAGKRVIAVGTTSVRSIESAALAAAEQGEPHLLAPYFSDTAIFLYPGKTFRVTDALITNFHLPESTLVMLVSAFAGYRNTMRAYQSAVAEKYRFFSYGDAMFISKNPDVSGLD

SEQ ID NO: 70058 - protein, 362 aa, Pasteurellaceae bacterium
  misc_feature (1)..(362): tr|A0A5C4QJ59|A0A5C4QJ59_9PAST S-adenosylmethionine:tRN A ribosyltransferase-isomerase OS=Pasteurellaceae bacte rium BK431 OX=2585026 GN=queA PE=3 SV=1
MQVSDFHFELPDELIARYPKAQRTSSRLLCLNGETGELQHRQFADVLHLVNAGDLLVFNNTRVIPARMFGRKSSGGKLEVLVERVLSENSCLAHVRASKAPQAGSQIILGEDKLGEGNGIAFMMKARHDTLFELEVVGEAPLLAVLQQIGHIPLPPYIDRPDEEMDQERYQTVYNQVPGAVAAPTAGLHFDQALLQQLTEKGVNFTFVTLHVGAGTFQPVRVEKVEDHHMHAEYVEVGEQTVEAILATKAAGKRVIAVGTTSVRSIESAALAAAETDQPHLLAPYFSDTTIFLYPGKPFRVVDALITNFHLPESTLVMLVSAFAGYQNTMRAYQSAVAERYRFFSYGDAMFISKNPMVKGLE

SEQ ID NO: 70059 - protein, 361 aa, Pasteurellaceae bacterium
  misc_feature (1)..(361): tr|A0A1V3TJH6|A0A1V3TJH6_9PAST S-adenosylmethionine:tRN A ribosyltransferase-isomerase OS=Pasteurellaceae bacte rium 15-036681 OX=1924934 GN=queA PE=3 SV=1
MLVSDFHFDLPDELIARYPTAERSASRLLHLNGATGEFHDQQFNELLSHINEGDLLIFNNTRVISARVYGRKASGGKVEMLVERVLDEHRCLAHVRSSKAPKEGAELFWGEDKLGEGNGFKATMVARHDTLFELEFDAETPLFDLLQQAGHMPLPPYIDRPDEDADQERYQTVYSKVLGAVAAPTAGLHFDNDMLAKLQAKGVDTAFVTLHVGAGTFQPVRVDTIEEHKMHAEYAEVSQDVVDKILATKANGKRVICVGTTSVRSIESAAQAAEKEGKLIAPFYSDTAIFLYPGKTFRVVDALVTNFHLPESTLIMLVSAFAGYSNCMKAYQHAVEQKYRFFSYGDAMFINKNPNALNDVP

SEQ ID NO: 70060 - protein, 284 aa, Patescibacteria group
  misc_feature (1)..(284): tr|A0A5C7J7I0|A0A5C7J7I0_9BACT S-adenosylmethionine:tRN A ribosyltransferase-isomerase (Fragment) OS=Patescibac teria group bacterium OX=2052139 GN=E6P97_01535 PE=3 SV =1
MQLSDFHYVIPDELIADQPPKVRGTTRLLTLDRITGNVADKKYADIVGLLSPGDVLVINDTKVIKARLIATKPSGGERELVLVEKHGEADDWHRHRVIYRRKLKAGDELTVGKYAIHVEEIVGDGIAIIRSDTDLLQVADEFGSVPLPPYMRRDATSEDIERYQTVWAREQGSVAAPTASLNMTNEMLEKLQARGIKVVYATLHVGLGTFLPIRVDDVTTHKMHQEYFEVPKSTVEAIQVAKKRGNQVVALGTTITRTLEYCHDEILNKPAKDLQGEADIFMYP

SEQ ID NO: 70061 - protein, 341 aa, Patescibacteria group
  misc_feature (1)..(341): tr|A0A3C1EUY9|A0A3C1EUY9_9BACT S-adenosylmethionine:tRN A ribosyltransferase-isomerase OS=Patescibacteria group bacterium OX=2052139 GN=queA PE=3 SV=1
MKMSEFIYNLPDEKIAKFPPEVRGTTNLLVLDRKDGRIEHKKYFNVSEYIQPGDVVVLNETKVEKRRTFFLTEGGRRLEVLFLNRIGDGRWYCLIKGSRYVKSGDILKGEEDENIRIQISERSGMGFLVKPIAEEGEKIFDKIGHTPIPPYMKRPDTKEDYVRYNTIFARLLGSVAAPTASLNLTDEILAQIQQKGVKIAKVELKVGWGTFAPIREENIEEHDIHKEEIAISAESAEIINQAKRKGKKVWAFGTTVARTLESVSNEEGLIKEFEGETQLYIYPGYTWKCVDHLVTNFHMPDSSLILLVSSFAGTENIKKAYQEALDNDYKFLSYGDSMLII

SEQ ID NO: 70062 - protein, 358 aa, Paucibacter aquatile
  misc_feature (1)..(358): tr|A0A2N8L028|A0A2N8L028_9BURK S-adenosylmethionine:tRN A ribosyltransferase-isomerase OS=Paucibacter aquatile OX=2070761 GN=queA PE=3 SV=1
MSFSSSSSSSSVTPQYTVSDFDFELPPELIAQHPAAERSGSRLLDGRSDVPVDRVFRELPDLLNPGDLLVFNNTKVIKARMYGAKATGGSVEALIERVLPGTQEVWAHVRASKSPKPGSWIRFNEAFDAEVLGRCGPDGGMFHLRFPSDPFALLEQHGHVPLPPYIEHADEADDVRRYQTVFAREPGAVAAPTAALHFDEALLARMSERGIASAHVTLHVGAGTFQPVRVEHLSEHKMHSEWFEVPAETVAAVAACRARGGRVVAVGTTTLRALESAAQGGELVAGARETEIFITPGFPFRVVDSLVTNFHLPKSTLMMLVSALAGHGRVMALYRHAIAQRYRFFSYGDAMLLQRAGD

SEQ ID NO: 70063 - protein, 347 aa, Paucibacter sp.
  misc_feature (1)..(347): tr|A0A0U3EY94|A0A0U3EY94_9BURK S-adenosylmethionine:tRN A ribosyltransferase-isomerase OS=Paucibacter sp. KCTC 42545 OX=1768242 GN=queA PE=3 SV=1
MSARQHSVSDFDFELPPELIAQHPAAERSASRLLDGRHATAVDRIFRELPDLLAPGDLLVFNNTRVIKARIYGQKATGGSVEGLIERVIAGTNEVWAHLRASKSPKPGSWVRFNEAFDAEVLGRCGPDNGMFHLRFPSDPFALLEQHGHVPLPPYIEHADEADDVRRYQTVFAKEPGAVAAPTAALHFDEALLARLAERGVGTAHVTLHVGAGTFQPVRVEQLSDHKMHSEWFEVSAETVAAIAACKARGGRVVAVGTTTLRALESAAQGGELQAGARETAIFITPGFQFRVVDTLVTNFHLPKSTLMMLVSAFAGYEPIMALYRHAIAHQYRFFSYGDAMLLQRAG

SEQ ID NO: 70064 - protein, 353 aa, Paucibacter sp.
  misc_feature (1)..(353): tr|A0A3N7DUE6|A0A3N7DUE6_9BURK S-adenosylmethionine:tRN A ribosyltransferase-isomerase OS=Paucibacter sp. KBW04 OX=2153361 GN=queA PE=3 SV=1
MSASPAAADRHYTVSDFDFFLPPELIAQHPAAERSASRLLDGRSQPPVDRVFRELPDLLEPGDLLIFNNTRVIKARLYGQKATGGSVEGLIERVLPGTHEVWAHLRASKSPKPGSWVRFNNAFDAEVLGRCGPDAGMFHLRFPSEPFALLEQHGHVPLPPYIEHADEADDVRRYQTVFAREPGAVAAPTAALHFDEALLERLAARGISTAHVTLHVGAGTFQPVRVEALSEHKMHSEWFEVPAETVAAVAACRARGGRVIAVGTTTLRALESAALPGELQAGARETAIFITPGFQFRVVDVLVTNFHLPKSTLMMLVSAFAGYESIMALYDHAIAAQYRFFSYGDAMLLQRRT

SEQ ID NO: 70065 - protein, 374 aa, Paucibacter toxinivorans
  misc_feature (1)..(374): tr|A0A4R6QQL2|A0A4R6QQL2_9BURK S-adenosylmethionine:tRN A ribosyltransferase-isomerase OS=Paucibacter toxinivor ans OX=270368 GN=queA PE=3 SV=1
MSRLFTASDFDFTLPPELIAQHPAPERSGSRLLDGRAATPVDRQFRDLPGLLDAGDLLVFNNTLVIKARLFGRKWGPQAPASRSLPPEGELGQLGSGPALAQATGGSVEALIERVLPGTQEVWAHMRASKSPKPGALVRFNDAFDAEVLGRCGPDNGLFHLRFPSDPFALLDAHGHVPLPPYITHEDSGDDVRRYQTVFAREPGAVAAPTAALHFDEGVLADLAARGVVTAHVTLHVGAGTFQPVRVETLAEHKMHSEWFQVPAETVAAIAETRARGGKVVAVGTTTLRALESAALGGTLKAGARETDIFITPGFEFQVVDRLLTNFHLPKSTLMMLVSAFAGYEPVMDLYRHAIAEQYRFFSYGDAMLLARAG

SEQ ID NO: 70066 - protein, 354 aa, Paucimonas lemoignei
  misc_feature (1)..(354): tr|A0A2X4AQE4|A0A2X4AQE4_PAULE S-adenosylmethionine:tRN A ribosyltransferase-isomerase OS=Paucimonas lemoignei OX=29443 GN=queA PE=3 SV=1
MRVADFTFELPDSLIARHPLAERRSSRLLTLDGVSGALAHEHFSDLLEHVRARDLMVFNNTRVIPARLFGQKASGGKLEILVERVLDTHRVLAHVRSSKSPKPGSMILIDGGGEAEMVVRHDTLFELRFTESVLPLLERVGHMPLPPYIDRPDESADRERYQTVYAQRAGAVAAPTAGLHFDQPLLDAMKAKGVEMAFVTLHVGAGTFQPVRVERLEDHHMHSEWLEVGQDVVDAVAACRERGGRVIAVGTTSVRSLESAARDGVLKPFSGDTDIFIFPGRPFHVVDALVTNFHLPESTLLMLVSAFAGYPETMAAYAAAVENGYRFFSYGDAMFITRNPAPTAPKASGPEDQA

SEQ ID NO: 70067 - protein, 339 aa, Paucimonas lemoignei
  misc_feature (1)..(339): tr|A0A4R3HZG8|A0A4R3HZG8_PAULE S-adenosylmethionine:tRN A ribosyltransferase-isomerase OS=Paucimonas lemoignei OX=29443 GN=queA PE=3 SV=1
MYSLSDFDFDLPPELIAQTPLAKRSASRLLEVDGPRLVDRQFTEVVDLLSPGDLLVFNDTRVLKARFFGAKQSGGKVEVLIERILDNRTAHAQVRASKSPQPGSSIRLADAFDVTVGERAGEFYTLSFPSDVFELIEAHGRLPLPPYIEHAADEFDEERYQTVYAKEPGAVAAPTAGLHFDDELLARLRAKGVNMAFVTLHVGAGTFQPVRSENLAEHQMHSEWYTIPQETVEAVRATQAAGRNVVAVGTTSMRALESASQSGKLEAGSNDTRLFITPGYTFKTVTRLVTNFHLPKSTLLMLVSAFAGYEEIRAAYAHAIAQKYRFFSYGDAMLLKLKR

SEQ ID NO: 70068 - protein, 340 aa, Pectinatus cerevisiiphilus
  misc_feature (1)..(340): tr|A0A4R3KAD0|A0A4R3KAD0_9FIRM S-adenosylmethionine:tRN A ribosyltransferase-isomerase OS=Pectinatus cerevisiip hilus OX=86956 GN=queA PE=3 SV=1
MLLTDFDYELPEELIAQTPCPERDHSRLMVLNRKDESITHAHFFELKKYLKAGDTLVFNNTRVIPARLIGRRDQTGGKVEVFLLRRQEGNQWEVLVKPGRKARVGSIINFGSKLSCEIKENTDFGGRIVEFSYEGIWEEVLDRLGQTPLPPYIHEKLKDKERYQTVYAKENGSAAAPTAGLHFTKELLAELKDMGVNLEFVTLHVGLGTFRPVNEDNIEDHVMHKEYFHIEKETADRINAARARGSRIIAVGTTSIRTLESAARDDGFLPAKCGETGIFIYPGYKFKIVDGIITNFHLPKSTLIMLISAFAGREYVLRAYKTAVQERYRFFSFGDAMLIL

SEQ ID NO: 70069 - protein, 355 aa, Pectobacterium actinidiae
  misc_feature (1)..(355): tr|A0A1V2R700|A0A1V2R700_9GAMM S-adenosylmethionine:tRN A ribosyltransferase-isomerase OS=Pectobacterium actini diae OX=1507808 GN=queA PE=3 SV=1
MRVADFSFELPESLIAHYPQAERSGCRLLSLDGATGNLTHGVFTDLLDKLNPGDLLVFNNTRVIPARLFGRKASGGKLEVLVERVLDEHRVLAHVRASKAPKPGTELLLGDDESVKATMAARHDALFELHFDDSRDVLSILNDIGHMPLPPYIDRPDEDADRELYQTVYSQRPGAVAAPTAGLHFDEPMLAALREKGIDMAFVTLHVGAGTFQPVRVDTIEDHIMHAEYAEVPQDVVDAVLACKARGNRVIAVGTTSVRSLESAAQASQNAAIEPFFGDTKIFIYPGYHYRIIDALVTNFHLPESTLIMLVSAFAGYQNTMSAYRQAVAEQYRFFSYGDAMFITHNPMAEQEKVG

SEQ ID NO: 70070 - protein, 355 aa, Pectobacterium aquaticum
  misc_feature (1)..(355): tr|A0A426IR04|A0A426IR04_9GAMM S-adenosylmethionine:tRN A ribosyltransferase-isomerase OS=Pectobacterium aquati cum OX=2204145 GN=queA PE=3 SV=1
MRVTDFSFELPESLIAHYPQAERSGCRLLSLDGPTGNLTHGVFTDLLDKLNPGDLLVFNNTRVIPARLFGRKASGGKLEVLVERVLDDHRVLAHVRASKAPKPGAELLLGDDESVKATMAARHDALFELHFDDARDVLSILNDIGHMPLPPYIDRPDEDADRELYQTVYSQRPGAVAAPTAGLHFDEPMLAALRDKGIDMAFVTLHVGAGTFQPVRVDTIEDHIMHAEYAEVPQDVVDAVLACKARGNRVIAVGTTSVRSLESAAQASQNAAIEPFFGDTKIFIYPGYHYRIIDALVTNFHLPESTLIMLVSAFAGYQNTMSAYRQAVAEQYRFFSYGDAMFITHNPMAEQEKVG

SEQ ID NO: 70071 - protein, 355 aa, Pectobacterium atrosepticum
  misc_feature (1)..(355): sp|Q6D856|QUEA_PECAS S-adenosylmethionine:tRNA ribosylt ransferase-isomerase OS=Pectobacterium atrosepticum (st rain SCRI 1043 / ATCC BAA-672) OX=218491 GN=queA PE=3 S V=1
MRVADFSFELPESLIAHYPQAERSGCRLLSLDGPTGDLTHGVFTDLLEKLNPGDLLVFNNTRVIPARLFGRKVSGGKLEVLVERVLDDHRILAHVRASKAPKPGTELLLGDDESVKATMVARHDALFELHFDDSRDVLSILNDIGHMPLPPYIDRPDEDADRELYQTVYSQRPGAVAAPTAGLHFDEPMLAALRAKGIEMAFVTLHVGAGTFQPVRVDTIEDHIMHAEYAEVPQDVVDAVLACKARGNRVIAVGTTSVRSLESAAQASQDAPIAPFFGDTKIFIYPGYHYRIIDALVTNFHLPESTLIMLVSAFAGYQNTMSAYREAVAEQYRFFSYGDAMFITHSPMAEQEKVG

SEQ ID NO: 70072 - protein, 355 aa, Pectobacterium betavasculorum
  misc_feature (1)..(355): tr|A0A093UE64|A0A093UE64_9GAMM S-adenosylmethionine:tRN A ribosyltransferase-isomerase OS=Pectobacterium betava sculorum OX=55207 GN=queA PE=3 SV=1
MRVADFSFELPESLIAHYPQAERSGCRLLSLDGPTGNLTHGVFTDLLEKLNPGDLLVFNNTRVIPARLFGRKVSGGKLEVLVERVLDDHRILAHVRASKAPKPGTELLLGDDESVKVTMVARHDALFELHFDDARDALSILNDIGHMPLPPYIDRPDEDADRELYQTVYSQRPGAVAAPTAGLHFDEPMLAALREKGIEMAFVTLHVGAGTFQPVRVDTIEDHIMHAEYAEVPQDVVDAVLACKARGNRVIAVGTTSVRSLESAAQASQNAPIAPFFGDTKIFIYPGYHYRIIDALVTNFHLPESTLIMLVSAFAGYQNTMSAYRQAVAEQYRFFSYGDAMFITHNPMAEQEKVG

SEQ ID NO: 70073 - protein, 355 aa, Pectobacterium brasiliense
  misc_feature (1)..(355): tr|A0A086F080|A0A086F080_9GAMM S-adenosylmethionine:tRN A ribosyltransferase-isomerase OS=Pectobacterium brasil iense OX=180957 GN=queA PE=3 SV=1
MRVTDFSFELPESLIAHYPQAERSGCRLLSLDGPTGNLTHGVFTDLLDKLNPGDLLVFNNTRVIPARLFGRKASGGKLEVLVERVLDDHRVLAHVRASKAPKPGTELLLGDDESVKATMTARHDALFELHFDDARDVLSILNDIGHMPLPPYIDRPDEDADRELYQTVYSQRPGAVAAPTAGLHFDEPMLAALREKGIDMAFVTLHVGAGTFQPVRVDTIEDHIMHAEYAEVPQDVVDAVLACKARGNRVIAVGTTSVRSLESAAQASQNAAIEPFFGDTKIFIYPGYHYRIIDALVTNFHLPESTLIMLVSAFAGYQNTMSAYRQAVAEQYRFFSYGDAMFITHNPMAEQENVG

SEQ ID NO: 70074 - protein, 355 aa, Pectobacterium carotovorum
  misc_feature (1)..(355): sp|C6DB25|QUEA_PECCP S-adenosylmethionine:tRNA ribosylt ransferase-isomerase OS=Pectobacterium carotovorum subs p. carotovorum (strain PC1) OX=561230 GN=queA PE=3 SV=1
MRVADFSFELPESLIAHYPQAERSGCRLLSLDGPTGDLTHGVFTDLLDKLNPGDLLVFNNTRVIPARLFGRKVSGGKLEVLVERVLDDHRVLAHVRASKAPKPGTELLLGDDESVKATMAARHDALFELHFDDSRDVLSILNDIGHMPLPPYIDRPDEDADRELYQTVYSQRPGAVAAPTAGLHFDEPMLAALREKGIEMAFVTLHVGAGTFQPVRVDTIEDHIMHAEYAEVPQDVVDAVLACKARGNRVIAVGTTSVRSLESAAQASQNAPIEPFFGDTKIFIYPGYHYRIIDALVTNFHLPESTLIMLVSAFAGYQNTMSAYRQAVAEQYRFFSYGDAMFITHNPMAEQEKVG

SEQ ID NO: 70075 - protein, 355 aa, Pectobacterium carotovorum
  misc_feature (1)..(355): tr|A0A221TD10|A0A221TD10_PECCA S-adenosylmethionine:tRN A ribosyltransferase-isomerase OS=Pectobacterium caroto vorum OX=554 GN=queA PE=3 SV=1
MRVTDFSFELPESLIAHYPQAERSGCRLLSLDGPTGNLTHGVFTDLLNKLNPGDLLVFNNTRVIPARLFGRKASGGKLEVLVERVLDDHRVLAHVRASKAPKPGAELLLGDDESVKATMAARHDALFELHFDDARDVLSILNDIGHMPLPPYIDRPDEDADRELYQTVYSQRPGAVAAPTAGLHFDEPMLAALREKGIDMAFVTLHVGAGTFQPVRVDTIEDHIMHAEYAEVPQDVVDAVLACKARGNRVIAVGTTSVRSLESAAQASQNAAIEPFFGDTKIFIYPGYHYRIIDALVTNFHLPESTLIMLVSAFAGYQNTMSAYRQAVAEQYRFFSYGDAMFITHNPMAEQEKVG

SEQ ID NO: 70076 - protein, 355 aa, Pectobacterium odoriferum
  misc_feature (1)..(355): tr|A0A094UAS7|A0A094UAS7_9GAMM S-adenosylmethionine:tRN A ribosyltransferase-isomerase OS=Pectobacterium odorif erum OX=78398 GN=queA PE=3 SV=1
MRVADFSFELPESLIAHYPQAERSGCRLLSLDGPTGNLTHGVFTDLLNKLNPGDLLVFNNTRVIPARLFGRKASGGKLEVLVERVLDEHRVLAHVRASKAPKPGTELLLGDDESVKATMAARHDALFELHFDDSRDVLSILNDIGHMPLPPYIDRPDEDADRELYQTVYSQRPGAVAAPTAGLHFDEPMLAALREKGIEMAFVTLHVGAGTFQPVRVDTIEDHIMHAEYAEVPQDVVDAVLACKTRGNRVIAVGTTSVRSLESAAQASQKAAIEPFFGDTKIFIYPGYHYRIIDALVTNFHLPESTLIMLVSAFAGYQNTMSAYRQAVAEQYRFFSYGDAMFITHNPMAEQEKVG

SEQ ID NO: 70077 - protein, 355 aa, Pectobacterium parmentieri
  misc_feature (1)..(355): tr|A0A0H3IBP3|A0A0H3IBP3_PECPM S-adenosylmethionine:tRN A ribosyltransferase-isomerase OS=Pectobacterium parmen tieri OX=1905730 GN=queA PE=3 SV=1
MRVADFSFELPESLIAHYPQAERSGCRLLSLDGPTGNLTHGVFTDLLEKLNPGDLLVFNNTRVIPARLFGRKASGGKLEVLVERVLDDRRVLAHVRASKAPKPGTELLLGDDESVKATMAARHDALFELHFDDARDVLSILNAIGHMPLPPYIDRPDEDADRELYQTVYSQRPGAVAAPTAGLHFDEPMLAALREKGIEMAFVTLHVGAGTFQPVRVDTIEDHIMHAEYAEVPQDVVDAVLACKARGNRVIAVGTTSVRSLESAAQASQDAPIAPFFDDTKIFIYPGYHYRIIDALVTNFHLPESTLIMLVSAFAGYQNTMSAYREAVAEQYRFFSYGDAMFITHNPLAEQEKVA

SEQ ID NO: 70078 - protein, 355 aa, Pectobacterium parmentieri
  misc_feature (1)..(355): tr|A0A3Q9JX10|A0A3Q9JX10_PECPM S-adenosylmethionine:tRN A ribosyltransferase-isomerase OS=Pectobacterium parmen tieri OX=1905730 GN=queA PE=3 SV=1
MRVADFSFELPESLIAHYPQAERSGCRLLSLDGPTGNLTHGVFTDLLEKLNPGDLLVFNNTRVIPARLFGRKASGGKLEVLVERVLDDRRVLAHVRASKAPKPGTELLLGDDESVKATMAARHDALFELHFDDARDVLSILNAIGHMPLPPYIDRPDEDADRELYQTVYSQRPGAVAAPTAGLHFDEPMLTALREKGIEMAFVTLHVGAGTFQPVRVDTIEDHIMHAEYAEVPQDVVDAVLACKARGNRVIAVGTTSVRSLESAAQASQDAPIAPFFDDTKIFIYPGYHYRIIDALVTNFHLPESTLIMLVSAFAGYQNTMSAYREAVAEQYRFFSYGDAMFITHNPLAEQEKVA

SEQ ID NO: 70079 - protein, 355 aa, Pectobacterium peruviense
  misc_feature (1)..(355): tr|A0A0J5Y1B9|A0A0J5Y1B9_9GAMM S-adenosylmethionine:tRN A ribosyltransferase-isomerase OS=Pectobacterium peruvi ense OX=2066479 GN=queA PE=3 SV=1
MRVADFSFELPESLIAHYPQAERSGCRLLSLDGPTGDLTHGVFTDLLEKLNPGDLLVFNNTRVIPARLFGRKVSGGKLEVLVERVLDDHRILAHVRASKAPKPGTELLLGDDESVKATMVARHDALFELHFDDARDVLSILNDIGHMPLPPYIDRPDEDADRELYQTVYSQRPGAVAAPTAGLHFDEPMLAALREKGIEMAFVTLHVGAGTFQPVRVDTIEDHIMHAEYAEVPQDVVDAVLASKARGNRVIAVGTTSVRSLESAAQASQDAPIAPFFGDTKIFIYPGYHYRIIDALVTNFHLPESTLIMLVSAFAGYQNTMSAYREAVAEQYRFFSYGDAMFITHNPMAEQEKVG

SEQ ID NO: 70080 - protein, 355 aa, Pectobacterium polaris
  misc_feature (1)..(355): tr|A0A3A3ZW18|A0A3A3ZW18_9GAMM S-adenosylmethionine:tRN A ribosyltransferase-isomerase OS=Pectobacterium polari s OX=2042057 GN=queA PE=3 SV=1
MRVADFSFELPESLIAHYPQAERSGCRLLSLDGPTGNLTHGVFTDLLDKLNPGDLLVFNNTRVIPARLFGRKASGGKLEVLVERVLDDHRVLAHVRASKAPKPGTELLLGDDESVKATMAARHDALFELHFDDSRDVLSILNDIGHMPLPPYIDRPDEDADRELYQTVYSQRPGAVAAPTAGLHFDEPMLAALREKGIDMAFVTLHVGAGTFQPVRVDTIEDHIMHAEYAEVPQDVVDAVLACKARGNRVIAVGTTSVRSLESAAQASQNAPIEPFFGDTKIFIYPGYHYRIIDALVTNFHLPESTLIMLVSAFAGYQNTMSAYRQAVAEQYRFFSYGDAMFITHNPMAEQEKVG

SEQ ID NO: 70081 - protein, 355 aa, Pectobacterium polaris
  misc_feature (1)..(355): tr|A0A433P2V2|A0A433P2V2_9GAMM S-adenosylmethionine:tRN A ribosyltransferase-isomerase OS=Pectobacterium polari s OX=2042057 GN=queA PE=3 SV=1
MRVADFSFELPESLIAHYPQAERSGCRLLSLDGPTGNLTHGVFTDLLDKLNPGDLLVFNNTRVIPARLFGRKASGGKLEVLVERVLDDHRVLAHVRASKAPKPGTELLLGDDESVKATMAARHDALFELHFDDSRDVLSILNDIGHMPLPPYIDRPDEDADRELYQTVYSQRPGAVAAPTAGLHFDEPMLAALREKGIDMAFVTLHVGAGTFQPVRVDTIEDHIMHAEYAEVPQDVVDAVLACKARGNRVIAVGTTSVRSLESAAQASQNAPIEPFFGDTKIFIYPGYHYRIIDALVTNFHLPESTLIMLVSAFAGYQNTMSAYRQAVAEQYRFFSYGDAMFITHNPMAEKEKVG

SEQ ID NO: 70082 - protein, 355 aa, Pectobacterium polonicum
  misc_feature (1)..(355): tr|A0A4U7KJI1|A0A4U7KJI1_9GAMM S-adenosylmethionine:tRN A ribosyltransferase-isomerase OS=Pectobacterium poloni cum OX=2485124 GN=queA PE=3 SV=1
MRVTDFSFELPESLIAHYPQAERSGCRLLSLDGPTGNLTHGVFTDLLDKLNPGDLLVFNNTRVIPARLFGRKASGGKLEVLVERVLDDHRVLAHVRASKAPKPGTELLLGDDESVKATMAARHDALFELHFDDSRDVLSILNAIGHMPLPPYIDRPDEDADRELYQTVYSQRPGAVAAPTAGLHFDEPMLAALREKGIEMAFVTLHVGAGTFQPVRVDTIEDHIMHAEYAEVPQDVVDAVLACKARGNRVIAVGTTSVRSLESAAQASQDALIAPFFDDTKIFIYPGYHYRVIDALVTNFHLPESTLIMLVSAFAGYRNTMSAYREAVAEQYRFFSYGDAMFITHNPLAEQEKVG

SEQ ID NO: 70083 - protein, 355 aa, Pectobacterium punjabense
  misc_feature (1)..(355): tr|A0A2T3VZ22|A0A2T3VZ22_9GAMM S-adenosylmethionine:tRN A ribosyltransferase-isomerase OS=Pectobacterium punjab ense OX=2108399 GN=queA PE=3 SV=1
MRVTDFSFELPESLIAHYPQAERSGCRLLSLDGPTGDLTHGVFTDLLDKLNPGDLLVFNNTRVIPARLFGRKASGGKLEVLVERVLDDRRVLAHVRASKAPKPGTELLLGDDESVKATMAARHDALFELHFDDSRDVLSILNAIGHMPLPPYIDRPDEDADRELYQTVYSQRPGAVAAPTAGLHFDEPMLAALREKDIEMAFVTLHVGAGTFQPVRVDTIEDHIMHAEYAEVPQDVVDAVLACKARGNRVIAVGTTSVRSLESAAQASQDALIAPFFDDTKIFIYPGYHYRVIDALVTNFHLPESTLIMLVSAFAGYQNTMSAYREAVAEQYRFFSYGDAMFITHNPLAEQEKVG

SEQ ID NO: 70084 - protein, 355 aa, Pectobacterium wasabiae
  misc_feature (1)..(355): tr|A0A1D7Z3M6|A0A1D7Z3M6_9GAMM S-adenosylmethionine:tRN A ribosyltransferase-isomerase OS=Pectobacterium wasabi ae CFBP 3304 OX=1175631 GN=queA PE=3 SV=1
MRVADFSFELPESLIAHYPQAERSGCRLLSLDGATGDLTHGVFTDLLEKLNPGDLLVFNNTRVIPARLFGRKASGGKLEVLVERVLDEHRVLAHVRASKAPKPGTELLLGDDESVKATMAARHDALFELHFDDARDVLSILNDIGHMPLPPYIDRPDEDADRELYQTVYSQRPGAVAAPTAGLHFDEPMLAALREKGIEMAFVTLHVGAGTFQPVRVDTIEDHIMHAEYAEVPQDVVDAVLACKARGNRVIAVGTTSVRSLESAAQASQDAPISPFFDDTKIFIYPGYHYRIIDALVTNFHLPESTLIMLVSAFAGYQNTMSAYRAAVAEQYRFFSYGDAMFITHNPMAEQEKVA

SEQ ID NO: 70085 - protein, 344 aa, Pediococcus acidilactici
  misc_feature (1)..(344): tr|A0A1A5VCL8|A0A1A5VCL8_PEDAC S-adenosylmethionine:tRN A ribosyltransferase-isomerase OS=Pediococcus acidilact ici OX=1254 GN=queA PE=3 SV=1
MTLTTEDFNYDLPHELIAQTPIKKRDASRMLVLDHKTGEMADKHFYDIVDQLNPGDAIVMNDSRVMPARIYGVKEETGGHLEVLLLHNIEGDRWETLVKPARRAKVGTKITFGDGSLTATVKKELDHGGREIEFEYDGIFMEILEKLGEMPLPPYIKEKLDDPERYQTVYSKEPGSAAAPTAGLHWTKELLQKVQDKGVKLVYLTLHVGLGTFRPVDEENIEDHKMHSEFYRLSEESAATLNEVRKNGGRIIATGTTSIRTLETIGTKFNGEIKPDSGWTDIFIKPGYEWKVVDAFITNFHLPKSTLVMLVAAFTGRETILNAYKHAVEEKYRFFSFGDAMFIK

SEQ ID NO: 70086 - protein, 347 aa, Pediococcus acidilactici
  misc_feature (1)..(347): tr|A0A1D8RLW3|A0A1D8RLW3_PEDAC S-adenosylmethionine:tRN A ribosyltransferase-isomerase OS=Pediococcus acidilact ici OX=1254 GN=queA PE=3 SV=1
MEKMTLTTEDFNYDLPHELIAQTPIKKRDASRMLVLDHKTGEMADKHFYDIVDQLNPGDAIVMNDSRVMPARIYGVKEETGGHLEVLLLHNIEGDRWETLVKPARRAKVGTKITFGDGSLTATVKKELDHGGREIEFEYDGIFMEILEKLGEMPLPPYIKEKLDDPERYQTVYSKEPGSAAAPTAGLHWTKELLQKVQDKGVKLVYLTLHVGLGTFRPVDEENIEDHKMHSEFYRLSEESAATLNEVRKNGGRIIATGTTSIRTLETIGTKFNGEIKPDSGWTDIFIKPGYEWKVVDAFITNFHLPKSTLVMLVAAFTGRETILNAYKHAVEEKYRFFSFGDAMFIK

SEQ ID NO: 70087 - protein, 344 aa, Pediococcus argentinicus
  misc_feature (1)..(344): tr|A0A0R2NQ17|A0A0R2NQ17_9LACO S-adenosylmethionine:tRN A ribosyltransferase-isomerase OS=Pediococcus argentini cus OX=480391 GN=queA PE=3 SV=1
MTLTVDDFDYDLPHELIAQTPIKQRDTSRLLVLDHKTGTMEDKHFYDILDQLNPGDAVVMNNSRVMPARIYGIKENTGGHFEVLLLHNIEGDKWETLVKPAKRAKLGTKIDFGDGLLTATVTKELEHGGREIEFSYDGIFMEILNQLGEMPLPPYIKEKLDDQERYQTVYSKEPGSAAAPTAGLHWTKELLQKVEDKGVKLVYLTLHVGLGTFRPVDEKNIEDHKMHSEFYQLSEESAATLNEVRKNGGRIIATGTTSIRTLETIGSKFDGEIKADSGWTDIFIKPGYEWKVVDAFITNFHLPKSTLVMLVAAFTGRDLILNAYQHAIEEKYRFFSFGDAMFVK

SEQ ID NO: 70088 - protein, 344 aa, Pediococcus cellicola
  misc_feature (1)..(344): tr|A0A0R2IJC9|A0A0R2IJC9_9LACO S-adenosylmethionine:tRN A ribosyltransferase-isomerase OS=Pediococcus cellicola OX=319652 GN=queA PE=3 SV=1
MTLSVDDFDYDLPHELIAQTPIKERDESRLLVLDHKTGALEDKHFYDILNELHAGDAVVMNDSRVMPARIYGVKKETGAHLEVLLLHNDNGDQWETLVKPAKRAKVGTEIEFGEGLLKATVTKELEHGGREIEFHYDGIFMEILEKLGETPLPPYIKEKLDDPERYQTVYARESGSAAAPTAGLHWTKELLQKVEEKGVKLVYLTLHVGLGTFRPVDEKNIEDHKMHSEFYRLSESSAATLNEVRQNGGRIIATGTTSIRTLETIGTKFDGEIKADSGWTDIFIKPGYEWKVVDAFITNFHLPKSTLVMLVAAFTGRDMILNAYQHAINEKYRFFSFGDAMFIK

SEQ ID NO: 70089 - protein, 344 aa, Pediococcus claussenii
  misc_feature (1)..(344): tr|G8PCM2|G8PCM2_PEDCP S-adenosylmethionine:tRNA ribosy ltransferase-isomerase OS=Pediococcus claussenii (strai n ATCC BAA-344 / DSM 14800 / JCM 18046 / KCTC 3811 / P0 6) OX=701521 GN=queA PE=3 SV=1
MTLTVDDFDYDLPHELIAQTPIKERDASRLLVLDHKTGEMQDKHFYDVIDQLNPGDAVVMNNSRVMPARIYGVKGETGGHLEVLLLHNIEGDRWETLVKPAKRAKVGTEINFGDGALRATVTKELEHGGREIEFSYDGIFMEILNQLGEMPLPPYIKEKLDDQERYQTVYSKEPGSAAAPTAGLHWTKELLDKVEAKGIKLVYLTLHVGLGTFRPVDEDNIEDHKMHSEFYQLSEESAKTLNDVRANGGRIIATGTTSIRTLETIGTKFDGEIKADSGWTDIFIKPGYDWKVVDAFITNFHLPKSTLVMLVAAFTGRDMILNAYQHAIEEKYRFFSFGDAMFIK

SEQ ID NO: 70090 - protein, 344 aa, Pediococcus ethanolidurans
  misc_feature (1)..(344): tr|A0A0R2JY42|A0A0R2JY42_9LACO S-adenosylmethionine:tRN A ribosyltransferase-isomerase OS=Pediococcus ethanolid urans OX=319653 GN=queA PE=3 SV=1
MTLTVDDFDYDLPHELIAQTPIKERDESRLLVLNHKTGTLEDKHFYDILDQLHAGDAVVMNDSRVMPARIYGVKPETGAHMEVLLLHNDTGDQWETLVKPAKRAKVGTVIEFGDGLLKATVIKELEHGGREIEFHYDGIFMEILEKLGETPLPPYIKEKLDDPERYQTVYARESGSAAAPTAGLHWTKELLKKVEDKGVKLVYLTLHVGLGTFRPVDEANIEDHKMHSEFYRLSEESAATLNEVRKNGGRIIATGTTSIRTLETIGTKFNGEIKADSGWTDIFIKPGYQWQVVDAFITNFHLPKSTLVMLVAAFTGRDMILNAYQHAIKEKYRFFSFGDAMFIK

SEQ ID NO: 70091 - protein, 344 aa, Pediococcus parvulus
  misc_feature (1)..(344): tr|A0A176TGX4|A0A176TGX4_9LACO S-adenosylmethionine:tRN A ribosyltransferase-isomerase OS=Pediococcus parvulus OX=54062 GN=queA PE=3 SV=1
MTLTVDDFDYNLPHELIAQTPIKERDESRLLVLDHKTGILEDKHFYDILDQLHAGDAVVMNDSRVMPARIYGIKPETGAHMEVLLLHNDVGDQWETLVKPAKRAKVGTIIEFGDGLLKATVVKELEHGGREIEFHYDGIFMEILEKLGETPLPPYIKEKLDDPERYQTVYARESGSAAAPTAGLHWTKELLKKVEDKGVKLVYLTLHVGLGTFRPVDEANIEDHKMHSEFYRLSEESAATLNEVRKNGGRIVATGTTSIRTLETIGTKFNGEIKADSGWTDIFIKPGYKWQVVDAFITNFHLPKSTLVMLVAAFTGRDMILNAYQHAIEEKYRFFSFGDAMFIK

SEQ ID NO: 70092 - protein, 344 aa, Pediococcus pentosaceus
  misc_feature (1)..(344): sp|Q03ER1|QUEA_PEDPA S-adenosylmethionine:tRNA ribosylt ransferase-isomerase OS=Pediococcus pentosaceus (strain ATCC 25745 / CCUG 21536 / LMG 10740 / 183-1w) OX=27819 7 GN=queA PE=3 SV=1
MTLTTEDFNYDLPHELIAQTPIKERDESRLLVLDHETGAMEDKHFYDIIDQLNPGDAVVMNNSRVMPARIYGIKDKTGGHFEVLLLHNIEGDRWETLVKPAKRAKTGTKIIFGDGALTATVTKELEHGGREIVFDYDGIFMEVLEKLGEMPLPPYIKEKLDDPERYQTVYSKEPGSAAAPTAGLHWTKELLEKVEQKGIKLVYLTLHVGLGTFRPVDEDNIEDHKMHSEFYQLSEESAAALNEVKKQGGRIVATGTTSIRTLETIGSKFNGEIKADSGWTDIFIKPGYEWKVVDAFITNFHLPKSTLVMLVAAFTGRENILNAYQHAIEEKYRFFSFGDAMFIK

SEQ ID NO: 70093 - protein, 344 aa, Pediococcus pentosaceus
  misc_feature (1)..(344): tr|A0A512K6P2|A0A512K6P2_PEDPE S-adenosylmethionine:tRN A ribosyltransferase-isomerase OS=Pediococcus pentosace us OX=1255 GN=queA PE=3 SV=1
MTLTTEDFNYDLPHELIAQTPIKERDESRLLVLDHETGAMEDKHFYDIIDQLNPGDAVVMNNSRVMPARIYGIKDKTGGHFEVLLLHDIEGDRWETLVKPAKRAKTGTKIIFGDGALTATVTKELEHGGREIVFDYDGIFMEVLEKLGEMPLPPYIKEKLDDPERYQTVYSKEPGSAAAPTAGLHWTKELLEKVEQKGIKLVYLTLHVGLGTFRPVDEDNIEDHKMHSEFYQLSEESAAALNEVKKQGGRIVATGTTSIRTLETIGSKFNGEIKADSGWTDIFIKPGYEWKVVDAFITNFHLPKSTLVMLVAAFTGRENILNAYQHAIEEKYRFFSFGDAMFIK

SEQ ID NO: 70094 - protein, 344 aa, Pediococcus stilesii
  misc_feature (1)..(344): tr|A0A0R2KY46|A0A0R2KY46_9LACO S-adenosylmethionine:tRN A ribosyltransferase-isomerase OS=Pediococcus stilesii OX=331679 GN=queA PE=3 SV=1
MTLTTEDFNYDLPHELIAQTPIKERDESRLLVLDHQTGKMEDKHFYDIIDQLNPGDAVVMNDSRVMPARIYGIKDQTGGHFEVLLLHNIEGDRWETLVKPAKRAKTGTKIVFGDGALTATVTKELDHGGREIVFDYDGIFMEVLEKLGEMPLPPYIKEKLDDPERYQTVYSKEPGSAAAPTAGLHWTKELLEKVEKKGIKLVYLTLHVGLGTFRPVDEDNIEDHKMHSEFYRLSEESAKTLNEVRNNGGRIIATGTTSIRTLETIGTKFNGEIKADSGWTDIFIKPGYEWKVVDAFITNFHLPKSTLVMLVAAFTGRETILNAYEHAIKEKYRFFSFGDAMFIK

SEQ ID NO: 70095 - protein, 349 aa, Pedobacter africanus
  misc_feature (1)..(349): tr|A0A1W2CK95|A0A1W2CK95_9SPHI S-adenosylmethionine:tRN A ribosyltransferase-isomerase OS=Pedobacter africanus OX=151894 GN=queA PE=3 SV=1
MKLSQFKFNLPESLVANNPSEERDEARLMVLHKDSGKIEHKIFKDVLEYFDDQDVMILNNTKVFPARLYGNKEKTGATIEVFLLRELNKELRLWDVLVDPARKIRVGNKLYFGDDDLLVAEVVDNTTSRGRTIRFLFDGTDEEFRKNIEILGETPLPKYIKRKATAQDKERYQTIFAKHEGAVAAPTAGLHFSRELMKRLELKGVNFAEVTLHVGLGTFRSVEVEDLTKHKMDSEQFIIEQKDADIVNKAIERKKRVCAVGTTSMRAIESAVSSARTLKAANDWTSKFIFPPYDFSIANSMITNFHTPESTLLMMVSAFGGYDYVRHAYEVALKEKYRFYSYGDAMLII

SEQ ID NO: 70096 - protein, 349 aa, Pedobacter alluvionis
  misc_feature (1)..(349): tr|A0A497YHD3|A0A497YHD3_9SPHI S-adenosylmethionine:tRN A ribosyltransferase-isomerase OS=Pedobacter alluvionis OX=475253 GN=queA PE=3 SV=1
MKLSQFKFNLPESLVANNPAEQRDEARLMVLHKDSGKIEHKIFKDVLGYFDDKDVMILNNTKVFPARLYGNKEKTGATIEVFLLRELNKELRLWDVLVDPARKIRVGNKLYFGDDDLLVAEVVDNTTSRGRTIRFLFEGTDEEFRKNVEILGETPLPKYIKRKATAEDKERYQTIFAKHEGAVAAPTAGLHFSRELMKRLELKGVEFAEVTLHVGLGTFRTVEVEDLTKHKMDSEQFIIEPKDANIVNKALEDKRKICAVGTTSMRAIESAVSANRTLKAANDWTSKFIFPPYDFSIANSMITNFHTPESTLLMMVSAFGGYENVMNAYEVAVKEKYKFYSYGDAMLII

SEQ ID NO: 70097 - protein, 349 aa, Pedobacter antarcticus
  misc_feature (1)..(349): tr|A0A081PKB1|A0A081PKB1_9SPHI S-adenosylmethionine:tRN A ribosyltransferase-isomerase OS=Pedobacter antarcticu s 4BY OX=1358423 GN=queA PE=3 SV=1
MKLSQFKFNLPESLVANNPSEQRDEARLMVLHKDTGKIEHKIFKDILEYFDDQDVMILNNTKVFPARLYGNKEKTGATIEVFLLRELNKELRLWDVLVDPARKIRVGNKLYFGDDDLLVAEVVDNTTSRGRTIRFLFDGTDEEFRKNIEILGETPLPKYIKRKATAQDKERYQTIFAKHEGAVAAPTAGMHFSRELMKRLELKGINFAEVTLHVGLGTFRSVEVEDLTKHKMDSEQFIIEEKQANIVNKALEEKRKICAVGTTSMRAIESAVSSGKMLKPANDWTSKFIFPPYDFSIANSMITNFHTPESTLLMMVSAFGGYDYVRNAYEVALKEKYRFYSYGDAMLII

SEQ ID NO: 70098 - protein, 349 aa, Pedobacter antarcticus; identical to SEQ ID NO: 70097
  misc_feature (1)..(349): tr|A0A1I2BCI1|A0A1I2BCI1_9SPHI S-adenosylmethionine:tRN A ribosyltransferase-isomerase OS=Pedobacter antarcticu s OX=34086 GN=queA PE=3 SV=1

SEQ ID NO: 70099 - protein, 361 aa, Pedobacter bauzanensis
  misc_feature (1)..(361): tr|A0A4R1M0K3|A0A4R1M0K3_9SPHI S-adenosylmethionine:tRN A ribosyltransferase-isomerase OS=Pedobacter bauzanensi s OX=653929 GN=queA PE=3 SV=1
MSFKGYTISIYIMKLSQFKFNLPQSLIASHPTPTRDESRLMVLHKDTGEIEHKIFKDILEYFDEKDVMIFNNTKVFPARLYGNKEKTGATIEVFLLRELNKELRLWDVLVDPARKIRVGNKLYFGDDDLLVAEVVDNTTSRGRTIRFLFDGTDEEFRKNIEILGETPLPKYINRKAVPEDKFRYQTIYAKHEGAVAAPTAGLHFSRELMKRLELKGVEFAEVTLHVGLGTFRTVEVEDLTKHKMDSEQFIVGEKEAELVNEAIDNKRRVCAVGTTSMRAIESAVSANLRLKAANSWTSKFIFPPYDFSIANSMITNFHTPESTLLMMVSAFGGYENVMNAYEVAVKEKYRFYSYGDAMLII

SEQ ID NO: 70100 - protein, 372 aa, Pedobacter borealis
  misc_feature (1)..(372): tr|A0A4R8P167|A0A4R8P167_9SPHI S-adenosylmethionine:tRN A ribosyltransferase-isomerase OS=Pedobacter borealis O X=475254 GN=queA PE=3 SV=1
MRLIKYEKEKLNSYFCTSKNSSRMKLSQFKFNLPESLVANNPAEQRDEARLMVLHKDSGKIEHKIFKDVLGYFDDKDVMILNNTKVFPARLYGNKEKTGATIEVFLLRELNKELRLWDVLVDPARKIRVGNKLYFGDDDLLVAEVVDNTTSRGRTIRFLFEGTDEEFRKNVEILGETPLPKYIKRKATAEDKERYQTIFAKHEGAVAAPTAGLHFSRELMKRLELKGVEFAEVTLHVGLGTFRTVEVEDLTKHKMDSEQFIIEQKDANIVNKAIEDRKKICAVGTTSMRAIESAVSANRTLKAANDWTSKFIFPPYDFSIANAMITNFHTPESTLLMMVSAFGGYENVMNAYEVAVKEKYKFYSYGDAMLII

SEQ ID NO: 70101 - protein, 368 aa, Pedobacter caeni
  misc_feature (1)..(368): tr|A0A1M5IZ54|A0A1M5IZ54_9SPHI S-adenosylmethionine:tRN A ribosyltransferase-isomerase OS=Pedobacter caeni OX=2 88992 GN=queA PE=3 SV=1
MKKKIIFLKFAPLIITSKNMKLSQFKFNLPESLVANNPSEHRDEARLMVLHKDSGKIEHKIFKDVLSYFDDKDVMILNNTKVFPARLYGNKEKTGATIEVFLLRELNKELRLWDVLVDPARKIRVGNKLYFGDDDLLVAEVVDNTTSRGRTIRFLFDGTDEEFRKNIEILGETPLPKYIKRKATAQDKERYQTIFAKHEGAVAAPTAGLHFSRELMKRLELKGINFAEVTLHVGLGTFRSVEVEDLTKHKMDSEQFIIEQKDADIVNKAIEEKRRICAVGTTSMRAIESAVSSGRMLKPANDWTSKFIFPPYDFSIANSMITNFHTPESTLLMMVSAFGGYDYVRNAYEVALKEKYRFYSYGDAMLII

SEQ ID NO: 70102 - protein, 349 aa, Pedobacter chitinilyticus
  misc_feature (1)..(349): tr|A0A443Z2E3|A0A443Z2E3_9SPHI S-adenosylmethionine:tRN A ribosyltransferase-isomerase OS=Pedobacter chitinilyt icus OX=2233776 GN=queA PE=3 SV=1
MKLSQFKFNLPDSLLASDPAEERDEARLMVLHKDTGKIEHKIFKDVLNYFDDKDVMILNNTKVFPARLYGNKEKTGATIEVFLLRELNKELRLWDVLVDPARKIRVGNKLYFGDDDLLVAEVVDNTTSRGRTIRFLFDGTDEEFRRNVEILGETPLPKYIKRKATEMDKERYQTIFAKHEGAVAAPTAGLHFSRELMKRLELKGIEFAEVTLHVGLGTFRQVEVEDLTKHKMDSEQFIIEQKDADIVNKGIEDKRRICAVGTTSMRAIESAVSANKTLKAANDWTSKFIFPPYDFSIANSMITNFHTSESTLLMMVSAFGGYENVMNAYEVAVKEKYRFYSYGDAMLII

SEQ ID NO: 70103 - protein, 349 aa, Pedobacter cryoconitis
  misc_feature (1)..(349): tr|A0A127V9B8|A0A127V9B8_9SPHI S-adenosylmethionine:tRN A ribosyltransferase-isomerase OS=Pedobacter cryoconiti s OX=188932 GN=queA PE=3 SV=1
MKLSQFKFNLPESLVANNPSEHRDEARLMVLHKETGKIEHKIFKDVLEYFDDQDVMILNNTKVFPARLYGNKEKTGATIEVFLLRELNKELRLWDVLVDPARKIRVGNKLYFGDDDLLVAEVVDNTTSRGRTIRFLFDGTDEEFRKNIEILGETPLPKYIKRKATAQDKERYQTIFAKHEGAVAAPTAGMHFSRELMKRLELKGINFAEVTLHVGLGTFRSVEVEDLTKHKMDSEQFIIEESQANIVNKALNEKRRICAVGTTSMRAIESAVSSGRMLKPANDWTSKFIFPPYDFSIANSMITNFHTPESTLLMMVSAFGGYDYVRNAYEVALKEKYRFYSYGDAMLII

SEQ ID NO: 70104 - protein, 349 aa, Pedobacter duraquae
  misc_feature (1)..(349): tr|A0A4R6IHR9|A0A4R6IHR9_9SPHI S-adenosylmethionine:tRN A ribosyltransferase-isomerase OS=Pedobacter duraquae O X=425511 GN=queA PE=3 SV=1
MKLSQFKFNLPESLVANTPSEQRDEARLMVLHKDSGKIEHKIFKDVLGYFDDKDVMILNNTKVFPARLYGNKEKTGATIEVFLLRELNKELRLWDVLVDPARKIRVGNKLYFGDDDLLVAEVVDNTTSRGRTIRFLFDGTDEEFRKNIEILGETPLPKYIKRKATAQDKERYQTIFAKHEGAVAAPTAGLHFSRELMKRLELKGVNFAEVTLHVGLGTFRSVEVEDLTKHKMDSEQFIINQKDADIVNKALEDKRKICAVGTTSMRAIESAVSSGKTLKAANDWTSKFIFPPYDFSIANSMITNFHTPESTLLMMVSAFGGYDYVRHAYEVALKEKYRFYSYGDAMLII

SEQ ID NO: 70105 - protein, 349 aa, Pedobacter ginsengisoli
  misc_feature (1)..(349): tr|A0A2D1U2M6|A0A2D1U2M6_9SPHI S-adenosylmethionine:tRN A ribosyltransferase-isomerase OS=Pedobacter ginsengiso li OX=363852 GN=queA PE=3 SV=1
MKLSQFKFNLPESLVANNPSEQRDEARLMVLHKDSGKIEHKIFKDILGYFDDKDVMILNNTKVFPARLYGNKEKTGATIEVFLLRELNKELRLWDVLVDPARKIRVGNKLYFGDDDLLVAEVVDNTTSRGRTIRFLFDGTDEEFRKNIEILGETPLPKYIKRKATAQDKERYQTIFAKHEGAVAAPTAGLHFSRELMKRLELKGINFAEVTLHVGLGTFRSVEVEDLTKHKMDSEQFIIEQKDADIVNKAIEDKRRVCAVGTTSMRAIESAVSSNRTLKAANDWTSKFIFPPYDFSIANSMITNFHTPESTLLMMVSAFGGFDYVRHAYEVALKEKYRFYSYGDAMLII

SEQ ID NO: 70106 - protein, 349 aa, Pedobacter ginsenosidimutans
  misc_feature (1)..(349): tr|A0A0T5VKP4|A0A0T5VKP4_9SPHI S-adenosylmethionine:tRN A ribosyltransferase-isomerase OS=Pedobacter ginsenosid imutans OX=687842 GN=queA PE=3 SV=1
MKLSQFKFNLPESLVANNPAEQRDEARLMVLHKDSGKIEHKIFKDVLGYFDDKDVMILNNTKVFPARLYGNKEKTGATIEVFLLRELNKELRLWDVLVDPARKIRVGNKLYFGDDDLLVAEVVDNTTSRGRTIRFLFEGTDEEFRKNVEILGETPLPKYIKRKATAEDKERYQTIFAKHEGAVAAPTAGLHFSRELMKRLELKGIEFAEVTLHVGLGTFRTVEVEDLTKHKMDSEQFIIEQKDANIVNKALEEKRKICAVGTTSMRAIESAVSANRTLKSANDWTSKFIFPPYDFSIANSMITNFHTPESTLLMMVSAFGGYENVMNAYEVAVKEKYKFYSYGDAMLII

SEQ ID NO: 70107 - protein, 424 aa, Pedobacter glucosidilyticus
  misc_feature (1)..(424): tr|A0A0B8Y0E8|A0A0B8Y0E8_9SPHI S-adenosylmethionine:tRN A ribosyltransferase-isomerase OS=Pedobacter glucosidil yticus OX=1122941 GN=queA_2 PE=3 SV=1
MELNNKLEAQQFEIKNFTYDLPENRIAKYPLAERDLSKLLVYHNGKISEDIYRNLDKYIFEKSIFIFNNTKVVQSRLYFNNSTGGKIEVFCLEPSKKNHEPSMAMMKKACVEWKCLIGRLDRWKEKVISINTKDISLDAEILERDGNVFTIRFSWQPTSFSFAEILEHFGAMPIPPYLKRESEEIDVSRYQTVYAEQQGSVAAPTAGLHFTNQILEKIKSKNAIVDYVTLHVGAGTFIPVKSETLEGHQMHYEWIEVSQETILNIVAQISDEQTNKNIIAIGTTSLRTIESLYWMGVKANQNMSASIDELEVKQWDAYELQQSLTASDALNCLLTWLKRNKIEKIICKTQLLIVPSYQLKIANALITNFHQPSSTLLLLVAAVVGDDWKVIYDYALKNDFRFLSYGDGSLLFDNKRNKNESIQY

SEQ ID NO: 70108 - protein, 349 aa, Pedobacter glucosidilyticus
  misc_feature (1)..(349): tr|A0A0B8YH23|A0A0B8YH23_9SPHI S-adenosylmethionine:tRN A ribosyltransferase-isomerase OS=Pedobacter glucosidil yticus OX=1122941 GN=queA_1 PE=3 SV=1
MKLSQFKFHLPESLIAHHPAETRDESRLMVLDKKTGHIEHKLFKDVLGYFEEKDVMILNNTKVFPARLYGNKEKTGATIEVFLLRELNKELRLWDVLVDPARKIRVGNKLYFGDDDLLVAEVVDNTTSRGRTIRFLFDGTDEEFRQNIEILGETPLPKYIKRKPTAEDKERYQTIFAKNEGAVAAPTAGLHFSRELLKRLELKGIEFAEVTLHIGLGTFRQVEVEDLTKHKMDSEQIIITQKDADIVNKGIADKRKVCAVGTTVMRSIESAVSASHTLKPINDWTSKFIFPPYDFSIANCMITNFHTPESTLLMMIAAFGGYENVMNAYEVAVKEKYRFYSYGDAMLII

SEQ ID NO: 70109 - protein, 349 aa, Pedobacter hartonius
  misc_feature (1)..(349): tr|A0A1H4D4T0|A0A1H4D4T0_9SPHI S-adenosylmethionine:tRN A ribosyltransferase-isomerase OS=Pedobacter hartonius OX=425514 GN=queA PE=3 SV=1
MKLSQFKFNLPESLVANNPSEQRDEARLMVLHKDTGKIEHKIFKDILEYFDDQDVMILNNTKVFPARLYGNKEKTGATIEVFLLRELNKELRLWDVLVDPARKIRVGNKLYFGDDDLLVAEVVDNTTSRGRTIRFLFDGTDEEFRKNIEILGETPLPKYIKRKATAMDKERYQTIFAKHEGAVAAPTAGMHFSRELMKRLELKGINFAEVTLHVGLGTFRSVEVEDLTKHKMDSEQFIIEEKEAAIVNKALENKKRICAVGTTSMRAIESAVSSGKMLKPANDWTSKFIFPPYDFSIANSMITNFHTPESTLLMMVSAFGGYDYVKHAYEVALKEKYRFYSYGDAMLII

SEQ ID NO: 70110 - protein, 349 aa, Pedobacter heparinus
  misc_feature (1)..(349): tr|C6Y064|C6Y064_PEDHD S-adenosylmethionine:tRNA ribosy ltransferase-isomerase OS=Pedobacter heparinus (strain ATCC 13125 / DSM 2366 / CIP 104194 / JCM 7457 / NBRC 12 017 / NCIMB 9290 / NRRL B-14731 / HIM 762-3) OX=
MKLSQFKFNLPESLVANNPSEQRDEARLMVLHKDSGKIEHKIFKDVLDYFDDQDVMILNNTKVFPARLYGNKEKTGATIEVFLLRELNKELRLWDVLVDPARKIRVGNKLYFGDDDLLVAEVVDNTTSRGRTIRFLFDGTDEEFRKNIEILGETPLPKYIKRKATAQDKERYQTIFAKHEGAVAAPTAGLHFSRELMKRLELKGINFAEVTLHVGLGTFRSVEVEDLTKHKMDSEQFIIEQKDADIVNKAIERKKRICAVGTTSMRAIESAVSSGRTLKAANDWTSKFIFPPYDFSIANSMITNFHTPESTLLMMVSAFGGYDYVRHAYEVALKEKYRFYSYGDAMLII

SEQ ID NO: 70111 - protein, 349 aa, Pedobacter insulae
  misc_feature (1)..(349): tr|A0A1I2UQB4|A0A1I2UQB4_9SPHI S-adenosylmethionine:tRN A ribosyltransferase-isomerase OS=Pedobacter insulae OX =414048 GN=queA PE=3 SV=1
MKLSQFKFNLPESLLANNPAEHRDEARLMVLHKDSGKIEHKIFKDVLGYFDDQDVMILNNTKVFPARLYGNKEKTGATIEVFLLRELNKELRLWDVLVDPARKIRVGNKLYFGDDDLLVAEVVDNTTSRGRTIRFLFDGTDEEFRKNVEILGETPLPKYIKRKATAEDKERYQTIFAKHEGAVAAPTAGLHFSRELMKRLELKGVDFAEVTLHVGLGTFRPVEVEDLTKHKMDSEQFIIDQTAVDVVNKALDNKKKICAVGTTSMRAIESAVSSGRKLKAANDWTSKFIFPPYDFSIANCMITNFHTPESTLLMMVSAFGGYENVMNAYQVAVKEKYRFYSFGDAMLII

SEQ ID NO: 70112 - protein, 349 aa, Pedobacter jejuensis
  misc_feature (1)..(349): tr|A0A3N0BUI6|A0A3N0BUI6_9SPHI S-adenosylmethionine:tRN A ribosyltransferase-isomerase OS=Pedobacter jejuensis OX=1268550 GN=queA PE=3 SV=1
MKLSQFKFNLPESLIANNPAEQRDEARLMVLHKDSGKIEHKIFKDVLGYFDDKDVMILNNTKVFPARLYGNKEKTGATIEVFLLRELNKELRLWDVLVDPARKIRVGNKLYFGDDDLLVAEVVDNTTSRGRTIRFLFEGTDEEFRRNVEILGETPLPKYIKRKATAEDKERYQTIFAKHEGAVAAPTAGLHFSRELMKRLELKGVEFAEVTLHVGLGTFRTVEVEDLTKHKMDSEQFIIEQKDANIVNKALEEKRKICAVGTTSMRAIESAVSANRTLKSANDWTSKFIFPPYEFNIANSMITNFHTPESTLLMMVSAFGGYENVMNAYEVAVKEKYKFYSYGDAMLII

SEQ ID NO: 70113 - protein, 349 aa, Pedobacter kyonggii
  misc_feature (1)..(349): tr|A0A4Q9HA03|A0A4Q9HA03_9SPHI S-adenosylmethionine:tRN A ribosyltransferase-isomerase OS=Pedobacter kyonggii O X=1926871 GN=queA PE=3 SV=1
MKLSQFKFNLPESLVANNPAEQRDEARLMVLHKDSGKIEHKIFKDVLGYFDDKDVMILNNTKVFPARLYGNKEKTGATIEVFLLRELNKELRLWDVLVDPARKIRVGNKLYFGDDDLLVAEVVDNTTSRGRTIRFLFEGTDEEFRKNVEILGETPLPKYIKRKATAEDKERYQTIFAKHEGAVAAPTAGLHFSRELMKRLELKGIEFAEVTLHVGLGTFRTVEVEDLTKHKMDSEQFIIEPKDAKIVNKALEEKRKICAVGTTSMRAIESAVSANRTLKSANDWTSKFIFPPYDFSIANSMITNFHTPESTLLMMVSAFGGYENVMNAYEVAVKEKYKFYSYGDAMLII

SEQ ID NO: 70114 - protein, 349 aa, Pedobacter kyungheensis
  misc_feature (1)..(349): tr|A0A0C1FVG7|A0A0C1FVG7_9SPHI S-adenosylmethionine:tRN A ribosyltransferase-isomerase OS=Pedobacter kyungheens is OX=1069985 GN=queA PE=3 SV=1
MKLSQFKFNLPESLVANNPAEERDEARLMVLHKDSGKIEHKIFKDVLGYFDDKDVMILNNTKVFPARLYGNKEKTGATIEVFLLRELNKELRLWDVLVDPARKIRVGNKLYFGDDDLLVAEVVDNTTSRGRTIRFLFEGSDEEFRKNVEILGETPLPKYIKRKATAEDKERYQTIFAKHEGAVAAPTAGLHFSRELMKRLELKGVDFAEVTLHVGLGTFRTVEVEDLTKHKMDSEQFIIEQKDANIVNRALENKKRICAVGTTSMRAIESAVSANRTLKAANDWTSKFIFPPYDFSIANSMITNFHTPESTLLMMVSAFGGYENVMNAYEVAVKEKYKFYSYGDAMLII

SEQ ID NO: 70115 - protein, 349 aa, Pedobacter lusitanus
  misc_feature (1)..(349): tr|A0A0D0GD02|A0A0D0GD02_9SPHI S-adenosylmethionine:tRN A ribosyltransferase-isomerase OS=Pedobacter lusitanus OX=1503925 GN=queA PE=3 SV=1
MKLSQFKFNLPESLIANNPSEHRDEARLMVLHRDSGKIEHKIFKDILEYFDDQDVMILNNTKVFPARLYGNKEKTGATIEVFLLRELNKELRLWDVLVDPARKIRVGNKLYFGDDDLLVAEVVDNTTSRGRTIRFLFDGTDEEFRKNIEILGETPLPKYIKRKATAQDKERYQTIFAKHEGAVAAPTAGMHFSRELMKRLELKGINFAEVTLHVGLGTFRSVEVEDLTKHKMDSEQFIIEESQANIVNKALAEKRRICAVGTTSMRAIESAVSSGRTLKPANDWTSKFIFPPYDFSIANSMITNFHTPESTLLMMISAFGGYDYVRHAYDVALKEKYRFYSYGDAMLII

SEQ ID NO: 70116 - protein, 349 aa, Pedobacter luteus
  misc_feature (1)..(349): tr|A0A1T5B5B2|A0A1T5B5B2_9SPHI S-adenosylmethionine:tRN A ribosyltransferase-isomerase OS=Pedobacter luteus OX= 572036 GN=queA PE=3 SV=1
MKLSQFKFDLPESLIAHNPSEQRDEARLMVLDRKTGAIEHKIFKDVLGYFGDKDVMILNNTKVFPARLYGNKEKTGATIEVFLLRELNRELRLWDVLVDPARKIRVGNKLYFGDDDLLVAEVVDNTTSRGRTIRFLFDGTDEEFRRNIEILGETPLPKYIKRKATAEDKERYQTIFAKKEGAVAAPTAGLHFSRELMKRLELKGVDFAEVTLHVGLGTFRAVEVEDLTKHKMDSEQFIIEQKSVNIVNKAIENKQKVCAVGTTSMRAIESAVSAGRELKAANDWTSKFIFPPYEFSIANSMITNFHTPESTLLMMVAAFGGYDHVMKAYEVAVKEKYRFYSYGDAMLII

SEQ ID NO: 70117 - protein, 349 aa, Pedobacter metabolipauper
  misc_feature (1)..(349): tr|A0A4R6SYN6|A0A4R6SYN6_9SPHI S-adenosylmethionine:tRN A ribosyltransferase-isomerase OS=Pedobacter metabolipa uper OX=425513 GN=queA PE=3 SV=1
MKLSQFKFNLPESLVANNPSENRDEARLMVLHKDSGKIEHKIFKDVLSYFDDKDVMILNNTKVFPARLYGNKEKTGATIEVFLLRELNKELRLWDVLVDPARKIRVGNKLYFGDDDLLVAEVVDNTTSRGRTIRFLFDGTDEEFRKNIEILGETPLPKYIKRKATAQDKERYQTIFAKHEGAVAAPTAGLHFSRELMKRLELKGVEFAEVTLHVGLGTFRSVEVEDLTKHKMDSEQYIIEQKDADIVNKAIADKRKICAVGTTSMRAIESAVSSNRTLKPANDWTSKFIFPPYDFSIANSMITNFHTPESTLLMMVSAFGGYDYVRNAYEVALKEKYRFYSYGDAMLII

SEQ ID NO: 70118 - protein, 349 aa, Pedobacter nutrimenti
  misc_feature (1)..(349): tr|A0A318UII2|A0A318UII2_9SPHI S-adenosylmethionine:tRN A ribosyltransferase-isomerase OS=Pedobacter nutrimenti OX=1241337 GN=queA PE=3 SV=1
MKLSQFKFNLPESLVANNPSEQRDEARLMVLHKDSGKIEHKIFKDVLNYFDDHDVMILNNTKVFPARLYGNKEKTGATIEVFLLRELNKELRLWDVLVDPARKIRVGNKLYFGDDDLLVAEVVDNTTSRGRTIRFLFDGTDEEFRKNIEILGETPLPKYIKRKATAQDKERYQTIFAKHEGAVAAPTAGLHFSRELMKRLELKGVNFAEVTLHVGLGTFRSVEVEDLTKHKMDSEQFIIEQKDADIVNKALEEKRKICAVGTTSMRAIESAVSSGRTLKAANDWTSKFIFPPYDFSIANSMITNFHTPESTLLMMVSAFGGYDYVRNAYEVALKEKYRFYSYGDAMLII

SEQ ID NO: 70119 - protein, 349 aa, Pedobacter nyackensis
  misc_feature (1)..(349): tr|A0A1W2F3J3|A0A1W2F3J3_9SPHI S-adenosylmethionine:tRN A ribosyltransferase-isomerase OS=Pedobacter nyackensis OX=475255 GN=queA PE=3 SV=1
MKLSQFKFNLPESLVANNPSEQRDEARLMVLHKDSGKIEHKIFKDVLDYFDDQDVMILNNTKVFPARLYGNKEKTGATIEVFLLRELNKELRLWDVLVDPARKIRVGNKLYFGDDDLLVAEVVDNTTSRGRTIRFLFDGTDEEFRKNIEILGETPLPKYIKRKATAQDKERYQTIFAKHEGAVAAPTAGLHFSRELMKRLELKGVNFAEVTLHVGLGTFRSVEVEDLTKHKMDSEQFIIEQKDADIVNLGIERKKKICAVGTTSMRAIESAVSSGRMLKPANDWTSKFIFPPYDFSIANSMITNFHTPESTLLMMVSAFGGYDYVRHAYEVALKEKYRFYSYGDAMLII

SEQ ID NO: 70120 - protein, 349 aa, Pedobacter psychrophilus
  misc_feature (1)..(349): tr|A0A179DF27|A0A179DF27_9SPHI S-adenosylmethionine:tRN A ribosyltransferase-isomerase OS=Pedobacter psychrophi lus OX=1826909 GN=queA PE=3 SV=1
MKLSQFKFHLPESLIAHTPSESRDESRLMVLDKKTGKIEHKIFKDVLGYFEEKDVMILNNTKVFPARLYGNKEKTGATIEVFLLRELNKELRLWDVLVDPARKIRVGNKLYFGDDDLLVAEVVDNTTSRGRTIRFLFDGTDEEFRQNIEILGETPLPKYIKRKPTAEDKDRYQTIFAKNEGAVAAPTAGLHFSRELMKRLELKGVDFAEVTLHIGLGTFRQVEVEDLTKHKMDSEQIIIEQKDADIVNKAKEEKRRICAVGTTVMRSIESAVSANHTLKPVNDWTSKFIFPPYDFSIANSMITNFHTPESTLLMMVAAFGNYDYVMNAYEQAVKEKYRFFSYGDAMLII

SEQ ID NO: 70121 - protein, 349 aa, Pedobacter psychrotolerans
  misc_feature (1)..(349): tr|A0A4R2H6W6|A0A4R2H6W6_9SPHI S-adenosylmethionine:tRN A ribosyltransferase-isomerase OS=Pedobacter psychrotol erans OX=1843235 GN=queA PE=3 SV=1
MKLSQFKFNLPEALIANNPAEQRDEARLMVLHKDSGKIEHKIFKDVLGYFDDKDVMILNNTKVFPARLYGNKEKTGATIEVFLLRELNKELRLWDVLVDPARKIRVGNKLYFGDDDLLVAEVVDNTTSRGRTIRFLFEGTDEEFRRNVEILGETPLPKYIKRKATAEDKERYQTIFAKHEGAVAAPTAGLHFSRELMKRLELKGVEFAEVTLHVGLGTFRTVEVEDLTKHKMDSEQFIIEPKDANIVNKALEEKRKICAVGTTSMRSIESAVSANRTLKSANDWTSKFIFPPYEFSIANSMITNFHTPESTLLMMVSAFGGYENVMNAYEVAVKEKYKFYSYGDAMLII

SEQ ID NO: 70122 - protein, 349 aa, Pedobacter rhizosphaerae
  misc_feature (1)..(349): tr|A0A1H9LZ25|A0A1H9LZ25_9SPHI S-adenosylmethionine:tRN A ribosyltransferase-isomerase OS=Pedobacter rhizosphae rae OX=390241 GN=queA PE=3 SV=1
MKLSQFKFNLPESLVAHNPSEERDEARLMVLHKDSGKIEHKIFKDVLGYFDDQDVMILNNTKVFPARLYGNKEKTGATIEVFLLRELNKELRLWDVLVDPARKIRVGNKLYFGDDDLLVAEVVDNTTSRGRTIRFLFEGTDEEFRRNVEILGETPLPKYIKRKATAEDKERYQTIFAKHEGAVAAPTAGLHFSRELMKRLELKGINFAEVTLHVGLGTFRTVEVEDLTKHKMDSEQFIIEQKDADIVNKGIADKRKVCAVGTTSMRAIESAVSANRTLKAANDWTSKFIFPPYDFSIANSMITNFHTPESTLLMMISAFGGYENVMNAYEVAVKEKYKFYSYGDAMLII

SEQ ID NO: 70123 - protein, 349 aa, Pedobacter ruber
  misc_feature (1)..(349): tr|A0A1G9M3U0|A0A1G9M3U0_9SPHI S-adenosylmethionine:tRN A ribosyltransferase-isomerase OS=Pedobacter ruber OX=9 90371 GN=queA PE=3 SV=1
MKLSQFKFDLPESLIAHNPVENRDEARLMVLDKKTGAIEHKIFKDILGYFEEKDVMILNNTKVFPARLYGNKEKTGATIEVFLLRELNRELRLWDVLVDPARKIRVGNKLYFGDDDLLVAEVVDNTTSRGRTIRFLFDGTDDEFRRNIEILGETPLPKYIKRKATAEDKERYQTIFAKKEGAVAAPTAGLHFSRELMKRLELKGVDFAEVTLHVGLGTFRAVEVEDLTKHKMDSEQFIIEQKDADIVNKAILEKRRVCAVGTTSMRAIESAVSAGKELKAANDWTSKFIFPPYDFSIANCMITNFHTPESTLLMMVAAFGGYENVMKAYEVAVKEKYRFYSYGDAMLII

SEQ ID NO: 70124 - protein, 349 aa, Pedobacter soli; identical to SEQ ID NO: 70114
  misc_feature (1)..(349): tr|A0A1G6SHV6|A0A1G6SHV6_9SPHI S-adenosylmethionine:tRN A ribosyltransferase-isomerase OS=Pedobacter soli OX=39 0242 GN=queA PE=3 SV=1

SEQ ID NO: 70125 - protein, 349 aa, Pedobacter sp.; identical to SEQ ID NO: 70096
  misc_feature (1)..(349): tr|A0A4R2ZGJ8|A0A4R2ZGJ8_9SPHI S-adenosylmethionine:tRN A ribosyltransferase-isomerase OS=Pedobacter sp. CF074 OX=2135714 GN=queA PE=3 SV=1

SEQ ID NO: 70126 - protein, 349 aa, Pedobacter sp.
  misc_feature (1)..(349): tr|A0A0Q5TQP9|A0A0Q5TQP9_9SPHI S-adenosylmethionine:tRN A ribosyltransferase-isomerase OS=Pedobacter sp. Leaf19 4 OX=1736297 GN=queA PE=3 SV=1
MKLSQFKFNLPESLVANNPSEERDEARLMVLHKDSGKIEHKIFKDVLGYFDDKDVMILNNTKVFPARLYGNKEKTGATIEVFLLRELNKELRLWDVLVDPARKIRVGNKLYFGDDDLLVAEVVDNTTSRGRTIRFLFEGTDEEFRKNVEILGETPLPKYIKRKATAEDKERYQTIFAKHEGAVAAPTAGLHFSRELMKRLELKGIEFAEVTLHVGLGTFRTVEVEDLTKHKMDSEQFIIEQKDANIVNKALEEKRKICAVGTTSMRAIESAVSANRTLKAANDWTSKFIFPPYDFSIANSMITNFHTPESTLLMMVSAFGGYENVMNAYEVAVKEKYKFYSYGDAMLII

SEQ ID NO: 70127 - protein, 349 aa, Pedobacter steynii
  misc_feature (1)..(349): tr|A0A1D7QK32|A0A1D7QK32_9SPHI S-adenosylmethionine:tRN A ribosyltransferase-isomerase OS=Pedobacter steynii OX =430522 GN=queA PE=3 SV=1
MKLSQFKFNLPESLVANNPSEHRDEARLMVLHKDSGKIEHKIFKDVLSYFDDKDVMILNNTKVFPARLYGNKEKTGATIEVFLLRELNKELRLWDVLVDPARKIRVGNKLYFGDDDLLVAEVVDNTTSRGRTIRFLFDGTDEEFRKNIEILGETPLPKYIKRKATAQDKERYQTIFAKHEGAVAAPTAGLHFSRELMKRLELKGVNFAEVTLHVGLGTFRSVEVEDLTKHKMDSEQFIIEQKDADIVNKAIEEKRKICAVGTTSMRAIESAVSSGRMLKAANDWTSKFIFPPYDFSIANSMITNFHTPESTLLMMVSAFGGYDYVRNAYDVALKEKYRFYSYGDAMLII

SEQ ID NO: 70128 - protein, 368 aa, Pedobacter steynii
  misc_feature (1)..(368): tr|A0A1G9PS95|A0A1G9PS95_9SPHI S-adenosylmethionine:tRN A ribosyltransferase-isomerase OS=Pedobacter steynii OX =430522 GN=queA PE=3 SV=1
MKKKIIFLKFAPLIITSKNMKLSQFKFNLPESLVANNPSEHRDEARLMVLHKDSGKIEHKIFKDVLSYFDDQDVMILNNTKVFPARLYGNKEKTGATIEVFLLRELNKELRLWDVLVDPARKIRVGNKLYFGDDDLLVAEVVDNTTSRGRTIRFLFDGTDEEFRKNIEILGETPLPKYIKRKATAQDKERYQTIFAKHEGAVAAPTAGLHFSRELMKRLELKGINFAEVTLHVGLGTFRSVEVEDLTKHKMDSEQFIIEQKDADIVNKAIEEKRKICAVGTTSMRAIESAVSSGKMLKPANDWTSKFIFPPYDFSIANSMITNFHTPESTLLMMVSAFGGYDYVRNAYEVALKEKYRFYSYGDAMLII

SEQ ID NO: 70129 - protein, 372 aa, Pedobacter suwonensis; identical to SEQ ID NO: 70100
  misc_feature (1)..(372): tr|A0A1I0U651|A0A1I0U651_9SPHI S-adenosylmethionine:tRN A ribosyltransferase-isomerase OS=Pedobacter suwonensis OX=332999 GN=queA PE=3 SV=1

SEQ ID NO: 70130 - protein, 349 aa, Pedobacter terrae
  misc_feature (1)..(349): tr|A0A1G7P7T3|A0A1G7P7T3_9SPHI S-adenosylmethionine:tRN A ribosyltransferase-isomerase OS=Pedobacter terrae OX= 405671 GN=queA PE=3 SV=1
MKLSQFKFNLPESLVANNPAEQRDEARLMVLHKDSGKIEHKIFKDVLGYFDDKDVMILNNTKVFPARLYGNKEKTGATIEVFLLRELNKELRLWDVLVDPARKIRVGNKLYFGDDDLLVAEVVDNTTSRGRTIRFLFEGTDEEFRKNVEILGETPLPKYIKRKATAEDKERYQTIFAKHEGAVAAPTAGLHFSRELMKRLELKGVEFAEVTLHVGLGTFRTVEVEDLTKHKMDSEQFIIEPKDAGIVNKAIEEKRKICAVGTTSMRAIESAVSANRTLKAANDWTSKFIFPPYDFSIANSMITNFHTPESTLLMMVSAFGGYENVMNAYEVAVKEKYKFYSYGDAMLII

SEQ ID NO: 70131 - protein, 349 aa, Pedobacter terrae
  misc_feature (1)..(349): tr|A0A561GFQ3|A0A561GFQ3_9SPHI S-adenosylmethionine:tRN A ribosyltransferase-isomerase OS=Pedobacter terrae OX= 405671 GN=queA PE=3 SV=1
MKLSQFKFNLPESLVANNPAEQRDEARLMVLHKDSGKIEHKIFKDVLGYFDDKDVMILNNTKVFPARLYGNKEKTGATIEVFLLRELNKELRLWDVLVDPARKIRVGNKLYFGDDDLLVAEVVDNTTSRGRTIRFLFEGTDEEFRKNVEILGETPLPKYIKRKATAEDKERYQTIFAKHEGAVAAPTAGLHFSRELMKRLELKGVEFAEVTLHVGLGTFRTVEVEDLTKHKMDSEQFIIEPKDANIVNKALENKRKICAVGTTSMRAIESAVSANRTLKAANDWTSKFIFPPYDFSIANSMITNFHTPESTLLMMVSAFGGYENVMNAYEVAVKEKYKFYSYGDAMLII

SEQ ID NO: 70132 - protein, 349 aa, Pedobacter tournemirensis
  misc_feature (1)..(349): tr|A0A4V1KJ03|A0A4V1KJ03_9SPHI S-adenosylmethionine:tRN A ribosyltransferase-isomerase OS=Pedobacter tournemire nsis OX=699437 GN=queA PE=3 SV=1
MKLSQFKFNLPDSLIAHSPSDQRDEARLMVLDRNTGAIEHKIFKDVLDYFEEKDVMILNNTKVFPARLYGNKEKTGATIEVFLLRELNKELRLWDVLVDPARKIRVGNKLYFGDDDLLVAEVVDNTTSRGRTIRFLFDGTDEEFRRNIEILGETPLPKYIKRKATAEDKERYQTIFAKHEGAVAAPTAGLHFSRELMKRLELKGVEFAEVTLHVGLGTFRPVEVEDLTKHKMDSEQFIIEQKSADLVNNAIENKRRVCAVGTTSMRAIESAVSANKTLKAANDWTSKFIFPPYDFSIANTMITNFHTPESTLLMMICAFGGYENVMNAYEVAVKEKYRFYSYGDAMLII

SEQ ID NO: 70133 - protein, 349 aa, Pedobacter westerhofensis
  misc_feature (1)..(349): tr|A0A521BKG0|A0A521BKG0_9SPHI S-adenosylmethionine:tRN A ribosyltransferase-isomerase OS=Pedobacter westerhofe nsis OX=425512 GN=queA PE=3 SV=1
MKLSQFKFNLPESLVASNPSDQRDEARLMVLHKDTGEIEHRIFKDVLEYFDDQDVMILNNTKVFPARLYGNKEKTGATIEVFLLRELNRELRLWDVLVDPARKIRVGNKLYFGDDDLLVAEVVDNTTSRGRTIRFLFDGTDEEFRKNIEILGETPLPKYIKRKATAMDKERYQTIFAKHEGAVAAPTAGMHFSRELMKRLELKGINFAEVTLHIGLGTFRTVEVEDLTKHKMDSEQFIIEESQAKIVNKALENKKRICAVGTTSMRAIESAVSSGKMLKPANDWTSKFIFPPYDFSIANSMITNFHTPESTLLMMISAFGGYEYVRHAYEVALKEKYRFYSYGDAMLII

SEQ ID NO: 70134 - protein, 349 aa, Pedobacter xixiisoli
  misc_feature (1)..(349): tr|A0A285ZRL8|A0A285ZRL8_9SPHI S-adenosylmethionine:tRN A ribosyltransferase-isomerase OS=Pedobacter xixiisoli OX=1476464 GN=queA PE=3 SV=1
MKLSQFKFNLPDSLLANDPAEERDEARLMVLHKDSGKIEHKIFKDVLGYFDDKDVMILNNTKVFPARLYGNKEKTGATIEVFLLRELNKELRLWDVLVDPARKIRVGNKLYFGDDDLLVAEVVDNTTSRGRTIRFLFDGTDEEFRRNVEILGETPLPKYIKRKATEKDKERYQTIFAKHEGAVAAPTAGLHFSRELMKRLELKGVEFAEVTLHVGLGTFRQVEVEDLTKHKMDSEQFIIEQKDANLVNKALEEKRKICAVGTTSMRAIESAVSANKTLKAANDWTSKFIFPPYDFSIANSMITNFHTSESTLLMMVSAFGGYENVMNAYEVAVKEKYRFYSYGDAMLII

SEQ ID NO: 70135 - protein, 349 aa, Pedobacter yonginense
  misc_feature (1)..(349): tr|A0A317ER41|A0A317ER41_9SPHI S-adenosylmethionine:tRN A ribosyltransferase-isomerase OS=Pedobacter yonginense OX=651869 GN=queA PE=3 SV=1
MKLSQFKFNLPESLIANNPAEQRDEARLMVLHKDSGKIEHKIFKDVLGYFDDKDVMILNNTKVFPARLYGNKEKTGATIEVFLLRELNKELRLWDVLVDPARKIRVGNKLYFGDNDLLVAEVVDNTTSRGRTIRFLFEGTDEEFRRNVEILGETPLPKYIKRKATAEDKERYQTIFAKHEGAVAAPTAGLHFSRELMKRLELKGVNFAEVTLHVGLGTFRTVEVEDLTKHKMDSEQFIIEQKDANIVNKALEEKRRICAVGTTSMRSIESAVSANRTLKAANDWTSKFIFPPYDFSIANSMITNFHTPESTLLMMVSAFGGYENVMNAYEVAVKEKYKFYSYGDAMLII

SEQ ID NO: 70136 - protein, 349 aa, Pedobacter yulinensis
  misc_feature (1)..(349): tr|A0A2T3HLJ0|A0A2T3HLJ0_9SPHI S-adenosylmethionine:tRN A ribosyltransferase-isomerase OS=Pedobacter yulinensis OX=2126353 GN=queA PE=3 SV=1
MKLSQFKFNLPDSLIASTPSENRDEARLMVLHKDSGKIEHKIFKDVLDYFDDKDVMILNNTKVFPARLYGNKEKTGATIEVFLLRELNKELRLWDVLVDPARKIRVGNKLYFGDDDLLVAEVVDNTTSRGRTIRFLFDGTDEEFRKNVEILGETPLPKYIKRKATAQDKERYQTIFAKHEGAVAAPTAGLHFSRELMKRLELKGIEFAEVTLHVGLGTFRPVEVEDLTKHKMDSEQFIIEDRDARIVNKALEEKRRICAVGTTSMRAIESAVSASHTLKAASDWTSKFIFPPYDFSIANSMITNFHTPESTLLMMIAAFGGYDNVMNAYEIAVKEKYRFYSYGDAMLII

SEQ ID NO: 70137 - protein, 358 aa, Pedosphaera parvula
  misc_feature (1)..(358): tr|B9XIH7|B9XIH7_PEDPL S-adenosylmethionine:tRNA ribosy ltransferase-isomerase OS=Pedosphaera parvula (strain E llin514) OX=320771 GN=queA PE=3 SV=1
MRTSDFDFALPPELIAQAPTATRDQSRLLVLKRNTAEIAHRKFRDVLEFLKPGDVLVLNNSRVIPARLRALNARTNGQFEVLLLEEHATNDWWVMMRPGKRARIGTELVFRDKTGVVAHIRASVIDTNPEGHRRIHFTGTPNIIENLDALGEIPLPPYIERNSDKGLAEDDIRYQTVYAKPAGSVAAPTAGLHFTDELLHEIRSRGIQICFVTLHVGLGTFAPVKAETLSEHVMHEERYELSAETAQTITTAKHAGRRIIAVGTTSVRVLESVAAQHHGKLIAGKGRTRIFIHPPYSFSVVDVLLTNFHLPCSTLLMLVSAFAAPGEMRGREIVLAAYAEAVREKYRFFSYGDAMLVI

SEQ ID NO: 70138 - protein, 357 aa, Pedosphaera sp.
  misc_feature (1)..(357): tr|A0A2A2RVE0|A0A2A2RVE0_9BACT S-adenosylmethionine:tRN A ribosyltransferase-isomerase OS=Pedosphaera sp. Tous- C6FEB OX=1982324 GN=queA PE=3 SV=1
MRTAEFDFTLPLDLIAQSPADARDGSRLLVLERRTGHVKHRRFRDILDLFGPGDVLVLNNSRVLRARLRGRKPSSGGEVELLLVEEVGVNDWWTLLRPGKRVRPGTEIQLCTNTGDPSTLRAIVQEKNAEGHCRASFIGTPNILAELEAHGEIPLPPYIGRAAGAGDDTRYQTVFARSAGSVAAPTAGLHFTPEVLAELRARGVHIHFVTLHVGLGTFAPVKADHLSDHVMHEERFELPADTAEAINAAKREGRRVIAVGTTTVRVLESAAALSTLNSQLSTQRGRTRIFIHPPYRFRIVDALLTNFHLPQSTLLMLVSAFAAPGELRGREQILAAYAEAVRERYRFFSYGDAMLIL

SEQ ID NO: 70139 - protein, 370 aa, Pedosphaera sp.
  misc_feature (1)..(370): tr|A0A2D5VZ99|A0A2D5VZ99_9BACT S-adenosylmethionine:tRN A ribosyltransferase-isomerase OS=Pedosphaera sp. OX=20 24890 GN=queA PE=3 SV=1
  misc_feature (299)..(299): Xaa can be any naturally occurring amino acid
  misc_feature (352)..(352): Xaa can be any naturally occurring amino acid
MVSGQQLTSSLRTDQFDFHLPGELIAQKPIDGPRDRSRLLVYERKSHQLKHSQFRDHAAWLQPGDLLIMNNSKVIPARLRGRKAGSGGKFEIFLLEEITHNQWLVMLKPGKRTRPGTLIEIQTAAERTQPLMCEVISKTTDGHYCVTFHGSKRVDEQLEDIGEIPLPPYIQRTGKPSKEDQERYQTVYADKNGSVAAPTAGLHYTPELLETLRKHGVQLSWVTLHVGLGTFNPIKTEWATDHRMHEERYEISEDTMRAIQAAKKAGRRVIAVGTTSLRVLESVASIWSTDQPARPIKQXTDIFIYPPYRFGLTDGLITNFHLPQSSLMMLVSAFSSPGSLEGIQILKDLYAXAVKERYRFFSFGDAMMIL

SEQ ID NO: 70140 - protein, 349 aa, Pelagibaca abyssi
  misc_feature (1)..(349): tr|A0A1P8UPM8|A0A1P8UPM8_9RHOB S-adenosylmethionine:tRN A ribosyltransferase-isomerase OS=Pelagibaca abyssi OX= 1250539 GN=queA PE=3 SV=1
MKLSDFDFDLPEALIATRPAQPRSSARLLVAEGERITDAVVSDLGNWLRPGDRLVLNDTKVIPARLFGTRSRQSAQGLTRAQIEVTLLEPRAGGLWAALVKPLKKLREGETVVFSDALSATLEAREEGQGLFRFNLAGEDFDAALAEAGAMPLPPYIAAKRAADARDKQDYQTVWAKHSGAVAAPTASLHFDAPLLAALRERGVAFTHVTLHVGAGTFLPVKVDDVTTHKMHGEWGEVSAAAAAEIAATKAAGGRVIPVGTTALRLIETAARETGAIVPWTGVTEIFIYPGFEFRVTDALMTNFHLPKSTLMMLVSALMGQERIKRIYAHAVAERYRFFSYGDSSLLLP

SEQ ID NO: 70141 - protein, 349 aa, Pelagibaca sp.
  misc_feature (1)..(349): tr|A0A2D6B348|A0A2D6B348_9RHOB S-adenosylmethionine:tRN A ribosyltransferase-isomerase OS=Pelagibaca sp. OX=197 9400 GN=queA PE=3 SV=1
MHLSDFDFDLPDALIATRPANPRSSARLLVAEGDTITDAVVRDLTQWLRLGDRLVLNDTKVIPARLSGARTRESAQGVTQAQIEITLLEPRPGGLWAALVKPLKKLREGETVVFSEALSATLEARENGQGLLRFNLEGEDFDAALAEAGAMPLPPYIAAKRAADAQDKTDYQTVWAERTGAVAAPTASLHFDAGLLAALEAHGVAFTKVTLHVGAGTFLPVKVDDVTTHKMHGEWGEVSESAAAEIAATKAAGGRVIPVGTTALRLLETAARDSGAIAPWQGVTDIFIYPGFEFRVTDALMTNFHLPKSTLMMLVSALMGRERMMGIYEHAISERYRFFSYGDSSLLIP

SEQ ID NO: 70142 - protein, 337 aa, Pelagibacteraceae bacterium
  misc_feature (1)..(337): tr|A0A1Z9SP38|A0A1Z9SP38_9PROT S-adenosylmethionine:tRN A ribosyltransferase-isomerase OS=Pelagibacteraceae bac terium TMED258 OX=1986820 GN=queA PE=3 SV=1
  misc_feature (2)..(2): Xaa can be any naturally occurring amino acid
  misc_feature (17)..(17): Xaa can be any naturally occurring amino acid
  misc_feature (23)..(23): Xaa can be any naturally occurring amino acid
  misc_feature (33)..(33): Xaa can be any naturally occurring amino acid
  misc_feature (36)..(36): Xaa can be any naturally occurring amino acid
  misc_feature (43)..(43): Xaa can be any naturally occurring amino acid
  misc_feature (59)..(59): Xaa can be any naturally occurring amino acid
  misc_feature (65)..(65): Xaa can be any naturally occurring amino acid
  misc_feature (73)..(74): Xaa can be any naturally occurring amino acid
  misc_feature (82)..(83): Xaa can be any naturally occurring amino acid
  misc_feature (99)..(99): Xaa can be any naturally occurring amino acid
  misc_feature (104)..(104): Xaa can be any naturally occurring amino acid
  misc_feature (106)..(106): Xaa can be any naturally occurring amino acid
  misc_feature (118)..(118): Xaa can be any naturally occurring amino acid
  misc_feature (122)..(122): Xaa can be any naturally occurring amino acid
  misc_feature (129)..(129): Xaa can be any naturally occurring amino acid
  misc_feature (133)..(133): Xaa can be any naturally occurring amino acid
  misc_feature (152)..(152): Xaa can be any naturally occurring amino acid
MXISHFDFDLPQELIAXRPIQPXNISRLLIGSXPVXHDNFNNXLNYIEKNDLLVVNNSXVIPAYXSIKHKSNXXRITFHKKXXESLWKAFIKPGKKINXGDKIXLXDSYFLDVIEKTXEGDXIIKINGXEDIXFRNFGKMPLPPYILKSRNXDKNDFNDYQTVYASHDGSIAAPTAGLHFNNEIFNKIKDRDQLAEITLHVGAGTFMPIRDNIENHKMHSELGFISNEVIELIKEKKSKKGRIISVGTTSLRLLESAALSGELSPFSGKTDIFIKPGFKFKVVDMLLTNFHLPKSTLMLLVSAFSGIDKIQSIYRTAIENDYRFFSYGDVSLLYRNE

SEQ ID NO: 70143 - protein, 93 aa, Pelagibacteraceae bacterium
  misc_feature (1)..(93): tr|A0A1Z8L578|A0A1Z8L578_9PROT S-adenosylmethionine:tRN A ribosyltransferase-isomerase OS=Pelagibacteraceae bac terium TMED13 OX=1986627 GN=CBB73_04955 PE=3 SV=1
  misc_feature (51)..(51): Xaa can be any naturally occurring amino acid
  misc_feature (61)..(61): Xaa can be any naturally occurring amino acid
  misc_feature (80)..(80): Xaa can be any naturally occurring amino acid
  misc_feature (89)..(89): Xaa can be any naturally occurring amino acid
MKLEDLDFEINSDLIALRPKKPRDESKLLISEDPLKIIKFKNIIETLRPGXVLVVNDTKVXRSDITGYINESKVSINLNXIVDKKKKIXVCIY

SEQ ID NO: 70144 - protein, 344 aa, Pelagibacterales bacterium
  misc_feature (1)..(344): tr|A0A2E5MSH0|A0A2E5MSH0_9PROT S-adenosylmethionine:tRN A ribosyltransferase-isomerase OS=Pelagibacterales bact erium OX=2026776 GN=queA PE=3 SV=1
MNIDAFEFNLPKQLIAQSSLEQPDKSRLLYISDKSIRDYNTLDLSNILKPGDLLIANNTKVINSRIIGKIEHKSFSITMLNEYEIGIWQALVKGSKKLNLGDNVILPNNMLISVQSKGERGIVYFNVNLNKTDFINYLNHYGELPLPPYIKLDDKSNNIINYQTLFAKNYGAVAAPTAGLHFTNNLKTNLANKNINICEITLHVGAGTFLPIEVSDISKHNMHSEYFSIDDEVANKINLTKKNGGRIIAIGTTVLRALESSCDVNGYVNSFKGDTSIFISPGYKIKSTDYLLTNFHLPKSTLFILVCAYAGIKTMHKAYQHAIDKKYRFYSLGDACLIKKTHIL

SEQ ID NO: 70145 - protein, 342 aa, Pelagibacterales bacterium
  misc_feature (1)..(342): tr|A0A2E4X5Q8|A0A2E4X5Q8_9PROT S-adenosylmethionine:tRN A ribosyltransferase-isomerase OS=Pelagibacterales bact erium OX=2026776 GN=queA PE=3 SV=1
MIIDDFDYNLPKELIAQRPASPRSSSKLLVTEKNLITSFNKLYTFLDKNDVLIINNTKVIPAVIIGKYEGKKIKITLHTKLSTRTWIAFAKPAKLLEAGSILSFRDDVSAKVLNKNEAHVELNFNLSMKGFNSFLNRYGELPIPPYIKTKSTKIKNEKYYQSIFSKNFGAYASPTASLHFDDLLLRNIKKKKIDIIEITLHVGAGTFLPLNNKIVEKNKLHKEKGYISAESAKKISDALENKKNIVALGTTVLRLLEDCFLKYSDIQSYNEETELFIYPGFKFNVVNKLITNFHLPKSSLFLLVCAFGGKKNILKCYNKAVEKKMRFFSYGDGMIINRYDKI

SEQ ID NO: 70146 - protein, 357 aa, Pelagibacterium halotolerans
  misc_feature (1)..(357): tr|G4R9Q7|G4R9Q7_PELHB S-adenosylmethionine:tRNA ribosy ltransferase-isomerase OS=Pelagibacterium halotolerans (strain DSM 22347 / JCM 15775 / CGMCC 1.7692 / B2) OX=1 082931 GN=queA PE=3 SV=1
MKVDLFDFELPEDRIALHPVSPRDSAKMLVVAGNGALSDRVVTDLETILRAGDVLVVNDTRVIPAELRGTRHRGAFAASVSFNLHKRVDGNTWLAFARPAKRLKAGDRVVFGATSEVCMLDELAASVKAVEDGQVTLAFDFSDAVLDEAIKARGAMPLPPYIGAKRDIEERDKTDYQTVYAEHDGAVAAPTAGLHFTPELLERLEGRGIAIEHVTLHVGAGTFLPMKADDTEDHTMHAEWGVVSPETVERINAAKAAGGRIVAVGTTSLRLLESAARKTGALEPFADETDIFITPGFTFGVVDVLMTNFHLPRSTLFMLVSAFSGLETMHKAYKHAIDHHYRFYSYGDSSLLFRADR

SEQ ID NO: 70147 - protein, 357 aa, Pelagibacterium luteolum
  misc_feature (1)..(357): tr|A0A1G7VXP2|A0A1G7VXP2_9RHIZ S-adenosylmethionine:tRN A ribosyltransferase-isomerase OS=Pelagibacterium luteo lum OX=440168 GN=queA PE=3 SV=1
MKVDLFDFDLPDRHIALHPVTPRDSAKMLVVSPDVELSDQVVTDLEALLVPGDVLVVNDTRVIPADLRGTRHRGEFSASVSFNLHKRENGNTWLAFARPAKRLKAGDRVVFGATTEVCMLDELSATVKAVEDGQVTLAFDFSDAILDEAIKARGAMPLPPYIGAKRGIEDRDKTDYQTVYAQHDGAVAAPTAGLHFTPELLARLEAKGVTIERVTLHVGAGTFLPMKADDTDDHKMHAEWGVVSPETVQRINAARAEGGRVVAVGTTSLRLLESAARKTGTLEPFADETDIFITPGFNFRVVDVLMTNFHLPRSTLFMLVSAFSGLETMRKAYKHAIDTDYRFYSYGDSSLLFRSAP

SEQ ID NO: 70148 - protein, 360 aa, Pelagibacterium sp.
  misc_feature (1)..(360): tr|A0A1E4DXY0|A0A1E4DXY0_9RHIZ S-adenosylmethionine:tRN A ribosyltransferase-isomerase OS=Pelagibacterium sp. S CN 63-126 OX=1660123 GN=queA PE=3 SV=1
MRVSDFDFDLPENLIALHPAEPRDSARLLVVEEGKPLLDRHIPDLKQLLRPGDVLVVNDTRVLPAELKGTRIRGENRAGVSFNLHKRVDAHTWRAFARPAKKLALLDELELGNGGAADALLARVSGRGESGEVTLEFELGGAALDEAIKSHGAMPLPPYIGAKRGVEERDKVDYQTVYAAEDGAVAAPTAGLHFTESLLQQLAEMDVAMERVTLHVGAGTFLPMKVDDTDDHVMHSEWGEIDQATVERIKARRDAGGRVVAVGTTSLRLLETASLATGELMPFVGDTDIFITPGFRFRTVDLLMTNFHLPKSTLFMLVSAFAGFDTMKAAYGHAIADGYRFYSYGDSSLLHRAPHPRDRA

SEQ ID NO: 70149 - protein, 357 aa, Pelagibacterium sp.
  misc_feature (1)..(357): tr|A0A2E7FT95|A0A2E7FT95_9RHIZ S-adenosylmethionine:tRN A ribosyltransferase-isomerase OS=Pelagibacterium sp. O X=1967288 GN=queA PE=3 SV=1
MKVDLFDFDLPEDRIALHPVSPRDSAKMLVVGEEGALSDRVVTDLEAILRAGDVLVVNDTRVIPAELRGRRHRGEFSASVSFNLHKRVDGNTWLAFARPAKRLKSGDRVVFGATSEVCMLDELAATVKAVEDGQVTLGFDLSDAVLDEAIKARGAMPLPPYIGAKRDIEERDKTDYQTVYAEHDGAVAAPTAGLHFTPELLERLESKGVGIEHVTLHVGAGTFLPMKADDTEDHQMHAEWGVVSPETVERIKAAKATGGRIVAVGTTSLRLLESAARKSGTLEPFADETDIFITPGFGFRVVDVLMTNFHLPRSTLFMLVSAFSGLETMHRAYKHAIDQNYRFYSYGDSSLLFRADR

SEQ ID NO: 70150 - protein, 356 aa, Pelagibaculum spongiae
  misc_feature (1)..(356): tr|A0A2V1GZ89|A0A2V1GZ89_9GAMM S-adenosylmethionine:tRN A ribosyltransferase-isomerase OS=Pelagibaculum spongia e OX=2080658 GN=queA PE=3 SV=1
MKLSDFQFDLPDEQIARFPLADRTASRLMEVQGATGELTQRHFADIETLLQPGDLLVLNNTRVIPARMYGQKASGGKLEVLVERLLDDKRALCHIRSSKSPKPGSMIRLEGLVDAEIEGREDALFLVKVQSEQTFLEVLDAHGHMPLPPYIDRPDENSDRERYQTVFGEHAGAVAAPTAGLHFDQSLLDRLVSKGVEIARVTLHVGAGTFQPVRVDNILEHHMHSEWIKVEQPVCDQVAACKARGGRVIAVGTTAVRSLETAAMSGELKPFEGDTDIFIYPGYRFQVVDCMVTNFHLSESTLLMLVSAFAGYRNMMQAYQQAVTDKFRFFSYGDAMFLHRCDNPDLPPSAMDRSSD

SEQ ID NO: 70151 - protein, 348 aa, Pelagicola litoralis
  misc_feature (1)..(348): tr|A0A4U7N6G4|A0A4U7N6G4_9RHOB S-adenosylmethionine:tRN A ribosyltransferase-isomerase OS=Pelagicola litoralis OX=420403 GN=queA PE=3 SV=1
MQLSDFDFDLPDHLIATRPAVPRTSARLLVSNGPQTVDATVGDMPEWLRPGDRLVLNDTKVIPARLTGARHRVGPEGPTSAKIEVTLLEPRADGQWSALLKPLKKVREGEEIVFADNFKATLLHKDAGQAVLQFDLRGEDFDGALAAAGAMPLPPYIAAKRAADEQDKTDYQTVWAEHSGAVAAPTASLHFDQALLDTLAQMGVTFTFVTLHVGAGTFLPVKVDNVLDHKMHSEWGRVSPEAARDIQDTKANGGRVIPVGTTALRLIETAARSGQIQPWQGGTDIFIYPGFTFHVADALITNFHLPKSTLMMLVSAFVGADRIREIYQHAVSKEYRFFSYGDASLLIP

SEQ ID NO: 70152 - protein, 348 aa, Pelagicola litorisediminis
  misc_feature (1)..(348): tr|A0A1Y5R5P2|A0A1Y5R5P2_9RHOB S-adenosylmethionine:tRN A ribosyltransferase-isomerase OS=Pelagicola litorisedi minis OX=1312363 GN=queA PE=3 SV=1
MKLSDFDFALPEDLIATRPARPRSSARMLVATGDSITDACVSDLGQWLRKGDRLVLNDTRVIPARLTGQRRRSGDQGDSVARIEVTLLDPQADGHWTALVKPLKKLREGEEVRFGAGLSAILTAKVDGQAVLWFNLSGDEFDDALARAGAMPLPPYIAAKRPADAQDKTDYQTVFARNPGAVAAPTASLHFDEQLLQGLRDSGVAFSHVTLHVGAGTFLPVKVEDVTTHKMHAEWGEVNAQAAEEIAATKAAGGRIIPVGTTALRLIESAARGGQIAPWSGETDIFIYPGFEFRVADALMTNFHLPCSTLMMLVSALMGQDRIRRIYGHAIAEKYRFFSYGDASLLIP

SEQ ID NO: 70153 - protein, 351 aa, Pelagicola sp.
  misc_feature (1)..(351): tr|A0A2U2CTZ9|A0A2U2CTZ9_9RHOB S-adenosylmethionine:tRN A ribosyltransferase-isomerase OS=Pelagicola sp. LXJ110 3 OX=2175247 GN=queA PE=3 SV=1
MQLSDFDFELPEALIATRPARPRSSARLLVAEGAQITDAVVTDLVEWLRPGDRLVLNDTKVIPARLSGSRARESAQGATEARIEVTLLEPQAEAVVWSALVKPLKKLKIGERVIFSDMLSADLVDKAEGQGLLRFNLTGDDFDAALAEAGAMPLPPYIAAKRAADSQDTEDYQTVWARRSGAVAAPTASLHFDAPLLEALAARGVAFSHVTLHVGAGTFLPVKVEDVTTHKMHAEWGEVTPAAAAEMAATRKAGGRIIPVGTTALRLIESAAAASGEIAAWEGETDIFIYPGFTFRAADALMTNFHLPKSTLMMLVSALMGQETVRNIYAHAVAEKYRFFSYGDASLLIPR

SEQ ID NO: 70154 - protein, 349 aa, Pelagimonas varians
  misc_feature (1)..(349): tr|A0A238KDL2|A0A238KDL2_9RHOB S-adenosylmethionine:tRN A ribosyltransferase-isomerase OS=Pelagimonas varians O X=696760 GN=queA PE=3 SV=1
MNLSDFDFDLPESLIATRPAKPRSSARLLVAKGGQVTDGVVTDLVNWLQPGDRLVLNDTKVIPARLSGIRKRTSAQGDTEAKIEVTLLEPRADGCWSALVKPLKKLKEGEEVRFSDDLAAVLEAKEDGQGHLRFNLIGDDFDAALNAAGAMPLPPYIAAKRAADAQDHEDYQTVWAANTGAVAAPTASLHFDEPLLAQLRDMGVQFSHVTLHVGAGTFLPVKVDDITTHKMHGEWGSVSAQAVEEIEATKAAGGRVIPVGTTALRLIESAARGGQIAQFEGVTDIFIYPGFDFHVADALMTNFHLPKSTLMMLVAALVGHDRILGIYDHAIRENYRFFSYGDASLLFPG

SEQ ID NO: 70155 - protein, 342 aa, Pelagirhabdus alkalitolerans
  misc_feature (1)..(342): tr|A0A1G6HQJ8|A0A1G6HQJ8_9BACI S-adenosylmethionine:tRN A ribosyltransferase-isomerase OS=Pelagirhabdus alkalit olerans OX=1612202 GN=queA PE=3 SV=1
MKIEDFDFELPEDLIAQTPLKDRSSSRLLVMNRQEQSIEHQRFAQIESYLKRGDCLVLNNTKVLPARLYGVKQDTGGKVELLLLHQRENDEWEVLVKPAKKVKEGTVIEFGDGRLRATCTEIQAHGGRVVTFDYKGIFLEVLNELGEMPLPPYIKEQLDDQDRYQTVYAEEEGSAAAPTAGLHFTEELLDRLKYKGVDIAFVTLHVGLGTFRPVSVDDIEKHDMHAEFYHVSEEAAEQIEETKKSGGRIISVGTTSIRTLETVASLNEGKVVPSSGWTSIFIYPPYTFKVVDGLITNFHLPKSTLMMLVSAFASRDFIMEAYQAAIDEKYRFFSFGDAMFII

SEQ ID NO: 70156 - protein, 357 aa, Pelagivirga sediminicola
  misc_feature (1)..(357): tr|A0A2T7GCC3|A0A2T7GCC3_9RHOB S-adenosylmethionine:tRN A ribosyltransferase-isomerase OS=Pelagivirga sediminic ola OX=2170575 GN=queA PE=3 SV=1
MKLSDFDYDLPETLIATRPARPRSAARLLVAEGSRITDAHVGDLPDWLRPGDRLVLNDTRVIPARLSGTRRRSGAQGETEARIEVTLLEPRADGAWAAMVKPLKKLAMGETVVFSAALSATLEGKADGQAHLRFNLAGDDFDAALEQAGAMPLPPYIAARRPADAADRDDYQTVWARHSGAVAAPTASLHFDDALLAALTAKGVALTHVTLHVGAGTFLPVKVDDVTTHKMHAEWGEVTPQAAAEIAATRAAGGRVIPVGTTALRLIESAARASGAIAPWQGETDIFIYPGFDFRVTDALMTNFHLPKSTLMMLVSALMGHETVRQIYAHAVTHEYRFFSYGDASLLIPRPKTAKAD

SEQ ID NO: 70157 - protein, 351 aa, Pelistega indica
  misc_feature (1)..(351): tr|V8FXC3|V8FXC3_9BURK S-adenosylmethionine:tRNA ribosy ltransferase-isomerase OS=Pelistega indica OX=1414851 G N=queA PE=3 SV=1
MIDPNLHLADFDYELPTELIAQKPTAQRTQSRLLRIDAQRHWHDHHFIDLPSFLKPNDLLVFNNTKVIKARLFGTKESGGKIEGLVERILTPTQALMHIKSSKSPKPGSKIIFANAIEATVLGRQDDLFGVEFAVDILTTLDQYGSLPLPPYIQHAADEQDSERYQTVYASPVGAVAAPTAGLHFDEQMLETLKQQGINTSFVTLHVGAGTFQPVRVDKISDHIMHAEWYEVSEETVAAIKHCRDLGGRVFAIGTTSVRALESAAIQAGTIEGKRIPKPHRGDTRLFMTPGFDIKVVDGLLTNFHLPQSTLLMLVSAFIGIDNMRAAYAYAIEQKYRFFSYGDAMLIEPTF

SEQ ID NO: 70158 - protein, 343 aa, Pelobacter acetylenicus
  misc_feature (1)..(343): tr|A0A1L3GJA9|A0A1L3GJA9_PELAE S-adenosylmethionine:tRN A ribosyltransferase-isomerase OS=Pelobacter acetylenic us OX=29542 GN=queA PE=3 SV=1
MRLNDFDFELPEALIAQHPLQERQSSRLMVLNRETQQAQLARFAEIVDWFRAGDVLVVNDTRVIPARLLGRKETGGRIEVFLVRRLPGDDETWACLTRCSKSPRTGMRLCFGEGLEGVVTEGGASPYRHVRFECPGDFAAVLGRVGRIPLPPYIRREATEEDHIRYQTVFARAAGAVAAPTAGLHFTGGILQALRTRGVDIRTLTLHVGLGTFLPVRTDNLAEHRMHEENYIVPADTAAAVNLAKQEGRRVIALGTTSTRTLEYAVDDRGRLCEGQGSCDLFIRPGFDFRIIDGLITNFHLPCSTLLMLVAAFAGRDFVLEAYRRAVAERFRFFSYGDCMLIL

SEQ ID NO: 70159 - protein, 343 aa, Pelobacter carbinolicus
  misc_feature (1)..(343): sp|Q3A3C1|QUEA_PELCD S-adenosylmethionine:tRNA ribosylt ransferase-isomerase OS=Pelobacter carbinolicus (strain DSM 2380 / NBRC 103641 / GraBd1) OX=338963 GN=queA PE= 3 SV=1
MRLSDFDFELPEELIAQHPLAQRQASRLMVLNRVTQQLQLAQFADIADWFRPGDVLVVNDTRVIPARLIGRKQTGGRIEVFLVRRLPGVEEVWACLTKCSKSPRPGTRLILGEGLEGTVVEGGEPPYRHVRFSFQGDFSQVLEQVGRIPLPPYIRREATPDDRSRYQTVFAREAGAVAAPTAGLHFTDEILDVLRAKGVEIQPLTLHVGLGTFLPMRTDDITEHRMHEENYFVPEGTAAAVNRAKDDGRRVIALGTTSTRTLEYAVDEQGRLQAGAGTCDLFIRPGFKFRIVDGLVTNFHLPCSTLLVLVAALAGREFILEAYQRAVAEKFRFFSYGDCMLIL

SEQ ID NO: 70160 - protein, 343 aa, Pelobacter propionicus
  misc_feature (1)..(343): sp|A1APZ3|QUEA_PELPD S-adenosylmethionine:tRNA ribosylt ransferase-isomerase OS=Pelobacter propionicus (strain DSM 2379 / NBRC 103807 / OttBd1) OX=338966 GN=queA PE=3 SV=1
MLVKEFDYHLPEELIARYPAPERDGSRLMLLNRESGTIGHGLFRDIADHLRPGDLLVLNDTRVIPARLFGRKATGGRVEIFLVRRQETQAERWSCLMRSSKGMRPGQLITLAGAMTALVVERLEPEGWLLEFQGAEPFSVWLEREGEMPLPPYLQRPAESGDQLRYQTVFARSAGAVAAPTAGLHFTPELLERLAERGVATACLTLHTGPGTFQPLRVERVQDHRIHSERYHISAETCQAIAETKQRGGRVVAVGTTSARTLEYAADEKGGLCPGSGDADIFIYPGYRFRVVDALVTNFHLPESTLIMLVSAFAGKEYVFHAYHEAARLGYRFYSYGDAMFIE

SEQ ID NO: 70161 - protein, 343 aa, Pelobacter sp.
  misc_feature (1)..(343): tr|A0A1L3GMQ9|A0A1L3GMQ9_9DELT S-adenosylmethionine:tRN A ribosyltransferase-isomerase OS=Pelobacter sp. SFB93 OX=1842532 GN=queA PE=3 SV=1
MHLSDFDFDLPEELIAQEPLAERTGSRLMVLDRATGNLTIGGFSDIVDHFRSGDVLVVNDTRVIPARLLGCKESGGKVEVLLVRRLAGKEETWICLTKASKGPRVGTRLLLGESLTATVVEGGEDPYKHIQFASEGDFLQQIEQIGRMPLPPYIRRDDSQLDKERYQTVFAQNAGAVAAPTAGLHFTPEILEQLRNKGVEIHPLTLHVGIGTFLPVRVDNIREHRMHEEHFTVPATTAEAVNLARAAGRRIFALGTTSTRTLEYAVDDQGRLQAGSGACDLFIYPGYRFRTVDAMLTNFHLPRSTLLMLVSAFAGREAVLAAYRRAVAEGFRFFSYGDCMLIL

SEQ ID NO: 70162 - protein, 349 aa, Pelobium manganitolerans
  misc_feature (1)..(349): tr|A0A419S5M6|A0A419S5M6_9SPHI S-adenosylmethionine:tRN A ribosyltransferase-isomerase OS=Pelobium manganitoler ans OX=1842495 GN=queA PE=3 SV=1
MKLSQFKFHLPESLIAHTPAEARDESRLMVLDRKTGKIEHKIFKDVLNYFDEKDVMILNNTKVFPARLYGNKEKTGATIEVFLLRELNKELRLWDVLVDPARKIRVGNKLYFGDDDLLVAEVVDNTTSRGRTIRFLFDGTDEEFRQNIEILGETPLPKYIKRKPTAEDKERYQTIFAKNEGAVAAPTAGLHFSRELLKRLELKGVEFAEVTLHVGLGTFRQVEVEDLTKHKMDSEQIIIDEKAANIVNKAIESKNRVCAVGTTAMRTIESAVSANHTLKPINDWTSKFIFPPYDFSIANSMITNFHTPESTLLMMVAAFGGYDYVMHAYEEAVKEKYRFYSYGDAMLII

SEQ ID NO: 70163 - protein, 346 aa, Pelodictyon luteolum
  misc_feature (1)..(346): tr|Q3B3A8|Q3B3A8_PELLD S-adenosylmethionine:tRNA ribosy ltransferase-isomerase OS=Pelodictyon luteolum (strain DSM 273 / 2530) OX=319225 GN=queA PE=3 SV=1
MRLSNFRYTLPKTKIADHPADPRDSCKMMVLNRRKKDIEHKVFEDIASYFKKGDLLILNNSRVFPAKIFGQKEKTDAKIEVFLLRVLNREAGLWDVLVDPARKVRVGNKIYFDEDVVAEVVDNTTSRGRTIRFLNPEIDVFSLVDRIGNVPLPPYFTRKSKDSDKENYQTVYANQTGSVVAPMAGLHFTMPLLQKIQKIGVKVLPITLHPSLSTFNAIEVEDVSKHKMDSEYFNIPYQTAMEINETKMKKSGRVIAVGTTTCRVLEANATVDGKIKFGQGWTDKFIYPPYQFKVTDALVTNFQQPETTLLMVVSAFAEHRLLMDAYKVALKNDYKFLAYGDAMFIH

SEQ ID NO: 70164 - protein, 341 aa, Pelodictyon luteolum
  misc_feature (1)..(341): sp|Q3B5E2|QUEA_PELLD S-adenosylmethionine:tRNA ribosylt ransferase-isomerase OS=Pelodictyon luteolum (strain DS M 273 / 2530) OX=319225 GN=queA PE=3 SV=1
MRVADFDYPLPEERIAKYPPLQRGSTRLLVICREGGTVSHARYRELDTFLRKGDLLVLNNTRVVKARLMAEKSTGAAIELMLLEKHGQEQSLVLFRGRVKQGDRLRSHGHEFLVEEIVDHGVARLSLPEGRSIQPVFEAHAEVPIPPYLRRPAEPVDRERYQTVFAEHAGSVAAPTASLNMTPELLLRLRDGGVETSSITLHVGLGTFLPIRVDSMEEHVMHREFYSIPAATIEKIRATKASGGRIIALGTTVTRALEHAALSLSGHSGPGPLEGEADIFIYPGCSFRLIDALLTNFHAPRSTVLMLTAAFAGPDLLRRAYREALDKEYRFLSYGDSTLIL

SEQ ID NO: 70165 - protein, 346 aa, Pelodictyon phaeoclathratiforme
  misc_feature (1)..(346): tr|B4SAG6|B4SAG6_PELPB S-adenosylmethionine:tRNA ribosy ltransferase-isomerase OS=Pelodictyon phaeoclathratifor me (strain DSM 5477 / BU-1) OX=324925 GN=queA PE=3 SV=1
MRLSNFRYTLPKTKIADEPASPRGKCKMMVLNRRKKDIEHKVFEDIVSYFKKGDLLVLNNSRVFPAKIFGQKEKTDAKIEVFLLRVLNKEAGLWDVLVDPARKVRVGNKIYFEEDVVAEVVDNTTSRGRTIRFLNPDIDVFSLVERIGNIPLPPYFTRPPRESDKENYQTVYASETGAVVAPMAGLHFTMPILQKIQKIGVKILPITLHPSLSTFNAIEVEDVSKHKMDSEYFNIPYQTAMEINETKVNKTGRVIAVGTTTCRVLEANATVDGKIKFGRGWTDKFIYPPYQFKVTDALLTNFQQPETTLLMTVSAFAEHRLLMEAYKTALKEDYQFLAYGDAMFIH

SEQ ID NO: 70166 - protein, 341 aa, Pelodictyon phaeoclathratiforme
  misc_feature (1)..(341): sp|B4SEZ1|QUEA_PELPB S-adenosylmethionine:tRNA ribosylt ransferase-isomerase OS=Pelodictyon phaeoclathratiforme (strain DSM 5477 / BU-1) OX=324925 GN=queA PE=3 SV=1
MRTGDFDYELSEEKIAKYPPAERGSTRLLVLNRHSGAVVHASYASLDLFLQPGDLLVLNNTRVLRARLYASKSTGARIELMLLEKHQEEQNRVLYRGKLKKGDKLMAHDQELLVTDIVDHGIARIAVCGERSLSDLFERFGGVPIPPYLKRDAEEVDRERYQTVFAELPGSVAAPTASLNMTSELLDTLRRKGVDMVTLTLHVGLGTFLPVRADALEEHVMHREYYSIPATLVEKIRKVKTTGGRVIAVGTTVTRALEHAGERMETFTGDAPLTGEADIFIYPGYQFRIIDCLLTNFHAPRSTVLMLTAAFAGPDHLRNAYQKALEEGYRFLSYGDSMFIA

SEQ ID NO: 70167 - protein, 336 aa, Pelolinea submarina
  misc_feature (1)..(336): tr|A0A347ZV43|A0A347ZV43_9CHLR S-adenosylmethionine:tRN A ribosyltransferase-isomerase OS=Pelolinea submarina O X=913107 GN=queA PE=3 SV=1
MKTDDFNYDLPPELIAQVPLKTRTDSRLLVYSRAQDRITHTYFRDIRQYLRPGDLLVVNNTRVIPARLYAHKETGGKVEVLLLKKLENEQWEVLVGGKRVTTGKKLTFDEGVEGTIVAELEGSKRIIQFNQPVGPHLKDLGEMPLPPYIHEHLDDPERYQTVYAEVEGSAAAPTAGLHFTKEIMAELRSYGVIFTEVLLHVGLDTFAPVTEDTVEEHKIHTEWCQVSPESAALINQAKAEGRRVIAVGTTSVRTLESAMDGQGGVRPYADTTGLFIYPGYRFKVVDAMITNFHLPKSTLLMLVSAFAGFENMRRCYQAAIEEKYRFYSFGDAMLIE

SEQ ID NO: 70168 - protein, 354 aa, Pelomonas puraquae
  misc_feature (1)..(354): tr|A0A254N8Q5|A0A254N8Q5_9BURK S-adenosylmethionine:tRN A ribosyltransferase-isomerase OS=Pelomonas puraquae OX =431059 GN=queA PE=3 SV=1
MSAAAPATYTVADFDFDLPPELIAQHPAAERSASRLLDGTGPTPVDRVFRDLPGLLSPGDLLVFNNTRVIKARLYGIKATGGHVEALVERVLPGTQEVWMHLRASKSPKPGSRVRFAEAFDAEVLGRCGPDNGLFHLRFDGDPFALLEAHGHVPLPPYIEHADSADDERRYQTVFAKEPGAVAAPTAALHFDEGVLAALTARGVEQAHVTLHVGAGTFQPVRVEKIDEHKMHSEWFEVPQATVEAVAACRARGGRVVAVGTTTLRALESAARDSTLQAGARETDIFITPGFEFRVVDRLVTNFHLPKSTLMMLVSALAGHAHVMALYRHAIAERYRFFSYGDAMLLSRAQATRP

SEQ ID NO: 70169 - protein, 355 aa, Pelomonas saccharophila
  misc_feature (1)..(355): tr|A0A4R3VBS4|A0A4R3VBS4_PELSC S-adenosylmethionine:tRN A ribosyltransferase-isomerase OS=Pelomonas saccharophi la OX=304 GN=queA PE=3 SV=1
MSSSPPTTHAVADFDFDLPPELIAQHPAPERSASRLLDAAGTEAVDRVFRELPELLAPGDLLVFNNTRVIKARLYGAKASGGAVEALVERVLPGTREVWMHLRASKSPKPGSRVRFAEAFDAEVLGRCGPDNGLFHLRFDGDPFALLEAHGHVPLPPYIDHADEAEDERRYQTVFAKQPGAVAAPTAALHFDEALLARLAARGVASAHVTLHVGAGTFQPVRVQTLAEHKMHSEWFDVPQPTVDAVAACRARSGGVVAVGTTTLRALESAARGGQLQAGARETDIFITPGFEFRVVDRLVTNFHLPRSTLMMLVSAFAGHELVMALYSHAIRERYRFFSYGDAMLLRRATIPAPC

SEQ ID NO: 70170 - protein, 354 aa, Pelomonas sp.
  misc_feature (1)..(354): tr|A0A0Q7B4Y3|A0A0Q7B4Y3_9BURK S-adenosylmethionine:tRN A ribosyltransferase-isomerase OS=Pelomonas sp. Root405 OX=1736529 GN=queA PE=3 SV=1
MTTSAGSTHTVADFDFELPPELIAQHPAAERSASRLLDASGPEAADRVFRELPTLLQAGDLLVFNNTRVIKARLYGVKSSGGAVEALVERVLPGTQEVWMHLRASKSPKPGGRVRFADAFDAEMLGRCGPDNGLFHLRFDGDPFALLEAHGHVPLPPYIAHADGEDDVRRYQTVFAKEPGAVAAPTAALHFDEALLARLAERGVERAHVTLHVGAGTFQPVRVEQLSEHKMHSEWFDVPQSTVDAVAACRARGGRVVAVGTTTLRALESAARGGELVAGSRETDIFITPGFQFQVVDRLVTNFHLPRSTLMMLVSAFAGYDKVMALYRHAIAQRYRFFSYGDAMLLSRTQATRP

SEQ ID NO: 70171 - protein, 290 aa, Pelomonas sp.
  misc_feature (1)..(290): tr|A0A2R7SRT1|A0A2R7SRT1_9BURK S-adenosylmethionine:tRN A ribosyltransferase-isomerase (Fragment) OS=Pelomonas sp. HMWF004 OX=2056841 GN=DBR42_14720 PE=3 SV=1
MNTSAAAAYTVADFDFDLPPELIAQHPAAERSASRLLDATAPQPVDRIFRDLPGLLQPGDLLVFNNTQVIKARLYGVKATGGNVEALVERVLPGTREVWMHLRASKSPKPGSRIRFAHAFNAEVLGRCGPDGGLFHLRFDGDPFALLEAHGHVPLPPYIAHADDADDVHRYQTVFATAPGAVAAPTAALHFDAAVLAALAERGVGTAEVTLHVGAGTFQPVRVDRIAEHKMHSEWCHVSPETAARITATRAAGGRVLAVGTTTLRTLESAAVAARQAGSAELLQTGARET

SEQ ID NO: 70172 - protein, 339 aa, Pelosinus fermentans
  misc_feature (1)..(339): tr|I9AZT4|I9AZT4_9FIRM S-adenosylmethionine:tRNA ribosy ltransferase-isomerase OS=Pelosinus fermentans B4 OX=11 49862 GN=queA PE=3 SV=1
MLLSEFDYFLPEELIAQHPCEPRDHSRLLMLDKNTGAISHHYFFDLLQYLNAGDTLVFNDTRVIPARLIGAKSETGGKVEVFLLNRKSESDWEALVKPGKKARPGAIIVFSDRLSCEILESTDFGGRIVRFRYEGIFEEILDELGETPLPPYITEQLADKERYQTVYARERGSAAAPTAGLHFTMDLMKRIEEKGIHLAFVTLHVGLGTFRPVNTDNITDHVMHREYYSVLPETAELINRTKQEGGRIIAVGTTAIRTLETATINGILEAKSGWTEIFIYPGYTFKIVDAAVTNFHLPKSTLLMLISALAGQQNVFAAYKEAVEQGYKFFSFGDAMLII

SEQ ID NO: 70173 - protein, 339 aa, Pelosinus fermentans
  misc_feature (1)..(339): tr|I8U5G4|I8U5G4_9FIRM S-adenosylmethionine:tRNA ribosy ltransferase-isomerase OS=Pelosinus fermentans JBW45 OX =1192197 GN=queA PE=3 SV=1
MLLSEFDYFLPEELIAQHPCEPRDHSRLLVLDKNTGAISHNYFFDLLQYLNAGDTLVFNDTRVIPARLIGAKAETGGKVEVFLLNRKSESDWEALVKPGKKARPGAIIIFSDRLSCEILESTDFGGRIVRFRYEGIFEEILDELGETPLPPYITEQLADKERYQTVYARERGSAAAPTAGLHFTTDLMKRIEEKGIHLAFVTLHVGLGTFRPVNTDNITDHVMHREYYSVLPETAELINRTKQEGGRIIAVGTTAIRTLETATINGLLEAKSGWTEIFIYPGYTFKIVDAAVTNFHLPKSTLLMLVSALAGQQKVFAAYKEAVEQGYKFFSFGDAMLII

SEQ ID NO: 70174 - protein, 339 aa, Pelosinus propionicus
  misc_feature (1)..(339): tr|A0A1I4KTU8|A0A1I4KTU8_9FIRM S-adenosylmethionine:tRN A ribosyltransferase-isomerase OS=Pelosinus propionicus DSM 13327 OX=1123291 GN=queA PE=3 SV=1
MLLSEFDYFLPEELIAQHPCEPRDHSRLLVLDKNTGAISHNRFFDLLQYLNAGDTLVFNNTRVIPARLIGTKAETGGKVEVFLLNRKTENDWEALVKPGKKARPGATIIFSDRLSCEILESTDFGGRIVRFRYEGIFEEILDELGETPLPPYITEQLADKERYQTVYAHERGSAAAPTAGLHFTTDLMKRIEEKGIHLAFVTLHVGLGTFRPVNTDNITDHVMHREYYSVLPEAAELINRTKREGGRIIAVGTTAIRTLETATTNGILESKSGWTEIFIYPGYTFKIVDAAITNFHLPKSTLLMLISALAGQKKVFAAYKEAVEQKYKFFSFGDAMLII

SEQ ID NO: 70175 - protein, 339 aa, Pelosinus sp.
  misc_feature (1)..(339): tr|A0A075KGQ7|A0A075KGQ7_9FIRM S-adenosylmethionine:tRN A ribosyltransferase-isomerase OS=Pelosinus sp. UFO1 OX =484770 GN=queA PE=3 SV=1
MLLSEFDYFLPEELIAQHPCEPRDHSRLLVLEKNTGAISHQHFFDLPQYLKAGDTLVFNDTKVIPARLIGTKAETGGKVEIFLLNNKSGNEWEALVKPGKKARPGAIIIFSDSLSCEILESTDFGGRVVRFIFKGIFEEILDELGQTPLPPYITEQLADKERYQTVYARERGSAAAPTAGLHFTTELMKRIEDLGVQLAFVTLHVGLGTFRPVNTDDITNHVMHREYYSVSPEAAQLINNTKKQGGRVIAVGTTAIRTLETATENGILEAKSGWTEIFIYPGYSFKMVDAAVTNFHLPKSTLLMLISALAGKKNVFNAYKEAVDQRYKFFSFGDAMLII

SEQ ID NO: 70176 - protein, 345 aa, Pelotomaculum propionicicum
  misc_feature (1)..(345): tr|A0A4Y7RMB8|A0A4Y7RMB8_9FIRM S-adenosylmethionine:tRN A ribosyltransferase-isomerase OS=Pelotomaculum propion icicum OX=258475 GN=queA PE=3 SV=1
MTIQMKTSDFDYALPAELIAQEPAAQRSASRLMVVRTDREQFEHRRFTDLVDYLKPGDTLVINDTKVIPARLLGVKEGTGARVEALLLKQLDNRRWEALVRPGKKIVVGTRLVFKEGLLSCEVLDSTGYGGRVLQFAWDGQFEEVLDQVGLMPVPPYIRKPLLDRDRYQTVYARLSGSAAAPTAGLHFSDELLSRIKDKGIAVAPVLLHVGLGTFRPVKVEDITRHRMHAEFYEVSAEAAEIISKTRERGGRVIAVGTTTTRCLESAAAADGRVCQGSGWTEIFIYPGYRFKAIDGMVTNFHLPRSTLLMMVAALAGREKILAAYQEAVEMRYRFFSFGDAMLII

SEQ ID NO: 70177 - protein, 341 aa, Pelotomaculum schinkii
  misc_feature (1)..(341): tr|A0A4Y7RBZ2|A0A4Y7RBZ2_9FIRM S-adenosylmethionine:tRN A ribosyltransferase-isomerase OS=Pelotomaculum schinki i OX=78350 GN=queA PE=3 SV=1
MNLSDFDYDLPEELIAQDPCGLRDRSRLMVVPLDRDEFEHRCFRDLLKYLRPGDNLVVNDTKVIPARLLGEKKVTGAKMEVLLLKKLEKDRWEALVRPGKRAPAGTEITFNHGLLEGRILEDTAYGGRIVEFYYNGSFDEVLDRVGLMPVPPYIKKPLSDRHRYQTVYAREAGSAAAPTAGLHFSPELLSSIRAMGVTITPVLLHVGLGTFRPVEVQDISLHHMHAENYEISGESAAAINLTKQQGGRVIAVGTTTTRCLESVAQEYGQIRPCSGWTEIFIYPGYRFQVIDGLVTNFHLPKSTLLMMVSALAGRDRILSAYEEAVRQKYRFFSFGDAMLIV

SEQ ID NO: 70178 - protein, 341 aa, Pelotomaculum sp.
  misc_feature (1)..(341): tr|A0A4Y7RVQ1|A0A4Y7RVQ1_9FIRM S-adenosylmethionine:tRN A ribosyltransferase-isomerase OS=Pelotomaculum sp. FP OX=261474 GN=queA PE=3 SV=1
MDLSDFYYDLPEELIAQDPCGLRDRSRLMVVPLDRDEFEHRWFRDLLKYLRPGDNLVVNDTKVIPARLLGEKKVTGAKMEVLLLKKLEKDRWEALVRPGKRAPVGTEITFNGGLLEGRILDDTAYGGRIVEFYYNGSFDEVLDRVGLMPVPPYIKKPLSDRHRYQTVYAREAGSAAAPTAGLHFSPELLNSIRAMGVTITPVLLHVGLGTFRPVEVQDISLHHMHAEYYEISGESAAAINLTKQQGGRVIAVGTTTTRCLESVAQEYGQIRPCSGWTEIFIYPGYRFQVIDGLVTNFHLPKSTLLMMVSALAGRDRILSAYEEAVRQKYRFFSFGDAMLIV

SEQ ID NO: 70179 - protein, 341 aa, Pelotomaculum sp.
  misc_feature (1)..(341): tr|A0A1V5BV23|A0A1V5BV23_9FIRM S-adenosylmethionine:tRN A ribosyltransferase-isomerase OS=Pelotomaculum sp. Pta U1.Bin065 OX=1811696 GN=queA PE=3 SV=1
MKLSDFDYFLPEGMIAQEPVSRRDASRLMVLHLNGAPLEHRRFTDLVDYLRPGDTLVINDTKVMPARLYGIKDITGAKVEVLILRQLDKNRWEALVRPGKRLAAGTKIIFGDGLLEALILEHTDFGGRVLEFSYNGIFEEILDQVGVMPVPPYIKKPLSDKQRYQTIYARQAGSAAAPTAGLHFSRELLERISNMGVVVVPVLLHVGLGTFRPVQVKDVREHHMHAEYYEISEKAAGTINETKQRKGRLIAVGTTTTRCLESAAGEKGEICPGSGWTDIFIYPGYRFKLVEGLITNFHLPRSTLLMMVSAFAGKDKIMAAYNEAVRLKYRFFSFGDAMLII

SEQ ID NO: 70180 - protein, 341 aa, Pelotomaculum thermopropionicum
  misc_feature (1)..(341): sp|A5D3G5|QUEA_PELTS S-adenosylmethionine:tRNA ribosylt ransferase-isomerase OS=Pelotomaculum thermopropionicum (strain DSM 13744 / JCM 10971 / SI) OX=370438 GN=queA PE=3 SV=1
MNLSDFDYFLPDELIAQEPLPERDMSRLMVVRLDGKEFEHRLFKDIVDYLNPGDALVINETKVIPARLVGRKEGTGARIELLLLRRLDSSRWEALVRPGKKAPKGTAVVFGEGLLACRILDSTAYGGRVVEFSFEGLFEEVLERVGVMPLPPYIKKPLLDQQRYQTIYARQAGSAAAPTAGLHFSPGLLSRIREMGVAVIPVLLHVGLGTFRPVRTEDIRRHRMHAEYYEITEEASRAIAETRARGGRVIAVGTTTTRCLESAAEEGGRVRPGSGWTEIFIYPGYRFKVIDGLVTNFHLPKSTLIMMVAALAGRERILAAYREAVGLRYRFFSFGDAMLII

SEQ ID NO: 70181 - protein, 341 aa, Peptoanaerobacter stomatis
  misc_feature (1)..(341): tr|J5UFA7|J5UFA7_9FIRM S-adenosylmethionine:tRNA ribosy ltransferase-isomerase OS=Peptoanaerobacter stomatis OX =796937 GN=queA PE=3 SV=1
MKTNDFYYDLPEELIAQVPLEDRSASRLMVLDRNTGNVQHKIFKNIIDYVGKDDVLVFNNTRVLPARLFGKKKDTNANIEILLLKRIELNKWQILVKPAKRVKIGTQIYFGNGEMIADVLQEYDEGIRIVEFSYNGVFEDIISKYGFMPLPPYIKEKLSDKERYQTVYSKINGSSAAPTAGLHFTKDLIESLKNKGVQVEYITLHVGLGTFRPVKSDNLEEHQMHSEYYNIAEETKNRLNDAKKSGKRIIAVGTTTVRTLESSANDYGYIQKTQDDTNIFIYPPYDFKFVDCVITNFHLPKSTLIMMISAFAGKDNVFRAYEEAVKEKYRFFSFGDAMFIQ

SEQ ID NO: 70182 - protein, 341 aa, Peptoanaerobacter stomatis
  misc_feature (1)..(341): tr|V9HU68|V9HU68_9FIRM S-adenosylmethionine:tRNA ribosy ltransferase-isomerase OS=Peptoanaerobacter stomatis OX =796937 GN=queA PE=3 SV=1
MKTNDFYYDLPEELIAQVPLEDRSASRLMVLDRNTGNVQHKIFKNIIDYVGKDDVLVFNNTRVLPARLFGKKKDTNANIEILLLKRIELNKWQILVKPAKRVKIGTQIYFGNGEMTADVLQEYDEGIRIVEISYNGVFEDIISKYGFMPLPPYIKEKLSDKERYQTVYSKINGSSAAPTAGLHFTKDLIESLKNKGVQVEYITLHVGLGTFRPVKSDNLEEHQMHSEYYNISEETKNRLNDAKKSGKRIIAVGTTTVRTLESSANGYGYIEKTQDDTNIFIYPPYDFKFVDSVITNFHLPKSTLIMMISAFAGKDNVFRAYAEAVKEKYRFFSFGDAMFIQ

SEQ ID NO: 70183 - protein, 341 aa, Peptoclostridium acidaminophilum
  misc_feature (1)..(341): tr|W8T3C5|W8T3C5_PEPAC S-adenosylmethionine:tRNA ribosy ltransferase-isomerase OS=Peptoclostridium acidaminophi lum DSM 3953 OX=1286171 GN=queA PE=3 SV=1
MKTSDFYFELPEELIAQTPIKKRDESRLMVVSKQTGEIEHRKFRDIAGYLRKGDVLVLNDTRVLPARLIGEKIPTGAKMEFLLLKRIDMDTWQVMVKPGKRAKPGSEFSFGDGRLRARVEDISDEGTRIVRFEYEGVFESVLDELGSMPLPPYIKETLQDKERYQTVYSRHVGSAAAPTAGLHFTPELLEEIRAIGVEIAYITLHVGLGTFRPVKMERIEEHQMHSEFYTIEQSEADKINLAKSSGNRVIAVGTTSCRTLETAADSTGRLHASSGWTDIFIYPGYKFKIIDAIITNFHLPESTLIMLVSAFSTRERVIGAYNEAVKEGYRFFSFGDSMFIY

SEQ ID NO: 70184 - protein, 341 aa, Peptoclostridium litorale
  misc_feature (1)..(341): tr|A0A069RPI9|A0A069RPI9_PEPLI S-adenosylmethionine:tRN A ribosyltransferase-isomerase OS=Peptoclostridium lito rale DSM 5388 OX=1121324 GN=queA PE=3 SV=1
MKTSDFYFDLPQERIAQEPLENRDESRLLVMDKESGQTQHKIFKDIVSYLKEGDVLVLNNTRVLPARIIGEKIPTGGKIEFLLLKRVEMDTWQVMVKPGKRAKIGSSFSFGDGRLKAYVIDISDEGTRIVRFEYEGVFETVLEELGSMPLPPYITHKLEDGERYQTVFSKHTGSAAAPTAGLHFTKELLEKIKGMGVQIAYVTLHVGLGTFRPVKVDDINDHKMHSEFYTVEKETADTINAAKKEGRRIIGVGTTSCRTLESACSEDGLIKEGSGWTDIFIYPGYSFKLVNGIITNFHLPESTLIMLVSAFSSRENVLNAYNEAVKMEYRFFSFGDAMLII

SEQ ID NO: 70185 - protein, 341 aa, Peptoclostridium sp.; identical to SEQ ID NO: 62528
  misc_feature (1)..(341): tr|A0A416Q4D2|A0A416Q4D2_9FIRM S-adenosylmethionine:tRN A ribosyltransferase-isomerase OS=Peptoclostridium sp. AF21-18 OX=2292243 GN=queA PE=3 SV=1

SEQ ID NO: 70186 - protein, 342 aa, Peptococcaceae bacterium
  misc_feature (1)..(342): tr|A0A419G153|A0A419G153_9FIRM S-adenosylmethionine:tRN A ribosyltransferase-isomerase OS=Peptococcaceae bacter ium OX=2052179 GN=queA PE=3 SV=1
MRLSDFDYHLPEELIAQEPAEQRDKSRLMVLYRNREKLEHRTFKDLLEYLNPGDALVLNDTKVIPARLLGTKEGGAAPVEVLLLSPAGHCRWEALVRPGRRVPVGARLEFGGGLLNCRVVDKTRFGGRVLDFGCGGILFDEILEQVGVVPLPPYIKKLLADKNRYQTVYARQAGSVAAPTAGLHFTPELLAEIVKKKVTVVPVLLHVGLGTFRPVRVDNIREHHMHAEYYRIAGETAEALARCRCAGGRVIAVGTTTSRCLESAADADGKIRAGEGCTDLFIYPGYRFKAVDVLLTNFHLPRSTLLMMVSAFAGREKILNAYREAVDKRYRFFSFGDAMLII

SEQ ID NO: 70187 - protein, 341 aa, Peptococcaceae bacterium
  misc_feature (1)..(341): tr|A0A0J1F5M8|A0A0J1F5M8_9FIRM S-adenosylmethionine:tRN A ribosyltransferase-isomerase OS=Peptococcaceae bacter ium CEB3 OX=999898 GN=queA PE=3 SV=1
MKVSDFDFHLPQELIAQTPVEPRDASRLMVVRRDTGELEHRHFRDLAELLHPGDVLVVNNTRVIPARLIGEKAGGGARIETLLLKRRDRDVWEALVRPGKRWHVGQKVVFAEGILVGELLDVLANGNRLVRFEYEGVFEEILDRLGRMPLPPYITAELADGGRYQTVYAKESGSAAAPTAGLHFTPELLQGLRQRGVEILEILLHVGLGTFRPVQVENVRDHVMHSEYFSLDRETAQRINQARKEQRRIIAVGTTVTRTLESCAGEDGMLAAGDGWTDIFIYPGYRFKTVDALITNFHFPKSTLLMLVSAFAGRELILRAYETAVGLGYRFYSFGDAMLIL

SEQ ID NO: 70188 - protein, 341 aa, Peptococcus niger
  misc_feature (1)..(341): tr|A0A1G6S2A4|A0A1G6S2A4_PEPNI S-adenosylmethionine:tRN A ribosyltransferase-isomerase OS=Peptococcus niger OX= 2741 GN=queA PE=3 SV=1
MKTSDFDYTLPEALIAQHPLDRRSASRLMLVNKENGEVTHRHFYDIIDELNAGDVLVLNTTRVIPARLIGEKVGGSATAEVLLLKPSADKKDRWECLVRPGKRLKAGAQISFGDGRLTAEIVDMTESGRLVDFSYDGIFEEVLAELGTMPLPPYIHEKLDNPDRYQTVYAKQSGSAAAPTAGLHMTQDLLTQIREKGVEICEVLLHVGLGTFQPVKEEDALEHHMHSEFYEVTPEAAACLNRAKEEGRRIICLGTTSVRTVESAAHEGKVCAGSGWTDIFIYPSYQFQVTDALITNFHLPKSTLLMLVSALAGREEILAAYHEAVERKYRFFSFGDAMFIR

SEQ ID NO: 70189 - protein, 338 aa, Peptoniphilus asaccharolyticus
  misc_feature (1)..(338): tr|A0A1W1USI0|A0A1W1USI0_PEPAS S-adenosylmethionine:tRN A ribosyltransferase-isomerase OS=Peptoniphilus asaccha rolyticus DSM 20463 OX=573058 GN=queA PE=3 SV=1
MKTSDFNYDLPKELIAQHPLEDRTNSRLLKLNRKNGNIEHEHFYNIIDELNAGDVLVINNTRVIPARIYGHRKDKEELIEFLLLNHKNDTWECLVKPGKKAKLDTEIIFSDELKGKIVDITEEGNRFIKLEYDGIFENILDKLGEMPLPPYIVERLEDKDRYQTVYSKYNGSSAAPTAGLHFTKELLEKISKKGVEIVEVTLHVGLGTFRPVKVDDVNEHKMHSEHYNVTREAADKINKAKSENRRIIAVGTTSIRTLESACVDGKVVPGSGDTDIFIYPGYEFKIVDALITNFHLPESTLIMLVAAFTSKDIILNAYEEAVKERYRFFSFGDAMFIR

SEQ ID NO: 70190 - protein, 343 aa, Peptoniphilus coxii
  misc_feature (1)..(343): tr|A0A134ABC7|A0A134ABC7_9FIRM S-adenosylmethionine:tRN A ribosyltransferase-isomerase OS=Peptoniphilus coxii O X=755172 GN=queA PE=3 SV=1
MKTNDFYYDLPEELIAQHPAEKRDESRLLHLKSDGSFEDLHFRDIVNFIKPEDVLVINNTKVLPARIFGSRPGKDEHIEVLLVKELDKDLWQCMVRPGRKMKQDTIIEFPHGLSGKVVDISEDGLRLIQFHYNGVFLEILEKLGEMPLPPYIHEKLEDKNRYQTVYAKYEGSAAAPTAGLHFTQDLLQKIREQGTEIAEITLHVGLGTFRPVKTDTIEDHHMHSEYYRIDEEAARKINKAKARGGRVIAVGTTSIRTLESAMAAMGEIKPIAKETDIFIYPGYQFKIVDAIITNFHLPESTLIMLVSAFAGRDVILNAYRHAVEEKYRFFSFGDAMFIESRKE

SEQ ID NO: 70191 - protein, 342 aa, Peptoniphilus duerdenii
  misc_feature (1)..(342): tr|E0NMT1|E0NMT1_9FIRM S-adenosylmethionine:tRNA ribosy ltransferase-isomerase OS=Peptoniphilus duerdenii ATCC BAA-1640 OX=862517 GN=queA PE=3 SV=1
MSLKTSDFYYDLPHELIAQHPLKDRASSRLLIVNRNSKDLEECHFYNIIDYLNEGDVLVVNNSRVIPARLFGHRKDKEEKIEILLLKREEDTWQCLVKPGKKAKVGSEIIFSDKLKCEVKRVDEEGNRYIKFHCDGIFEEILDELGNMPLPPYITEKLEDKERYQTVYSKIDGSAAAPTAGLHFTEDLLDRIKEKGIKVVPITLHVGLGTFRPVKVDDVEKHHMHSEFYMMDKETAKIINDAKENGKRIIAVGTTSMRTLETIGRNGRVKETSGWTDIFIYPGFEFKIVDALITNFHLPESTLMMLVSAFASKDIIFNAYEYAIKNKFRFFSFGDAMFIKGN

SEQ ID NO: 70192 - protein, 339 aa, Peptoniphilus grossensis
  misc_feature (1)..(339): tr|A0A1U7LYQ2|A0A1U7LYQ2_9FIRM S-adenosylmethionine:tRN A ribosyltransferase-isomerase OS=Peptoniphilus grossen sis OX=1465756 GN=queA PE=3 SV=1
MKTKDFYYDLPKELIAQHPVEKRDHSRLLVLDKKTGKMEHKHFYDIVDYLNEGDVLVLNDTKVMPARIYGHRENKEEKIEFLLLNRKGDIWECLSKPGKKAQIGTKIIFSDKLSAEVVDISHDGSRFLKFQYDGVFEEILDELGEMPLPPYITEKLKDKNRYQTVYAREEGSAAAPTAGLHFTKELLQKVKDKKVEICYITLHVGLGTFRPVKVENIDEHEMHSEFYIMNKEVADKINAAKKRGNRVIAVGTTSVRTVESIADESGKVCEKSGFTNIFIYPPYKFKCIDALITNFHLPESTLLMLVSSLSTREIILKAYKEAVKERYRFFSFGDAMFIR

SEQ ID NO: 70193 - protein, 339 aa, Peptoniphilus harei
  misc_feature (1)..(339): tr|A0A2X1YMJ7|A0A2X1YMJ7_9FIRM S-adenosylmethionine:tRN A ribosyltransferase-isomerase OS=Peptoniphilus harei O X=54005 GN=queA PE=3 SV=1
MKTKDFYYDLPKELIAQYPEEKRDHSRLLVLDKESGKMEHKHFYDIIDYLNEGDLLVLNDTKVMPARIYGHREGKEEKIEFLLLNRKDDVWECLSKPGKKAKLGTKIIFSDKLSAEVVDISEDGSRFLKFEYDGIFEEILDELGEMPLPPYITEKLEDKNRYQTVYAREEGSAAAPTAGLHFTKDLLQKIKDKGIEICYITLHVGLGTFRPVKVENVDEHEMHSEFYVMTKEVADKINAAKDRGNRVIAVGTTSVRTVESIADDNGRVCEKSGFTNIFIYPPYKFKCVDALITNFHLPESTLLMLVSSLSSREIILKAYEEAVKERYRFFSFGDAMFIR

SEQ ID NO: 70194 - protein, 339 aa, Peptoniphilus harei
  misc_feature (1)..(339): tr|E4KZ34|E4KZ34_9FIRM S-adenosylmethionine:tRNA ribosy ltransferase-isomerase OS=Peptoniphilus harei ACS-146-V -Sch2b OX=908338 GN=queA PE=3 SV=1
MKTKDFYYDLPKELIAQHPEEKRDHSRLLVLDKESGEMEHKHFYDIIDYLKKGDLLVLNDTKVMPARIYGHREGKEEKIEFLLLNRKDDIWECLSKPGKKAKIGSKIIFSDKLSAEVVDISEDGSRFLKFEYDGIFEEILDELGEMPLPPYITEKLEDKNRYQTVYAREEGSAAAPTAGLHFTKELLEKLKDKGVEICYITLHVGLGTFRPVKVENVDEHEMHSEFYVMTKEVADKINAAKDRGSRVIAVGTTSVRTVESIANEDGRVCEKSGFTNIFIYPPYKFKCVDALITNFHLPESTLLMLVSSLSSREIILKAYEEAVKERYRFFSFGDAMFIR

SEQ ID NO: 70195 - protein, 338 aa, Peptoniphilus indolicus
  misc_feature (1)..(338): tr|A0A379DFU5|A0A379DFU5_9FIRM S-adenosylmethionine:tRN A ribosyltransferase-isomerase OS=Peptoniphilus indolic us OX=33030 GN=queA PE=3 SV=1
MKTSDFNYYLPKELIAQHPLEDRTNSRLLKLNRENGNIEHDHFYNIIDELNSGDVLVINNTRVIPARIYGHRKDKEELIEFLLLNHKNDTWECLVKPGKKAKIGTEIIFSDKLKGEIVNISEDGNRFIKLEYEGIFENILDKLGEMPLPPYITERLEDKDRYQTVYSKYNGSSAAPTAGLHFTKKLLEKLKEKGIEIVEVTLHVGLGTFRPVKVDNVDEHKMHSEHYVVTKEAAEKINNAKKEGRRIIAVGTTSIRTLESACDGEMLVSGSGDTDIFIYPGYEFKIVDALITNFHLPESTLIMLVAAFTSKEIILNAYKEAVKEKYRFFSFGDAMFIR

SEQ ID NO: 70196 - protein, 338 aa, Peptoniphilus indolicus; identical to SEQ ID NO: 70195
  misc_feature (1)..(338): tr|G4D5T7|G4D5T7_9FIRM S-adenosylmethionine:tRNA ribosy ltransferase-isomerase OS=Peptoniphilus indolicus ATCC 29427 OX=997350 GN=queA PE=3 SV=1

SEQ ID NO: 70197 - protein, 343 aa, Peptoniphilus ivorii
  misc_feature (1)..(343): tr|A0A3S5C2H5|A0A3S5C2H5_9FIRM S-adenosylmethionine:tRN A ribosyltransferase-isomerase OS=Peptoniphilus ivorii OX=54006 GN=queA PE=3 SV=1
MKTRDFYYDLPEELIAQHPADRRDGSRLLYVKADGSYKDLMFADILELLHPEDVLVLNNTKVLPARIFGARPGREERIEVLLVKDLGADLWQCMVRPGKKLKLGGEIVFPEGLRGVVEAITEDGLRHIRFCYEGVFYEILEKLGQMPLPPYIHETPEDPDRYQTVYAKYLGSAAAPTAGLHFTEDLFKRIREKGVAVAEVTLHVGLGTFRPVKVENIEEHHMHSERYRIDEAAAETIRRAQAVGGRVIAVGTTSIRTLESCMQKHGAIVADAGDTDIFIYPGYEFHCVDAIVTNFHLPESTLLMLVSAFAGKDVILDAYRHAVEARYRFFSFGDAMFLERGAR

SEQ ID NO: 70198 - protein, 339 aa, Peptoniphilus lacrimalis
  misc_feature (1)..(339): tr|D1VUV9|D1VUV9_9FIRM S-adenosylmethionine:tRNA ribosy ltransferase-isomerase OS=Peptoniphilus lacrimalis 315- B OX=596330 GN=queA PE=3 SV=1
MKTSDFSYDLPSELIAQHPAQKRDQSRLMLLNKKTGEINHKKFYNIIDYLNNGDVLVLNDTRVMPARIFGHRPEKDESIEILLLNHKGDTWETLAKPGKKLKIGTEIIFSDELKAQVVDISEDGSRFLKFIYSGIFEEILDRLGEMPLPPYIQEKLEDKERYQTVYSKEIGSAAAPTAGLHFTKELLKKIEEKGIEICFITLHVGLGTFRPVKVEDVTKHKMHSEFYIIRDDVAKKINKAKDEGRRIVAVGTTSIRTLESASDDKGYVEAKSGWTDIFIYPPYKFKCVDALITNFHLPESTLIMLVSSLSTREIILNAYNVAVKEKYRFFSFGDAMFIY

SEQ ID NO: 70199 - protein, 339 aa, Peptoniphilus lacrimalis
  misc_feature (1)..(339): tr|A0A379C4Q3|A0A379C4Q3_9FIRM S-adenosylmethionine:tRN A ribosyltransferase-isomerase OS=Peptoniphilus lacrima lis OX=33031 GN=queA PE=3 SV=1
MKTSDFSYDLPSELIAQHPAQKRDQSRLMLLNKKTGEINHKKFYNIIDYLNNGDVLVLNDTRVMPARIFGHRPEKDESIEILLLNHKGDTWETLAKPGKKLKIGTEIIFSDELKAEVVDISEDGSRFLKFIYSGIFEEILDRLGEMPLPPYIQEKLEDKERYQTVYSKEIGSAAAPTAGLHFTKELLKKIEEKGIEICFITLHVGLGTFRPVKVEDVTKHKMHSEFYIIRDDVAQKINKAKDEGRRIVAVGTTSIRTLESAADDKGYVKAKSGWTDIFIYPPYKFKCVDALITNFHLPESTLIMLVSSLSTREIILNAYNVAVKEKYRFFSFGDAMFIY

SEQ ID NO: 70200 - protein, 340 aa, Peptoniphilus sp.
  misc_feature (1)..(340): tr|A0A090JNM0|A0A090JNM0_9FIRM S-adenosylmethionine:tRN A ribosyltransferase-isomerase OS=Peptoniphilus sp. ING 2-D1G OX=1912856 GN=queA PE=3 SV=1
MKTEEFKYYLPEDLIAQYPLNNRSESKLLILGRKDGLIEHKHFYDIVDYLQRGDVLVLNDTKVIPARIFGHRKNKEEKIEILLLKQKEDDIWECLTRPGKKTKTGCEVIISDKLSGKIVSVSDDGSRFIKFHYHGIFNEILDELGEMPLPPYIKTKLGDKDRYQTVYSREQGSAAAPTAGLHFTEKLLEEIKNKGVEIAYVTLHIGLGTFRPVKAEDIENHHMHSEYYTVNSETVDIVNKAKSEGRRVIAVGTTSVRTIESIANERGLINEKSGWTDIFIYPGYEFKCIDGLITNFHLPESTLLMLVSAFTTKEIIFRAYEEAIKEKYRFFSFGDAMFIH

SEQ ID NO: 70201 - protein, 339 aa, Peptoniphilus sp.
  misc_feature (1)..(339): tr|D8FGI5|D8FGI5_9FIRM S-adenosylmethionine:tRNA ribosy ltransferase-isomerase OS=Peptoniphilus sp. oral taxon 836 str. F0141 OX=768724 GN=queA PE=3 SV=1
MKTSDFSYDLPSELIAQHPAQKRDQSRLMLLNKKTGEINHKKFYNIIDYLNNGDVLVLNDTRVMPARIFGHRPEKDESIEILLLNHKGDTWETLAKPGKKLKIGTEIIFSDELKAEVVDISEDGSRFLKFIYSGIFEEILDRLGEMPLPPYIQEKLEDKERYQTVYSKEIGSAAAPTAGLHFTKELLKKIEEKGIEICFITLHVGLGTFRPVKVEDVTKHKMHSEFYIIRDDVAQKINKAKDEGRRIVAVGTTSIRTLESAADDKGYVKAKSGWTDIFIYPPYKFKCVDALITNFHLPESTLIMLVSSLSTREIILNAYNVAVKDKYRFFSFGDAMFIY

SEQ ID NO: 70202 - protein, 342 aa, Peptostreptococcaceae bacterium; identical to SEQ ID NO: 63359
  misc_feature (1)..(342): tr|A0A2P1G2U2|A0A2P1G2U2_9FIRM S-adenosylmethionine:tRN A ribosyltransferase-isomerase OS=Peptostreptococcaceae bacterium oral taxon 929 OX=2081703 GN=queA PE=3 SV=1

SEQ ID NO: 70203 - protein, 349 aa, Peptostreptococcaceae bacterium
  misc_feature (1)..(349): tr|A0A1I2A6K2|A0A1I2A6K2_9FIRM S-adenosylmethionine:tRN A ribosyltransferase-isomerase OS=Peptostreptococcaceae bacterium pGA-8 OX=1520829 GN=queA PE=3 SV=1
MRLDDFDYNLPENLIAQHPTKERDKCRLMVLNRASHTVDNKKFCDIIDHINPGDCLVMNNSKVLPARLYGIKEGTGAKIEFLLIKRIEGDLWETMVKPGKRLKPGDSVLFGEENQLKAVVKDYGEDGTRLVEFFYDGIFIEQLEKIGTMPLPPYIDRKSDDDDRKMYQTVYCKEEGSVASPTAGLHFTKELLSKLSDKGVDLVYVTLHVGIGTFRPVKCENVEDHHMHFEEYYIDRENADIINKAVREGRRIVSVGTTSTRTLESAAFYSEEDGKYLVKAGEDSTDIFIYPGYKFKIINSLITNFHLPKSTLLMLISALYDREHILTAYNRAVADGYRFFSYGDAMFIE

SEQ ID NO: 70204 - protein, 340 aa, Peptostreptococcus anaerobius
  misc_feature (1)..(340): tr|R5JCB9|R5JCB9_9FIRM S-adenosylmethionine:tRNA ribosy ltransferase-isomerase OS=Peptostreptococcus anaerobius CAG:621 OX=1263100 GN=queA PE=3 SV=1
MKTSDFKYYLPEELIAQVPVKDRSSSRLMVLDKATGEIEHRIFKDIIDYLEEGDCLVLNDTRVIPARLIGEKESSGGRVEFLLLKRDGELWETLVKPGKRAKIGSRISFGGGKLVAEVVDIVEDGSRMVKFIYDGIFEEVLDELGNMPLPPYITAKLDDKERYQTVYSKHKGSAAAPTAGLHFTECLLEEIKSKGVDLAFVTLHVGLGTFRPVKVDDVESHKMHSEFYVVSEEAAEKINRAKENGKRIICVGTTSCRTIESVASEDGKMHAKTGWTDIFIYPGYKFKVVDNLITNFHLPESTLVMLVSALSKKEYVLSAYEEAVKEKYRFFSFGDAMFFK

SEQ ID NO: 70205 - protein, 340 aa, Peptostreptococcus anaerobius
  misc_feature (1)..(340): tr|D3MPV6|D3MPV6_9FIRM S-adenosylmethionine:tRNA ribosy ltransferase-isomerase OS=Peptostreptococcus anaerobius 653-L OX=596329 GN=queA PE=3 SV=1
MKTSDFKYYLPEELIAQVPIKDRSSSRLMVLDKATGEIEHRIFKDIIDYLEEGDCLVLNDTRVIPARLIGEKESSGGRVEFLLLKRDGELWETLVKPGKRAKIGSRISFGGGKLVAEVVDIVEDGSRMVKFIYDGIFEEVLDELGNMPLPPYITAKLDDKERYQTVYSKHKGSAAAPTAGLHFTECLLEEIKSKGVDLAFVTLHVGLGTFRPVKVDDVESHKMHSEFYVVSEDAAEKINRAKENGKRIICVGTTSCRTIESVASEDGKMHAKTGWTDIFIYPGYKFKVVDNLITNFHLPESTLVMLVSALSKKEYVLSAYEEAVKEKYRFFSFGDAMFFK

SEQ ID NO: 70206 - protein, 341 aa, Peptostreptococcus russellii
  misc_feature (1)..(341): tr|A0A1H8I8C3|A0A1H8I8C3_9FIRM S-adenosylmethionine:tRN A ribosyltransferase-isomerase OS=Peptostreptococcus ru ssellii OX=215200 GN=queA PE=3 SV=1
MKTSDFNYDLPEELIAQFPIKDRSSSRLMVVDKKTGEIEHKVFKDIIDYLEEGDCLVLNDTRVIPARLIGSKVETGGKIEFLLLKRNEDDTWETLVKPGKRAKIGSKFSFGDGKLIAEVVGMGDDGARIVKFEYEGIFEEVLDELGNMPLPPYITEKLEDRERYQTVYSKHNGSAAAPTAGLHFTDDLLKQIRDKGVEEAFVTLHVGLGTFRPVKVDDVLEHKMHSEYYMVSQEAADKINRAKENGKRVICVGTTSCRTIESAADNNGVLKATSGWTDIFIYPGYKFKLMDNLITNFHLPESTLIMLVSALSTRENILNAYEEAVKERYRFFSFGDAMFLK

SEQ ID NO: 70207 - protein, 341 aa, Peptostreptococcus russellii
  misc_feature (1)..(341): tr|A0A2P7Q0S4|A0A2P7Q0S4_9FIRM S-adenosylmethionine:tRN A ribosyltransferase-isomerase OS=Peptostreptococcus ru ssellii OX=215200 GN=queA PE=3 SV=1
MKTSDFNYNLPEELIAQVPIADRSSSRLMVVDKKSGEVEHKIFKDIIDYLEEGDCLVLNDTRVIPARLIGSKVETGGKIEFLLLKRNEDDTWETLVKPGRKAKIGSEFTFGDDKLIAKVVGMGDDGSRIVKFKYDGIFEEILDELGNMPLPPYITEKLEDRERYQTVYSKHSGSAAAPTAGLHFTEDLLEEIRKKGVDEAFVTLHVGLGTFRPVKVDDVLEHKMHSEYFIVNQEAADKINKAKKNGKKVICVGTTSCRTIESASEEDGTLKAKSGWTEIFIYPGYDFKIMDNLITNFHLPESTLIMLVSALSSKENILNAYEEAVKERYRFFSFGDAMFLK

SEQ ID NO: 70208 - protein, 341 aa, Peptostreptococcus sp.
  misc_feature (1)..(341): tr|A0A1I1YLJ8|A0A1I1YLJ8_9FIRM S-adenosylmethionine:tRN A ribosyltransferase-isomerase OS=Peptostreptococcus sp . D1 OX=72304 GN=queA PE=3 SV=1
MKTSDFYYDLPEDLIAQVPIEDRASSKLLVLNKSTGKIKHDIFKNIVSYLKEGDCLVLNDTRVIPARLIGEKKDTGGRVEFLLLKRNEDDTWETLVKPGKKARIGSEISFGNGKLIAKVVDIVEDGKRIVRFDYDGIFEEVLYELGKMPLPPYITETLQDNERYQTVYSKTSGSAAAPTAGLHFTEELLADIRRKGINIAFVTLHVGLGTFRPVKVDDVNDHKMHSEFYMVSDESAELINSVKKSGGRVICVGTTSCRTIESACDDQGNVMSGSGWTDIFIYPGYKFKIVDNLITNFHLPESTLIMLVSALSSRETILKAYKEAVKEKYRFFSFGDAMFLE

SEQ ID NO: 70209 - protein, 341 aa, Peptostreptococcus sp.
  misc_feature (1)..(341): tr|A0A096A323|A0A096A323_9FIRM S-adenosylmethionine:tRN A ribosyltransferase-isomerase OS=Peptostreptococcus sp . MV1 OX=1219626 GN=queA PE=3 SV=1
MKTSDFKYDLPHELIAQVPIKDRSSSRLMVLNKETGEIEHKVFKNIIDYLEEGDCLVLNDTRVIPARLIGEKVESGGKMEFLLLKRNEDDTWETLVKPGKRAKIGSRFSFGGGKLFADVVDILADGSRLVTFDYDGIFEEILDELGNMPLPPYITEKLEDKDRYQTVYSKHNGSAAAPTAGLHFTDELLDQIRAKGVKTAFVTLHVGLGTFRPVKVDDVDKHKMHSEFYSVSQEAADMINDAKKSSKRVICVGTTSCRTIESASGPDGRLKAGSGWTDIFIYPGYEFKLCDNLITNFHLPESTLIMLVSALSSRENILNAYRVAVDEKYRFFSFGDAMFLK

SEQ ID NO: 70210 - protein, 341 aa, Peptostreptococcus stomatis
  misc_feature (1)..(341): tr|E0E403|E0E403_9FIRM S-adenosylmethionine:tRNA ribosy ltransferase-isomerase OS=Peptostreptococcus stomatis D SM 17678 OX=596315 GN=queA PE=3 SV=1
MKTSDFKYDLPEELIAQVPIEDRSSSRLMVVDKNTGQIEHRVFKDIIDYLEEGDCLVLNDTRVIPARLIGEKVGSGGKMEFLLLKRNEDDTWETLVKPGKRAKLGARFSFGGGKLFADVVDILEDGSRLVKFDYDGIFEEILDELGNMPLPPYITEKLEDKERYQTVYSKHNGSAAAPTAGLHFTDQLLDQIRAKGVKTAFVTLHVGLGTFRPVKVDDVGQHKMHSEFYMVTQEAADMINEARVKSKRVICVGTTSCRTIESASKPDGRLEAKSGWTDIFIYPGYKFKVCDNLITNFHLPESTLIMLVSALSSKENILNAYKSAVEERYRFFSFGDAMFLK

SEQ ID NO: 70211 - protein, 347 aa, Peredibacter sp.
  misc_feature (1)..(347): tr|A0A2E5CAT7|A0A2E5CAT7_9PROT S-adenosylmethionine:tRN A ribosyltransferase-isomerase OS=Peredibacter sp. OX=2 024850 GN=queA PE=3 SV=1
MKREDLLTESYDYELPEELIAQRPAPERDHSKLMVYKHKSETVDHSKFHNIADYLPAGTLLVLNQSKVFPCRLMGKKPTGGKAEVLFLSLLDEGGLYPVMLKTSGKKKLGDVFLFGELKLKIERILEDGSFYVQTNLVGEDLLDYLESRAHIPIPPYIREGVADESDKKDYQTVYAKHAGSVAAPTAGLHFTNQVFDSLKEKGIEIAKVTLHVGAGTFKPVSADEITDHKMHREHFDISDEDLEKLNSAKNIFAVGTTTLRVLESCYSDGKFALPEEKSTDIFLYPGKEVKSIQGLITNFHLPKSTLLMLVSSIVGREKTLSLYKEAVEKKYRFFSYGDSMMIMRNE

SEQ ID NO: 70212 - protein, 368 aa, Perlucidibaca sp.
  misc_feature (1)..(368): tr|A0A2P6ASL3|A0A2P6ASL3_9GAMM S-adenosylmethionine:tRN A ribosyltransferase-isomerase OS=Perlucidibaca sp. HR- E OX=2094561 GN=queA PE=3 SV=1
MHRSDFTFELPDALIARYPLAERSASRLLCLDGDSGGFRHAAFRDLLGLLRPGDLLVFNQSRVMPARLFARKETGGQAEILVERLPAPTRALAHVRASKSPKPGGVLHLADGSAVRMAGREGDLFLLEADEPWQALMARLGEMPLPPYFGRAAEASDSERYQTVYARDAGSVAAPTAGLHFDQPLLDALRAHGVETAFVTLHVGAGTFQPVRADDIRDHVMHAEWLTVGADVVAAVQAAKARGGRVIAVGTTSVRALESAAWAGQGVDPEGWSLAAGFPAGSGDAAATLAPFAGDTRIFIAPGYRWQLIDALITNFHLPESTLLMLVSALAGREAVLAAYAEAVSARYRFFSYGDAMFVTRPGAGRES

SEQ ID NO: 70213 - protein, 361 aa, Permianibacter aggregans
  misc_feature (1)..(361): tr|A0A4R6UXN9|A0A4R6UXN9_9GAMM S-adenosylmethionine:tRN A ribosyltransferase-isomerase OS=Permianibacter aggreg ans OX=1510150 GN=queA PE=3 SV=1
MEMSRPNRYPSDPRFVPADMKLSDFDYTLPEQLIARYPLPERSASRLLCLDGATGALAHRQFTDIVDLLSERDLLVFNNTRVLAARLFAQKSTGGKVEVLIERVVDPQHAIAQVRASKSPKAGTVLQLEAGGEVTVTGRLGEFYQLQTDNDWFALMAEQGHMPLPPYFERDDEKADEERYQTVYAKQPGAVAAPTAGLHFDQPLLQCLRDKGVRMAEVTLHVGAGTFQPVRVEDIREHQMHSEWYQLNDEVVQAVAETKASGGRVIAVGTTSVRTLESASRSGHLESGASDTNIFIYPGYRFRIVDAMITNFHLPQSTLLMLVSAFSGRDHILNAYHEAIAREYRFFSYGDAMFLTPGANA

SEQ ID NO: 70214 - protein, 337 aa, Persephonella hydrogeniphila
  misc_feature (1)..(337): tr|A0A285NFY8|A0A285NFY8_9AQUI S-adenosylmethionine:tRN A ribosyltransferase-isomerase OS=Persephonella hydroge niphila OX=198703 GN=queA PE=3 SV=1
MIRLSDYDYKLPKELIAKYPVEPRDACRLMVLDRKNKSIKHRMFRDIIEYTEEEDLLVLNDTKVIPARLIGKKETGAKIEIFLLRPFSDNEWEVLIKNIKRLKAGQKVIIGEGFYAELIEKYDEGKAKVRLYGEDINSLIKKYGHIPLPPYIEREDEEKDKELYQTVFAKKEGAVASPTAGLHFTEELLKKLEEKGVKKAFCTLHVGLGTFRPIQTEDITKHRMHEEFYQIPEETINLIQETKRKGKRVIAVGTTVVRTLETYAKTGKKEGFSNIFIYPPYRFEIVDALVTNFHLPKSTLILLVSAFAGREFILKAYEEAVQKKYRFFSYGDAMLIL

SEQ ID NO: 70215 - protein, 337 aa, Persephonella marina
  misc_feature (1)..(337): tr|C0QR80|C0QR80_PERMH S-adenosylmethionine:tRNA ribosy ltransferase-isomerase OS=Persephonella marina (strain DSM 14350 / EX-H1) OX=123214 GN=queA PE=3 SV=1
MHRLSDYDYRLPKELIAKYPVEPRDSCRLMVLNRKERTIEHRIFRDIGDYLKEGDLLVLNDTKVIPARLIGRKETGAKIEIFLLKPVTENVWEALIKNIKRLKEGQVVIISEDFRVKLLEKLDEGKAVVQLVGEDIKYLIEKYGHIPLPPYIEREDEDKDRDYYQTVFAKKEGAVASPTAGLHFTEELLEKLKEKGIKTAFVTLHVGLGTFRPITVEDITKHKMHEEFYQIPEETLDLIRETKERGRSVVAVGTTVVRTLETYAQTGKKEGFSDIFIYPPYDFKIVDSMITNFHLPKSTLLLLVSAFAGRDFILEAYREAVEKRYRFFSYGDAMLIL

SEQ ID NO: 70216 - protein, 411 aa, Petrimonas mucosa
  misc_feature (1)..(411): tr|A0A1G4G832|A0A1G4G832_9PORP S-adenosylmethionine:tRN A ribosyltransferase-isomerase OS=Petrimonas mucosa OX= 1642646 GN=queA 1 PE=3 SV=1
MKKCDAEKVRIADYNYTLPQEKIAKYPLPKRDASKLLLFCNNQISTLAFSSIAEEIPEGSLMIFNDTRVIHARLIFEKGSGALIEVFCLSPHSPRDYSENFQQRRGCSWHCMIGNAKRWKDEVLQMRIVMEGSELLLSARKIAKNGNDTVVEFSWDRPEVTFSELLEVAGKLPIPPYLNRNSEASDDETYQTVYSEVEGSVAAPTAGLHFTPEVMASLEKRGIRIARVTLHVGAGTFKPVKSETIGDHDMHTEFISVSRETVQALYENRNKLIVVGTTSMRTVESLYYLGKRVLLHPDIKPDELLVSQWEPYEEETPVSPQLALKAIIDYLDRNSADQLIAHTQVMIVPGYRFHYPQAIVTNFHQPQSTLLLLIAACIGERWRDLYQYALQNNYRFLSYGDSSLLWLTASH

SEQ ID NO: 70217 - protein, 349 aa, Petrimonas mucosa
  misc_feature (1)..(349): tr|A0A1G4G863|A0A1G4G863_9PORP S-adenosylmethionine:tRN A ribosyltransferase-isomerase OS=Petrimonas mucosa OX= 1642646 GN=queA 3 PE=3 SV=1
MKLSQFKFNLPEELIAKFPSKHRDESRLMVVHRNSDKVEHLIFKDILNYFDAHDFFIFNDTKVFPARLFGNKEKTGAKIEVFLLRELNPAQHLWDVLVNPARKIRIGNKLYFGDNEELVAEVIDNTTSRGRTLRFLYDGPYEEFKDLLFSIGETPIPEYMERPAVPEDAERYQNIFASNEGAVVVPAAGLHFSRELIKRMEIKNIDYGFLTLHHGLGAYRDIDVEDLTKHKIDSEQMIISQELCDRVNTAKDNGHKICAVGTSVLRAIETTISTDGHIKPREGWTNKFIFPPYDFTLPDALITNFHLPLSTLLMVTAAFGGYERIMDVYQIAIKEKYEFGAYGDAMLII

SEQ ID NO: 70218 - protein, 413 aa, Petrimonas sp.
  misc_feature (1)..(413): tr|A0A3G9E2A4|A0A3G9E2A4_9PORP S-adenosylmethionine:tRN A ribosyltransferase-isomerase OS=Petrimonas sp. IBARAK I OX=1978337 GN=PEIBARAKI_5829 PE=3 SV=1
MKKCDAEKIRIADYSYTLPPEKIARYPLEKRDSSKLLLFRNNTISTRPFSGIGAEIPEGSLLVFNDTRVIHARLIFEKSTGAVIEIFCLSPHAPRDYSVNFQQRTSCSWHCMIGNAKRWKDDVLQMKVSVNNENVLLSARKIESNADDVIVEFSWNNPGFTFSELLEIAGKLPIPPYLNRASEARDDETYQTVYSAVEGSVAAPTAGLHFTSEVMRSFRKKGIQSARVTLHVGAGTFKPVKSETIGDHDMHMEFISVSRETVQALYENENNLIVVGTTSMRTVESLYYLGKKILLQPDIQPEELVVFQWEPYGEENPVSPKLALKSIIDYLIRNNADQLLAFTQVMIVPGYTFHYPQALITNFHQPQSTLLLLIASGIGKYWRDVYDYALQNDYRFLSYGDSSLLWLTANQAI

SEQ ID NO: 70219 - protein, 349 aa, Petrimonas sp.
  misc_feature (1)..(349): tr|A0A3G9EPL0|A0A3G9EPL0_9PORP S-adenosylmethionine:tRN A ribosyltransferase-isomerase OS=Petrimonas sp. IBARAK I OX=1978337 GN=queA PE=3 SV=1
MKLSQFKFNLPEELIAKHPSKHRDESRLLVVHRNSDKIEHLVFKDILNYFDAHDFFVFNDTKVFPARLFGNKEKTGAKIEVFLLRELNPAQHLWDVLVNPARKIRIGNKLYFGENEELVAEVIDNTTSRGRTLRFLYDGPYEEFKDLLFSIGETPIPEYMERSVVPEDAERYQNIFANNEGAVVVPAAGLHFSRELIKRMEIKNIDYGFLTLHHGLGAYRDIDVEDLTKHKVDSEQMIITQELCDKVNTAKDNGHKICAVGTSVLRAIETTISTDGHIKPREGWTNKFIFPPYDFTLPDALVTNFHLPFSTLLMVTTAFGGYERIMDVYQTAIKEKYEFGAYGDAMLII

SEQ ID NO: 70220 - protein, 341 aa, Petrocella atlantisensis
  misc_feature (1)..(341): tr|A0A3P7PFJ6|A0A3P7PFJ6_9FIRM S-adenosylmethionine:tRN A ribosyltransferase-isomerase OS=Petrocella atlantisen sis OX=2173034 GN=queA PE=3 SV=1
MKLSDFTFKLPQELIAQEPLEDRSDSRLMVLNRSDRSIEHKKFTDLLDELHPGDCLVLNNTRVMPARLIGEKPETHGKVEFLLLSRKQQNQWEVMVKPGKKAKVGDIIEFGNGMIKAEVLEIMDGGNRLVALEYEGIFEEVLDQLGQMPLPPYITKQLEDKERYQTVYSKHTGSAAAPTAGLHFTHDLMKKITEKGVAIAYITLHVGLGTFRPVKVENVLEHDMHSEYYFIEEEEAEKINTAKKKGGRIIAVGTTSSRTLESVADEDGFIKKSSGWTDIFIYPGYSFKIVDALITNFHLPESTLIMLVSALAGRDFILEAYEAAIESSYRFFSFGDAMLIK

SEQ ID NO: 70221 - protein, 341 aa, Petrotoga halophila
  misc_feature (1)..(341): tr|A0A2S5EFY6|A0A2S5EFY6_9BACT S-adenosylmethionine:tRN A ribosyltransferase-isomerase OS=Petrotoga halophila D SM 16923 OX=1122953 GN=queA PE=3 SV=1
MSEQSFDLEQYNYELPEELIAQEPVEPRDSCKLMVLNRRVKSIEHKVFRDIKNYLRPGDLLVLNNTRVIPARLYGKKETGAKVEVLLLEKNGNDKTWKALVKPGGKIKKGNKLIFEDNLVCTVVEHLEDGSRILEFDDPNFFSKLPRIGEVPLPPYIKKQIDDPEKYQTTYAKNNGAVAAPTAGLHFTQELIDELTDYGVNFTEVTLHVGLGTFRPVKEPDIRNHQIHEEYYTVSKSVLRDIVRAKANGKRVIATGTTVVRTLETIARNPDELAGRTDLYIYPPFEFKIIDAMITNFHLPRSSLLFLVSAFAGRDFIMNSYEIAKEKKYRFFSFGDAMFIM

SEQ ID NO: 70222 - protein, 341 aa, Petrotoga mexicana
  misc_feature (1)..(341): tr|A0A2K1PBL1|A0A2K1PBL1_9BACT S-adenosylmethionine:tRN A ribosyltransferase-isomerase OS=Petrotoga mexicana DS M 14811 OX=1122954 GN=queA PE=3 SV=1
MSEQSFDLEQYNYELPEELIAQEPVEPRDSCKLMVLNRRVKSIEHKVFRDIKNYLRPGDLLVLNNTRVIPARLYGKKETGAKVEVLLLEKNGNDKTWKALVKPGGKIKKGNKLIFEDNLVCSVVEHLEDGSRILEFDDPNFFSKLPRIGEVPLPPYIKKQIDDPEKYQTTYAKNNGAVAAPTAGLHFTQELIKELTDYGVNFTEVTLHVGLGTFRPVKEPDIRNHQIHEEYYTVSKSVLRDIVRAKANGKRVIATGTTVVRTLETIARNPDKLAGRTDLYIYPPFEFKIIDAIITNFHLPRSSLLFLVSAFAGRDFIMNSYEIAKEKKYRFFSFGDAMFIM

SEQ ID NO: 70223 - protein, 341 aa, Petrotoga miotherma
  misc_feature (1)..(341): tr|A0A2K1PCI5|A0A2K1PCI5_9BACT S-adenosylmethionine:tRN A ribosyltransferase-isomerase OS=Petrotoga miotherma D SM 10691 OX=1434326 GN=queA PE=3 SV=1
MSEQSFNLEQYDYELPEELIAQEPVEPRDSCKLMVLNRRVKSIEHKVFRDIKNYLRPGDLLVLNNTRVIPARLYGKKETGAKVEVLLLEKDGNDKTWKALVKPGGKIKKGNKLIFEDDLVCTVVEHLEDGSRILEFDDPNFFSKLPKIGEVPLPPYIKKQIDDPEKYQTTYAKNNGAVAAPTAGLHFTQELIDELTDYGVNFTEVTLHVGLGTFRPVKEPDIRNHLIHEEYYTVPKSVLHDIVRAKADGKRVIATGTTVVRTLETIARNPDKLAGRTDLYIYPPFEFKIIDALITNFHLPKSSLLFLVSAFAGHDFIMNSYEIAKEKKYRFFSFGDAMFIM

SEQ ID NO: 70224 - protein, 358 aa, Petrotoga mobilis
  misc_feature (1)..(358): tr|A0A101HR15|A0A101HR15_9BACT S-adenosylmethionine:tRN A ribosyltransferase-isomerase OS=Petrotoga mobilis OX= 69499 GN=queA PE=3 SV=1
MNISLIKTNYWNCGGLWMSEQSFDLEQYDYELPEDLIAQEPLEPRDSCKLMVLNRKTKSIEHKVFRDIKNYLRPGDLLVLNNTRVIPARLYGKKETGAKVEVLLLEKNGNDKTWKALVKPGGKIKKGNKLIFEDNLTCTVEEHLEDGSRILKFDDPNFFSKLPRIGEVPLPPYIKKQIDDPEKYQTTYAKYDGAVAAPTAGLHFTKELIEELTDYGVRFAEITLHVGLGTFRPVKEADIRNHQIHEEYYTVPKSVLRDIVRAKAEGKRVIATGTTVVRTLESIARNPDKLAGKTDLYIYPPFEFKIIDAMITNFHLPKSSLLFLVSAFAGQDFIMNSYQIAKEKKYRFFSFGDAMFII

SEQ ID NO: 70225 - protein, 358 aa, Petrotoga mobilis
  misc_feature (1)..(358): tr|A0A117L096|A0A117L096_9BACT S-adenosylmethionine:tRN A ribosyltransferase-isomerase OS=Petrotoga mobilis OX= 69499 GN=queA PE=3 SV=1
MNISLIKTNYWNFGGFLMSELSFDLEKYDYELPEELIAQEPVEPRDSCKLMVLNRKTKSIEHKVFRDIKSYLQPGDLLVLNNTRVIPARLYGKKETGAKVEVLLLEKNGNDKTWKALVKPGGKIKKGNKLIFEDNLTCTVEEHLEDGSRILEFDDPNFFSKLEKIGEVPLPPYIKKQIDDPEKYQTTYAKYDGAVAAPTAGLHFTKELIEELSDYGVNFTEITLHVGLGTFRPVSEADIRNHQIHEEYYTVSKSVLRDIVRAKAEGKRVIATGTTVVRTLESIARNPDKLAGKTDLYIYPPFEFKIIDALITNFHLPRSSLLFLVSAFAGQDFVMNSYQIAKEKKYRFFSFGDAMFII

SEQ ID NO: 70226 - protein, 341 aa, Petrotoga olearia
  misc_feature (1)..(341): tr|A0A2K1NZU9|A0A2K1NZU9_9BACT S-adenosylmethionine:tRN A ribosyltransferase-isomerase OS=Petrotoga olearia DSM 13574 OX=1122955 GN=queA PE=3 SV=1
MSELSFDLEKYDYELPEELIAQEPVEPRDSCKLMVLNRKTKSIEHKVFRDIKSYLQPGDLLVLNNTRVIPARLYGKKETGAKVEVLLLEKDGNDKTWKALVKPGGKIKKGNKLIFEDNLTCTVEEHLEDGSRILEFDDPNFFSKLEKIGEVPLPPYIKKKIDDPEKYQTTYAKYDGAVAAPTAGLHFTKELIEELTDYGVRFAEITLHVGLGTFRPVSEADIRNHQIHEEYYTVSKSVLRDIVRAKAEGKRVIATGTTVVRTLESIARNPDKLAGKTDLYIYPPFEFKIIDALITNFHLPRSSLLFLVSAFAGQDFIMNSYQIAKEKKYRFFSFGDAMFII

SEQ ID NO: 70227 - protein, 341 aa, Petrotoga sibirica
  misc_feature (1)..(341): tr|A0A4R8EUW9|A0A4R8EUW9_9BACT S-adenosylmethionine:tRN A ribosyltransferase-isomerase OS=Petrotoga sibirica OX =156202 GN=queA PE=3 SV=1
MSEQSFDLEQYDYELPEDLIAQEPLEPRDSCKLMVLNRKTKSIEHKVFRDIKNYLRPGDLLVLNNTRVIPARLYGKKETGAKVEVLLLEKNGNDKTWKALVKPGGKIKKGNKLIFEDNLTCTVEEHLEDGSRILKFDDPNFFSKLPRIGEVPLPPYIKKQIDDPEKYQTTYAKYDGAVAAPTAGLHFTKELIEELTDYGVRFAEITLHVGLGTFRPVKEADIRNHQIHEEYYTVPKSVLRDIVRAKAEGKRVIATGTTVVRTLESIARNPDKLAGKTDLYIYPPFEFKIIDAMITNFHLPKSSLLFLVSAFAGQDFIMNSYQIAKEKKYRFFSFGDAMFII

SEQ ID NO: 70228 - protein, 341 aa, Petrotoga sp.
  misc_feature (1)..(341): tr|A0A328PUP2|A0A328PUP2_9BACT S-adenosylmethionine:tRN A ribosyltransferase-isomerase OS=Petrotoga sp. 9PW.55. 5.1 OX=1308979 GN=queA PE=3 SV=1
MSEELFDLERYDYNLPDELIAQEPAEPRDSCKLMVINRRTKSIEHKIFKDIGDYLEPGDLLVLNNTKVIPARLYGRKETGAHVEVLLLEKDGSEKRWKALVKPGGKIKTGNKLYFKNNLSCSVVEHLDDGSRILEFQEPQFYSKLEQIGEIPLPPYIKKELDDPNKYQTEYAKFDGAVAAPTAGLHFTKELMDELKVRGIKFAEITLHVGLDTFRPVKEQDIRNHQIHEEYFNVSKDVLHEIARTKAQGKRVIAVGTTVVRTLESISRNPNKLVDKTSLYIYPPFEFKIVDALITNFHLPKSSLLFLVSAFSDYKFIMDAYEIAKEKEYRFFSFGDAMFII

SEQ ID NO: 70229 - protein, 341 aa, Petrotoga sp.
  misc_feature (1)..(341): tr|A0A421CNC9|A0A421CNC9_9BACT S-adenosylmethionine:tRN A ribosyltransferase-isomerase OS=Petrotoga sp. HKA.pet .4.5 OX=1473155 GN=queA PE=3 SV=1
MSEQSFDLEQYDYELPEELIAQEPFEPRDSCKLMVLNRRVKSIEHKVFRDIKNYLRPGDLLVLNNTRVIPARLYGKKETGAKVEVLLLEKNGNDKTWKALVKPGGKIKKGNKLIFEDDLVCTVVEHLEDGSRILEFDDPNFFSKLPRIGEVPLPPYIKKQIDDPEKYQTTYAKNNGAVAAPTAGLHFTQELIDELTDYGVNFTEVTLHVGLGTFRPVKEPDIRNHQIHEEYYTVSKSVLHDIVRAKANGKRVIATGTTVVRTLESIARNPDKLAGKTDLYIYPPFEFKIIDAMITNFHLPRSSLLFLVSAFADRDFIMNSYEIAKENKYRFFSFGDAMFIM

SEQ ID NO: 70230 - protein, 356 aa, Phaeobacter gallaeciensis
  misc_feature (1)..(356): tr|V9WGP0|V9WGP0_9RHOB S-adenosylmethionine:tRNA ribosy ltransferase-isomerase OS=Phaeobacter gallaeciensis DSM 26640 OX=1423144 GN=queA PE=3 SV=1
MKLSDFDFDLPDDRIATRPAVPRSSARLLVAEGDHISDARVANLGQWLRPGDRLVLNDTKVIPARLSGLRHRDTAQGPMAAKVEVTLLDPGADGSWAALLKPLKKVKLGEEIIFSDALSATLERIEDGQGHLKFNLSGTDFDAALAEAGAMPLPPYIAAKRPADEQDKTDYQTVWARNSGAVAAPTASLHFDDALLAELQAKGVEISYVTLHVGAGTFLPVKVEDVTTHRMHAEWGRVSAEAAAEIAATKAAGGRVIPVGTTALRLIESAGQSGAIQPWEGDTDIFIYPGFTFHVADALMTNFHLPKSTLLMLVSALMGQDRIRAIYDHALAEDYRFFSYGDASLLIPPMAEMSQT

SEQ ID NO: 70231 - protein, 349 aa, Phaeobacter gallaeciensis
  misc_feature (1)..(349): tr|A0A366WR11|A0A366WR11_9RHOB S-adenosylmethionine:tRN A ribosyltransferase-isomerase OS=Phaeobacter gallaecie nsis OX=60890 GN=queA PE=3 SV=1
MKLSDFDFDLPEDLIATRPASPRSSARLLVADAGQITDAHVFDLTEWLRPGDRLILNDTKVLPARLSGKRHRDSAQGPVSAAIEVTLLDPKASGTWTALLKPLKKIKIGESIIFTDQFSAVLEDVIEGQGVLRFNLTGSDFDGALSEAGAMPLPPYIAAKRKADAQDKTDYQTVWARHAGAVAAPTASLHFDDTLLAKLTSKGVGFTHVTLHVGAGTFLPVKVEDVTTHKMHAEWGHVSEQAAAEINETKAAGGRVIPVGTTALRLIESAARSGRIQAWDGETDIFIYPGFEFHVADALMTNFHLPKSTLLMLVSALMGKGQMDEIYAHAVNSRYRFFSYGDASLLFPS

SEQ ID NO: 70232 - protein, 356 aa, Phaeobacter inhibens
  misc_feature (1)..(356): tr|A0A2I7K988|A0A2I7K988_9RHOB S-adenosylmethionine:tRN A ribosyltransferase-isomerase OS=Phaeobacter inhibens OX=221822 GN=queA PE=3 SV=1
MKLSDFDFDLPDDRIATRPAVPRSSARLLVAEGDRIRDARVANLGQWLRSGDRLVLNDTKVIPARLSGLRHRDTAQGPMAAKVEVTLLDPGADGSWAALLKPLKKVKPGEEIVFSDALSATLERIEDGQGHLKFNLSGTDFDAALAEAGAMPLPPYIAAKRPADEQDKTDYQTVWARNSGAVAAPTASLHFDDALLAELQAKGVEISYVTLHVGAGTFLPVKVEDVTTHRMHAEWGRVSAEAATEIAATKAAGGRVIPVGTTALRLIESAGQSGAIQPWEGDTDIFIYPGFTFHVADALMTNFHLPKSTLLMLVSALMGQDRIRAIYDHALAEEYRFFSYGDASLLIPPTAEMSQT

SEQ ID NO: 70233 - protein, 356 aa, Phaeobacter inhibens
  misc_feature (1)..(356): tr|A0A135IJK8|A0A135IJK8_9RHOB S-adenosylmethionine:tRN A ribosyltransferase-isomerase OS=Phaeobacter inhibens OX=221822 GN=queA PE=3 SV=1
MKLSDFDFDLPDDRIATRPAVPRSSARLLVAEGDRIRDARVANLGQWLRSGDRLVLNDTKVIPARLSGLRHRDTAQGPMAAKVEVTLLDPGADGSWAALLKPLKKVKLGEEIIFSDALSATLERIEDGQGHLKFNLSGTDFDAALAEAGAMPLPPYIAAKRPADEQDKTDYQTVWARNSGAVAAPTASLHFDDALLAELQAKGVEISYVTLHVGAGTFLPVKVEDVTTHRMHAEWGRVSAEAATEIAATKAAGGRVIPVGTTALRLIESAGQSGAIQPWEGDTDIFIYPGFTFHVADALMTNFHLPKSTLLMLVSALMGQDRIRAIYDHALAEEYRFFSYGDASLLIPPTAEMSQT

SEQ ID NO: 70234 - protein, 353 aa, Phaeobacter italicus
  misc_feature (1)..(353): tr|A0A0H5CXK4|A0A0H5CXK4_9RHOB S-adenosylmethionine:tRN A ribosyltransferase-isomerase OS=Phaeobacter italicus OX=481446 GN=queA PE=3 SV=1
MKLSDFDFDLPDDLIATRPAVPRTSARLLVAEADQISDATVADLGQWLRPGDRLVLNDTKVIPARLSGQRHRDTAQGPMAAKVEVTLLEPGADGCWSALLKPLKKVKLGEEIIFSDQLSARLDRVEDGQGYLAFNLSGDDFDTALAEAGAMPLPPYIAAKRAADEQDKTDYQTVWARNSGAVAAPTASLHFDETLLAQLREMGVSFSYVTLHVGAGTFLPVKVEDVTTHKMHSEWGRVSAEAAEEIAATKAAGGRVIPVGTTALRLIESAARSGAIEPWEGDTDIFIYPGFTFNVADALMTNFHLPKSTLMMLVSALMGQERIREIYEHAVSQRYRFFSYGDASLLIPAKTRV

SEQ ID NO: 70235 - protein, 356 aa, Phaeobacter piscinae
  misc_feature (1)..(356): tr|A0A291FNY1|A0A291FNY1_9RHOB S-adenosylmethionine:tRN A ribosyltransferase-isomerase OS=Phaeobacter piscinae OX=1580596 GN=queA PE=3 SV=1
MKLSDFDFDLPDDRIATRPAVPRSSARLLVAEGDRISDARVANLGQWLRPGDRLVLNDTKVIPARLSGLRHRDTAQGPMAAKVEVTLLDPGADGSWAALLKPLKKVKLGEEIIFSDALSATLERIEDGQGHLSFNLSGTDFDAALAEAGAMPLPPYIAAKRPADEQDKTDYQTVWARNSGAVAAPTASLHFDDALLAELQAKGVEISYVTLHVGAGTFLPVKVEDVTTHRMHAEWGRVSAEAAAEIAATKAAGGRVIPVGTTALRLIESAAQSGAIQPWEGDTDIFIYPGFTFHVADALMTNFHLPKSTLLMLVSALMGQDRIRAIYDHALAEEYRFFSYGDASLLIPPMAELSQT

SEQ ID NO: 70236 - protein, 356 aa, Phaeobacter piscinae
  misc_feature (1)..(356): tr|A0A291G006|A0A291G006_9RHOB S-adenosylmethionine:tRN A ribosyltransferase-isomerase OS=Phaeobacter piscinae OX=1580596 GN=queA PE=3 SV=1
MKLSDFDFDLPDDRIATRPAVPRSSARLLVAEGDRISDARVANLGQWLRSGDRLVLNDTKVIPARLSGVRHRDTAQGPMAAKVEVTLLDPGADGSWAALLKPLKKVKLGEEIIFSDALSATLERIEDGQGHLKFNLSGTDFDAALAEAGAMPLPPYIAAKRPADEQDKTDYQTVWARNSGAVAAPTASLHFDDALLAELQAKGVEISYVTLHVGAGTFLPVKVEDVTTHRMHAEWGRVSAEAAAEIAATKAAGGRVIPVGTTALRLIESAAQSGAIQPWEGDTDIFIYPGFTFHVADALMTNFHLPKSTLLMLVSALMGQDRIRVIYDHALAEEYRFFSYGDASLLIPPMAELSQT

SEQ ID NO: 70237 - protein, 356 aa, Phaeobacter porticola
  misc_feature (1)..(356): tr|A0A1L3I4Z9|A0A1L3I4Z9_9RHOB S-adenosylmethionine:tRN A ribosyltransferase-isomerase OS=Phaeobacter porticola OX=1844006 GN=queA PE=3 SV=1
MKLSDFDFDLPDDRIATRPAVPRSSARLLVAEGDHISDARVANLGQWLRPGDRLVLNDTKVIPARLSGLRHRDTVQGPMAAKVEVTLLDPGADGSWAALLKPLKKVKLGEEIIFSDALSATLERIEDGQGHLKFNLSGTDFDAALAEAGAMPLPPYIAAKRPADEQDKTDYQTVWARNSGAVAAPTASLHFDDALLAELQAKGVEISYVTLHVGAGTFLPVKVEDVTTHRMHAEWGRVSTETAAEIAATKAAGWRVIPVGTTALRLIESAAQSGAIQPWEGDTDIFIYPGFTFHVADALMTNFHLPKSTLLMLVSALMGQDRIRAIYDHALAEEYRFFSYGDASLLIPPTAEMSQT

SEQ ID NO: 70238 - protein, 356 aa, Phaeobacter sp.
  misc_feature (1)..(356): tr|A0A384GXX8|A0A384GXX8_9RHOB S-adenosylmethionine:tRN A ribosyltransferase-isomerase OS=Phaeobacter sp. S60 O X=1569353 GN=queA PE=3 SV=1
MKLSDFDFDLPDDRIATRPAVPRSSARLLVAEGDRISDARVANLGQWLRPGDRLVLNDTKVIPARLSGLRHRDTAQGPMAAKVEVTLLDPGADGSWAALLKPLKKVKLGEEIIFSDALSATLERIEDGQGHLAFNLSGTDFDAALAEAGAMPLPPYIAAKRPADEQDKTDYQTVWARNSGAVAAPTASLHFDDALLAELQAKGVEISYVTLHVGAGTFLPVKVEDVTTHRMHAEWGRVSAEAAAEIAATKAAGGRVIPVGTTALRLIESAAQSGAIQPWEGDTDIFIYPGFTFHVADALMTNFHLPKSTLLMLVSALMGQDRIRAIYDHALAEEYRFFSYGDASLLIPPMAELSQT

SEQ ID NO: 70239 - protein, 349 aa, Phaeobacter sp.
  misc_feature (1)..(349): tr|A0A254R488|A0A254R488_9RHOB S-adenosylmethionine:tRN A ribosyltransferase-isomerase OS=Phaeobacter sp. 22II1 -1F12B OX=1317111 GN=queA PE=3 SV=1
MKLSDFDFDLPDDRIALRPAVPRSSARLLVADRGIINDAHVHDLPDWLRPGDRLVLNDTQVIPARLTGQRRRSGAQGDTAARIELTLLEPRADGCWTGLIKPLKKIRPGEMIHFTDALSAELIGVEDGQGIVRFNLAGDDFDAALEEAGQMPLPPYIASQRPADAQDKTDYQTVFARVPGAVAAPTASLHFDDALLAQLKERGVEFTHVTLHVGAGTFLPVKVEDVTTHKMHAEWGEVSEQAAAEIAATRASGGRVIPVGTTALRLIESAARGGKIAPWRGETDIFIYPGFKFHVTDALMTNFHLPKSTLLMLVSALIGYEEMRVIYDHAVKTGYRFFSYGDSSLLIPR

SEQ ID NO: 70240 - protein, 409 aa, Phaeodactylibacter luteus
  misc_feature (1)..(409): tr|A0A5C6RJ47|A0A5C6RJ47_9BACT S-adenosylmethionine:tRN A ribosyltransferase-isomerase OS=Phaeodactylibacter lu teus OX=1564516 GN=queA PE=3 SV=1
MRPQEIDINEYNYDLPEERIAKFPLEQRDASKLLIYKNGHLSHGVFRELPGLLPEQALLVFNNTRVIHARLHFALPNGKPLEILCLEPLSPAEHQQSFSSTQAVHWKCMVGGNRRWKSGEIAKTVAGPSGEVNLSATRIGRTADAFEIRFEWDDPTLAFGELLAAAGIIPLPPYLNRENTPEDEDRYQTVYAEEEGSVAAPTAGLHFTDEVLRELEKQGAQRAFVTLHVGAGTFKPVTADRLEGHHMHEESIFIHPDTLQQLAAHLEAGHPVIPVGTTSTRLLESLYWHGRKVLDGGAAPFASVGQWEPYEGKPDVAPAEALRATVEHLKVNGQEHLQGFTRLIIAPGYTFRICSGMITNFHQPRSTLLLLIAALIGKDWKAAYQYALDNSFRFLSYGDSSLLLGQGVR

SEQ ID NO: 70241 - protein, 354 aa, Phaeodactylibacter luteus
  misc_feature (1)..(354): tr|A0A5C6S372|A0A5C6S372_9BACT S-adenosylmethionine:tRN A ribosyltransferase-isomerase OS=Phaeodactylibacter lu teus OX=1564516 GN=queA PE=3 SV=1
MRTKLSQFDFDLPSDRIAKHPEKNRHDSKLMVIHRDSGKIEHRQFKDILEYFDEGDTMIFNNTKVFPARLYGQKEKTGADIEVFLLRELNSDSRLWDVLVDPARKIRVGNKLYFCDEHGNEVLVAEVVDNTTSRGRTIRFIYEDSDEAFQRDLNRLGTTPLPKEIGRKAEPADRDRFQTVFAKELGAVAAPTAGLHYSEELMKRLEIKGVEFAELTLHIGLGTFRSIDVEDLSKHKMDAEYFRITDRAVDTVNRSKTEGHRVCAVGTTTMRSIESAVSAEGLLKEAEGWTNLFIYPPYEFSIADAMVTNFHLPKSSLMIMVCAFGGYDLIMEAYKQALKEGYRFFSYGDAMLIL

SEQ ID NO: 70242 - protein, 417 aa, Phaeodactylibacter xiamenensis
  misc_feature (1)..(417): tr|A0A098S0H6|A0A098S0H6_9BACT S-adenosylmethionine:tRN A ribosyltransferase-isomerase OS=Phaeodactylibacter xi amenensis OX=1524460 GN=IX84_26530 PE=3 SV=1
MRTNYQSLVDPKSINIKNFSYELPESRIAKFPLEERDASKLLYYNGGKIDAHSFRALPELLPEGALLVFNNTKVIHARLHFTLPNDKRLEILCLEPLAPAEYQQNFSSAQKVRWKCLVGGNRKWKTGVIEKTITTELGDVQLQATRIGRMENAFEVEFEWNDDRIAFGSLLAAAGIIPLPPYLNRENVPEDEDRYQTVYAKTKGSVAAPTAGLHFTDRVFDDLKEKGISTLEVTLHVGAGTFKPVSAEALADHHMHEESIYINLATLNTLIAHLEQGKPIIPVGTTSMRLLESLYWHGQSLCSGQPASFIDVQQWTPYEEGKRPSTLESFQAVRQAMEAQQQETVQGYTQLIIAPGYTFRVCNGIITNFHQPQSTLLLLIAALIGEDWKKVYDFALSEGFRFLSYGDSSLLLPGSQN

SEQ ID NO: 70243 - protein, 354 aa, Phaeodactylibacter xiamenensis
  misc_feature (1)..(354): tr|A0A098RZ29|A0A098RZ29_9BACT S-adenosylmethionine:tRN A ribosyltransferase-isomerase OS=Phaeodactylibacter xi amenensis OX=1524460 GN=queA PE=3 SV=1
MRTKLSQFDFTLPPELIAKYPADNRHDSRLMVVHRDSGKIEHRTFKDILEYFDEGDAMIFNNTKVFPARLYGKKEKTGADIEVFLLRELNSESRLWDVLVDPARKIRVGNKLYFSDEHDNDVLVAEVVDNTTSRGRTIRFIYDDSDENFQKDLHRLGTTPLPKEIGRKAETLDRDRYQTLFAKEMGAVAAPTAGLHYSDELLKRLEIKGVEFAELTLHIGLGTFRSIDVEDLSKHKMDAEYFKIDNNAVETVNKAKAGEHRVCAVGTTSMRAIESAVSAENMLKEAEGWTNLFIYPPYEFSIPDAMVTNFHLPKSSLMIMVCAFGGYDLIMEAYKQAVKEKYRFFAYGDAMLII

SEQ ID NO: 70244 - protein, 347 aa, Phaeospirillum fulvum
  misc_feature (1)..(347): tr|A0A1H6HG22|A0A1H6HG22_PHAFV S-adenosylmethionine:tRN A ribosyltransferase-isomerase OS=Phaeospirillum fulvum OX=1082 GN=queA PE=3 SV=1
MKVDIFDFDLPRELIAERPARPRDSARMLRVGADGIADGGVRDLPALLCPGDVMVFNDTRVIPARLDGKRGTASVELTLHLRKDESCWRAFARPAKKLRPGDRIDFAADFSATVETKGEAGEVTLRFDRGGPALMAALEAHGRLPLPPYIRHGEADATDRADYQTTFARADGAVAAPTAGLHFTPELLAALDQRGVVRTTVTLHVGAGTFLPVKVDDTDDHKMHAEIGIVTEDSARTINAARAAGGRVIAVGTTALRLLESAAGEDGQVRPFAAATDIFIVPGYRFRAVDRLMTNFHLPRSTLFMLVSAFAGLERMRAAYAHAMASGYRFYSYGDSCLLDRNDDDQL

SEQ ID NO: 70245 - protein, 345 aa, Phaeospirillum fulvum
  misc_feature (1)..(345): tr|S9TYG4|S9TYG4_PHAFV S-adenosylmethionine:tRNA ribosy ltransferase-isomerase OS=Phaeospirillum fulvum MGU-K5 OX=1316936 GN=queA PE=3 SV=1
MDIFDFDLPRELIAERPARPRDSARMLRVAADGIGDGGVRDLPDLLCPGDVLVFNDTRVIPARLDGKRGTASVELTLHLREDESCWRAFARPAKKLRPGDRIDFAADFSASVEEKGEAGEVLLRFDRGGPALMAALEAHGRLPLPPYIRHGEADETDRADYQTTFARTDGAVAAPTAGLHFTPELLAALDQRGVKRVAVTLHVGAGTFLPVKAEDTDDHKMHAEIGVVSDEAARAINVARAAGGRVIAVGTTALRLLESAAGEDGQVRPFAAATDIFIVPGYRFRVVDRLMTNFHLPRSTLFMLVSAFAGLDRMRAAYAHAMASGYRFYSYGDSSLLDRNDDDQL

SEQ ID NO: 70246 - protein, 343 aa, Phaeospirillum molischianum
  misc_feature (1)..(343): tr|H8FU19|H8FU19_PHAMO S-adenosylmethionine:tRNA ribosy ltransferase-isomerase OS=Phaeospirillum molischianum D SM 120 OX=1150626 GN=queA PE=3 SV=1
MFDFDLPRALIAERPARPRDSARMLRVSADGVKDRGVRDLPSQLCPGDVMVFNDTRVIPARLNGKRGTASVELTLHLREDDSCWRAFARPAKKLRPGDRIAFAEDFSAIVEEKGEAGEVTVRFDRGGVALMAALETHGRLPLPPYIRHGEADETDRADYQTTFARTDGAVAAPTAGLHFTPELLEALDRRGVKRVAVTLHVGAGTFLPVKVDDTDDHRMHAEIGVVSADSAQAINEARAAGGRVVAVGTTALRLLESAAGEDGLVRPYAAATDIFIVPGYRFRAVDLLMTNFHLPRSTLFMLVSAFAGLDRMRAAYAHAMASGYRFYSYGDSCLLDRNDDDQL

SEQ ID NO: 70247 - protein, 342 aa, Phascolarctobacterium faecium
  misc_feature (1)..(342): tr|A0A3G9GT33|A0A3G9GT33_9FIRM S-adenosylmethionine:tRN A ribosyltransferase-isomerase OS=Phascolarctobacterium faecium OX=33025 GN=queA PE=3 SV=1
MQVKDFTYELPQELIAQYPLEPRDHSRLLVLDKNTGAIEHRYFYDLCEYLRHDDLLVFNDTRVIPARLHGVKDTGARVEVFLLTRLNSTDWEVLVKPGRKLRVGAKIKFSDELSCDIIADTDFGGRIARFYYNGVFEEILDRLGETPLPPYITAPLEDKERYQTVYSRENGSAAAPTAGLHFTKELLQKIRDIGCEEVFVTLHVGLGTFRPVSVDDIKDHVMHREFYSVSPEAAEAINKAKAEGRRIVAVGTTAVRTLEAAGESGVIKAGGNWTNIFIYPGYRFRLVNSLITNFHLPQSTLLMLVSALSTREIMLSTYAEAVREHYRFFSFGDAMFITDLNK

SEQ ID NO: 70248 - protein, 342 aa, Phascolarctobacterium sp.
  misc_feature (1)..(342): tr|R6I8F7|R6I8F7_9FIRM S-adenosylmethionine:tRNA ribosy ltransferase-isomerase OS=Phascolarctobacterium sp. CAG :207 OX=1262914 GN=queA PE=3 SV=1
MQVKDFTYELPQELIAQYPLEPRDHSRLLVVDKNTGAIEHRYFYDLCEYLRHDDLLVFNDTRVIPARLHGVKDTGARVEVFLLTRLNSTDWEVLVKPGRKLRVGAKIKFSDDLSCDIIADTDFGGRIARFYYNGAFEEILDRLGETPLPPYITAPLEDKERYQTVYSRENGSAAAPTAGLHFTKELLQKIRDIGCEEVFVTLHVGLGTFRPVSVDDIKDHVMHREFYSVSPEAAEAINKAKAEGRRIVAVGTTAVRTLEAAGESGVIKAGGNWTNIFIYPGYRFRLVNSLITNFHLPQSTLLMLVSALSTREIMLSTYAEAVREHYRFFSFGDAMFITDLNK

SEQ ID NO: 70249 - protein, 343 aa, Phascolarctobacterium sp.
  misc_feature (1)..(343): tr|A0A316S430|A0A316S430_9FIRM S-adenosylmethionine:tRN A ribosyltransferase-isomerase OS=Phascolarctobacterium sp. OX=2049039 GN=queA PE=3 SV=1
MQVSDFNYDLPQELIAQTPMEPRDHSRLLVVDKDTGKIEHRHFYDLPNYLRPDDLLVFNDTRVIPARLHGVKDTGAKAEVFLLTRLNATDWEVLVRPGKRLRTGANIKFSDDLSCEIIDNTEFGGRIARFKFDGVFEEILDRLGETPLPPYITKQLEDKERYQTVYSRDKGSAAAPTAGLHFTKELLQKVKDMGCEEVFVTLNIGLGTFRPVSVENIEDHIMHKEFYTITPEAADAINKAKAAGRRIVSVGTTAVRTLEAAATANNGVIKPGAAWTDIFIYPGYKFKMVDALVTNFHLPQSTLLMLVSTLSTREIMLKTYEEAVREKYRFFSFGDAMFITDHL

SEQ ID NO: 70250 - protein, 342 aa, Phascolarctobacterium succinatutens
  misc_feature (1)..(342): tr|E8LGA7|E8LGA7_9FIRM S-adenosylmethionine:tRNA ribosy ltransferase-isomerase OS=Phascolarctobacterium succina tutens YIT 12067 OX=626939 GN=queA PE=3 SV=1
MLVTDFDYDLPQELIAQHPMEPRDHSRLLVVDKKTGEIEHKHFYDLVNYLKPGDVLVFNDTRVIPARLHGTKDTGAHVEVFLLTRRDATDWEVLVRPGKKLQVGAKINFSDELSCEVIEHTDFGGRVVRFKYDGIFEEILDRLGETPLPPYITAPLEDKERYQTVYNRERGSAAAPTAGLHFTKELLQKIKEIGCEEVFVTLHVGLGTFRPVSEAKIEDHKMHKEFYTVSQEAADAVNKAKAEGRRIIAVGTTAVRTLEAAGADGQLHAGSSWTNIFIYPGYKFRLVDDLVTNFHLPQSTLLMLVSTLSTREIMLQTYKKAVEEKYRFFSFGDAMFITDLNK

SEQ ID NO: 70251 - protein, 342 aa, Phascolarctobacterium succinatutens
  misc_feature (1)..(342): tr|A0A3C1IMA9|A0A3C1IMA9_9FIRM S-adenosylmethionine:tRN A ribosyltransferase-isomerase OS=Phascolarctobacterium succinatutens OX=626940 GN=queA PE=3 SV=1
MLVTDFDYDLPQELIAQHPMEPRDHSRLLVVDKKTGEIEHKHFYDLVNYLKPGDVLVFNDTRVIPARLHGTKDTGAHVEVFLLTRRDATDWEVLVRPGKKLQVGAKINFSDELSCEVIEHTDFGGRVVRFKYDGIFEEILDRLGETPLPPYITAPLEDKERYQTVYNRERGSAAAPTAGLHFTKELLQKIKEIGCEEVFVTLHVGLGTFRPVSEAKIEDHKMHKEFYTVSQEAADAVNKAKAEGRRIIAVGTTAVRTLEAAGADGQLHAGSSWTNIFIYPGYKFRLVDDLVTNFHLPQSTLLMLVSTLSTREIMLQTYKKAVEEKYRFFSFGDAMFITELNK

SEQ ID NO: 70252 - protein, 357 aa, Phenylobacterium deserti
  misc_feature (1)..(357): tr|A0A328ABZ9|A0A328ABZ9_9CAUL S-adenosylmethionine:tRN A ribosyltransferase-isomerase OS=Phenylobacterium dese rti OX=1914756 GN=queA PE=3 SV=1
MRLADFDFILPEESIALRPANPRDSARLLLVEPGAPLQDLRVYDLPGLLRSGDILVLNDTRVIPARLKGVRLRGESRVACEATLHKRLSAHVWTAFMRPGKKLSPGDRIAFGATSDAACLLSALDATVKEKGEGGEVTLAFDLSGPDLDVAISERGAMPLPPYIAAKRGEDEKDRADYQTVYAQEDGSVAAPTAGLHFTPQLFAGLEAAGVQTAFVTLHVGAGTFLPVKSEDLSEHRMHAEWGEVDEATADRLNAVRAAGGRIICVGTTSLRLLESAAGEDGVIRPFMDETSIFITPGYRFRAADGLMTNFHLPKSTLFMLVSAFAGYETMRAAYAHAIESGYRFYSYGDSSLLWRA

SEQ ID NO: 70253 - protein, 358 aa, Phenylobacterium hankyongense
  misc_feature (1)..(358): tr|A0A328B1K6|A0A328B1K6_9CAUL S-adenosylmethionine:tRN A ribosyltransferase-isomerase OS=Phenylobacterium hank yongense OX=1813876 GN=queA PE=3 SV=1
MQLADFDFDLPEDRIALRPASPRDSARLLVVEPGQALRDLQVRDLPGLLRAGDILVLNDTRVIPARLKGVRRREATSMRVEATLHKRLSPHAWTAFMRPGKRLAVGDRVSFGETDDRACLLGALDATVKAKGEGGEVTLAFDLSGPDLDAAIAERGAMPLPPYIAAKRGEDAQDRTDYQTVYAEEDGSVAAPTAGLHFTPELFARLAEAGVETAFVTLHVGAGTFLPVKTENLAEHRMHAEWGEVDAATAERLNAVRRAGGRIVCVGTTSLRLLESATGEDGVVRPFMDETAIFITPGYRFRAADGLVTNFHLPKSTLFMLVSAFAGLETMRAAYAHAIATGYRFYSYGDGSLLWRAA

SEQ ID NO: 70254 - protein, 358 aa, Phenylobacterium kunshanense
  misc_feature (1)..(358): tr|A0A328BNJ7|A0A328BNJ7_9CAUL S-adenosylmethionine:tRN A ribosyltransferase-isomerase OS=Phenylobacterium kuns hanense OX=1445034 GN=queA PE=3 SV=1
MKLADFDFHLPEERIALRPAIPRDSARLLLVEPGAALRDLHVRDLPGLLRAGDVLVVNDTRVIPARLKGVRLRGESRVAVEATLHRQLSGHVWTAFMRPGKKLAPGDRISFGEPSDRACLLGALDATVREKGEGGEVTLAFDLSGPDLMAAIAERGMMPLPPYIAAKRGEDAQDRADYQTIYAAEDGSVAAPTAGLHFTPELLGRLEAMGVGFERVTLHVGAGTFLPVKTDELADHRMHAEWGEIDAATADRLNAARAAGGRVICVGTTSLRLLESAADETGAIRPFAAETAIFITPGYRFRAVDGLMTNFHLPKSTLFMLVCAFAGFETMKAAYAHAIADGYRFYSYGDASLLWREV

SEQ ID NO: 70255 - protein, 358 aa, Phenylobacterium sp.
  misc_feature (1)..(358): tr|A0A525JAW7|A0A525JAW7_9CAUL S-adenosylmethionine:tRN A ribosyltransferase-isomerase OS=Phenylobacterium sp. OX=1871053 GN=queA PE=3 SV=1
MQLSDFDFDLPDSLIALRPATPRDAARLLVVTPGEGLADLAVRDLPGRLRRGDILVLNDTRVIPARLKGVRHRGESRVAVEATLHRRLSPASWTAFMRPGKRLAEGDRVVFGEAADRACFLGALDATITAKGDGGEVTLAFDLSGPDLDAAIAERGEMPLPPYIAAKRAEDEQDRRDYQTVYADEDGSVAAPTAGLHFTPELFAALAAAGVETAFVTLHVGAGTFLPVKTEDVSEHRMHPEWGEVDAGTAERLNAARAAGGRIVCVGTTSLRLLESATGEDGVIRPFMDETAIFITPGYRFRAADGLMTNFHLPKSTLFMLVSAFAGLDTMRAAYAHAIAEGYRFYSYGDASLLWRAA

SEQ ID NO: 70256 - protein, 359 aa, Phenylobacterium sp.
  misc_feature (1)..(359): tr|A0A1E4GV90|A0A1E4GV90_9CAUL S-adenosylmethionine:tRN A ribosyltransferase-isomerase OS=Phenylobacterium sp. SCN 70-31 OX=1660129 GN=queA PE=3 SV=1
MKLADFDFHLPDNRIALRPADPRDSARLLVVEPALPLRDETVRDLPGELRSGDVLVVNDTRVIPARLKGVRLRGDSRVVVEATLHRQTGPAAWTAFMRPGKRLAEGDRVVFGEPGDRACLLGSLEATVTGKGDGGEVFLAFDLAGPDLMAAIAERGVMPLPPYIAAKRPEDERDRADYQTVYAEADGSVAAPTAGLHFTPELLARLTAMGVGFERVTLHVGAGTFLPVKTEDLADHRMHAEWGEVPEEVADRLNAARDAGGRIVCVGTTSLRLLESAADESGRIRPFSAETAIFITPGYRFRAADGLMTNFHLPKSTLFMLVSAFAGLDAMRAAYAHAIGTGYRFYSYGDSSLLWRAGR

SEQ ID NO: 70257 - protein, 348 aa, Phenylobacterium zucineum
  misc_feature (1)..(348): tr|A0A227JQE2|A0A227JQE2_9CAUL S-adenosylmethionine:tRN A ribosyltransferase-isomerase OS=Phenylobacterium zuci neum OX=284016 GN=queA PE=3 SV=1
MQLSDFDFDLPETAIALRPAEPRDSARMLLVRPGARWADLRVSDLPSQLRAGDVLVLNDTRVIPARMSATRIRGASEIRTEATLHQRLAPDTWSAFMRPGKRLSPGDDLVFGGCLTASVVEKREGGEVVLNFSLSGLALDLAVAEIGVMPLPPYIAAKRPQDQRDKADYQTVYAAADGSVAAPTAGLHFTPSLLAQIEALGVHLAFVRLHVGAGTFLPVKVDDIATHKMHAEYGEVTSATADTINAARAAGGRVVCVGTTSLRLIESAADQDGRVHPFADETAIFITPGYRFRAVDGLMTNFHLPKSTLFMLVSAFAGLEVMREAYRRAIDTGYRFYSYGDSSLLWRA

SEQ ID NO: 70258 - protein, 357 aa, Phenylobacterium zucineum
  misc_feature (1)..(357): sp|B4R9Q3|QUEA_PHEZH S-adenosylmethionine:tRNA ribosylt ransferase-isomerase OS=Phenylobacterium zucineum (stra in HLK1) OX=450851 GN=queA PE=3 SV=1
MKLADFDFDLPEEAIALRPANPRDAARLLLVEPGQDFRDLAVRDLPGLLRAGDVLVLNDTRVIPARLKGVRTREGSRVAVEATLHQRKAGHVWTAFMRPGKRLAPGDRVSFGETDDRACFLGALDATVKEKGEGGEVTLAFDLSGPDLDAAIAERGAMPLPPYIAAKRAEDEQDRADYQTVYAEEDGSVAAPTAGLHFTPELLARLAQAGVTTERVTLHVGAGTFLPVKTEDISEHRMHAEWGEVDAATADRLNAARAAGGRIVCVGTTSLRLLESAAGEDGVVRPFRDETAIFITPGYRFRAADGLMTNFHLPKSTLFMLVCAFAGTDTMRAAYRHAIETGYRFYSYGDSSLLWRA

SEQ ID NO: 70259 - protein, 363 aa, Phocoenobacter uteri
  misc_feature (1)..(363): tr|A0A379CB03|A0A379CB03_9PAST S-adenosylmethionine:tRN A ribosyltransferase-isomerase OS=Phocoenobacter uteri OX=146806 GN=queA PE=3 SV=1
MLLSDFHFDLPNELIARYPTKQRSASRLLYVNGETGQYQDQQFTHILEHINEGDLLIFNNTRVIPARLYGKKLSGGKLEVLVERVLDEHRCLAHIRCSKSPKEGATIILGEDKLGEGNGFKATMVTRHETLFELRFEEQQPLFELLERAGHMPLPPYIDRPDEDTDQERYQTVYSKELGAVAAPTAGLHFDDEMLQKLAEKGVQTAFVTLHVGAGTFQPVRVETIEDHKMHAEYAQVSQEVVDKILATKANGKRVIAVGTTSVRSVESAAQQAELGEQLIAPFFSDTSIFIYPGKSFRVIDALLTNFHLPESTLIMLVSAFAGYSNCMQAYQHAVAEKYRFFSYGDAMFIDKNPNALNDVPSK

SEQ ID NO: 70260 - protein, 343 aa, Phorcysia thermohydrogeniphila
  misc_feature (1)..(343): tr|A0A4R1GB91|A0A4R1GB91_9BACT S-adenosylmethionine:tRN A ribosyltransferase-isomerase OS=Phorcysia thermohydro geniphila OX=936138 GN=queA PE=3 SV=1
MKVSDFDYELPKELIAKFPVEPRDSARLMVLHRDSGKLEHRIFRDIVEYLKEGDVLVLNDTKVIPARLFGRLETGGKVELLLVRQPLPNLWEVMAKPARKLKEGKRIIFDEELEGIVKGYAGEGRRLVEFKVKGNKDFMEKLEKVGHIPLPPYIEREERPEDREKYQTVFAQKPGAVAAPTAGLHFTEELLEKLRDKGVIIKTVTLHVGPGTFKPVKVENVEEHQMDYETYNVPEETAKEVNRAKDEGRRVIAVGTTVVRTLESAADESGRVKSGEGSTNLFIYPGYRFKVIDALITNFHLPRSTLLMLVSAFAGRERILNAYREAVKEGYRFYSYGDAMLIL

SEQ ID NO: 70261 - protein, 457 aa, Phormidesmis priestleyi
  misc_feature (1)..(457): tr|A0A0P7YU20|A0A0P7YU20_9CYAN S-adenosylmethionine:tRN A ribosyltransferase-isomerase OS=Phormidesmis priestle yi Ana OX=1666911 GN=queA PE=3 SV=1
MLQSNSFVYCSVDHKTLNSIMAQCSPTSRDRQLSAYNYHLPAALIAQNPVTPRDSSRLLVVKEAVAEKAVAEKAVAEKAVAEKAQNYQHRHFRDLAELLLPGDLLVLNNTRVIPARLFGRKQIDTFRSNTSPADDLLNETRSGAQSTYSVGSAVVEVLLIEPIDADRWLALVKPGRRLQPGATIVFGEPESPMMHALVESRDESTNGRVLRLIPQGDRTIEEIIYQLGQIPLPPYITQSNSLPEQYQTIYARKQSQRTGTSLGEKSAENPSTASLVGSVAAPTAGLHFTDRLLTELAEKNIQTAEVTLHVGIGTFRPVEVSDIETHQMHQERIEVPAATVEKIQQTKANGGRVIAVGTTSTRALEGAAAISGKLQPYNGKTELFIYPGYQWRVIDGLITNFHLPGSSLMMMVSALIGRERLLALYEVAIQSEYRFYSFGDAMLILPEATLNRQTTAQ

SEQ ID NO: 70262 - protein, 370 aa, Phormidesmis priestleyi
  misc_feature (1)..(370): tr|A0A2T1D7H0|A0A2T1D7H0_9CYAN S-adenosylmethionine:tRN A ribosyltransferase-isomerase OS=Phormidesmis priestle yi ULC007 OX=1920490 GN=queA PE=3 SV=1
MLDRVDADFLLSAYDYELPKEQIAQTAAIPRDSAQLLVVDDQTQHSHHIFRELPDLLKSGDLLVLNNTRVLPARLYGQKPGGTEVEVLLLEEQQKDQWLALVKPGRRLKPGSKILFTPLRSDCSISLSAIVIASDEATRGRIIEFEISGNHSLLDVLDQFGQLPLPPYITDRDSQPEQYQTVYADRLGAVAAPTAGLHFTPELLDRLQQKGIDQAFVTLHVGVGTFRPVETEDITHHQMHGEWVEVSPEAVEQIRQTKNRGGRVIAVGTTSVRSLEAAAQTGEIQPYYGKTSLFIYPGYRWRVVEGLITNFHLPKSSLLMLVSALIGRERLLKLYQDAIEQHYRFYSFGDAMLILPEAKIDLTRECGDRL

SEQ ID NO: 70263 - protein, 377 aa, Phormidium ambiguum
  misc_feature (1)..(377): tr|A0A1U7I6Z5|A0A1U7I6Z5_9CYAN S-adenosylmethionine:tRN A ribosyltransferase-isomerase OS=Phormidium ambiguum I AM M-71 OX=454136 GN=queA PE=3 SV=1
MNQPKSASLSSPSLIGKSEEDLLLSAYDYELPDDRIAQNPVTPRDSSRLLVISSPTQHSHQIFRDLVELLKPGDLLVMNNTRVIPARLYGRKNTGTPVEILLLQEQKNNCWLALVKPGRRLQPGTEIYFQSKNSSENGGEFRLSAKVLAKDEATGGRILEFNIPEGKSLIPLLDEFGHVPLPPYIKDSESLPKQYQTIYAQTPGSVAAPTAGLHFTPELLEKLTAKGVEQTFVTLHIGVGTFRPVEAQKITEHQMHGEWVEISEATVAKIQETKARGGRVIAVGTTAVRSLEGASQNGELRPFCGQTELFIYPGYQWRVVEGLITNFHLPRSSLMMLVSALVGRKRLLSLYEEAIAQNYRFYSFGDAMLILPEARIN

SEQ ID NO: 70264 - protein, 366 aa, Phormidium sp.
  misc_feature (1)..(366): tr|A0A522XFV0|A0A522XFV0_9CYAN S-adenosylmethionine:tRN A ribosyltransferase-isomerase OS=Phormidium sp. SL48-S HIP OX=2518363 GN=queA PE=3 SV=1
MIPTSEDDLQLDSYDYHLPEERIAQNPVTPRDHSRLLVVHSPQDHSHQVFWQLPNWLKAGDLLVLNDTRVLPARLHGHKSSGAKVEVLLLEEQTEDRWLALVKPGKRLKPGAEIRFDAPNGSPTEDFGTFRAKVLTTDEATGGRVLQLIPPSGQTVLETLEDYGEVPFPPYVTQSQADSSQYQTVYAREARSAAAPTAGLHFTPDLLQRLHEQGISQAFVTLHVGVGTFRPVETSDIRRHVMHQEWLDVPATTVEAIRQTRSRGGRVIAVGTTAVRSLESAAGQQPSGEIAPFSGKTDLFIYPGYRWRVVDGLITNFHLPKSSLMMMVSALLGRQRLLGLYEEAIAENYRFFSFGDAMLIMPEARS

SEQ ID NO: 70265 - protein, 372 aa, Phormidium sp.
  misc_feature (1)..(372): tr|A0A0P8DAC9|A0A0P8DAC9_9CYAN S-adenosylmethionine:tRN A ribosyltransferase-isomerase OS=Phormidium sp. OSCR O X=1666905 GN=queA PE=3 SV=1
MIPTSEDDLQLDSYDYHLPEERIAQNPVTPRDHSRLLVVHSPQDHSHQVFWQLPNWLKAGDLLVLNDTRVLPARLYGHKPSGAKVEVLLLEEQAENRWLALVKPGKRLKPGAEIRFDASQRFDASQKSSAAGLGAFQAKVLTTDEATGGRVLQLIPPSGRTVLDTLEDYGEVPFPPYVTQSQADSSQYQTVYAREARSAAAPTAGLHFTPDLLHQLHEQGVSQAFVTLHVGVGTFRPVETSDIRKHVMHQEWLDVPATTVEAIRQTRARGGRVIAVGTTAVRSLEAAAGQQPSGEITPFSGKTDLFIYPGYRWRVVDGLITNFHLPKSSLMMMVSALLGRQRLLELYEEAIAENYRFFSFGDAMLIMPEARS

SEQ ID NO: 70266 - protein, 377 aa, Phormidium tenue
  misc_feature (1)..(377): tr|A0A1U7J1V5|A0A1U7J1V5_9CYAN S-adenosylmethionine:tRN A ribosyltransferase-isomerase OS=Phormidium tenue NIES -30 OX=549789 GN=queA PE=3 SV=1
MRDSSQLAPETDSRAQLPSDEYSLAAYQYSLPSEKIAQTPVTPRDSSRLLVVDGPTTHGHYHFRDLPALLHPGDLLVLNDTRVIPARLPGYKPSGAQVEVFLLEDRGDNQWLALVRPGRRLKPGATVHFGPNPNQPDLVAQVLATDPETNGRLLKFAPQGSESLLALFERLGEVPLPPYITDTAASAEQYQTVYAETPGAVAAPTAGLHFTPELFERLEEKGIGRSHITLHVGVGTFRPVEAENILDHKMHGEWIDVSAETVAQINATRARGRRVIAVGTTVVRALEGAAQGGELQPYQGKVNLFIYPGYEYRAIDGLITNFHLPGSSLLMLVSALIGRERLLGLYETAIQHDYRFYSFGDAMLILPEAVQGENIER

SEQ ID NO: 70267 - protein, 366 aa, Phormidium willei
  misc_feature (1)..(366): tr|A0A168SYC5|A0A168SYC5_9CYAN S-adenosylmethionine:tRN A ribosyltransferase-isomerase OS=Phormidium willei BDU 130791 OX=399101 GN=queA PE=3 SV=1
MIPTSEDDLQLDSYDYHLPKERIAQNPVTPRDHSRLLVVHSPQDHSHQVFWQLPNWLKAGDLLVLNDTRVLPARLHGHKPSGAKVEVLLLEEQAEDRWLALVKPGKRLKPGAEIRFDAPQGSSAADLGSFQAQVLTTDEATGGRVLQLIPPSGRTVLETLEVYGEVPFPPYVTQSQADSSQYQTVYAREARSAAAPTAGLHFTPDLLQRLHEQGVSQTFVTLDVGVGTFRPVETSDIRKHVMHQEWLNVPATTVEAIRQTRSRGGRVIAVGTTAVRSLEAAANQQPSGEIRPFSGKTDLFIYPGYRWRVVDGLITNFHLPKSSLMMMVSALLGRQRLLGLYEEAIAENYRFFSFGDAMLIMPEARS

SEQ ID NO: 70268 - protein, 350 aa, Photobacterium angustum
  misc_feature (1)..(350): tr|Q1ZRC6|Q1ZRC6_PHOAS S-adenosylmethionine:tRNA ribosy ltransferase-isomerase OS=Photobacterium angustum (stra in S14 / CCUG 15956) OX=314292 GN=queA PE=3 SV=1
MQVSDFDFDLPDELIARYPQPERTASRLLQMTGNTGELAHKGFKDVLDLVQAGDLLVFNNTRVIPARMFGHKASGGKIEVLVERMLDDKSILAHVRASKPPKPGNELLLGENGEFSAEMVARHDALFEIRFNSDKTVLEILDAVGHMPLPPYIDRPDEDADKERYQTVYNAKPGAVAAPTAGLHFDDKLMADLKAKGVNFAFVTLHVGAGTFQPVRVDDINDHHMHSEYVEVPEEVVTAVNETRANGGRIIAVGTTSVRSLESAAQDALKNGTEFKPFFGDTEIFIYPGYQFQLVDVLITNFHLPESTLIMLVSAFAGYENTMNAYHEAVANKYRFFSYGDSMFITRKDV

SEQ ID NO: 70269 - protein, 350 aa, Photobacterium angustum; identical to SEQ ID NO: 70268
  misc_feature (1)..(350): tr|A0A2T3QG50|A0A2T3QG50_PHOAN S-adenosylmethionine:tRN A ribosyltransferase-isomerase OS=Photobacterium angust um OX=661 GN=queA PE=3 SV=1

SEQ ID NO: 70270 - protein, 350 aa, Photobacterium aphoticum
  misc_feature (1)..(350): tr|A0A090R0F0|A0A090R0F0_9GAMM S-adenosylmethionine:tRN A ribosyltransferase-isomerase OS=Photobacterium aphoti cum OX=754436 GN=queA PE=3 SV=1
MQVSDFHFDLPDELIARYPQPERTASRLLQLTGNTGELAHKSFKDVLDLVQAGDLLVFNNTRVIPARLFGQKASGGKIEVLVERMVDDKTILAHVRASKAPKPGNELLLGEQGEYQAEMVARHDALFEIRFNSDKTVLEILEDVGHMPLPPYIDRPDEDADKERYQTVYNAKPGAVAAPTAGLHFDDALMAALKEKGVNFAFVTLHVGAGTFQPVRVDNIHDHHMHAEYVEVPAEVVEAINTTKANGGRVVAVGTTSVRSLESAAQDALKKGTELKPFFGDTEIFIFPGYQFQLVDVLITNFHLPESTLIMLVSAFAGYDHTMNAYLQAVENQYRFFSYGDSMFITRQTN

SEQ ID NO: 70271 - protein, 350 aa, Photobacterium aquae
  misc_feature (1)..(350): tr|A0A0J1H2P2|A0A0J1H2P2_9GAMM S-adenosylmethionine:tRN A ribosyltransferase-isomerase OS=Photobacterium aquae OX=1195763 GN=queA PE=3 SV=1
MQVSDFHFDLPDELIARYPQPERTASRLLQLDGNTGELTHKGFKDVLDLVMPGDLLVFNNTRVIPARLFGRKASGGKIEVLVERMLDDKSILAHVRASKAPKPGNELLLGENDDYKAEMVARHDALFEIRFDSEKTVLEILEEVGHMPLPPYIDRPDEDADKERYQTVYNAKPGAVAAPTAGLHFDDELLAAIKAKGASFAFVTLHVGAGTFQPVRVDNILDHHMHAEYVEVPADVVAAVNETKANGGRVIAVGTTSVRSLESAAQDAVKNGTELKPFFGDTEIFIYPGYEFQLIDVLITNFHLPESTLIMLVSAFAGYEHTMNAYQQAVENKYRFFSYGDSMFVTRQVK

SEQ ID NO: 70272 - protein, 350 aa, Photobacterium aquimaris
  misc_feature (1)..(350): tr|A0A1Y6L1J8|A0A1Y6L1J8_9GAMM S-adenosylmethionine:tRN A ribosyltransferase-isomerase OS=Photobacterium aquima ris OX=512643 GN=queA PE=3 SV=1
MQVSDFDFELPDELIARYPQPERTASRLLHMTGNSGELAHKGFKDVLDLVEAGDLLVFNNTRVIPARMYGHKASGGKIEVLVERMLDDKSILAHVRASKPPKPGNELLLGEHGEFSAEMVARHDALFEIRFNSDKTVLEILDQVGHMPLPPYIDRPDEDADKERYQTVYNAKPGAVAAPTAGLHFDDKLMADLKAKGVNFAFVTLHVGAGTFQPVRVDDINDHHMHSEYVEVPQEVVTAVNQTRANGGRIIAVGTTSVRSLESAAQDAVKNGTELKPFFGDTEIFIYPGYQFQLVDVLITNFHLPESTLIMLVSAFAGYEHTMNAYHQAVANQYRFFSYGDSMFITRKNM

SEQ ID NO: 70273 - protein, 350 aa, Photobacterium aquimaris
  misc_feature (1)..(350): tr|A0A2T3IJH6|A0A2T3IJH6_9GAMM S-adenosylmethionine:tRN A ribosyltransferase-isomerase OS=Photobacterium aquima ris OX=512643 GN=queA PE=3 SV=1
MQVSDFDFELPDELIARYPQPERTASRLLHMTGNSGELAHKGFKDVLDLVEAGDLLVFNNTRVIPARMYGHKASGGKIEVLVERMLDDKSILAHVRASKPPKPGNELLLGEHGEFSAEMVARHDTLFEIRFNSDKTVLEILEQVGHMPLPPYIDRPDEDADKERYQTVYNAKPGAVAAPTAGLHFDDKLMADLKAKGVNFAFVTLHVGAGTFQPVRVDDINDHHMHSEYVEVPPEVVTAVNQTRANGGRIIAVGTTSVRSLESAAQDALKNGTELKPFFGDTEIFIYPGYQFQLVDVLITNFHLPESTLIMLVSAFAGYEHTMNAYHQAVANQYRFFSYGDSMFITRKNM

SEQ ID NO: 70274 - protein, 350 aa, Photobacterium carnosum
  misc_feature (1)..(350): tr|A0A2N4UMT6|A0A2N4UMT6_9GAMM S-adenosylmethionine:tRN A ribosyltransferase-isomerase OS=Photobacterium carnos um OX=2023717 GN=queA PE=3 SV=1
MQVSDFDFELPDELIARYPQPERTASRLLHMTGNTGELAHKGFKDVLDLVEAGDLLVFNNTRVIPARMYGHKASGGKIEVLVERMLDDKSILAHVRASKPPKPGMELLLGEHGEFSAVMVARHDTLFEIHFNSDKTVLEILDQVGHMPLPPYIDRPDEDADKERYQTVYNAKPGAVAAPTAGLHFDEKLMADLKAKGVNFAFVTLHVGAGTFQPVRVDDINDHHMHSEYVEVPEEVVTAVNETRANGGRIIAVGTTSVRSLESAAQDAIQKGTELKPFFGDTEIFIFPGYQFQLVDVLITNFHLPESTLIMLVSAFASYEYTMNAYHQAVANQYRFFSYGDSMFITRKNV

SEQ ID NO: 70275 - protein, 351 aa, Photobacterium damsela
  misc_feature (1)..(351): tr|A0A1V1V902|A0A1V1V902_PHODP S-adenosylmethionine:tRN A ribosyltransferase-isomerase OS=Photobacterium damsel a subsp. piscicida OX=38294 GN=queA PE=3 SV=1
MMQVSDFDFDLPDELIARYPQPERTSSRLLQLDGNSGDIAHKTFKDVLDLVNLGDLMIFNNTRVIPARMFGRKASGGKLEVLVERMLDEKSILAHVRASKSPKPGTELLLGENDEYSAEMVARHDALFEIRFNSDKTVLEILDEVGHMPLPPYIDRPDEDADKERYQTVYNAKPGAVAAPTAGLHFDDALLAALKEKGVNFAFVTLHVGAGTFQPVRVDNIDDHHMHSEYVEVPEEVVTAINETKANGGRVVAVGTTSVRSLESAAQDAVKNGTELKPFFGDTEIFIFPGYQFQLVDVLITNFHLPESTLIMLVSAFAGYEHTMNAYKDAVANQFRFFSYGDSMFVTRKTL

SEQ ID NO: 70276 - protein, 350 aa, Photobacterium damsela
  misc_feature (1)..(350): tr|A0A1Q9H799|A0A1Q9H799_PHODP S-adenosylmethionine:tRN A ribosyltransferase-isomerase OS=Photobacterium damsel a subsp. piscicida OX=38294 GN=queA PE=3 SV=1
MQVSDFDFDLPDELIARYPQPERTSSRLLQLDGNSGDIAHKTFKDVLDLVNLGDLMIFNNTRVIPARMFGRKASGGKLEVLVERMLDEKSILAHVRASKSPKPGTELLLGENDEYSAEMVARHDALFEIRFNSDKTVLEILDEVGHMPLPPYIDRPDEDADKERYQTVYNAKPGAVAAPTAGLHFDDALLAALKEKGVNFAFVTLHVGAGTFQPVRVDNIDDHHMHSEYVEVPEEVVTAINETKANGGRVVAVGTTSVRSLESAAQDAVKNGTELKPFFGDTEIFIFPGYQFQLVDVLITNFHLPESTLIMLVSAFAGYEHTMNAYKDAVANQFRFFSYGDSMFVTRKTL

SEQ ID NO: 70277 - protein, 351 aa, Photobacterium damselae
  misc_feature (1)..(351): tr|A0A2X1W8L8|A0A2X1W8L8_9GAMM S-adenosylmethionine:tRN A ribosyltransferase-isomerase OS=Photobacterium damsel ae OX=38293 GN=queA PE=3 SV=1
MMQVSDFDFDLPDELIARYPQPERTSSRLLQLDGNSGDIAHKTFKDVLDLVNPGDLMIFNNTRVIPARMFGRKASGGKLEVLVERMLDEKSILAHVRASKSPKPGTELLLGENDEYSAEMVARHDALFEIRFNSDKTVLEILDEVGHMPLPPYIDRPDEDADKERYQTVYNAKPGAVAAPTAGLHFDDALLAALKEKGVNFAFVTLHVGAGTFQPVRVDNIDDHHMHSEYVEVPEEVVTAINETKANGGRVVAVGTTSVRSLESAAQDAVKNGTELKPFFGDTEIFIFPGYQFQLVDVLITNFHLPESTLIMLVSAFAGYEHTMNAYKDAVANQFRFFSYGDSMFVTRKTL

SEQ ID NO: 70278 - protein, 350 aa, Photobacterium damselae
  misc_feature (1)..(350): tr|A0A2T3QQQ8|A0A2T3QQQ8_9GAMM S-adenosylmethionine:tRN A ribosyltransferase-isomerase OS=Photobacterium damsel ae OX=38293 GN=queA PE=3 SV=1
MQVSDFDFDLPDELIARYPQPERTSSRLLQLDGNSGDIAHKTFKDVLDLVNPGDLMIFNNTRVIPARMFGRKASGGKLEVLVERMLDEKSILAHVRASKSPKPGTELLLGENDEYSAEMVARHDALFEIRFNSDKTVLEILDEVGHMPLPPYIDRPDEDADKERYQTVYNAKPGAVAAPTAGLHFDDALLAALKEKGVNFAFVTLHVGAGTFQPVRVDNIDDHHMHSEYVEVPEEVVTAINETKANGGRVVAVGTTSVRSLESAAQDAVKNGTELKPFFGDTEIFIFPGYQFQLVDVLITNFHLPESTLIMLVSAFAGYEHTMNAYKDAVANQFRFFSYGDSMFVTRKTL

SEQ ID NO: 70279 - protein, 351 aa, Photobacterium frigidiphilum
  misc_feature (1)..(351): tr|A0A2T3JF69|A0A2T3JF69_9GAMM S-adenosylmethionine:tRN A ribosyltransferase-isomerase OS=Photobacterium frigid iphilum OX=264736 GN=queA PE=3 SV=1
MQVSDFHFDLPNELIARYPQPERTASRLLQLTGETGNIQHKGFKDVLDLAESGDLFVFNNTRVIPARIFGRKASGGKIEVLVERMLDDKSILAHVRASKSPKPGNELLLGENDDYQAEMIARHDTLFEIRFNSDKTVLEILEEVGHMPLPPYIDRPDEDADKERYQTVYNAKPGAVAAPTAGLHFDDELMAALKAKGVNFAFVTLHVGAGTFQPVRVDNIDDHHMHSEYVEVPQDVVDAVNATKANGGRIIAVGTTSVRSLESAAQDAVKKGTELVPFFGDTEIFIFPGYEFQLVDVLVTNFHLPESTLIMLVSAFAGYEHTMNAYLQAVDNQYRFFSYGDSMFITRRNNV

SEQ ID NO: 70280 - protein, 350 aa, Photobacterium gaetbulicola
  misc_feature (1)..(350): tr|A0A0B9FRQ4|A0A0B9FRQ4_9GAMM S-adenosylmethionine:tRN A ribosyltransferase-isomerase OS=Photobacterium gaetbu licola OX=1295392 GN=queA PE=3 SV=1
MQVSDFDFDLPDELIARYPQPQRTASRLLQLTGNTGELAHKGFKDVLDLVEPGDLLVFNNTRVIPARLFGRKASGGKLEVLVERMLDDKSILAHVRASKSPKPGNELFLGDNDEYQAEMVARHDALFEIRFNSDKTVLEILEEVGHMPLPPYIDRPDEDADKERYQTVYNAKPGAVAAPTAGLHFDDELMAALKAKGVNFAFVTLHVGAGTFQPVRVDNINDHHMHAEYVEVPEDVVAAINETKANGKRVVAVGTTSVRSLESAAQDAKQKGTELKPFFGDTEIFIYPGYEYQLIDVLITNFHLPESTLIMLVSAFAGYEHTMNAYKQAVENKYRFFSYGDSMFITRKTV

SEQ ID NO: 70281 - protein, 351 aa, Photobacterium gaetbulicola
  misc_feature (1)..(351): tr|A0A0C5WTM6|A0A0C5WTM6_9GAMM S-adenosylmethionine:tRN A ribosyltransferase-isomerase OS=Photobacterium gaetbu licola Gung47 OX=658445 GN=queA PE=3 SV=1
MMQVSDFDFDLPDELIARYPQPQRTASRLLQLTGNTGELAHKGFKDVLDLVEPGDLLVFNNTRVIPARLFGRKASGGKLEVLVERMLDDKSILAHVRASKSPKPGNELFLGDNDEYQAEMVARHDALFEIRFNSDKTVLEILEEVGHMPLPPYIDRPDEDADKERYQTVYNAKPGAVAAPTAGLHFDDELMAALKAKGVNFAFVTLHVGAGTFQPVRVDNINDHHMHAEYVEVPEEVVAAINATKANGKRVVAVGTTSVRSLESAAQDAKQKGTELKPFFGDTEIFIYPGYEYQLIDVLITNFHLPESTLIMLVSAFAGYEHTMNAYKQAVENKYRFFSYGDSMFITRKTV

SEQ ID NO: 70282 - protein, 350 aa, Photobacterium galatheae
  misc_feature (1)..(350): tr|A0A066RW39|A0A066RW39_9GAMM S-adenosylmethionine:tRN A ribosyltransferase-isomerase OS=Photobacterium galath eae OX=1654360 GN=queA PE=3 SV=1
MQVSDFHFDLPDELIARYPQPERSASRLLQLNGNSGDVQHQSFKNVLDLVQPGDLLVFNNTRVIPARMFGRKASGGKLEVLVERLLDDKSILAHVRASKAPKPGTQLLLGENDEFEAEMVARHDALFEIRFNSALTVLEILETVGHMPLPPYIDRPDEEADKERYQTVYNAKPGAVAAPTAGLHFDDQLLADIKAKGVEFAFVTLHVGAGTFQPVRVDDIHDHHMHAEYVEVPQDVVDAIKATRERGGRVIAVGTTSVRSLESAAQDALKQGTELVPFFGDTDIFIFPGYEFQLVDVLITNFHLPESTLIMLVSAFAGYEHTMNAYQQAVAQKYRFFSYGDSMFIHRRQA

SEQ ID NO: 70283 - protein, 350 aa, Photobacterium ganghwense
  misc_feature (1)..(350): tr|A0A0J1H7Q7|A0A0J1H7Q7_9GAMM S-adenosylmethionine:tRN A ribosyltransferase-isomerase OS=Photobacterium ganghw ense OX=320778 GN=queA PE=3 SV=1
MQVSDFHFDLPDELIARYPQPERTASRLLQLTGNNGELAHKGFKDVLDLVQPGDLLVFNNTRVIPARLFGRKASGGKLEVLVERMLDDKSILAHVRASKPPKPGNELLLGENDEYQAEMVARHDALFEIRFNSDKTVLEILEDVGHMPLPPYIDRPDEEADKERYQTVYNAKPGAVAAPTAGLHFDEMLLSAIKEKGVNLAFVTLHVGAGTFQPVRVDSIHDHHMHAEYVEVPQEVVTAIAETKANGGRVIAVGTTSVRSLESAAQDAVKNGTELKPFFGDTDIFIFPGYEFQLVDVLITNFHLPESTLIMLVSAFAGYEHTMNAYKEAVENRYRFFSYGDSMFITRKTA

SEQ ID NO: 70284 - protein, 350 aa, Photobacterium halotolerans
  misc_feature (1)..(350): tr|A0A0F5VHN3|A0A0F5VHN3_9GAMM S-adenosylmethionine:tRN A ribosyltransferase-isomerase OS=Photobacterium haloto lerans OX=265726 GN=queA PE=3 SV=1
MQVSDFHFDLPDELIARYPQPERSSSRLLQLDGNSGDVWHKSFRDVLDLVRPGDLLVFNNTRVIPARLFGRKASGGKLEVLVERLLDDKSILAHVRASKAPKPGTQLLLGENDEFEAEMVARHDALFEIRFNSALTVLEILEQVGHMPLPPYIDRPDEEADKERYQTVYNAKPGAVAAPTAGLHFDEQLLADIRAKGAELAFVTLHVGAGTFQPVRVDNIHDHHMHAEYVEVPQEVVDAIHATRARGGRVIAVGTTSVRSLESAAQDALKNGTDLVPFFGDTDIFIFPGYEFQLVDVLITNFHLPESTLIMLVSAFAGYENTMGAYQQAVEHSYRFFSYGDSMFITRRQD

SEQ ID NO: 70285 - protein, 350 aa, Photobacterium iliopiscarium
  misc_feature (1)..(350): tr|A0A2T3MB71|A0A2T3MB71_9GAMM S-adenosylmethionine:tRN A ribosyltransferase-isomerase OS=Photobacterium iliopi scarium OX=56192 GN=queA PE=3 SV=1
MQVSDFDFELPDELIARYPQPERTASRLLHMTGNTGELAHKGFKDVLDLVEAGDLLVFNNTRVIPARMYGHKASGGKIEVLVERMLDDKSILAHVRASKPPKPGMELLLGEHGEFSAVMVARHDTLFEIRFNSDKTVLEILDQVGHMPLPPYIDRPDEDADKERYQTVYNAKPGAVAAPTAGLHFDEKLMADLKAKGVNFAFVTLHVGAGTFQPVRVDDINDHHMHSEYVEVPEEVVTAVNETRANGGRVIAVGTTSVRSLESAAQDAIKKGTELKPFFGDTEIFIFPGYQFQLVDVLITNFHLPESTLIMLVSAFASYEYTMNAYHQAVVNQYRFFSYGDSMFITRKNV

SEQ ID NO: 70286 - protein, 351 aa, Photobacterium indicum
  misc_feature (1)..(351): tr|A0A2T3LC58|A0A2T3LC58_9GAMM S-adenosylmethionine:tRN A ribosyltransferase-isomerase OS=Photobacterium indicu m OX=81447 GN=queA PE=3 SV=1
MQVSDFHFDLPDELIARYPQPERTASRLLQLTGETGNIQHKGFKDVLDLAEPGDLFVFNNTRVIPARIFGRKASGGKIEVLVERMLDDKSILAHVRASKSPKPGNELLLGENDDYQAEMIARHDTLFEIRFNSDKTVLEILEEVGHMPLPPYIDRPDEDADKERYQTVYNAKPGAVAAPTAGLHFDDELMAALKAKGVNFAFVTLHVGAGTFQPVRVDNIDDHHMHSEYVEVPQDVVDAVNATKANGGRVIAVGTTSVRSLESAAQDAVKKGTELVPFFGDTEIFIFPGYEFQLVDVLVTNFHLPESTLIMLVSAFAGYEHTMNAYLQAVDNQYRFFSYGDSMFITRRNNV

SEQ ID NO: 70287 - protein, 352 aa, Photobacterium jeanii
  misc_feature (1)..(352): tr|A0A178KAB9|A0A178KAB9_9GAMM S-adenosylmethionine:tRN A ribosyltransferase-isomerase OS=Photobacterium jeanii OX=858640 GN=queA PE=3 SV=1
MQVSDFHFDLPDELIARYPQPERTASRLLQLTGNTGELQHKGFKDMLDAVEPGDLLVFNNTRVIPARVFGRKESGGKIEVLVERMLDDKSILAHVRASKSPKPGNVLFLGDGDEHQAEMVARHDTLFEIRFTGDKTVLEVLEEVGHMPLPPYIDRPDEDADKERYQTVYNEKPGAVAAPTAGLHFDETLLEAIKAKGVNLAFVTLHVGAGTFQPVRVDDINDHHMHSEYVEVTQEVVDAINETKANGGRVIAVGTTSVRSLESAAQDALKKGTPLAPFFGDTDIFIYPGGYEFQVIDALVTNFHLPESTLIMLVSAFAGYEHTMNAYKVAVEEKYRFFSYGDAMFITRRTAD

SEQ ID NO: 70288 - protein, 350 aa, Photobacterium kishitanii
  misc_feature (1)..(350): tr|A0A2T3QU93|A0A2T3QU93_9GAMM S-adenosylmethionine:tRN A ribosyltransferase-isomerase OS=Photobacterium kishit anii OX=318456 GN=queA PE=3 SV=1
MQVSDFDFELPDELIARYPQPERTASRLLHMTGNTGELAHKGFKDVLDLVEAGDLLVFNNTRVIPARMYGHKASGGKIEVLVERMLDDKSILAHVRASKPPKPGNELLLGENGEFSAEMVARHDALFEIRFNSDKTVLEILDQVGHMPLPPYIDRPDEDADKERYQTVYNAKPGAVAAPTAGLHFDDKLMADLKAKGVNFAFVTLHVGAGTFQPVRVDDINDHHMHSEYVEVPQEVVTAVNETRANGGRIIAVGTTSVRSLESAAQDAVKNGTELKPFFGDTEIFIFPGYQFQLVDVLITNFHLPESTLIMLVSAFAGYDHTMNAYHQAVANQYRFFSYGDSMFITRKNV

SEQ ID NO: 70289 - protein, 350 aa, Photobacterium leiognathi
  misc_feature (1)..(350): tr|A0A0M9FCG5|A0A0M9FCG5_PHOLD S-adenosylmethionine:tRN A ribosyltransferase-isomerase OS=Photobacterium leiogn athi subsp. mandapamensis OX=48408 GN=queA PE=3 SV=1
MQVSDFDFELPDELIARYPQPERTASRLLQMTGNTGELAHKCFKDVLDLVQPGDLLVFNNTRVIPARMFGHKASGGKIEVLVERMLDDKSILAHVRASKPPKPGNELLLGENGEFSAEMVARHDALFEIRFNSDKTVLEILDIVGHMPLPPYIDRPDEDADKERYQTVYNAKPGAVAAPTAGLHFDDKLMADLKAKGVNFAFVTLHVGAGTFQPVRVDDINDHHMHSEYVEVPEEVVAAVNETRANGGRVIAVGTTSVRSLESAAQDALKKGTEFKPFFGDTDIFIFPGYQFQLVDVLITNFHLPESTLIMLVSAFAGYENTMNAYHEAVANKYRFFSYGDSMFITRKDA

SEQ ID NO: 70290 - protein, 350 aa, Photobacterium leiognathi
  misc_feature (1)..(350): tr|X0NLL4|X0NLL4_PHOLE S-adenosylmethionine:tRNA ribosy ltransferase-isomerase OS=Photobacterium leiognathi lri vu.4.1 OX=1248232 GN=queA PE=3 SV=1
MQVSDFDFELPDELIARYPQPERTASRLLQMTGNTGELAHKCFKDVLDLVQPGDLLVFNNTRVIPARMFGHKASGGKIEVLVERMLDDKSILAHVRASKPPKPGNELLLGENGEFSAEMVARHDALFEIRFNSDKTVLEILDIVGHMPLPPYIDRPDEDADKERYQTVYNAKPGAVAAPTAGLHFDDKLMADLKAKGVNFAFVTLHVGAGTFQPVRVDDINDHHMHSEYVEVPEEVVAAVNETRANGGRVIAVGTTSVRSLESAAQDALKKGTEFKPFFGDTDIFIFPGYQFQLVDALITNFHLPESTLIMLVSAFAGYENTMNAYHEAVANKYRFFSYGDSMFITRKDA

SEQ ID NO: 70291 - protein, 350 aa, Photobacterium lipolyticum
  misc_feature (1)..(350): tr|A0A2T3MS51|A0A2T3MS51_9GAMM S-adenosylmethionine:tRN A ribosyltransferase-isomerase OS=Photobacterium lipoly ticum OX=266810 GN=queA PE=3 SV=1
MQVSDFHFDLPDELIARYPQPERTASRLLQLTGDTGEIQHKGFKDVLDLVQPGDLLVFNNTRVIPARIFGRKASGGKLEVLVERMLDDKSILAHVRASKSPKPGNELLLGENDEYQAEMVARHDALFEIRFNSDKTVLEILEDVGHMPLPPYIDRPDEDADKERYQTVYNTKPGAVAAPTAGLHFDDTLMDALRAKGVNFAFVTLHVGAGTFQPVRVDNIDDHHMHAEYVEVPQEVVDAINATKANGGRVVAVGTTSVRSLESAAQDAVKKGTELKPFFGDTDIFIFPGYEFQLVDVLVTNFHLPESTLIMLVSAFAGYEHTMNAYLQAVENKYRFFSYGDSMFITRKNK

SEQ ID NO: 70292 - protein, 350 aa, Photobacterium lutimaris
  misc_feature (1)..(350): tr|A0A2T3IUS9|A0A2T3IUS9_9GAMM S-adenosylmethionine:tRN A ribosyltransferase-isomerase OS=Photobacterium lutima ris OX=388278 GN=queA PE=3 SV=1
MQVSDFDFDLPDELIARYPQPQRTASRLLQLTGNTGELAHKGFKDVLDLVEPGDLLVFNNTRVIPARLFGRKASGGKMEVLVERMLDDKSILAHVRASKSPKPGNELFLGENDEYQAEMVARHDALFEIRFNSDKTVLEILEEVGHMPLPPYIDRPDEEADKERYQTVYNAKPGAVAAPTAGLHFDDELMAALKAKGVNFAFVTLHVGAGTFQPVRVDNINDHHMHAEYVEVPEAVVAAIHATKANGKRVIAVGTTSVRSLESAAQDAKQKGTELKPFFGDTEIFIYPGYEYQLIDVLITNFHLPESTLIMLVSAFAGYDNTMNAYRQAVENKYRFFSYGDSMFITRKTA

SEQ ID NO: 70293 - protein, 350 aa, Photobacterium marinum
  misc_feature (1)..(350): tr|L8JCP7|L8JCP7_9GAMM S-adenosylmethionine:tRNA ribosy ltransferase-isomerase OS=Photobacterium marinum OX=105 6511 GN=queA PE=3 SV=1
MQVSDFHFDLPDELIARYPQPERTASRLLQLTGDTGEVQHKGFKDILDLVQPGDLLVFNNTRVIPARIFGRKASGGKLEVLVERMLDDKSILAHVRCSKSPKPGTELLLGENDEYQAEMVARHDALFEIRFNSDKTVLEILEDVGHMPLPPYIDRPDEDADKERYQTVYNAKPGAVAAPTAGLHFDEEILAAIKAKGASFAFVTLHVGAGTFQPVRVDSIEDHHMHAEYVEVPEEVVAAINETKSSGGRVIAVGTTSVRSLESAAQDAVKKGTELKPFFGDTDIFIFPGYEFQLVDVLVTNFHLPESTLIMLVSAFAGYEHTMNAYRQAVENKYRFFSYGDSMFVTRKTK

SEQ ID NO: 70294 - protein, 350 aa, Photobacterium phosphoreum
  misc_feature (1)..(350): tr|A0A2T3K5G1|A0A2T3K5G1_PHOPO S-adenosylmethionine:tRN A ribosyltransferase-isomerase OS=Photobacterium phosph oreum OX=659 GN=queA PE=3 SV=1
MQVSDFDFELPDELIARYPQPERTASRLLHMTGNTGELAHKGFKDVLDLVEAGDLLVFNNTRVIPARMYGHKASGGKIEVLVERMLDDKSILAHVRASKPPKPGMELLLGEQGEFSAVMVARHDALFEIRFNSDKTVLEILDQVGHMPLPPYIDRPDEDADKERYQTVYNAKPGAVAAPTAGLHFDEKLMADLKAKGVNFAFVTLHVGAGTFQPVRVDDINDHHMHSEYVEVPQEVVTAVNETRANGGRIIAVGTTSVRSLESAAQDAIKNGTELKPFFGDTEIFIFPGYQFQLVDVLITNFHLPESTLIMLVSAFASYEHTMNAYHQAVANQYRFFSYGDSMFITRKNV

SEQ ID NO: 70295 - protein, 361 aa, Photobacterium phosphoreum
  misc_feature (1)..(361): tr|A0A0B7JAD7|A0A0B7JAD7_PHOPO S-adenosylmethionine:tRN A ribosyltransferase-isomerase OS=Photobacterium phosph oreum ANT-2200 OX=1454202 GN=queA PE=3 SV=1
MPACCYLRRITMQVSDFDFELPDELIARYPQPERTASRLLHMTGNTGELAHKGFKDVLDLVEAGDLLVFNNTRVIPARMYGHKASGGKIEVLVERMLDDKSILAHVRASKPPKPGNELLLGENGEFSAEMVARHDALFEIRFNSDKTVLEILEQVGHMPLPPYIDRPDEDADKERYQTVYNAKPGAVAAPTAGLHFDDKLMADLKAKGVNFAFVTLHVGAGTFQPVRVDDINDHHMHSEYVEVPQEVVTAVNETRANGGRIIAVGTTSVRSLESAAQDAVKNGTELKPFFGDTEIFIFPGYQFQLVDVLITNFHLPESTLIMLVSAFAGYDHTMNAYHQAVANQYRFFSYGDSMFITRKNV

SEQ ID NO: 70296 - protein, 361 aa, Photobacterium piscicola
  misc_feature (1)..(361): tr|A0A1T5I540|A0A1T5I540_9GAMM S-adenosylmethionine:tRN A ribosyltransferase-isomerase OS=Photobacterium piscic ola OX=1378299 GN=queA PE=3 SV=1
MLACCYLRRITMQVSDFDFELPDELIARYPQPERTASRLLHMTGNTGELTHKGFKDVLDLVEAGDLLVFNNTRVIPARMYGHKASGGKIEVLVERMLDDKSILAHVRASKPPKPGNELLLGENGEFSAEMVARHDALFEIRFNSDKTVLEILDAVGHMPLPPYIDRPDEDADKERYQTVYNAKPGAVAAPTAGLHFDDKLMADLKAKGVNFAFVTLHVGAGTFQPVRVDDINDHHMHSEYVEVPQEVVTAVNETRANGGRVIAVGTTSVRSLESAAQDAIKNGTELKPFFGDTEIFIFPGYQFQLVDVLITNFHLPESTLIMLVSAFASYEYTMNAYHQAVANQYRFFSYGDSMFITRKNV

SEQ ID NO: 70297 - protein, 351 aa, Photobacterium profundum
  misc_feature (1)..(351): sp|Q6LU70|QUEA_PHOPR S-adenosylmethionine:tRNA ribosylt ransferase-isomerase OS=Photobacterium profundum (strai n SS9) OX=298386 GN=queA PE=3 SV=2
MQVSDFHFDLPNELIARYPQPERTASRLLQLTGETGNIQHKGFKDVLDLAESGDLFVFNNTRVIPARIFGRKASGGKIEVLVERILDDKSILAHVRASKSPKPGNELLLGENDDYQAEMIARHDTLFEIRFNSDKTVLEILEEVGHMPLPPYIDRPDEDADKERYQTVYNAKPGAVAAPTAGLHFDDKLMAALKAKGVNFAFVTLHVGAGTFQPVRVDNIDDHHMHSEYVEVPQDVVDAVNATKANGGRIIAVGTTSVRSLESAAQDAVKKGTELVPFFGDTEIFIFPGYEFQLVDVLVTNFHLPESTLIMLVSAFAGYEHTMNAYLQAVDNKYRFFSYGDSMFITRRNNV

SEQ ID NO: 70298 - protein, 351 aa, Photobacterium profundum
  misc_feature (1)..(351): tr|Q1YX65|Q1YX65_9GAMM S-adenosylmethionine:tRNA ribosy ltransferase-isomerase OS=Photobacterium profundum 3TCK OX=314280 GN=queA PE=3 SV=1
MQVSDFHFDLPDELIARYPQPERTASRLLQLTGETGNIQHKGFKDVLELAEPGDLFVFNNTRVIPARIFGRKASGGKIEVLVERMLDDKSILAHVRASKSPKPGNELLLGENDDYQAEMIARHDTLFEIRFNSDKTVLEILEEVGHMPLPPYIDRPDEDADKERYQTVYNAKPGAVAAPTAGLHFDDELMAALKAKGVNFAFVTLHVGAGTFQPVRVDNIDDHHMHSEYVEVPQDVVDAVNATKANGGRIIAVGTTSVRSLESAAQDAVKKGTELVPFFGDTEIFIFPGYEFQLVDVLVTNFHLPESTLIMLVSAFAGYEHTMNAYLQAVDNQYRFFSYGDSMFITRRNNV

SEQ ID NO: 70299 - protein, 350 aa, Photobacterium proteolyticum
  misc_feature (1)..(350): tr|A0A1Q9GMR7|A0A1Q9GMR7_9GAMM S-adenosylmethionine:tRN A ribosyltransferase-isomerase OS=Photobacterium proteo lyticum OX=1903952 GN=queA PE=3 SV=1
MQVSDFHFDLPDELIARYPQPERTASRLLQLTGDTGEVQHKGFKDVLDLVQPGDLLVFNNTRVIPARLFGRKASGGKLEVLVERMLDDKRILAHVRASKSPKPGTELLLGENDDYQAEMVARHDALFEIRFDSDKTVLEILEEVGHMPLPPYIDRPDEDADKERYQTVYNAKPGAVAAPTAGLHFDDEILEAIKAKGANFAFVTLHVGAGTFQPVRVDNINDHHMHAEYVEVPEEVVAAINETKANGGRVVAIGTTSVRSLESAAQDAVKNGTELKPFFGDTDIFIFPGYEFQLVDVLVTNFHLPESTLIMLVSAFAGYEHTMNAYQQAVENKYRFFSYGDSMFITRKNK

SEQ ID NO: 70300 - protein, 350 aa, Photobacterium rosenbergii
  misc_feature (1)..(350): tr|A0A2T3N297|A0A2T3N297_9GAMM S-adenosylmethionine:tRN A ribosyltransferase-isomerase OS=Photobacterium rosenb ergii OX=294936 GN=queA PE=3 SV=1
MQVSDFDFDLPDELIARYPQPQRTASRLLQLTGNTGELAHKGFKDVLDLVEPGDLLVFNNTRVIPARLFGRKASGGKLEVLVERMLDDKSILAHVRASKSPKPGNELFLGDNDEYQAEMVARHDALFEIRFNSDKTVLEILEEVGHMPLPPYIDRPDEDADKERYQTVYNAKPGAVAAPTAGLHFDDELMAALKAKGVNFAFVTLHVGAGTFQPVRVDNINDHHMHAEYVEVPEDVVKAINETKANGKRVVAVGTTSVRSLESAAQDAKQKGTELKPFFGDTEIFIYPGYEYQLIDVLITNFHLPESTLIMLVSAFAGYEHTMNAYKQAVENKYRFFSYGDSMFITRKTV

SEQ ID NO: 70301 - protein, 350 aa, Photobacterium sanctipauli
  misc_feature (1)..(350): tr|A0A2T3NB29|A0A2T3NB29_9GAMM S-adenosylmethionine:tRN A ribosyltransferase-isomerase OS=Photobacterium sancti pauli OX=1342794 GN=queA PE=3 SV=1
MQVSDFDFDLPDELIARYPQPERTASRLLQLTGNTGELAHKGFKDVLDLVEPGDLLVFNNTRVIPARLFGRKASGGKLEVLVERMLDDKSILAHVRASKSPKPGNELFLGDNDDYQAEMVARHDALFEIRFNSDKTVLEILEEVGHMPLPPYIDRPDEDSDKERYQTVYNAKPGAVAAPTAGLHFDDELLAAIKDKGANFAFVTLHVGAGTFQPVRVDNINDHHMHAEYVEVPEDVVDTINETKANGGRVIAVGTTSVRSLESAAQDAVKKGTELKPFFGDTDIFIFPGYEFQLVDVLITNFHLPESTLIMLVSAFAGYEHTMNAYRQAVENKYRFFSYGDSMFITKKDK

SEQ ID NO: 70302 - protein, 352 aa, Photobacterium sanguinicancri
  misc_feature (1)..(352): tr|A0A135ZME8|A0A135ZME8_9GAMM S-adenosylmethionine:tRN A ribosyltransferase-isomerase OS=Photobacterium sangui nicancri OX=875932 GN=queA PE=3 SV=1
MQVSDFHFELPDELIARYPQPERTASRLLQLTGNTGELQHKGFKDVLDLVEPGDLLVFNNTRVIPARVFGRKESGGKIEVLVERMLDDKSILAHVRASKSPKPGNVLFLGDNDEHQAEMVARHDTLFEIRFTGDQTVLEVLEDVGHMPLPPYIDRPDEEADKERYQTVYNAKPGAVAAPTAGLHFDDELLAAIKAKGADFAFVTLHVGAGTFQPVRVDDINDHHMHSEYVEVPQDVVDAVLTTKANGGRVIAVGTTSVRSLESAAQDALKKGTELVPFFGDTDIFIYPGGYEFQLVDALVTNFHLPESTLIMLVSTFAGYDHTMKAYQVAVENQYRFFSYGDAMFITRRTKD

SEQ ID NO: 70303 - protein, 350 aa, Photobacterium sp.
  misc_feature (1)..(350): tr|Q2C7I5|Q2C7I5_9GAMM S-adenosylmethionine:tRNA ribosy ltransferase-isomerase OS=Photobacterium sp. SKA34 OX=1 21723 GN=queA PE=3 SV=1
MQVSDFDFDLPDELIARYPQPERTASRLLQMTGNTGELAHKGFKDVLDLVQAGDLLVFNNTRVIPARMFGHKASGGKIEVLVERMLDDKSILAHVRASKPPKPGNELLLGENGEFSAEMVARHDALFEIRFNSDKTVLEILDAVGHMPLPPYIDRPDEDTDKERYQTVYNTKPGAVAAPTAGLHFDDKLMANLKAKGVNFAFVTLHVGAGTFQPVRVDDINDHHMHSEYVEVPEEVVTAVNETRANGGRIIAVGTTSVRSLESAAQDAIKNCTEFKPFFGDTEIFIYPGYQFQLVDALITNFHLPESTLIMLVSAFAGYENTMNAYHEAVANRYRFFSYGDSMFITRKDV

SEQ ID NO: 70304 - protein, 361 aa, Photobacterium sp.
  misc_feature (1)..(361): tr|A0A1Y6MR21|A0A1Y6MR21_9GAMM S-adenosylmethionine:tRN A ribosyltransferase-isomerase OS=Photobacterium sp. CE CT 9190 OX=2006084 GN=queA PE=3 SV=1
MPACCYLRRITMQVSDFDFELPDELIARYPQPERTASRLLHMTGNSGELAHKGFKDVLDLVEAGDLLVFNNTRVIPARMYGHKASGGKIEVLVERMLDDKSILAHVRASKPPKPGNELLLGEHGEFSAEMVARHDALFEIRFNSDKTVLEILEQVGHMPLPPYIDRPDEDADKERYQTVYNAKPGAVAAPTAGLHFDDKLMADLKAKGVNFAFVTLHVGAGTFQPVRVDDINDHHMHSEYVEVPPEVVTAVNQTRANGGRIIAVGTTSVRSLESAAQDALKNGTELKPFFGDTEIFIYPGYQFQLVDVLITNFHLPESTLIMLVSAFAGYEHTMNAYHQAVANQYRFFSYGDSMFITRKNM

SEQ ID NO: 70305 - protein, 352 aa, Photobacterium swingsii
  misc_feature (1)..(352): tr|A0A0J8VCQ7|A0A0J8VCQ7_9GAMM S-adenosylmethionine:tRN A ribosyltransferase-isomerase OS=Photobacterium swings ii OX=680026 GN=queA PE=3 SV=1
MQVSDFHFDLPDELIARYPQPERTASRLLQLTGNTGELQHKGFKDMLDLVEPGDLLVFNNTRVIPARVFGRKESGGKIEVLVERMLDEKSILAHVRASKSPKPGNVLFLGDNDEHQAEMVARHDTLFEIRFTGDKTVLEVLEEVGHMPLPPYIDRPDEDADKERYQTVYNAKPGAVAAPTAGLHFDDELLAAIKAKGANFAFVTLHVGAGTFQPVRVDDINDHHMHSEYVEVPQDVVDAVLTTKANGGRVIAVGTTSVRSLESAAQDALKNGTELVPFFGDTDIFIYPGGYEFQLVDALVTNFHLPESTLIMLVSTFAGYDHTMHAYQVAVENQYRFFSYGDAMFITRRTQG

SEQ ID NO: 70306 - protein, 361 aa, Photobacterium toruni
  misc_feature (1)..(361): tr|A0A1T4UBT3|A0A1T4UBT3_9GAMM S-adenosylmethionine:tRN A ribosyltransferase-isomerase OS=Photobacterium toruni OX=1935446 GN=queA PE=3 SV=1
MLACCYLRRITMQVSDFDFELPDELIARYPQPERTASRLLHMTGNTGELAHKGFKDVLDLVEAGDLLVFNNTRVIPARMYGHKASGGKIEVLVERMLDDKSILAHVRASKPPKPGMELLLGEHGEFSAVMVARHDALFEIRFNSDKTVLEILDTVGHMPLPPYIDRPDEDADKERYQTVYNAKPGAVAAPTAGLHFDNKLMADLKAKGVNFAFVTLHVGAGTFQPVRVDDINDHHMHSEYVEVPQEVVTAVNETRANGGRVIAVGTTSVRSLESAAQDAIKNGTELKPFFGDTEIFIFPGYQFQLVDVLITNFHLPESTLIMLVSAFASYEYTMNAYHQAVANQYRFFSYGDSMFITRKDV

SEQ ID NO: 70307 - protein, 355 aa, Photorhabdus asymbiotica
  misc_feature (1)..(355): tr|C7BK82|C7BK82_PHOAA S-adenosylmethionine:tRNA ribosy ltransferase-isomerase OS=Photorhabdus asymbiotica subs p. asymbiotica (strain ATCC 43949 / 3105-77) OX=553480 GN=queA PE=3 SV=1
MRVSDFTFELPDEMIARYPQPQRSSCRLLSLDGATGALTHGVFTDVLNKLNAGDLLVFNNTRVIPARIFGRKVTGGKLEVLVERILDDKRVLAHVRASKAPKEGTELLLGDNESIKATMLARHDTLFEIRFDDERDVLSILDDVGHMPLPPYIDRPDEEADRELYQTVYSERPGAVAAPTAGLHFDEPLLNALREKGVEMVFVTLHVGAGTFQPVRVETIEDHVMHSEYAEVPQNVVDAVLACKARGNKVVAVGTTSVRSLESAAAACKDGLIAPFFDDTRIFIYPGFEYQIVDALITNFHLPESTLIMLVSAFAGYKNTMNAYKEAVAEKYRFFSYGDAMFIHRNPFAFEEIIS

SEQ ID NO: 70308 - protein, 355 aa, Photorhabdus australis
  misc_feature (1)..(355): tr|A0A1C0U4Q3|A0A1C0U4Q3_9GAMM S-adenosylmethionine:tRN A ribosyltransferase-isomerase OS=Photorhabdus australi s OX=286156 GN=queA PE=3 SV=1
MRVSDFTFELPDEMIARYPQPQRSGCRLLSLDGETGALTHGVFTDVINKLNTGDLLVFNNTRVIPARIFGRKSTGGKLEILVERILDDKRVLAHVRASKAPKEGTELLLGDNESIKATMLARHDTLFEIRFDDERDVLSILDDVGHMPLPPYIDRPDEEEDRELYQTVYSERPGAVAAPTAGLHFDEPLLEALREKGVEMVFVTLHVGAGTFQPVRVETIEDHVMHAEYAEVPQNVVDAVLACKARGNKVVAVGTTSVRSLESAAKACKDGLIAPFFDDTRIFIYPGFEYQIVDALITNFHLPESTLIMLVSAFAGYKNTMNAYKEAVAEKYRFFSYGDAMFIHRNSLAFEEIIS

SEQ ID NO: 70309 - protein, 355 aa, Photorhabdus bodei
  misc_feature (1)..(355): tr|A0A329XCD4|A0A329XCD4_9GAMM S-adenosylmethionine:tRN A ribosyltransferase-isomerase OS=Photorhabdus bodei OX =2029681 GN=queA PE=3 SV=1
MRVSDFTFELPDEMIAHYPQPQRSGCRLLSLDGETGKLTHGIFTDVLDKLNAGDLLVFNNTRVIPARIFGRKVTGGKLEVLVERVLDDKRVLAHVRASKAPKVGTELLLGDNESLKATMLARHDTLFEIRFDDERDVLSILDDIGHMPLPPYINRPDEEADRELYQTVYSERPGAVAAPTAGLHFDEPLLEALRKKGVEMVFVTLHVGAGTFQPVRVETIEDHIMHAEYAEVPQDVVDAVLACKARGNKVVAVGTTSVRSLESAAKACQDGLIAPFFNDTQIFIYPGFEYQVVDALITNFHLPESTLIMLVSAFAGYKNTMNAYKEAVAEKYRFFSYGDAMFIRRNPFACKEKIS

SEQ ID NO: 70310 - protein, 355 aa, Photorhabdus heterorhabditis
  misc_feature (1)..(355): tr|A0A0M9CWY2|A0A0M9CWY2_9GAMM S-adenosylmethionine:tRN A ribosyltransferase-isomerase OS=Photorhabdus heterorh abditis OX=880156 GN=queA PE=3 SV=1
MRVSDFTFELPDEMIARYPQPQRSSCRLLSLDGETGALTHGVFTDVLNKLNTGDLLVFNNTRVIPARIFGRKATGGKLEVLVERILDDKRVLAHVRASKAPKEGTELLLGDNESIKATMLARHDTLFEIRFEDERDVLSILDNVGHMPLPPYIDRPDEEADRELYQTVYSERPGAVAAPTAGLHFDEPLLEALREKGVEMVFVTLHVGAGTFQPVRVETIEDHVMHSEYAEVPQHVVDAVLACKARGNKVVAVGTTSVRSLESAAKACKDELIAPFFGDTRIFIYPGFEYQIVDALITNFHLPESTLIMLVSAFAGYKNTMNAYKEAVAEKYRFFSYGDAMFIRRNPLAFEEKIS

SEQ ID NO: 70311 - protein, 355 aa, Photorhabdus khanii
  misc_feature (1)..(355): tr|W3VDB5|W3VDB5_9GAMM S-adenosylmethionine:tRNA ribosy ltransferase-isomerase OS=Photorhabdus khanii NC19 OX=1 004151 GN=queA PE=3 SV=1
MRVSDFTFELPDEMIAHYPQPQRSGCRLLSLDGETGGLTHGVFTDVLDKLNAGDLLVFNNTRVIPARIFGRKATGGKLEVLVERVLDDKRVLAHVRASKAPKEGAELLLGDSENVKATMLARHDTLFEIRFDDPRDVLSILDDVGHMPLPPYIDRPDEEADRELYQTVYSERPGAVAAPTAGLHFDEPLLEALREKGVAMVFVTLHVGAGTFQPVRVETIEDHIMHAEYAEVPQDVVDAVLACKARGNKVVAVGTTSVRSLESAARACQDGLIAPFFNDTQIFIYPGFEYQVVDALITNFHLPESTLIMLVSAFAGYKNTMSAYKEAVAEKYRFFSYGDAMFIRRNPLACKEKVS

SEQ ID NO: 70312 - protein, 355 aa, Photorhabdus laumondii
  misc_feature (1)..(355): sp|Q7N0I3|QUEA_PHOLL S-adenosylmethionine:tRNA ribosylt ransferase-isomerase OS=Photorhabdus laumondii subsp. l aumondii (strain DSM 15139 / CIP 105565 / TT01) OX=2432 65 GN=queA PE=3 SV=1
MRVSDFTFELPDEMIAHYPQPQRSGCRLLSLDGETGALTHGIFTDVLDKLNAGDLLVFNNTRVIPARIFGRKATGGKLEVLVERVLDDKRVLAHVRASKAPKEGTELLLGDNESLKATMLARHDTLFEIRFDDERDVLSILDDIGHMPLPPYINRPDEEADRELYQTVYSERPGAVAAPTAGLHFDEPLLEALRKKGVEMVFVTLHVGAGTFQPVRVETIEDHIMHAEYAEVPQDVVDAVLACKARGNKVVAVGTTSVRSLESAAKACQDELIAPFFNDTQIFIYPGFEYQVVDALITNFHLPESTLIMLVSAFAGYKNTMNAYQEAVAEKYRFFSYGDAMFIRRNPFACKEKIS

SEQ ID NO: 70313 - protein, 355 aa, Photorhabdus laumondii
  misc_feature (1)..(355): tr|A0A329VM93|A0A329VM93_9GAMM S-adenosylmethionine:tRN A ribosyltransferase-isomerase OS=Photorhabdus laumondi i subsp. clarkei OX=2029685 GN=queA PE=3 SV=1
MRVSDFTFELPDEMIAHYPQSQRSGCRLLSLDGETGALTHGIFTDVLDKLNAGDLLVFNNTRVIPARIFGRKSTGGKLEVLVERVLDDKRVLAHVRASKAPKEGTELLLGDSESLKATMLARHDTLFEIRFDDERDVLSILDDIGHMPLPPYINRPDEEADRELYQTVYSERPGAVAAPTAGLHFDEPLLEALRKKGVEMVFVTLHVGAGTFQPVRVETIEDHIMHAEYAEVPQDVVDAVLACKARGNKVVAVGTTSVRSLESAARACQDELIAPFFNDTQIFIYPGFEYQVVDALITNFHLPESTLIMLVSAFAGYKNTMNAYQEAVAEKYRFFSYGDAMFIRRNPFACKEKIS

SEQ ID NO: 70314 - protein, 355 aa, Photorhabdus luminescens
  misc_feature (1)..(355): tr|A0A5C4REY0|A0A5C4REY0_PHOLU S-adenosylmethionine:tRN A ribosyltransferase-isomerase OS=Photorhabdus luminesc ens subsp. sonorensis OX=1173677 GN=queA PE=3 SV=1
MRVSDFTFELPDEMIAHYPQPQRSGCRLLSLDGETGALTHGIFTDVLDKLNAGDLLVFNNTRVIPARIFGRKATGGKLEVLVERVLDDKRVLAHVRASKAPKEGTELLLGDNESLKATMLARHDSLFEIRFDDKRDVLSILDDIGHMPLPPYINRPDEEADRELYQTVYSERPGAVAAPTAGLHFDEPLLEALRKKGVEVVFVTLHVGAGTFQPVRVETIEDHIMHAEYAEVPQDVVDAVLACKARGNKVVAVGTTSVRSLESAAKACQDGLIAPFFNDTQIFIYPGFEYQVVDALITNFHLPESTLIMLVSAFAGYKNTMNAYKEAVAEKYRFFSYGDAMFIRRNPLACKEKIS

SEQ ID NO: 70315 - protein, 355 aa, Photorhabdus luminescens
  misc_feature (1)..(355): tr|A0A1G5PWH0|A0A1G5PWH0_PHOLU S-adenosylmethionine:tRN A ribosyltransferase-isomerase OS=Photorhabdus luminesc ens OX=29488 GN=queA PE=3 SV=1
MRVSDFTFELPDEMIAHYPQPQRSGCRLLSLDGETGALTHGIFTDVLDKLNAGDLLVFNNTRVIPARIFGRKATGGKLEVLVERVLDDKRVLAHVRASKAPKEGTELLLGDNESLKATMLARHDSLFEIRFDDKRDVLSILDDIGHMPLPPYINRPDEEADRELYQTVYSERPGAVAAPTAGLHFDEPLLEALRKKGVEMVFVTLHVGAGTFQPVRVETIEDHIMHAEYAEVPQDVVDAVLACKARGNNVVAVGTTSVRSLESAAKACQDGLIAPFFNDTQIFIYPGFEYQVVDALITNFHLPESTLIMLVSAFAGYKNTMNAYKEAVAEKYRFFSYGDAMFIRRNSLACKEKIS

SEQ ID NO: 70316 - protein, 355 aa, Photorhabdus namnaonensis
  misc_feature (1)..(355): tr|A0A1B8YMR6|A0A1B8YMR6_9GAMM S-adenosylmethionine:tRN A ribosyltransferase-isomerase OS=Photorhabdus namnaone nsis OX=1851568 GN=queA PE=3 SV=1
MRVSDFTFELPDEMIAHYPQPQRSGCRLLSLDGDTGALTHGIFTDVIDKLNAGDLLVFNNTRVIPARIFGRKATGGKLEVLVERVLDDKRVLAHVRASKAPKEGTELLLGDNESLKATMLARHDSLFEIRFDDERDVLSILDDIGHMPLPPYINRPDEEADRELYQTVYSERPGAVAAPTAGLHFDEPLLEALRKKGVEMVFVTLHVGAGTFQPVRVETIEDHIMHAEYAEVPQDVVDAVLACKARGNKVVAVGTTSVRSLESAAKVCQDGLIAPFFNDTQIFIYPGFEYQVVDALITNFHLPESTLIMLVSAFAGYKNTMNAYKEAVAEKYRFFSYGDAMFIRRNPLACKEKIS

SEQ ID NO: 70317 - protein, 355 aa, Photorhabdus sp.
  misc_feature (1)..(355): tr|A0A4R4IWH3|A0A4R4IWH3_9GAMM S-adenosylmethionine:tRN A ribosyltransferase-isomerase OS=Photorhabdus sp. MEX4 7-22 OX=2100167 GN=queA PE=3 SV=1
MRVSDFTFELPDEMIAHYPQPQRSGCRLLSLDGETGALTHGIFTDVLDKLNAGDLLVFNNTRVIPARIFGRKATGGKLEVLVERVLDDKRVLAHVRASKAPKEGTELLLGDNESLKATMLARHDSLFEIRFDDKRDVLSILDDIGHMPLPPYINRPDEEADRELYQTVYSERPGAVAAPTAGLHFDEPLLEALRKKGVEMVFVTLHVGAGTFQPVRVETIEDHIMHAEYAEVPQDVVDAVLACKARGNKVVAVGTTSVRSLESAAKACQDGLIAPFFNDTQIFIYPGFEYQVVDALITNFHLPESTLIMLVSAFAGYKNTMNAYKEAVAEKYRFFSYGDAMFICRNPLACKEKIF

SEQ ID NO: 70318 - protein, 355 aa, Photorhabdus sp.
  misc_feature (1)..(355): tr|A0A329VRG2|A0A329VRG2_9GAMM S-adenosylmethionine:tRN A ribosyltransferase-isomerase OS=Photorhabdus sp. S10- 54 OX=2029684 GN=queA PE=3 SV=1
MRVSDFTFELPDEMIAHYPQPQRSGCRLLSLDGETGKLTHGIFTDVLDKLNAGDLLVFNNTRVIPARIFGRKATGGKLEVLVERVLDDKRVLAHVRASKAPKVGTELLLGDNESLKATMLARHDTLFEIRFDDERDVLSILDDIGHMPLPPYINRPDEEADRELYQTVYSERPGAVAAPTAGLHFDEPLLEALRKKGVEMVFVTLHVGAGTFQPVRVETIEDHIMHAEYAEVPQDVVDAVLACKARGNKVVAVGTTSVRSLESAAKACQDGLIAPFFNDTQIFIYPGFEYQVVDALITNFHLPESTLIMLVSAFAGYKNTMNAYKEAVAEKYRFFSYGDAMFIRRNPFACKEKIS

SEQ ID NO: 70319 - protein, 355 aa, Photorhabdus temperata
  misc_feature (1)..(355): tr|A0A081S264|A0A081S264_PHOTE S-adenosylmethionine:tRN A ribosyltransferase-isomerase OS=Photorhabdus temperat a subsp. temperata Meg1 OX=1393735 GN=queA PE=3 SV=1
MRVSDFTFELPDEMIAHYPQPQRSGCRLLSLDGETGALTHGVFTDVLDKLNAGDLLVFNNTRVISARIFGRKATGGKLEVLVERVLDDKRVLAHVRASKAPKEGSELLLGDSENVKATMLARHDTLFEIRFDDQRDVLSILDDVGHMPLPPYIDRPDEAADRELYQTVYSERPGAVAAPTAGLHFDEPLLEALREKGVEMVFVTLHVGAGTFQPVRVETIEDHIMHAEYAEVPQDVADAVLACKARGNKVVAVGTTSVRSLESAARACQNGLIAPFFNDTQIFIYPGFEYQVVDALITNFHLPESTLIMLVSAFAGYKNTMSAYKEAIAEKYRFFSYGDAMFIRRNPLAFKEKVS

SEQ ID NO: 70320 - protein, 355 aa, Photorhabdus temperata
  misc_feature (1)..(355): tr|T0P309|T0P309_PHOTE S-adenosylmethionine:tRNA ribosy ltransferase-isomerase OS=Photorhabdus temperata subsp. temperata M1021 OX=1221520 GN=queA PE=3 SV=1
MRVSDFTFELPDEMIAHYPQPQRSGCRLLSLDGETGALTHGVFTDVLDKLNAGDLLVFNNTRVIPARIFGRKATGGKLEVLVERVLDDKRVLAHVRASKAPKEGAELLLGDNENVKATMLARHDTLFEIRFDDQRDVLSILDDVGHMPLPPYIDRPDEEADRELYQTVYSERPGAVAAPTAGLHFDEPLLEALREKGVEMVFVTLHVGAGTFQPVRVETIEDHIMHAEYAEVSQDVVDAVLACKARGNKVVAVGTTSVRSLESAAKAYQNGLIAPFFNDTQIFIYPGFEYQVVDALITNFHLPESTLIMLVSAFAGYKNTMSAYKEAVAEKYRFFSYGDAMFIHRNLLACKEKIS

SEQ ID NO: 70321 - protein, 355 aa, Photorhabdus thracensis
  misc_feature (1)..(355): tr|A0A0F7LKK8|A0A0F7LKK8_9GAMM S-adenosylmethionine:tRN A ribosyltransferase-isomerase OS=Photorhabdus thracens is OX=230089 GN=queA PE=3 SV=1
MRVSDFTFELPDEMIAHYPQPQRSGCRLLSLDGETGALTHGVFTDVLDKLNAGDLLVFNNTRVIPARIFGRKATGGKLEVLVERVLDDKRVLAHVRASKAPKEGAELLLGDSENVKATMLARHDTLFEIRFDDQRDVLSILDDVGHMPLPPYIDRPDEEADRELYQTVYSERPGAVAAPTAGLHFDEPLLEALREKGVEMVFVTLHVGAGTFQPVRVETIEDHIMHAEYAEVPQDVADAVLACKARGNKVVAVGTTSVRSLESAARACQNGLIAPFFNDTQIFIYPGFEYQVVDALITNFHLPESTLIMLVSAFAGYKNTMSAYKEAIAEKYRFFSYGDAMFILRNPLACKEKIS

SEQ ID NO: 70322 - protein, 358 aa, Phreatobacter cathodiphilus
  misc_feature (1)..(358): tr|A0A2S0N9V1|A0A2S0N9V1_9PROT S-adenosylmethionine:tRN A ribosyltransferase-isomerase OS=Phreatobacter cathodi philus OX=1868589 GN=queA PE=3 SV=1
MRVDLFDFDLPADRIALRPASPRDAARLMVVRPGAEIGDRVVRDLPEILRPGDALVFNDTRVIPAQLEGVRERAGQVASISATLHRRLAPDRWLAFVRGAKKLRPGDLVRFGETPEACLLSGLHATIVSKDDDGVVLEFEFAGAYLDEAVARVGHIPLPPYIASKRREDAQDRADYQTVYARDEGSVAAPTAGLHFTPDLLDRLKARGVSLHFLTLHVGAGTFLPVKSDDTADHRMHPEYGLVTAETATALNTVRAAGGRIVAVGTTSLRLLESAASEDGTIRPFAAETSIFITPGYRFRAVDVLMTNFHLPRSTLFMLVSAFAGLDTMRAAYARAIATGYRFYSYGDGSLLFREDAR

SEQ ID NO: 70323 - protein, 358 aa, Phreatobacter oligotrophus
  misc_feature (1)..(358): tr|A0A2T4Z557|A0A2T4Z557_9PROT S-adenosylmethionine:tRN A ribosyltransferase-isomerase OS=Phreatobacter oligotr ophus OX=1122261 GN=queA PE=3 SV=1
MRVDLFDFDLPNDRIALRPANPRDSARFMVVRPGEGIEDRIVRDLPDLLAPGDALVFNDTRVIPAQLEGIRERAGQTASVSATLHKRLSDNRWLAFVKGAKKLQPGDLVRFGETPEACLLAGVHASVIAKDDDGVTFEFEFAGAYLDEAIARIGHIPLPPYIASKRPEDAQDRADYQTVYAKDEGSVAAPTAGLHFTPDLLDRLKARGIELHFVTLHVGAGTFLPVKADDTTAHRMHAEYGQVTPEIAASLNAVRARGGRIVAVGTTSLRLLESAAAEDGTIHPFAAETDIFITPGYRFRAVDALMTNFHLPRSTLFMLVSAFAGLETMKAAYARAIAEGYRFYSYGDSSLLFRAEAP

SEQ ID NO: 70324 - protein, 356 aa, Phreatobacter sp.
  misc_feature (1)..(356): tr|A0A4D7QTJ3|A0A4D7QTJ3_9PROT S-adenosylmethionine:tRN A ribosyltransferase-isomerase OS=Phreatobacter sp. NMC R1094 OX=2570229 GN=queA PE=3 SV=1
MRVDLFDFDLPPDRIALRPANPRDSARMMVVGEQGIDDRIMRDLPDLLQPGDALVLNDTRVIPAQLEGIRERDGQTATISATLHKRLAPDRWLAFVRGAKKLHPGDRVEFGAKAEACLLGALPATVISKDDDGVVFAFDLSGIHLDEAIGRVGHVPLPPYIASKRPEDAQDRLDYQTVFARDEGSVAAPTAGLHLTPDLMERLKARGVELHFVTLHVGAGTFLPVKADDTADHRMHAEFGEVTAATAAALNAVHARGNRIIAVGTTSLRLIESAAAEDGTIHPFAAETAIFITPGYRFRAVDRLVTNFHLPRSTLFMLVSAFAGLDRMRAAYARAIETGYRFYSYGDGSLLTRAEA

SEQ ID NO: 70325 - protein, 373 aa, Phreatobacter stygius
  misc_feature (1)..(373): tr|A0A4D7B4I2|A0A4D7B4I2_9PROT S-adenosylmethionine:tRN A ribosyltransferase-isomerase OS=Phreatobacter stygius OX=1940610 GN=queA PE=3 SV=1
MRVDLFDFDLPPDRIALRPISPRDDARLMVVRPGTAPGQAIADAHIRDAHVRDLADLLAPGDALVFNDTRVIPAQLEGLRNRDGAMASISATLHRRLADDRWLAFVRGAKKVQPGDRIHFGETAQTCLLGALDATVVSKDDDGVVFAFDLSGVILDEAVARVGHVPLPPYIASKRPEDAADRADYQTVYARDEGSVAAPTAGLHFTAGLMDRLRARGIDLHFLTLHVGAGTFLPVKSDDTADHKMHPEFGLVTPEVADALNRTRARGGRIVAVGTTSLRLLESATAEDGVIRPFAAETAIFITPGYRFRAVDALMTNFHLPRSTLFMLVSAFAGLATMQAAYGRAIETGYRFYSYGDGSLLFRQPAAAPGEAS

SEQ ID NO: 70326 - protein, 367 aa, Phycicoccus bigeumensis
  misc_feature (1)..(367): tr|A0A502CVC5|A0A502CVC5_9MICO S-adenosylmethionine:tRN A ribosyltransferase-isomerase OS=Phycicoccus bigeumens is OX=433644 GN=EAH86_10570 PE=3 SV=1
MTRLSVAPLTHFASPDDTTAPAPPEERGVARDEVRMMVATDEGVAHARFRDLPAYLAPGDLVVVNNSATLAAEFDAVLRGRGPVLVHAATRLDDGTWVVELRTAPDASRGILDAQAGEELELPASGRITLLAPYPRADSSPTGNGNRLWRAAVRGPRTLGQHLVRYGRPIAYGYLDRSYPLAAYQTVFATRPGSAEMPSAARPFSQELVTRLVATGIGISAVTLHTGVSSQEAGEAPQSEWFEVSATVARLVNATRAEGGRVVAVGTTVTRALESAVDGGDGHGAAQLTARSGWTSRVVSRDDPPRVVTGLVTGWHNPGASHLLLVEAVAGQGLTQRAYDEAARGGYLWHEFGDSALLLPTGPGRTG

SEQ ID NO: 70327 - protein, 364 aa, Phycicoccus sp.
  misc_feature (1)..(364): tr|A0A0Q9S649|A0A0Q9S649_9MICO S-adenosylmethionine:tRN A ribosyltransferase-isomerase OS=Phycicoccus sp. Soil8 03 OX=1736415 GN=ASG95_01090 PE=3 SV=1
MSRLSVVPSTRFASPGDTTAPAPPEERGVARDGVRMLVATDEGVAHAHFRDLAAYLTPGDLVVVNNSATLAAEFDAVLRGRGPVVVHAATRLDDGTWVVELRSAPDAARSVLDADSGAELDLPGGGRLTLVAPYPRPLSSPTGRGNRLWRAAVSGPRPLEQHLVRYGRPIAYGYLDRAYPLSAYQTVFASRPGSAEIPSAARPFTHELVTDLVSHGIGVAVVTLHTGVSSQEAGEAPQPEWFEVSALTARLVNATRAEGGRVVAVGTTVTRALESAVQLSPADEPGVVPRTGWTARVVSRDDPPRVVTGLVTGWHDPQASHLLLVEAVAGPDLTQRAYDGAARGGYLWHEFGDSALLLPGPDPR

SEQ ID NO: 70328 - protein, 364 aa, Phycicoccus sp.
  misc_feature (1)..(364): tr|A0A0Q9SWM9|A0A0Q9SWM9_9MICO S-adenosylmethionine:tRN A ribosyltransferase-isomerase OS=Phycicoccus sp. Soil8 02 OX=1736414 GN=ASG91_03750 PE=3 SV=1
MTRLSVVPSTRFASPGDTTAPAPPEERGLARDGVRMLVATDEGVAHAHFRDLAAYLTPGDLVVVNNSATLAAEFDAVLRGRAPVVVHAATRLDDGTWVVELRSAPDAARSVLDADSGAELDLPGGGRLTLVAPYPRPLSSPTGRGNRLWRAAVSGPRPLEQHLVRYGRPIAYGYLDRAYPLSAYQTVFASRPGSAEMPSAARPFTHELVTDLVSHGIGLAVVTLHTGVSSQEAGEAPQPEWFEVSALTARLVNATRAEGGRVVAVGTTVTRALESAVQLSPSDEPVVVPRTGWTARVVSRDDPPRVVTGLVTGWHDPQASHLLLVEAVAGRDLTQRAYDGAARGGYLWHEFGDSALLLPGPAPR

SEQ ID NO: 70329 - protein, 370 aa, Phycisphaera mikurensis
  misc_feature (1)..(370): tr|I0IDY4|I0IDY4_PHYMF S-adenosylmethionine:tRNA ribosy ltransferase-isomerase OS=Phycisphaera mikurensis (stra in NBRC 102666 / KCTC 22515 / FYK2301M01) OX=1142394 GN =queA PE=3 SV=1
MRTDELDFHLPERLIATTAAEPRDSARLMVCDRATGSVHHRRVSDLPGLGLVGDGDLMVVNRTAVLPARFEATRAGTGGRVTGLYLGHDDAGLWTAMLKSGGRPRIGERLQLGDACELELLSPRGGGRWRLRPRDLAGEPMPIDASLEVLRRVGLPPLPPYLLRARERAGGPADLPGDAERYQTVFADRSAASQRSVAAPTAGLHLTEAVLAGLRAAGVRTEAVTLEVGPGTFLPVRADELAEHPMHAERWHAPAATLDALRASRAAGGRVLAIGTTSVRTLESLPFPLPEPAPTAGLAGETDLFIRPDAGFAFRNTDLLLTNFHLPRSTLLALVAALPGVGLDRLLGWYEEAIGEAYRFYSFGDAMVVV

SEQ ID NO: 70330 - protein, 347 aa, Phycisphaera sp.
  misc_feature (1)..(347): tr|A0A3R7RF95|A0A3R7RF95_9BACT S-adenosylmethionine:tRN A ribosyltransferase-isomerase OS=Phycisphaera sp. TMED 24 OX=1986832 GN=CBB84_008360 PE=3 SV=1
MTDLRTEELDFVIPDSCIATQPATPRDSARLMVVPLDGSAVQHRVVRDLPDILHHDDTLVLNHTRVLPARFHTKRHDSGGAVEGLFLQEVNGRWQCFLKAGGRLTPGLKLDWFDGQHLVLDEPAAEGWWVRPEPAGSPEGLLAAGGATPLPPYIRKARKDRAESFTDATDRDWYQTVFGDGRAASVAAPTASLHLTPELVQQFNSLRVELEVGAGTFKPVATDRLADHPMHTERCHVPRATLKALPQATRRIAVGTTALRTLESLPSPLPTEDWSAETDLLIMPGHRFRWADGLLTNFHLARSTLLALVAAFTGIDRLRDLYDEAVQEGYRFHSYGDAMLLLPGDHA

SEQ ID NO: 70331 - protein, 250 aa, Phycisphaera sp.
  misc_feature (1)..(250): tr|A0A1Z9HAU2|A0A1Z9HAU2_9BACT S-adenosylmethionine:tRN A ribosyltransferase-isomerase OS=Phycisphaera sp. TMED 151 OX=1986610 GN=CBD11_03735 PE=3 SV=1
MKAGGRLTPGLKLDWFEGQHLVLDEPADEGWWVRPEPAGSPEGLLAAGGATPLPPYIRKARKDRAESFADATDRDWYQTVFGDGRAASVAAPTASLHLTPELLQQFNTLRVELEVGAGTFKPVTTDRLADHPMHTERCHVSRATLEALPQATRRIAVGTTALRTLESLPSPLPTEDWSAETDLLIMPGHTFRWADGLLTNFHLARSTLLALVASFTGIDRLRALYDEAVQEGYRFHSYGDAMLLLPGDHA

SEQ ID NO: 70332 - protein, 393 aa, Phycisphaeraceae bacterium
  misc_feature (1)..(393): tr|A0A1Z9Q7F3|A0A1Z9Q7F3_9BACT S-adenosylmethionine:tRN A ribosyltransferase-isomerase OS=Phycisphaeraceae bact erium TMED231 OX=1986831 GN=queA PE=3 SV=1
MGLRTDQLDFELDPALVATAPVSPRDSARMLVVTLPPAELEDGASFDLEHRRIADLPEYLGAGDRLVLNETKVVPARIRGRRIDTGGGLEGLLAESAGLGRWWAMLRKSRRLRPGHEIDVLDRHGDSTGFRLRVEDTDDVGRVLVGLVDLRTGTAADAPIDEATVEAFRADAGEIPLPPYILHARRDRGLPESDPHDPDWYQTTFAAASDPTASVAAPTAGLHLTDELRRRLGDRGVEEIRISLEVGAGTFKPVEVEELDRHPMHEERCLVTPEAAAAIGRAEVDRAAGRGRVVAVGTTAVRTLESMAPVDRLPALVDGRHAWRTDLLIQPGHRFRRVDAMLTNFHLPRSTLLALVAAMTGLDRTRAIYAAAIEARYRFFSYGDAMFVRRGIA

SEQ ID NO: 70333 - protein, 347 aa, Phycisphaeraceae bacterium
  misc_feature (1)..(347): tr|A0A520QDQ8|A0A520QDQ8_9BACT S-adenosylmethionine:tRN A ribosyltransferase-isomerase OS=Phycisphaeraceae bact erium OX=2026777 GN=EVA77_02405 PE=3 SV=1
MTDLRTEELDFVIPDSCIATQPASPRDSARLMVVPLDGSAVQHRVVRDLPDILFPNDTLVLNHTRVLPARFHTTRHDSGGGVEGLFLQEVNGRWQCFLKAGGRLTPGLKLDWFEGQHLVLDEPADEGWWVRPEPAGSPEGLLAAGGATPLPPYIRKARKDRAESFADATDRDWYQTVFGDGRAASVAAPTASLHLTPELLQQFNTLRVELEVGAGTFKPVTTDRLADHPMHTERCHVPRATLEALPQATRRIAVGTTALRTLESLPSPLPTEDWSAETDLLIMPGHTFRWADGLLTNFHLARSTLLALVASFTGIDRLRALYDEAVQEGYRFHSYGDAMLLLPGDHA

SEQ ID NO: 70334 - protein, 353 aa, Phycisphaerae bacterium
  misc_feature (1)..(353): tr|A0A0S8GYY8|A0A0S8GYY8_9BACT S-adenosylmethionine:tRN A ribosyltransferase-isomerase OS=Phycisphaerae bacteri um SM23_30 OX=1703411 GN=queA PE=3 SV=1
MDVSDLDYELPQELIAQQALPMRSQSRLLILHRKDGQIEHRRFMDVIDFLQPGNCLVVNDSKVIPARFFTRRATGGKIEGLFLRLTKNGAWQVLLKNASRLCVKETIFLYPPNQSDQKKPTIAMTVLEREGRGVWQLQVESKQSPLDILQHHGVTPLPPYIHRHSTLVNEDIDRQRYQTVYAEAPGSVAAPTAGLHFDENLLERIQTKEVSIARLCLHIGLGTFEPIATDKVEEHPMHAEQYLLDQTNADMINHNIQNRGRIVAVGTTSVRTLETLAEDKRVRAGGGWTNLLITPGHKFKVVDALITNFHLPRTTLLALVCAFGGAEQVLAAYREAIGQQYRFYSYGDAMLII

SEQ ID NO: 70335 - protein, 351 aa, Phycisphaerae bacterium
  misc_feature (1)..(351): tr|A0A0S8KGI7|A0A0S8KGI7_9BACT S-adenosylmethionine:tRN A ribosyltransferase-isomerase OS=Phycisphaerae bacteri um SM1_79 OX=1703410 GN=queA PE=3 SV=1
MKTEELNYDLPSELIAQHPAPVRSDSRLLILNRSGGDILDSRFSNLGDYLSPGDCLVLNDTKVLPARFFARRSSGAKLEGLFLAQTGAGIWNVMIKGTRKLKLGEQLYLKDKQNRDACEAVLLEKTEQGRCRLKPKTDASARAVLEQIGFPPLPPYIKRGDDPTVAAEDKLRYQTVYARHTGAVAAPTAGLHFTEGLIAQLKRSGISLAYVTLHVGPGTFKPISAKNLEDHHLHEERFSIDAENARIINAARKRGGRIISVGTTSTRVLETVAVGSQIEAASGTTNLFIKPGYQFKITDALITNFHLPKSSLLALVAAFAGLDNILTAYHHAIERRYRFYSYGDAMLIRED

SEQ ID NO: 70336 - protein, 364 aa, Phycisphaerales bacterium
  misc_feature (1)..(364): tr|A0A3A4PME7|A0A3A4PME7_9BACT S-adenosylmethionine:tRN A ribosyltransferase-isomerase OS=Phycisphaerales bacte rium OX=2052180 GN=queA PE=3 SV=1
MTRPIASCSAPPGFDVRLLDYDLPERLIAQTPAERREDARMMVVDRAREALHHARVRDLPSHLTAGDLLVLNDTRVLPARLCLRRATGGRVEGLFIEEQEPGRWTVMLRSAKRCKAGEVLEFVAPERVPWHIVLASKANGGLWEVRLSPATEAQTVLLRVGAAPLPPYIRRPMAGDESTRRADIERYQTVYARAAGAVAAPTAGLHLTEALLAQLGERGVQTAFVTLHVGLGTFKPIETGLLADHRTHAERFELPGETAAAIDACRSRGGRVVAVGTTTVRVLEHCAQADGTVRPQSGATDVFIYPPYTPRVVNALLTNFHLPRSTLLALVMAFAGIELTRRAYASAVESDYRFYSYGDAMLLL

SEQ ID NO: 70337 - protein, 270 aa, Phycisphaerales bacterium
  misc_feature (1)..(270): tr|A0A349UIZ3|A0A349UIZ3_9BACT S-adenosylmethionine:tRN A ribosyltransferase-isomerase (Fragment) OS=Phycisphae rales bacterium OX=2052180 GN=DCX07_00890 PE=3 SV=1
MPMTGQVDEFDYPLDPQLIAQQPLTGRDESRLFVLRRRDEWYQHLRFRDLPTALHKGDLLVLNDTRVVPAKFFCRRETGGRVEGLFLSERADGAWEVLLKNAGKCHPGEQLAFQPEDATRLSLRENLGEGRWFVAAEPPTPAETVLHRVGVTPLPPYIHRADAARDAADRARYQTVYAARPGAVAAPTAGLHFTPELLASLEDAGIATTRLTLHVGMGTFAPVKSETVAQHRMHAEWYELPPAAAEAVNAARRDGRRVVAVGTTSVRVLE

SEQ ID NO: 70338 - protein, 357 aa, Phyllobacteriaceae bacterium
  misc_feature (1)..(357): tr|A0A2E1XTT5|A0A2E1XTT5_9RHIZ S-adenosylmethionine:tRN A ribosyltransferase-isomerase OS=Phyllobacteriaceae ba cterium OX=1871068 GN=queA PE=3 SV=1
MRVDLFDFELPESAIALRPAEPRDAARMLVVRPGSGLEDRGVLDLADLLEPGDALVFNDTRVIPAQLEGVRVRDGGEARVSATLHMRTGPDRWLAFLKPGKRVKAGDRIRFGHEGNACFLGTLEATAGEKGEGGDVELVFDLSGPALDEALHAVGHVPLPPYIASKRPEDERDRSDYQTIYAREEGAVAAPTAGLHFTPRLMERLEARGIERHFVTLHVGAGTFLPVKADDTRDHRMHSEIGHVSGETASALNAVKARGGRIVSVGTTSLRLLESAADETGRLHEWSGPTDIFITPGYRFRFIDMLMTNFHLPRSTLFMLVSAFSGLETMRAAYDHAIASGYRFYSYGDSSLLFRKD

SEQ ID NO: 70339 - protein, 359 aa, Phyllobacterium bourgognense
  misc_feature (1)..(359): tr|A0A368Z334|A0A368Z334_9RHIZ S-adenosylmethionine:tRN A ribosyltransferase-isomerase OS=Phyllobacterium bourg ognense OX=314236 GN=queA PE=3 SV=1
MRVDLFDFDLPEESIALRPAEPRDSARLLLVRADGSEFENSSVRNLGDFLQAGDALVFNDTKVIPAQLEGFREREGVKAQIGATLHMRTGPDRWKAFLRPAKRIKEGERIDFGHGNNACLLGSLQATVTEKGDAGEALLVFDFSGADLDQAIAAVGHIPLPPYIASKRADDIRDREDYQTVYAREEGAVAAPTAGLHFTPELLDDLKKRGIEEHFVTLHVGAGTFLPVKADDTADHKMHSEIGTVDQRTADALNAVKARGGRIVSVGTTSLRLLESATGEDGVIKPWSGPTDIFITPGYKFRAVDMLMTNFHLPRSTLFMLVSAFSGFERMHAAYQYAVKNNYRFYSYGDASLLWRSAS

SEQ ID NO: 70340 - protein, 397 aa, Phyllobacterium brassicacearum
  misc_feature (1)..(397): tr|A0A2P7B928|A0A2P7B928_9RHIZ S-adenosylmethionine:tRN A ribosyltransferase-isomerase OS=Phyllobacterium brass icacearum OX=314235 GN=CU102_24865 PE=3 SV=1
MITDNRSDRRSARLFVVEADGTMRDLPRTRLATLFDPGDLIVANDAATLPASLHGTHVPSGEAIEIRLAGWLSLPDPTRFVAIAFGSGDHRTRTEDRLPPPALSTGDRLRLGPLEAVVERLLDHPRLLELYFPGIRAAVLAGMAQHGQPIQYAHAPEPLALWDVWTKIAARPFAFEAPSAGFALDWRTLQAWRRRDVGFAALTHAAGVSSTGDPALDSRLPLDEPYRIPERTAAQVARAKLRGSRIIAIGTSVVRALEAAANADGSVRAGNGTATGRIARGTLLRVVDAILTGVHQPGESHFELLRAFADDALLAEASAALSASRYRAHEFGDSVLLNCQPLLRSARTEPARGARGEASRSTVFLALGALEVKIQPMASLIRLRSRRSLKITHPDML

SEQ ID NO: 70341 - protein, 359 aa, Phyllobacterium brassicacearum
  misc_feature (1)..(359): tr|A0A2P7BSM0|A0A2P7BSM0_9RHIZ S-adenosylmethionine:tRN A ribosyltransferase-isomerase OS=Phyllobacterium brass icacearum OX=314235 GN=queA PE=3 SV=1
MRVDLFDFDLPEENIALRPAEPRDSARLLLVKADASGFEDSTVRNLADFLRPGDALVFNDTKVIPAQLEGFREREGVNAQISATLHMRAGPDRWKAFLRPAKRIKQGERIDFGHGNNACLLGSLQATVTEKGDAGEALLVFDFSGADLDQAIAAVGHIPLPPYIASKRADDIRDREDYQTVFAREEGAVAAPTAGLHFTPELLDNLKRRGIEEHFVTLHVGAGTFLPVKAEDTADHKMHAEIGTVDQTTAEALNAVRARGGRIVSVGTTSLRLLESATDEHGVIKPWSGPTDIFITPGYNFRAVDMLMTNFHLPRSTLFMLVSAFSGFERMHAAYDYAVKNHYRFYSYGDASLLWRSAS

SEQ ID NO: 70342 - protein, 359 aa, Phyllobacterium endophyticum
  misc_feature (1)..(359): tr|A0A2P7AVU3|A0A2P7AVU3_9RHIZ S-adenosylmethionine:tRN A ribosyltransferase-isomerase OS=Phyllobacterium endop hyticum OX=1149773 GN=queA PE=3 SV=1
MRVDLFDFDLPEENIALRPAEPRDSARLLLVRADGADFKDSTVRNLGDFLRPGDALVFNDTKVIPAQLEGFRERDGVKAQISATLHMRAGPDRWKAFLRPAKRVKEGERIDFGHGNNACLLGSLQATVAEKGDAGEALLVFDFSGADLDQAIAAVGHIPLPPYIASKRADDVRDREDYQTVYAKEEGAVAAPTAGLHFTPELLDDLKKRGIEEHFVTLHVGAGTFLPVKADDTADHKMHAEIGIVDQFTADALNEVKARGGRIVSVGTTSLRLLESATDESGVIRRWSGATDIFITPGYKFRAVDMLMTNFHLPRSTLFMLVSAFSGFERMHAAYEYAVKNHYRFYSYGDASLLWRSTS

SEQ ID NO: 70343 - protein, 375 aa, Phyllobacterium leguminum
  misc_feature (1)..(375): tr|A0A318TEI4|A0A318TEI4_9RHIZ S-adenosylmethionine:tRN A ribosyltransferase-isomerase OS=Phyllobacterium legum inum OX=314237 GN=queA PE=3 SV=1
MPGRVEGGVWPRTIVQRQYMRVDLFDFDLPEELIALRPAEPRDSARLLLVKPGEPFADKSVSELPDLLNPGDALVFNDTKVIPAQLEGIRERDGVTAHISATLHMRVGPDRWKAFLRPGKRVKEGERICFGHDGSSCFLGTLDATVAEKGDAGEALLVFDMSGAALDEAIAAVGHIPLPPYIASKRPEDQRDRTDYQTVYAREEGAVAAPTAGLHFTPRLLEKLKQKGIEEHFVTLHVGAGTFLPVKADDTAEHKMHAEIGHVSEATANALNRVRANGGRIVCVGTTSLRLLESAADEDGVIQPWSGATDIFITPGYRFRAVDMLMTNFHLPRSTLFMLVSAFSGMDTMRAAYEHAIRENYRFYSYGDASLLWRG

SEQ ID NO: 70344 - protein, 359 aa, Phyllobacterium myrsinacearum
  misc_feature (1)..(359): tr|A0A2S9JYT8|A0A2S9JYT8_9RHIZ S-adenosylmethionine:tRN A ribosyltransferase-isomerase OS=Phyllobacterium myrsi nacearum OX=28101 GN=queA PE=3 SV=1
MRVDLFDFDLPEENIALRPAEPRDSARLLLVKADSSGFDDSSVRNLGDFLRPGDALVFNDTKVIPAQLEGFREREGVKAQVSATLHMRAGPDRWKAFLRPAKRIRQGERIDFGHGNNACLLGSLQATVAEKGDAGEALLVFDFSGADLDQAIAAVGHIPLPPYIASKRAEDGRDKEDYQTVYAREEGAVAAPTAGLHFTPDLLDDLKKRGIEEHFVTLHVGAGTFLPVKADDTADHKMHAEIGHVDQKTADALNAVKARGGRIVSVGTTSLRLLESATGEDGIIRAWSGPTDIFITPGYKFRAVDLLMTNFHLPKSTLFMLVSAFSGFERMHAAYAHAIKNHYRFYSYGDASLLWRSAS

SEQ ID NO: 70345 - protein, 365 aa, Phyllobacterium salinisoli
  misc_feature (1)..(365): tr|A0A368K703|A0A368K703_9RHIZ S-adenosylmethionine:tRN A ribosyltransferase-isomerase OS=Phyllobacterium salin isoli OX=1899321 GN=queA PE=3 SV=1
MRVDLFDFDLPEELIALRPMEPRDQARLLIVQPGSPFQDRRVDALPTMLRPGDALVFNNTKVIPAQLEGIREREGVTAHISATLHMRVGPDRWKAFLRPGKRVKEGERIRFGHEGSSCFLGTLDATVIEKGDAGEALLVFDLSGTVLDEAIAAVGHIPLPPYIASKRPEDQRDRTDYQTVYASEEGAVAAPTAGLHFTPQLLERLKQEGVEEHFVTLHVGAGTFLPVKADDTSEHKMHAEIGHVSQATADALNRVRANGGRIVCVGTTSLRLLESAADEDGTIRPWSGATDIFITPGYRFRAVDMLMTNFHLPRSTLFMLVSAFSGMDTMRQAYEHAIREGYRFYSYGDASLLERRIESNSRESA

SEQ ID NO: 70346 - protein, 359 aa, Phyllobacterium sophorae
  misc_feature (1)..(359): tr|A0A2P7BIX4|A0A2P7BIX4_9RHIZ S-adenosylmethionine:tRN A ribosyltransferase-isomerase OS=Phyllobacterium sopho rae OX=1520277 GN=queA PE=3 SV=1
MRVDLFDFDLPEENIALRPAEPRDSARLLLVKADASGFEDSCVRNLGDFLRPGDALVFNDTKVIPAQLEGFREREGVKAQISATLHMRAGPDRWKAFLRPAKRIKQGERIDFGHGNNACLLGALQATVTEKGEAGEALLVFDFSGADLDQAIAAVGHIPLPPYIASKRADDSRDREDYQTVYAREEGAVAAPTAGLHFTPGLLDDLKKRGIEEHFVTLHVGAGTFLPVKAEDTANHKMHAEIGTVDQRTAEALNAVKARGGRIVSVGTTSLRLLESATDANGVIQPWSGPTDIFITPGYKFRAVDMLMTNFHLPRSTLFMLVSAFSGFERMHAAYEYAIKNHYRFYSYGDASLLWRSAS

SEQ ID NO: 70347 - protein, 359 aa, Phyllobacterium sp.
  misc_feature (1)..(359): tr|A0A1H0E1W9|A0A1H0E1W9_9RHIZ S-adenosylmethionine:tRN A ribosyltransferase-isomerase OS=Phyllobacterium sp. O V277 OX=1882772 GN=queA PE=3 SV=1
MRVDLFDFDLPEENIALRPAEPRDSARLLLVKANTSGFEDNIVRNLGDFLQAGDALVFNDTKVIPAQLEGFREREGVKAQISATLHMRTGPDRWKAFLRPAKRIKQGERIDFGHGNNACLLGSLQATVAEKGEAGEALLVFDFSGADLDQAIAAVGHIPLPPYIASKRAEDGRDKEDYQTIYAREEGAVAAPTAGLHFTPALLEDLKKRGIEEHFVTLHVGAGTFLPVKADDTADHKMHAEIGHVDQATADALNAVKARGGRIVSVGTTSLRLLESATTPDGVVKAWSGPTDIFITPGYQFRAVDLLMTNFHLPKSTLFMLVSAFSGFERMHEAYAYAIKNHYRFYSYGDASLLWRSAS

SEQ ID NO: 70348 - protein, 359 aa, Phyllobacterium sp.
  misc_feature (1)..(359): tr|J2VFW3|J2VFW3_9RHIZ S-adenosylmethionine:tRNA ribosy ltransferase-isomerase OS=Phyllobacterium sp. YR531 OX= 1144343 GN=queA PE=3 SV=1
MRVDLFDFDLPEDNIALRPAEPRDSARLLLVKNDGSDFQDSTVRNLGDFLQEGDALVFNDTKVIPAQLEGFREREGVKAQISATLHMRAGPDRWKAFLRPAKRIKEGERIDFGDGNNACLLGSLHATVAEKGDAGEALLVFDFSGPDLDQAIAAVGHIPLPPYIASKRAEDERDQADYQTVYAREEGAVAAPTAGLHFTPELLADLKKRGIEEHFVTLHVGAGTFLPVKADDTADHKMHAEIGTVDATTAGALNAVKARGGRIVSVGTTSLRLLESATAEDGVIRPWSGPTDIFITPGYQFRAVDMLMTNFHLPRSTLFMLVSAFSGFERMHAAYDYAIKNRYRFYSYGDSSLLWRSAS

SEQ ID NO: 70349 - protein, 359 aa, Phyllobacterium zundukense
  misc_feature (1)..(359): tr|A0A2N9W4S5|A0A2N9W4S5_9RHIZ S-adenosylmethionine:tRN A ribosyltransferase-isomerase OS=Phyllobacterium zundu kense OX=1867719 GN=queA PE=3 SV=1
MRVDLFDFDLPEENIALRPAEPRDSARLLLVKANTSEFDDSSVRNLGDFLRPGDALVFNDTKVIPAQLEGIREREGVKAQISATLHMRAGPDRWKAFLRPAKRIKQGERIDFGHGNNACLLGSLQATVAEKGEAGEALLVFDFSGADLDQAIAAVGHIPLPPYIASKRADDSRDREDYQTVYAREEGAVAAPTAGLHFTPELLEDLRERGIEEHFVTLHVGAGTFLPVKADDTADHKMHAEIGTVDQPTAEALNAVKARGGRIVSVGTTSLRLLESATDENGVIQPWSGPTDIFITPGYKFRAVDMLMTNFHLPRSTLFMLVSAFSGFERMHAAYEHAIKNHYRFYSYGDASLLWRSAS

SEQ ID NO: 70350 - protein, 356 aa, Phytobacter diazotrophicus; identical to SEQ ID NO: 67067
  misc_feature (1)..(356): tr|A0A4R4B265|A0A4R4B265_9GAMM S-adenosylmethionine:tRN A ribosyltransferase-isomerase OS=Phytobacter diazotrop hicus OX=395631 GN=queA PE=3 SV=1

SEQ ID NO: 70351 - protein, 356 aa, Phytobacter ursingii
  misc_feature (1)..(356): tr|A0A0G3QDU1|A0A0G3QDU1_9GAMM S-adenosylmethionine:tRN A ribosyltransferase-isomerase OS=Phytobacter ursingii OX=1972431 GN=queA PE=3 SV=1
MRVADFSFELPESLIAHYPQPERSSCRLLSLDGPTGALAHGTFTDLLDKLNPGDLLVFNNTRVIPARLFGRKASGGKIEVLVERMLDDKRILAHIRASKAPKPGAELLLGDDESIHATMVARHDALFEVEFNDERPVLDILNAIGHMPLPPYIDRPDEEADRELYQTVYSQKPGAVAAPTAGLHFDEPLLARLREKGIEMAFVTLHVGAGTFQPVRVDSIEDHIMHSEYAEVPQEVVDAVLAAKARGNRVIAVGTTSVRSLESAAQAAKEALIEPFFGDTQIFIFPGYQYQVIDALVTNFHLPESTLIMLVSAFAGYQHTMRAYQEAVAHKYRFFSYGDAMFITYNPQAINERPGE

SEQ ID NO: 70352 - protein, 356 aa, Phytobacter ursingii; identical to SEQ ID NO: 67688
  misc_feature (1)..(356): tr|A0A508UD17|A0A508UD17_9GAMM S-adenosylmethionine:tRN A ribosyltransferase-isomerase OS=Phytobacter ursingii OX=1972431 GN=queA PE=3 SV=1

SEQ ID NO: 70353 - protein, 379 aa, Pigmentiphaga aceris
  misc_feature (1)..(379): tr|A0A5C0B0H6|A0A5C0B0H6_9BURK S-adenosylmethionine:tRN A ribosyltransferase-isomerase OS=Pigmentiphaga aceris OX=1940612 GN=queA PE=3 SV=1
MPGLTVDDFDYVLPPELIAQAPAVERRASRLLHLDPASLLHDRQFADLPSLLRPNDLLVFNDTRVIKARLFGEKSSGGKVEILVERIVETDRALVHMRASKSPKAGARLRLSNAFDATVLGRAGDGGDLFDLRFAGPVLELLEKHGQTPLPPYITHTPDQGDDARYQTVYAREPGAIAAPTAGLHFDADMLATLKAQGVNTAFVTLHVGAGTFLPVRVQNLTEHVMHSELYTVTQETVDAINAARAAGGRVIAVGTTSVRALESAATATAKTRASVAAHPALDGTSTLPRPPATLDAQSGDTRLFITPGFTFHVIDAMVTNFHLPKSTLMMLISALAGTDAVKAAYAHAVAERYRFFSYGDAMLIERPLIAPQTSAGQA

SEQ ID NO: 70354 - protein, 350 aa, Pigmentiphaga kullae
  misc_feature (1)..(350): tr|A0A4Q7NN23|A0A4Q7NN23_9BURK S-adenosylmethionine:tRN A ribosyltransferase-isomerase OS=Pigmentiphaga kullae OX=151784 GN=queA PE=3 SV=1
MRFPNPVLPVPDLTLDDFDYELPPELIAQTPAADRTASRLLHLDAQGGLHDRRFADLPGLLRPHDLLVFNDTRVIKARLFGEKSSGGKVEVLVERITEPDRALVHLRASKSPKSGAVIRLAGAFDVTMLGRQGDLFDLRFPGPVLELLAEHGQTPLPPYITHTPDTGDDARYQTVYAREPGAVAAPTAGLHFDDALLATLRAQGVRTAFVTLHVGAGTFLPVRVDKLSEHVMHSELYTLPQATVDAIAQARAAGGRVVAVGTTSVRALESAAATHWPLRETRGDTRLFITPGFEFRAVDALVTNFHLPKSTLMMLISAFAGMDPIRRAYAHAVAQRYRFFSYGDAMFIER

SEQ ID NO: 70355 - protein, 411 aa, Pigmentiphaga sp.
  misc_feature (1)..(411): tr|A0A208XMI8|A0A208XMI8_9BURK S-adenosylmethionine:tRN A ribosyltransferase-isomerase OS=Pigmentiphaga sp. NML 080357 OX=2008675 GN=queA PE=3 SV=1
MSSRGRSRPSSAITWWKSPAGRTEGNRAGPPRHRGGAVPLTKGPAEFPRIGQPRGGLSWLVFRRFFKPLAVPELTLDDFDYDLPPELIAQAPAADRTASRLLHLDAQGGLHDRQFADLPGLLRPNDLLVFNDTRVIKARLFGEKRSGGKVEVLVERITEPDRALVHLRASKSPKAGAVMRLAGAFEVTMLGREGDLFDLRFPGPVLELLAEHGQTPLPPYITHAPDAGDDSRYQTVYAREPGAVAAPTAGLHFDEPLLDTLRTQGIHTAFVTLHVGAGTFLPVRVDKLSEHVMHSELYTLPQATVEAIARARAAGGRVIAVGTTSVRALESAAAAHWPLRETRGDTRLFITPGFEFRVVDALITNFHLPKSTLMMLISAFAGMEPIRRAYAHAVARRYRFFSYGDAMFIER

SEQ ID NO: 70356 - protein, 341 aa, Pigmentiphaga sp.
  misc_feature (1)..(341): tr|A0A3G8GK38|A0A3G8GK38_9BURK S-adenosylmethionine:tRN A ribosyltransferase-isomerase OS=Pigmentiphaga sp. H8 OX=2488560 GN=queA PE=3 SV=1
MPDLTLDDFDYELPPELIAQTPAADRTASRLLHLDAQGGLHDRRFADLPGLLRPNDLLVFNDTRVIKARLFGEKSSGGKVEVLVERITEPDRALVHLRASKSPKAGATIRLAGAFDVAMLGREGDLFDLRFPGPVLELLAEHGQTPLPPYITHTPDTGDDARYQTVYAREPGAVAAPTAGLHFDDALLATLRAQGVRTAFVTLHVGAGTFLPVRVDNLSEHVMHSELYTLPQATVDAIAQARAAGGRVVAVGTTSVRALESAAATHWPLRETRGDTRLFITPGYEFRAVDALVTNFHLPKSTLMMLISAFAGMVPIRRAYAHAVAQRYRFFSYGDAMFIER

SEQ ID NO: 70357 - protein, 343 aa, Pilibacter termitis
  misc_feature (1)..(343): tr|A0A1T4RHA8|A0A1T4RHA8_9ENTE S-adenosylmethionine:tRN A ribosyltransferase-isomerase OS=Pilibacter termitis O X=263852 GN=queA PE=3 SV=1
MMSTNDFDFHLPEELIAQTPLKEREKSRLLVIDRETKNIQDKHFEDILEELNAGDALVMNDTKVLPARLFGVKVATGGMIEVLLLNNTQGDDWEVLMKPAKRAKVGTELSFGDGRLKATVVEEREHGGRIVRFSYEGIFLEVLDSLGEMPLPPYIHEKLEDKERYQTVYAENPGSAAAPTAGLHFTKELLKKIEEKGVKLVYLTLHVGLGTFRPVSVEDVNNHQMHSEFYSLSAEAARTIQEVKKNGGRIIAVGTTSIRTLETIAQKFEGNIQADSGWTDIFIYPGYQFKIVDAFSTNFHLPKSTLVMLVSAFAGKDFVLNAYQHAIDEQYRFFSFGDAMFVK

SEQ ID NO: 70358 - protein, 352 aa, Pirellula sp.
  misc_feature (1)..(352): tr|A0A142XZT7|A0A142XZT7_9PLAN S-adenosylmethionine:tRN A ribosyltransferase-isomerase OS=Pirellula sp. SH-Sr6A OX=1632865 GN=queA PE=3 SV=1
MQEPNELDLYDFDLPRELIAQDPPAQRTDSRMMLVDRASGRIEHASIRDLPSVLRAGDVMVVNDSKVIPARLVGYREKTGGRWEGLFLREENGVAELLSSTRGFLNPGESIVLRDPEGRENQRLVLASRTDQGNFLFTPSPNRPWLELLEECGRVPLPPYIRDGQMTSADRERYQTVYARSPGSVAAPTAGLHLTQELIGKVRASGVALVAVTLHVGLGTFRPIQTTRLADHKMHSEFAQISEPVVKRLQSARAEGGRIIAIGTTSVRTLETAASHGNGTLIPWSGSTDIFIQPGHAFRGVDGLLTNFHLPKSSLIVLVSTFAGRELIQEAYRKAIENRYRFYSYGDCMLIL

SEQ ID NO: 70359 - protein, 349 aa, Pirellula staleyi
  misc_feature (1)..(349): tr|D2R8T4|D2R8T4_PIRSD S-adenosylmethionine:tRNA ribosy ltransferase-isomerase OS=Pirellula staleyi (strain ATC C 27377 / DSM 6068 / ICPB 4128) OX=530564 GN=queA PE=3 SV=1
MNELDAYDFELPRDLVAQHPLPHRTDARLLVVDRAKQSIDHHHIRDLPGLLRYGDHLVMNDTRVIPARLVGRREQTGARWSGLFLSADDQGNWQVLGKTRGKLLPGEAILVLSWDLRQSIKLRLLTKLEGGVWVVRPEPLGDPWELLDSVGRVPLPPYIRDGEMIEADSTNYQTVFAKTRGAVAAPTAGLHFTPELLEKVKVAGVLSSHVTLHVGLGTFRPVTAEKLAEHVMHSEFCDVSQPAVETILKTKSRGGRVIAVGTTVARSLESAAAPTGKLEPFSGPTNLFIRPPFTFCVLDGLLTNFHLPRSTLLVLVRTFGGDELIQQAYREAIEERYRFYSYGDAMLIL

SEQ ID NO: 70360 - protein, 342 aa, Piscibacillus halophilus
  misc_feature (1)..(342): tr|A0A1H9BVS5|A0A1H9BVS5_9BACI S-adenosylmethionine:tRN A ribosyltransferase-isomerase OS=Piscibacillus halophi lus OX=571933 GN=queA PE=3 SV=1
MNIEDFDFELPEELIAQTPLVDRSSSRLMVLNREQETINHRYFYNIVDYLNPGDCLVLNNTKVMPARLFGEKEDTGGKIELLLLNQLEGDEWEVLVKPAKKVKEGTRLSFGDGLLKAVCTGQKEHGGRLIRFEYDGIFLEVLDQLGEMPLPPYIKEQLDDRDRYQTVYAEEVGSAAAPTAGLHFTEELLEQIKAKGVHIAYITLHVGLGTFRPVQVENIEEHDMHAEFYQMNQQTADLLNDVKQRDNKIVAVGTTSVRTLETIARDEDGKFKEANGWTDIFIYPPYQFKAIDAMITNFHLPKSTLIMLVSAFANKEFILNAYNEAVKERYRFFSFGDAMLIL

SEQ ID NO: 70361 - protein, 343 aa, Pisciglobus halotolerans
  misc_feature (1)..(343): tr|A0A1I3CSE1|A0A1I3CSE1_9LACT S-adenosylmethionine:tRN A ribosyltransferase-isomerase OS=Pisciglobus halotoler ans OX=745365 GN=queA PE=3 SV=1
MLTTEDFDFDLPEELIAQTPLKDRSSSRLMILDSQTGKVEDKHFTEIIDELNQGDALVMNDTRVLPARLYGTKPETGAHLEVLLLKNTQEDQWETLVKPAKRAKVGTMIEFGDGRLKAEVKEELDHGGRIIEFSYEGIFLEVLESLGEMPLPPYIKEKLEDQERYQTVYAKENGSAAAPTAGLHFTKELLEKIEEKGIHLVFLTLHVGLGTFRPVSVDNIENHKMHAEFYRLTEEAAATLNQVRQSGGRIVAVGTTSIRTLETIGTKFNGEIKADSGWTDIFIAPGYEFKVVDAFSTNFHLPKSTLVMLVSAFAGREHVLSAYQHAVEERYRFFSFGDAMFVK

SEQ ID NO: 70362 - protein, 342 aa, Piscirickettsia litoralis
  misc_feature (1)..(342): tr|A0A1E3G851|A0A1E3G851_9GAMM S-adenosylmethionine:tRN A ribosyltransferase-isomerase OS=Piscirickettsia litor alis OX=1891921 GN=queA PE=3 SV=1
MHIDAFDFELPEQLIAQYPQEKRRSSRLLHLDHQGQCQHRCFSDVVDLLNPGDLLVLNNTQVIAARLYGKKPTGGKIEILVERLISETEVLAHVKSSKAPKEGTSILLDEEGAEVIVLGRQESLFHLKFSQPVLPLLDRIGHMPLPPYMVRLDEDADRRRYQTVYAKHPGAVAAPTAGLHFDDELLAELKEKGIDVAFVTLHVGAGTFQPVRVENIHDHVMHAEWLQVSDEVVAKVNKTKQSGGRVIAVGSTSLRSLETAAESGELKAFEGESRLFVTPGFKFNVADVMITNFHLPKSTLMMLVSAFAGYDEVMTAYHIAIEEKYRFFSYGDAMFIEKKVTS

SEQ ID NO: 70363 - protein, 346 aa, Piscirickettsia salmonis
  misc_feature (1)..(346): tr|A0A0K2DXX7|A0A0K2DXX7_PISSA S-adenosylmethionine:tRN A ribosyltransferase-isomerase OS=Piscirickettsia salmo nis OX=1238 GN=queA PE=3 SV=1
MHIDAFDFELPEHLIAQYPQTERRASRLLHVNRQGQCLHRGFSEVIDLLNPGDVLVLNNTEVIAARLYGKKPTGGKIEILVERLISEYEVLAHVKASKAPQAGTQVILSEAGAEVMVLGRDESLFQLKFNQAVLPLLARIGHMPLPPYMVRPDEETDRTRYQTVYARHPGAVAAPTAGLHFDDELLAEIKDKGVEIAFVTLHVGAGTFQPVRVENIQDHVMHAEWLQVSDDVVAKVNQAQQSGGRVIAVGSTSLRSLETAAAQAEEELKAFEGESRLFITPGFNFKVVDCMITNFHLPKSTLMMLVSAFAGYDEIMTAYYRAIEEKYRFFSYGDAMFLEKKEPMKV

SEQ ID NO: 70364 - protein, 346 aa, Piscirickettsia salmonis
  misc_feature (1)..(346): tr|A0A0K2L2P3|A0A0K2L2P3_PISSA S-adenosylmethionine:tRN A ribosyltransferase-isomerase OS=Piscirickettsia salmo nis OX=1238 GN=queA PE=3 SV=1
MHIDAFDFELPEHLIAQYPQTERRASRLLHVNRQGQCLHRGFSEIIDLLNPSDVLVLNNTEVIAARLYGKKLTGGKIEILVERLISEYEVLAHVKASKAPQAGTQIILSEVGAEVMVLGRDESLFRLKFNQAVLPLLARIGHMPLPPYMVRPDEETDRTRYQTVYARHPGAVAAPTAGLHFDDELLAEIKGKGVEIAFVTLHVGAGTFQPVRVENIQDHVMHAEWLQVSDDVVAKVNQAQRSGGRVIAVGSTSLRSLETAAAQAEEELKAFEGESRLFITPGFNFKVVDCMITNFHLPKSTLMMLVSAFAGYDEIMTAYYLAIEEKYRFFSYGDAMFLEKKEPMKV

SEQ ID NO: 70365 - protein, 341 aa, Piscirickettsiaceae bacterium
  misc_feature (1)..(341): tr|A0A2A4WHH0|A0A2A4WHH0_9GAMM S-adenosylmethionine:tRN A ribosyltransferase-isomerase OS=Piscirickettsiaceae b acterium OX=2030828 GN=queA PE=3 SV=1
MKKSDFNYQLPNELIARYPLDKRTDSRLLVVNEKKLTDDCFTDLTSLLKAGDLLVFNNTRVIPARLFGQKTTGGKLEVLIERVIDDTHALAHIRCSKSPKAGATILLTGGHECMVEGRDDDLFKLKFAESITVVLEDIGHMPLPPYIDREDESLDVERYQTVFSKTPGAVAAPTAGLHFDLDILNKIRSLGIDFAYVTLHVGSGTFQPVREENLDDHIMHKEWLTVNKAVVDKVNETKQKGGRVVAVGTTAMRSLESAAKDGILKPYTGDTDLFITPGYHFNVVDAMVTNFHLPESTLLMLVSAFSGYQRIKDVYQHAIEQKYRFFSYGDAMFLSRMNDKG

SEQ ID NO: 70366 - protein, 350 aa, Piscirickettsiaceae bacterium
  misc_feature (1)..(350): tr|A0A2M7M5Y5|A0A2M7M5Y5_9GAMM S-adenosylmethionine:tRN A ribosyltransferase-isomerase OS=Piscirickettsiaceae b acterium CG_4_10_14_3_um_filter_44_349 OX=1974075 GN=qu eA PE=3 SV=1
MQRQDFHFNLPDALIAQKPPESRTDSRLLVLEADGRLSDCHFPDILEYLQPNDCLIFNNTRVIPARLFGQKQSGGKVELLIERVLDANRVLTHIRASNAPKPGDALTIAEAFQAVVIGREGALFELQFQQEDGPDLTALDLIERYGHIPLPPYISREDAVEDKTRYQTVYSQIPGAVAAPTAGLHFDEPLLKKIAEKGVKIGFVTLHVGAGTFKPVQVDDIARHKMHSEVIEVLPETVALIEQTRQKGGRVIAVGTTSVRCLESAARFSKTGELAPYQGETDIFITPGVDFKVVEVLLTNFHLPESTLIMLVSAFAGHKRTLSAYEHAVAQSYRFFSYGDAMLVFPQNKT

SEQ ID NO: 70367 - protein, 342 aa, Pistricoccus aurantiacus
  misc_feature (1)..(342): tr|A0A5B8SKZ3|A0A5B8SKZ3_9GAMM S-adenosylmethionine:tRN A ribosyltransferase-isomerase OS=Pistricoccus aurantia cus OX=1883414 GN=queA PE=3 SV=1
MQRADFHYDLPEELIARYPSERRSDCRLLCVAGESGTLSHRHFTDLLDLLEPGDLLVFNDTRVIPARLHGVKASGGRVEMLLERPLDAWRGLAHLRSSKSPKPGTELVFEGDIHAVVEGRRGALFELRFLGDTPLIELLERHGHMPLPPYITREDELSDRERYQTVYARQDGAVAAPTAGLHFDEAMLAALEEKAVESAFVTLHVGAGTFQPVRAEDIRDHQMHSEWIDVSETVCRQVRTAKARGKRVIAVGTTSVRCLETASATGEIAPYQGDTDIFIYPGYEWRCVDGLITNFHLPESTLLMLVASFAGFETVMGAYQEAVAQRYAFFSYGDAMLLTRRV

SEQ ID NO: 70368 - protein, 355 aa, Planctomicrobium piriforme
  misc_feature (1)..(355): tr|A0A1I3G850|A0A1I3G850_9PLAN S-adenosylmethionine:tRN A ribosyltransferase-isomerase OS=Planctomicrobium piri forme OX=1576369 GN=queA PE=3 SV=1
MLSLDQINAYDYSLPEELIAQVPAERRDESRLLVVNRQSGSISHHRFRDLPELLRPHDLLVLNDTRVVPARLIGHRAATGGKWEGLFLRLEDDGAWRLIGQTRGTLRAGERLTLSPADPNAASPASQLDLILEARNGDGTWRVRPDSEVPAMTLLEQFGTLPLPHYMQRDAEIADRDRYQTTYAEKPGAVAAPTAGLHFTPEVFAACQTRQIETAHVTLHVGLGTFRPVSVDNLSEHRMHSEWCELSVKSAQQIADTKATGGRIVAVGTTSVRTLESVAQQGQLRAWQGETNLFIRPPFQFQIVDALITNFHLPRSTLLVLVCTFAGRELMLAAYEEAIRERYRFFSYGDAMLIV

SEQ ID NO: 70369 - protein, 138 aa, Planctomyces bekefii
  misc_feature (1)..(138): tr|A0A5C6M2F2|A0A5C6M2F2_9PLAN S-adenosylmethionine:tRN A ribosyltransferase-isomerase (Fragment) OS=Planctomyc es bekefii OX=1653850 GN=E3A20_25370 PE=3 SV=1
MATPDPDLLSTWQFELPEHLIASRPAASRDDSRLMILNRRLGTIEHAWIRDLPDRLNSEDLLVFNNTQVIPARLFGYRQQTGGRWEGLYVESDASGNWILLCETRGKLQPGERIQVVPADCWQRDDLHPQSAGSYSRL

SEQ ID NO: 70370 - protein, 357 aa, Planctomyces sp.
  misc_feature (1)..(357): tr|A0A2E0SKJ3|A0A2E0SKJ3_9PLAN S-adenosylmethionine:tRN A ribosyltransferase-isomerase OS=Planctomyces sp. OX=3 7635 GN=queA PE=3 SV=1
METISDYDYTLPERLIAAAPPEDRTAARLMVIRRETGAIEHRGIRDLPQLLTPGDCLVLNNTRVIPAKLHGYRTSTGGKWEGLYLGQAEGGDWRVIGQTRGKLQPGETISLVPGDIEGVDDTTAIPPLELELIERRPEEGSWVMRPRSDRGFLELLDEYGSVPLPPYIKRDEEKSFDRERYQTTYAKQPGSVAAPTAGLHFTPELLEECRACGIAVGWVTLHVGLGTFRPVKVEQLSDHQMHAEWCEVPEETVSMIRRTKESDGNVVAIGTTTVRTLESASQSGSLQPWAGETDLFIRPPYRFKTVDQLVTNFHLPKSTLLVLVSTLAGHELIRRAYAQAMEQEYRFFSYGDAMLIL

SEQ ID NO: 70371 - protein, 352 aa, Planctomyces sp.
  misc_feature (1)..(352): tr|A0A2E8F3P7|A0A2E8F3P7_9PLAN S-adenosylmethionine:tRN A ribosyltransferase-isomerase OS=Planctomyces sp. OX=3 7635 GN=queA PE=3 SV=1
MLTSDFDYHLPQDLIAQTPIEPRDSSRLLVLDRAFGLLQHKHFHQIFEYLKPGDVMVFNESRVIAARLRGRRTDTGGKVEFLLLRRESQGVWQALAKPGRRLKAGATVTLETPGHDQSESTRATVDVEVLDSGQDGVKTIRLLREDDIDRFGVMPLPPYIHDRLEDPERYQTVYSRQLGSAAAPTAGLHFTQELMAGLTQIGVEQTFVTLHVGLDTFRPVQDDDPNQHRIHTEYYELSQETADLLNRAKSNGQRIIAVGTTSVRVLEHTAQEMERQGRDRLVECQGQADIFILPGYRFRLVDAMVTNFHLPRSTLLMLVSAFAGRETMLAAYQEAIRERYRFYSFGDAMLML

SEQ ID NO: 70372 - protein, 348 aa, Planctomycetaceae bacterium
  misc_feature (1)..(348): tr|A0A1Z8MM32|A0A1Z8MM32_9PLAN S-adenosylmethionine:tRN A ribosyltransferase-isomerase OS=Planctomycetaceae bac terium TMED10 OX=1986833 GN=queA PE=3 SV=1
MSELNAYDYTLPKERIAQQPLAHRSDARLMVVDRKSDSIEHRYVRDLPQLLAAGDSLVLNDTRVVAARLVGKRTATGGRWEGLFLESDAGGLWKVLGRTRGKIGAGESVQLIDREGRPATTLTLIAQEDDSSWIVHTDSEQEPYQLLEQVGRTPLPPYIRGGEMLPEDESRYQTVYARHPGSVAAPTAGLHFTDALLEQLSAAKIQRQEVTLHVGTGTFRPIASDSLSEHPMHSEWAQLSPATASALTRVRNEGHRVVAVGTTSMRVIETAAHGGTLGAFEGPTDLFIHPPYTFQGVDALLTNFHLPRTTLLVLVRTFGGDRLIRRAYELAVEEEYRFYSYGDAMLIL

SEQ ID NO: 70373 - protein, 358 aa, Planctomycetaceae bacterium
  misc_feature (1)..(358): tr|A0A3D1DEK0|A0A3D1DEK0_9PLAN S-adenosylmethionine:tRN A ribosyltransferase-isomerase OS=Planctomycetaceae bac terium OX=2026779 GN=queA PE=3 SV=1
MSKPESTDQLSVFDYHLPDELIAREPLERRDASRLLVVDRERQHIESRLIQDLPDLVDPGDCLVVNDTRVLPAKLAGHRVATGGAWEGLFLGSEEDGRWRIIGQTRGRLQPGETISLVPVHPPAFPVPDQELRLLEQIAGGIWRAAPFPPGQPMELLERFGTMPLPPYIQRHIATDLDRQRYQTVFARHPGAVAAPTAGLHLSEDLIDRCRQNGLGFEHLTLHVGLGTFRPISSETLDDHVMHSEWCRISHATCQALNKIKQSRRRVVAVGTTVVRTLESASAGGTLEKFDDTTDLFIRPGHQFRSIDALLTNFHLPRSTLFVLVCAFCGTDLAQEAYRMAIANRYRFYSYGDAMLIL

SEQ ID NO: 70374 - protein, 349 aa, Planctomycetales bacterium
  misc_feature (1)..(349): tr|A0A1W9TBM6|A0A1W9TBM6_9BACT S-adenosylmethionine:tRN A ribosyltransferase-isomerase OS=Planctomycetales bact erium 4572_13 OX=1971638 GN=queA PE=3 SV=1
MKTEDLNYSLPQELIAQHPSEKRRQSRLLVLDRAAKTRADRRFSDLGGYLQAGDCLVLNNTKVVPARFYGRKQTGAQLEGLFIHEEPDGEWQVLLKNARKVKSGEEIELLDRTGSVWGRAVTNRSEVKGQWRLRPNEPIDAFSALEQIGLPPLPPYIKRGREDTSTPEDLQRYQTVYATQPGAVAAPTAGLHFDEPTLEKIKNLGVELAYITLHVGIGTFRPVQTETLDEHPMHEERYEVGKGAAATINDTVDVGGRIIAVGTTSVRTLESVAKNHHIQPAQGQTKLFIQPGYNFKIVDAILTNFHLPKSTLLALVGAFAGIDTVLNAYQHAIKQKYRFYSYGDAMFIY

SEQ ID NO: 70375 - protein, 365 aa, Planctomycetales bacterium
  misc_feature (1)..(365): tr|A0A1V4QY76|A0A1V4QY76_9BACT S-adenosylmethionine:tRN A ribosyltransferase-isomerase OS=Planctomycetales bact erium 4484_113 OX=1956161 GN=queA PE=3 SV=1
MLHYDLPPELVPQQPLADRDASRLMVVHRQTADIEHRAFRELPDILEPMDFLVLNDGRVMHSRFRCLRARTGGKVEVLITRVLPGSRAECLTESRGHLQAGDELTLDSQTSFILERPTTHENPGIVHILRNGVPAPEQEIRDLLQRGELPLPPYLKERLQDEERYQTTYAASFGSAAAPTAGLHFTPRIFSRLKERGVDWAMVTLHIGTATFLPIRTDDVTDHRLSPEGYSMKPTELRRILKAKLSGRRIVAVGTTSVRVLEGVLTDWRRRLQVHGIKTTRDLEAMNDDQLAEAFPLRGDTRLFILPGYRFGVIDHMLTNFHLPRTTLLALVYAFGGRELIRRAYESAIARRYRFYSLGDSMLIL

SEQ ID NO: 70376 - protein, 361 aa, Planctomycetes bacterium
  misc_feature (1)..(361): tr|A0A5C6EEJ9|A0A5C6EEJ9_9BACT S-adenosylmethionine:tRN A ribosyltransferase-isomerase OS=Planctomycetes bacter ium Poly59 OX=2528013 GN=queA PE=3 SV=1
MNEIDQYDYDLPKELIAQEPLATRSDSRLMLVDRATGSIAHHYVRDLPELLSAGDTLVMNNSRVVPARLVGQRANTGGRWQGLFLQADRETGIWEVLTKTRGTLREGEAITIKDRDARDGMELIVVARTGDGKLLVKPRLTADMAVVMGDKLKEPADWLDRFGRIPLPPYIRDGQMVDADLQNYQTVFAKDRGSVAAPTAGLHFTKTLLEKVRAAGVDTAEVTLHVGIGTFRPIQTEQLDDHVMHTEWGSIDASTVDNIRSRRARGRCIAVGTTSVRVLESSAAKNGGKLTPWTGETDLFIRPPYQFNVIDGMMTNFHLPKSSLLVLVSAFAGRELAMKAYRTAIENEYRFYSYGDAMLIL

SEQ ID NO: 70377 - protein, 351 aa, Planctomycetes bacterium
  misc_feature (1)..(351): tr|A0A517X9U0|A0A517X9U0_9BACT S-adenosylmethionine:tRN A ribosyltransferase-isomerase OS=Planctomycetes bacter ium CA11 OX=2527988 GN=queA PE=3 SV=1
MTDLNAFDYQLPLELIATEPTQQRDQSRLLILDRKSQSITHGSISDLPRYLNPDDCLVLNNTRVLSARLFGTRQSTGGKWEGLYLGSNSLGEWKLMSKTRGKLNPGDIIELRPAHQRSLEKQVTLKLLSKDTEGYWTALVKSDEDHHSLLAHFGTMPLPPYMKRNLATEEDWERYQTVYAAQPGAVAAPTAGLHFTPELLERCTAQGTRIANVTLHVGIGTFKPISVETLEAHKMHSEWCELPAESAELLNQSRRQGGRIVCVGTTSVRTLESVAQQGPLQAWQGETDIFIYPPYQFQAVDCLLTNFHLPKSTLLVLVSAFAGAEFIREAYKKAVEAEYRFYSYGDAMLIL

SEQ ID NO: 70378 - protein, 154 aa, Planctomycetia bacterium
  misc_feature (1)..(154): tr|A0A3D3KPR2|A0A3D3KPR2_9BACT S-adenosylmethionine:tRN A ribosyltransferase-isomerase (Fragment) OS=Planctomyc etia bacterium OX=2052181 GN=DIS73_06270 PE=3 SV=1
  misc_feature (153)..(153): Xaa can be any naturally occurring amino acid
QPLLEEIRCMGVEIIRVTLHVGLGTFMPIRSDVITHHRMEKEYFELDTDAARRLNEVRNRGGKIVAVGSTCCRVLETLAQGGGIKASKGWTDLFIHPPYKFKMVNTLLTNFHLPKTTLLVLVATFAGRTKILDAYAEAVEKGYRFYSYGDAMXE

SEQ ID NO: 70379 - protein, 353 aa, Planctomycetia bacterium
  misc_feature (1)..(353): tr|A0A1Z8SU96|A0A1Z8SU96_9BACT S-adenosylmethionine:tRN A ribosyltransferase-isomerase OS=Planctomycetia bacter ium TMED53 OX=1986839 GN=queA PE=3 SV=1
MEIESGENHHSLSRYDFDLPESLIAQEPASNRSGSRCIFAERGLPGHQSGHFTDLIQQLNGDELLVYNDTRVIPARIHGNRSTGGKVEIFILRPARDGHSWIAWISPSKRIKPGEVIFGPDVEITVHEREGSSWRIEWPSDISLEEIGEVPLPPYIRRDVDQPDRSELDRERYQTVFAKTPGAVAAPTAGLHFDETLLDQLKARGVERCPVTLHVGPGTFKPIESEDLRDHKVDPEWFSISRESRQTLHEAQQQGRPIIAVGTTSLRVLETLEDLSPGEEIVGETDLTILPGYQFRHVDGLLTNFHLPGSSLLVLVSCFHGVENTLEIYRYAIENEFRFYSYGDCMLIKPGSH

SEQ ID NO: 70380 - protein, 364 aa, Planctopirus ephydatiae
  misc_feature (1)..(364): tr|A0A518GQ11|A0A518GQ11_9PLAN S-adenosylmethionine:tRN A ribosyltransferase-isomerase OS=Planctopirus ephydati ae OX=2528019 GN=queA PE=3 SV=1
MSSSPDFESLSTYDYELPPELIAQHPLPERDASRMLVIHRSKGMIEHRFIKELPLFLKPHDLIVVNNSKVVPARLQGVRASTSGKWEGLFLGVTTSGEWQIIGQTRGRLQSGEWITIPVPATHVESTESRQHPDLQLQLIERGEGGIWKACPQSQVSTWDLLEQYGSMPLPPYIHRDDEEVEDRVRYQTIFSGPQGSVAAPTAGLHFTPALRDRCAASGAKFAEVTLHVGMGTFRPVSSERIAEHKMHTETCELSEDVARKIQSTRSQGGKVLAIGTTSARTLESAARKVGVGLPWQGETNLFLRPPCEFLQVEALLTNFHVPKSTLLMLVCAMAGYDLTMQAYQEAVEQRYRFLSYGDCMLIL

SEQ ID NO: 70381 - protein, 364 aa, Planctopirus hydrillae
  misc_feature (1)..(364): tr|A0A1C3EHD2|A0A1C3EHD2_9PLAN S-adenosylmethionine:tRN A ribosyltransferase-isomerase OS=Planctopirus hydrilla e OX=1841610 GN=queA PE=3 SV=1
MSSSPDFESLSTYDYELPPELIAQHPLPERDASRMLVIHRSKGTIEHRFIKELPLFLKPNDLIVVNNSKVVPARLQGVRASTGGKWEGLFLGVTTSGEWQIIGQTRGRLVAGEWITIPVPATHIENAASRQNSDLQLQLIERGEGGIWKASPQSEISTWDLLEQYGSMPLPPYIHRDDEEAEDRVRYQTIFSGPQGSVAAPTAGLHFTPALRDRCAASGAKFAEVTLHVGMGTFRPVSSERIAEHQMHTETCELSEDVAQKIRSTKSEGGRVLVIGTTSARTLESAARKVGVGLPWQGETNLFLRPPCEFLQVEALLTNFHVPKSTLLMLVCAMAGYDLTMQAYKEAVEQRYRFLSYGDCMLIL

SEQ ID NO: 70382 - protein, 364 aa, Planctopirus limnophila
  misc_feature (1)..(364): tr|D5SXQ5|D5SXQ5_PLAL2 S-adenosylmethionine:tRNA ribosy ltransferase-isomerase OS=Planctopirus limnophila (stra in ATCC 43296 / DSM 3776 / IFAM 1008 / 290) OX=521674 G N=queA PE=3 SV=1
MSSSPDFESLSTYDYELPPELIAQHPLPERDASRMLVIHRSTGMIEHRFIKELPLFLKPHDLIVVNNSKVVPARLQGVRASTGGKWEGLFLGVTTSGEWQIIGQTRGRLVAGEWITIPVPATHIENAASRQNSDLQLQLIERGEGGIWKASPQSEISTWDLLEQYGSMPLPPYIHRDDEEAEDRVRYQTIFSGPQGSVAAPTAGLHFTPALRDRCAASGAKFAEVTLHVGMGTFRPVSSERIAEHQMHTETCELSEDVAQKIRSTKSEGGRVLAIGTTSARTLESAARKVGVGLPWQGETNLFLRPPCEFLQVEALLTNFHVPKSTLLMLVCAMAGYDLTMQAYKEAVEQRYRFLSYGDCMLIL

SEQ ID NO: 70383 - protein, 343 aa, Planifilum fimeticola
  misc_feature (1)..(343): tr|A0A2T0LBX9|A0A2T0LBX9_9BACL S-adenosylmethionine:tRN A ribosyltransferase-isomerase OS=Planifilum fimeticola OX=201975 GN=queA PE=3 SV=1
MDVSEFDFHLPEELIAQSPPPRRADSRLMVLDRETGELEHRRFSDLTEYLRPGDVLVINDTRVRPARLIGMKKETGGRVEILLLKPLGEDRWEVLAKPARRLKPGSTILFGNGELQAVVEGESGVAGGRIVRLAYEAEDLEALLERLGEMPLPPYIRKRLEDPERYQTVYARAVGSAAAPTAGLHFTPELLEEIRDKGVDIASVTLHVGLGTFRPVTAERVEEHRMHAEYYEVGEAAAERIRSARKRGGRVVAVGTTSVRTLETVAGLHGEIVPAKGWTDIFIYPGYRFRAVDALITNFHLPRSTLLMLVSAFASRRQILAAYEEAVNQRYRFFSFGDAMLIL

SEQ ID NO: 70384 - protein, 343 aa, Planifilum fulgidum
  misc_feature (1)..(343): tr|A0A1I2QVE5|A0A1I2QVE5_9BACL S-adenosylmethionine:tRN A ribosyltransferase-isomerase OS=Planifilum fulgidum O X=201973 GN=queA PE=3 SV=1
MDVSEFDFHLPEELIAQSPPPRRTDSRLMVLHRETGELEHRRFSDLTEYLRPGDVLVINDTRVRPARLIGMKKETGGRVEILLLKPLGEDRWEVLAKPARRLKPGSTLLFGNGELQAVVEGESGVAGGRIVRLRYEGKDLEALLDRLGEMPLPPYIRKRLDDPERYQTVYARAVGSAAAPTAGLHFTTELLEEIRGKGVDIASITLHVGLGTFRPVTAERVEDHRMHAEYYEVGEKAAEKIRAARKRGGRVVAVGTTSVRTLETVAGLHGRIVPAKGWTDIFIYPGYRFRVVDALITNFHLPRSTLLMLVSAFASRRRILAAYEEAVKLRYRFFSFGDAMLIL

SEQ ID NO: 70385 - protein, 348 aa, Planktomarina sp.
  misc_feature (1)..(348): tr|A0A2E0AFF7|A0A2E0AFF7_9RHOB S-adenosylmethionine:tRN A ribosyltransferase-isomerase OS=Planktomarina sp. OX= 2024851 GN=queA PE=3 SV=1
MYLSDFDFELPKKLIATRPTSPRGNAKLLVSSSGRLHDSRVGNICNFLRPGDRLVLNNTKVIPARLDGVRFRQSAQGPVQAKIAITLVKPLPNGNWEALIKPLRKVKVGEKIIFKKGLIATCIKKLDGKGLLAFSVKGDELDEVLDKIGDMPLPPYIASRRPADAQDHLDYQTVWAKHPGAVAAPTASLHLDEHVLSALSNHGVDITFVTLHVGAGTFLPVTVDDIRKHKMHAEWGYVGSKAAQEIKSTKSKGGRIIPVGTTALRLIETASLTGMIKPFDGDTEIFIHPGFKFKVTDGLLTNFHLPKSTLLMLVSAFVGKSELDNIYQHAIDMSYQFFSYGDASLLFP

SEQ ID NO: 70386 - protein, 352 aa, Planktotalea frisia
  misc_feature (1)..(352): tr|A0A1L9NZ24|A0A1L9NZ24_9RHOB S-adenosylmethionine:tRN A ribosyltransferase-isomerase OS=Planktotalea frisia O X=696762 GN=queA PE=3 SV=1
MKLSDFDFDLPDRLIATRPVSPRSSARLLLAQAGSIQDWHVYDLPEIFLPGDVLVLNNTKVIPARLFGLRRRESEHGSGEAKIEVTLLEPSADQGSWRALIKPLRKVKEGEVIVFSDVLSATLTGKEVGQGVLKFNLQGDDFDAALADAGAMPLPPYIAAKRAADEQDKDDYQTVFAEHSGAVAAPTASLHFDEDLLENLRGRGVEFAHVTLHVGAGTFLPVKVDDVTTHKMHAEWGQVSATAADQILRAKKEGRRVIPVGTTALRLIESAAAASGEIAPWEGETDIFIYPGFKFNVADALMTNFHLPKSTLMMLVAALMGKARMDEIYAHAIAENYRFFSYGDSSLLVPSK

SEQ ID NO: 70387 - protein, 372 aa, Planktothricoides sp.
  misc_feature (1)..(372): tr|A0A0M1JKB8|A0A0M1JKB8_9CYAN S-adenosylmethionine:tRN A ribosyltransferase-isomerase OS=Planktothricoides sp. SR001 OX=1705388 GN=queA PE=3 SV=1
MSESQNFDLMLTAYDYKLPEERIAQNPVVPRDASRLLVVKSPTEHSHHIFRELPELLQPGDLLILNNTRVIQARLYGRKSTGAPVEVLLLEESQANIWLALVKPGRRLKPGAQIEFEPASEALQSEALQNGAIPAPFTAKVLATEESTGGRFIELFLPTGATLAQVLQVYGHVPLPPYITKSSALPSQYQTVYAEKPGSVAAPTAGLHFTEELLTRLEQRRIQRAFVTLNVGVGTFRPVEVENVTQHEMHSEWALVPESTVAKIRETKAQGGRVIAVGTTAVRSLEGAAAGGELQPLCGKTDLFIYPGYQWQVVDGLITNFHLPKSSLLMLVSALVGRQRLLDLYQEAIAHQYRFYSFGDAMLILPTAKAHG

SEQ ID NO: 70388 - protein, 378 aa, Planktothrix agardhii
  misc_feature (1)..(378): tr|A0A2Z6CDQ1|A0A2Z6CDQ1_PLAAG S-adenosylmethionine:tRN A ribosyltransferase-isomerase OS=Planktothrix agardhii NIES-204 OX=282423 GN=queA PE=3 SV=1
MDQLDYQLESYNYELPEERIAQNPVVPRDNSRLLVVDSPDSHRHCLFKDLPEFLRPGDLLVLNNTRVLPARLYGHKSSGAEVEVLLLEEKQHHCWLALVKPGKKFKPGSVIEFELNPTSKNNFNCERLQATVLETDEETGGRLLKFEIPPGKSLIPFLEAFGNIPFPPYLTETEALPEQYQTIYAERSGAVAAPTAGLHFTEELFQRLQLKGIDQVFLTLHVGVGTFRPVEVDNIIDHQMHGEWIEVPAETFEKIAKTKASGGRVIAVGTTSARALEGAAVALANATETPQKSTFTGYCGKTDIFIYPGYQWQIINGLITNFHLPKSSLLMLVSALIGRKRLLNLYQQVLEEPANEFGQQYRFYSFGDAMFIAPESVL

SEQ ID NO: 70389 - protein, 378 aa, Planktothrix agardhii
  misc_feature (1)..(378): tr|A0A073CDP5|A0A073CDP5_PLAAG S-adenosylmethionine:tRN A ribosyltransferase-isomerase OS=Planktothrix agardhii NIVA-CYA 126/8 OX=388467 GN=queA PE=3 SV=1
MDQLDYQLESYNYELPEERIAQNPVVPRDNSRLLVVDSPDSHRHCLFKDLPEFLRPGDLLVLNNTRVLPARLYGHKSSGAEVEVLLLEEKQHHCWLALVKPGKKFKPGSVIEFELNPTSKNNFNCERLQATVLETDEETGGRLLKFEIPPGKSLIPFLEAFGNIPFPPYLTETEALPEQYQTIYAERSGAVAAPTAGLHFTEELFQRLQLKGIDQVFLTLHVGVGTFRPVEVDNIIDHQMHGEWIEVPAETFEKIAKTKASGGRVIAVGTTSARALEGAAIALANATETPQESTFTGYCGKTDIFIYPGYQWQIINGLITNFHLPKSSLLMLVSALIGRKRLLNLYQQVLEEPANEFGQQYRFYSFGDAMFIAPESVL

SEQ ID NO: 70390 - protein, 378 aa, Planktothrix rubescens
  misc_feature (1)..(378): tr|A0A1J1L4P4|A0A1J1L4P4_PLARU S-adenosylmethionine:tRN A ribosyltransferase-isomerase OS=Planktothrix rubescen s OX=59512 GN=queA PE=3 SV=1
MDQLDYQLESYNYELPEERIAQNPVVPRDNSRLLVVDSPDSHRHCLFKDLPEFLRPGDLLVLNNTRVLPARLYGHKSSGAEVEVLLLEEKQHHCWLALVKPGKKFKPGSVIEFELNPTSKNNFNCERLQATVLETDEETGGRLLKFEIPPGKSLIPFLEAFGNIPFPPYLTETEALPEQYQTIYAERSGAVAAPTAGLHFTEELFQRLQLKGIDQVFLTLHVGVGTFRPVEVDNIIDHQMHGEWIEVPAETFEKIAKTKASGGRVIAVGTTSARALEGAAVALANATETPQESTFTGYCGKTDIFIYPGYQWQIINGLITNFHLPKSSLLMLVSALIGRKRLLNLYQQVLEEPANEFGQQYRFYSFGDAMFIAPESVL

SEQ ID NO: 70391 - protein, 381 aa, Planktothrix sp.
  misc_feature (1)..(381): tr|A0A3C1RVH0|A0A3C1RVH0_9CYAN S-adenosylmethionine:tRN A ribosyltransferase-isomerase OS=Planktothrix sp. UBA8 407 OX=2055758 GN=queA PE=3 SV=1
MDQLDYQLESYNYELPEERIAQNPVVPRDNSRLLVVDSLISHRHCLFKDLPEFLRPGDLLVLNNTRVLPARLYGHKSSGAAVEVLLLEEKQHNCWLALVKPGKKFKPGSVIEFELNPLSKNKFNCQNLRATVLETNGETGGRLLKFDLAPGKSLIPFLEMFGNIPFPPYVTKTEALPEQYQTIYAERSGAVAAPTAGLHFTEELFQRLQSKGIDQTCLTLHVGVGTFRPVEVDNIIEHQMHGEWINVSAETFEKIEKTKASGGRVIAVGTTSVRALEGAAIALSEKSISTENHKESAFTGYCGKTSIFIYPGYKWQIIDGLITNFHLPKSSLLMLVSALIGRERLLNLYQQVLEEPANQFGQQYRFYSFGDAMFILPESVL

SEQ ID NO: 70392 - protein, 381 aa, Planktothrix sp.; identical to SEQ ID NO: 70391
  misc_feature (1)..(381): tr|A0A354WKE0|A0A354WKE0_9CYAN S-adenosylmethionine:tRN A ribosyltransferase-isomerase OS=Planktothrix sp. UBA1 0369 OX=2055760 GN=queA PE=3 SV=1

SEQ ID NO: 70393 - protein, 385 aa, Planktothrix tepida
  misc_feature (1)..(385): tr|A0A1J1LDL9|A0A1J1LDL9_9CYAN S-adenosylmethionine:tRN A ribosyltransferase-isomerase OS=Planktothrix tepida P CC 9214 OX=671072 GN=queA PE=3 SV=1
MDQLDYWLESYNYQLPEERIAQNPVVPRDHSRLLVVDSPNSHRHCLFKDLPEFLRPGDLLVLNNTRVLPARLYGRKSSGAVVEVLLLEEKSHQTWLALVKPGKRFKSGSVIEFESISDSTTNFNPKLLRAIVLETDEETGGRLLKFEIPEEQSLIPLLEQFGNIPFPPYVTETEALPEQYQTIYAKHSGAVAAPTAGLHFTEELFQRLEQQGIDKTFLTLHVGVGTFRPVEVNQITEHQMHGEWIEVPAETIEKIEKTKASGGRIIAVGTTVVRALEGAAIAHSSNSGTSTENSKESALKSYCGKTNIFIYPGYQWRVIDGLITNFHLPKSSLLMLVSALIGRERLLSLYQAVLEEPANDFGRQYRFYSFGDAMFILPEATLKRE

SEQ ID NO: 70394 - protein, 350 aa, Planococcus antarcticus
  misc_feature (1)..(350): tr|A0A1C7DKZ3|A0A1C7DKZ3_9BACL S-adenosylmethionine:tRN A ribosyltransferase-isomerase OS=Planococcus antarctic us DSM 14505 OX=1185653 GN=queA PE=3 SV=1
MNIQDYDFRLPEELIAQTPLLDRTSSRLLVMNKVTGDTAHRHFRDITDYLHEGDTLVLNDTRVLPARLMGVKEDTGANIELLLLKQVEDGVWETLAKPAKKVKIGTIVSFGEGLLRAECTGILDHGGRHFKMIYDGIFYEILDQLGEMPLPPYIREKLEDQDRYQTVFAKERGSAAAPTAGLHFTDELLEEIRKKGVNIAFITLHVGLGTFRPVSVDSIEDHEMHSEFYRITQETADLINQTRQQGGRIVSVGTTSTRTLESVAQKFDGELQEDSGWTDIFIFPGYKFKAIDGLITNFHLPKSTLVMLVSALSNRDHILNAYQQAVDERYRFFSFGDAMFIEPQKKETHQ

SEQ ID NO: 70395 - protein, 359 aa, Planococcus citreus
  misc_feature (1)..(359): tr|A0A497YFN5|A0A497YFN5_9BACL S-adenosylmethionine:tRN A ribosyltransferase-isomerase OS=Planococcus citreus O X=1373 GN=queA PE=3 SV=1
MTKLTNEQQLNVNDFDFELPEELIAQTPLLDRTSSRLLVMDKETGAVEHKHFRDILGHLHTGDTLVLNDTRVLPARLMGTKEETGANIEVLLLKQTEEDVWETLVKPAKKVKIGTVVSFGDGLLRAECTGVLDHGGRHFKFIYDGIFYEILDQLGEMPLPPYIREKLEDQDRYQTVFAKERGSAAAPTAGLHFTDELLGEIRNKGVNIVFITLHVGLGTFRPVSVESIEDHEMHAEFYRITKETADLINDTKQKGGRVISVGTTSTRTLESVAKKFGGKLQEDNGWTDIFIYPGYRFEAVDGLITNFHLPKSTLVMLVSAMSNRDAILNAYNEAVQERYRFFSFGDAMFIEPQKKETES

SEQ ID NO: 70396 - protein, 359 aa, Planococcus donghaensis
  misc_feature (1)..(359): tr|A0A1C7EIT4|A0A1C7EIT4_9BACL S-adenosylmethionine:tRN A ribosyltransferase-isomerase OS=Planococcus donghaens is OX=414778 GN=queA PE=3 SV=1
MTKLTENKSLTIQDYDFDLPEDLIAQTPLLDRTSSRLLVMNKETGETSHRHFRDIIDYLHKGDTLVLNDTRVLPARLMGVKEDTGANIELLLLKQIEDDVWETLVKPAKKVKIGTVVSFGEGLLRAECTAILDHGGRHFKMIYDGIFYEILDQLGEMPLPPYIREKLEDQDRYQTVFAKERGSAAAPTAGLHFTDELLEKIRNKGVNITFITLHVGLGTFRPVSVESIEDHEMHSEFYRISKETAELINETKKNGGRIVSVGTTSTRTLESVAQKFDGELQEDSGWTDIFIFPGYEFKAVDGLITNFHLPKSTLVMLVSALSSRDHILNAYKQAVDERYRFFSFGDAMFIEPQKKETHQ

SEQ ID NO: 70397 - protein, 359 aa, Planococcus donghaensis
  misc_feature (1)..(359): tr|E7RIL4|E7RIL4_9BACL S-adenosylmethionine:tRNA ribosy ltransferase-isomerase OS=Planococcus donghaensis MPA1U 2 OX=933115 GN=queA PE=3 SV=1
MTKLTEKKSLNILDYDFDLPEELIAQTPLLDRTSSRLLVMNKESGETSHRHFRDITDYLHKGDTLVLNDTRVLPARLMGVKEDTGANIELLLLKQIEDDVWETLVKPAKKVKIGTVVSFGEGLLRAECTGILDHGGRHFKMIYDGIFYEILDQLGEMPLPPYIREKLEDQDRYQTVFAKERGSAAAPTAGLHFTDELLEKIRNKGVNITFITLHVGLGTFRPVSVESIEDHEMHSEFYRITKESAELINETKKNGGRIVSVGTTSTRTLESVAQKFDGKLQEDSGWTDIFIFPGYEFKAVDGLITNFHLPKSTLVMLVSALSSRDHILNAYKQAVDERYRFFSFGDAMFIEPQKKETHQ

SEQ ID NO: 70398 - protein, 359 aa, Planococcus halocryophilus
  misc_feature (1)..(359): tr|A0A1C7DN58|A0A1C7DN58_9BACL S-adenosylmethionine:tRN A ribosyltransferase-isomerase OS=Planococcus halocryop hilus OX=1215089 GN=queA PE=3 SV=1
MTKLTVKTSLNIQDYDFDLPEELIAQTPLLDRTSSRLLVMNKESGATSHRHFRDIIDYLHKGDTLVLNDTRVLPARLMGVKEDTGANIELLLLKQIEDDVWETLVKPAKKVKIGTVVSFGEGLLRAECTGILDHGGRHFKMIYAGIFYEILDQLGEMPLPPYIREKLEDQDRYQTVFAKERGSAAAPTAGLHFTDELLEKIRNKGVNITFITLHVGLGTFRPVSVDSIEDHEMHSEFYRITKETAELINETKRKGGRIVSVGTTSTRTLESVAQKFDGELQEDSGWTDIFIFPGYEFKAVDGLITNFHLPKSTLVMLVSALSSRDHILNAYNQAVDERYRFFSFGDAMFIEPQKKETHQ

SEQ ID NO: 70399 - protein, 361 aa, Planococcus halotolerans
  misc_feature (1)..(361): tr|A0A365KTS1|A0A365KTS1_9BACL S-adenosylmethionine:tRN A ribosyltransferase-isomerase OS=Planococcus halotoler ans OX=2233542 GN=queA PE=3 SV=1
MMKTTQQPNTLNVNDFDFELPEELIAQTPLLDRTSSRLLVMNKESGKTEHKHFRDIIDYLHEGDTLVLNDTRVLPARLMGVKEDTGANIELLLLKQIEDDVWETLVKPAKKVKVGTVVSFGEGLLRAECTGILDHGGRHFKMIYDGIFYEILDQLGEMPLPPYIREKLEDQDRYQTVFAKERGSAAAPTAGLHFTDELLKKIEEKGVNIAFITLHVGLGTFRPVSVESIEDHEMHAEFYRINKETAELINNTKAQGGRVISVGTTSTRTLESVANKFGGELKEDSGWTDIFIFPGYDFKAIDGLITNFHLPKSTLVMLVSALSNRDNILNAYNEAVNERYRFFSFGDAMFIEPQKKETHHD

SEQ ID NO: 70400 - protein, 360 aa, Planococcus kocurii
  misc_feature (1)..(360): tr|A0A0U2ZNX1|A0A0U2ZNX1_9BACL S-adenosylmethionine:tRN A ribosyltransferase-isomerase OS=Planococcus kocurii O X=1374 GN=queA PE=3 SV=1
MTKLTTPNTTLNIQDYDFDLPEELIAQTPLLDRTSSRLLVMNKETGQTSHRHFRDIIDYLHKGDTLVLNDTRVLPARLMGVKEDTGANIELLLLKQVEDDVWETLTKPAKKVKVGTVVSFGDGLLRAECTGILDHGGRHFKMIYDGIFYEILDQLGEMPLPPYIREKLEDQDRYQTVFAKERGSAAAPTAGLHFTDELLEQIRDKGVNIAFITLHVGLGTFRPVSVDSIEDHEMHSEFYRIPKETADLINKTKQNGGRIVSVGTTSTRTLESVAQKFDGRLQEDSGWTDIFIFPGYEFKAVDGLITNFHLPKSTLVMLVSALSSRDYILNAYNQAVDERYRFFSFGDAMFIEPQKKETHP

SEQ ID NO: 70401 - protein, 359 aa, Planococcus maitriensis
  misc_feature (1)..(359): tr|A0A365K8V5|A0A365K8V5_9BACL S-adenosylmethionine:tRN A ribosyltransferase-isomerase OS=Planococcus maitriens is OX=221799 GN=queA PE=3 SV=1
MTKLTNEQQLNVNDFDFDLPEELIAQTPLLDRTSSRLLVMDKETGAVEHKHFRDILGHLHEGDTLVLNDTRVLPARLMGTKEETGANIEVLLLKQTEEDVWETLVKPAKKVKVGTVVSFGDGLLRAECTGVLDHGGRYFKFIYDGIFYEILDQLGEMPLPPYIREKLEDQDRYQTVFAKERGSAAAPTAGLHFTDELLEEIRKKGVNIAFITLHVGLGTFRPVSVESIEDHEMHAEFYRITKETADLINETKQQGGRVISVGTTSTRTLESVAKKFGGQLQEDNGWTDIFIYPGYEFEAVDGLITNFHLPKSTLVMLVSAMSNRDAILNAYHEAVEERYRFFSFGDAMFIEPQKKETES

SEQ ID NO: 70402 - protein, 359 aa, Planococcus maritimus
  misc_feature (1)..(359): tr|A0A150W553|A0A150W553_PLAMR S-adenosylmethionine:tRN A ribosyltransferase-isomerase OS=Planococcus maritimus OX=192421 GN=queA PE=3 SV=1
MTKLTNEQQLNVNDFDFELPEELIAQTPLLDRTSSRLLVMGKETGAVEHKHFRDILDHLHEGDTLVLNDTRVLPARLMGTKEETGANIEVLLLKQTEEDVWETLVKPAKKVKIGTVVSFGDGLLRAECTGVLDHGGRYFKFIYDGIFYEILDQLGEMPLPPYIREKLEDQDRYQTVFAKERGSAAAPTAGLHFTDELLSDIRNKGVNIAFITLHVGLGTFRPVSVESIEDHEMHAEFYRITQQTADLINATKQRGGRVISVGTTSTRTLESVAKKFGGTLQEDNGWTDIFIYPGYRFEAVDGLITNFHLPKSTLVMLVSAMSNRDAILNAYNEAVKERYRFFSFGDAMFIEPQKKETES

SEQ ID NO: 70403 - protein, 359 aa, Planococcus maritimus
  misc_feature (1)..(359): tr|A0A1C7DZJ5|A0A1C7DZJ5_PLAMR S-adenosylmethionine:tRN A ribosyltransferase-isomerase OS=Planococcus maritimus OX=192421 GN=queA PE=3 SV=1
MTKLTNEQQLNVNDFDFELPEELIAQTPLLDRTSSRLLVMGKETGAVEHKHFRDILDHLHEGDTLVLNDTRVLPARLMGTKEETGANIEVLLLKQTEEDVWETLVKPAKKVKIGTVVSFGDGLLRAECTGILDHGGRYFKFIYDGIFYEILDQLGEMPLPPYIREKLEDQDRYQTVFAKERGSAAAPTAGLHFTDELLNDIRNKGVNIAFITLHVGLGTFRPVSVESIEDHEMHAEFYRITQQTAELINETKQRGGRVISVGTTSTRTLESVAKKFGGTLQEDNGWTDIFIYPGYRFEAVDGLITNFHLPKSTLVMLVSAMSNRDAILNAYNEAVKERYRFFSFGDAMFIEPQKKETES

SEQ ID NO: 70404 - protein, 350 aa, Planococcus massiliensis
  misc_feature (1)..(350): tr|A0A098EMM0|A0A098EMM0_9BACL S-adenosylmethionine:tRN A ribosyltransferase-isomerase OS=Planococcus massilien sis OX=1499687 GN=queA PE=3 SV=1
MNVNDFDFHLPEELIAQTPLLDRTSSRLLVMDKETGAITHRHFRDITEHLEAGDTLVLNDTRVLPARLMGVKEETGAHIELLLLKQIEDNVWETLVKPAKKVKIGTVISFGDGLLKAECTGILDHGGRHFKMIYDGIFYEILEQLGEMPLPPYIREKLEDQERYQTVFAKERGSAAAPTAGLHFTDELLDEIRAKGVNIAFITLHVGLGTFRPVSVDSIKDHTMHAEFYRINQETADLINDTKKRGNRVISVGTTSTRTLETVASKFGGELKEDSGWTDIFIFPGFEFKAIDGLITNFHLPKSTLVMLVSALSNRDNILNAYNEAVNERYRFFSFGDAMFIEPQKKETHQ

SEQ ID NO: 70405 - protein, 350 aa, Planococcus plakortidis
  misc_feature (1)..(350): tr|A0A1C7ECA9|A0A1C7ECA9_9BACL S-adenosylmethionine:tRN A ribosyltransferase-isomerase OS=Planococcus plakortid is OX=1038856 GN=queA PE=3 SV=1
MNVNDFDFELPEELIAQTPLLDRTSSRLLVMGKETGAVEHKHFRDILGHLHAGDTLVLNDTRVLPARLMGTKEETGANIEVLLLKQAEEDVWETLVKPAKKVKVGTVVSFGDGLLRAECTGVLDHGGRYFKFIYDGIFYEILDQLGEMPLPPYIREKLEDQDRYQTVFAKERGSAAAPTAGLHFTDELLQEIRNKGVNIAFITLHVGLGTFRPVSVESIEDHEMHAEFYRITKETAELINETKQRGGRVISVGTTSTRTLESVAKKFGGKLQEDNGWTDIFIYPGYQFEAVDGLITNFHLPKSTLVMLVSAMSNRDAILNAYNEAVKERYRFFSFGDAMFIEPQKKETES

SEQ ID NO: 70406 - protein, 350 aa, Planococcus rifietoensis
  misc_feature (1)..(350): tr|A0A0U2XL59|A0A0U2XL59_9BACL S-adenosylmethionine:tRN A ribosyltransferase-isomerase OS=Planococcus rifietoen sis OX=200991 GN=queA PE=3 SV=1
MNVNDFDFELPEELIAQTPLLDRTSSRLLVMDKETGAVEHKHFRDILGHLHTGDTLVLNDTRVLPARLMGTKEETGANIEVLLLKQTEEDVWETLVKPAKKVKIGTVVSFGDGLLRAECTGVLDHGGRHFKFIYDGIFYEILDQLGEMPLPPYIREKLEDQDRYQTVFAKERGSAAAPTAGLHFTDELLEEIRNKGVNIAFITLHVGLGTFRPVSVESIEDHEMHAEFYRITQETADMINETKQQGGRVISVGTTSTRTLESVAKKFGGNLQEDNGWTDIFIYPGYEFEAVDGLITNFHLPKSTLVMLVSAMSNRDAILNAYNEAVKERYRFFSFGDAMFIEPQKKETES

SEQ ID NO: 70407 - protein, 350 aa, Planococcus salinus
  misc_feature (1)..(350): tr|A0A3M8PC41|A0A3M8PC41_9BACL S-adenosylmethionine:tRN A ribosyltransferase-isomerase OS=Planococcus salinus O X=1848460 GN=queA PE=3 SV=1
MNVTDFDFELPEELIAQTPLLDRTASRLLVLDKETGAVEHRHFRDIIDHLHKGDTLVLNDTRVLPARLMGTKEDTGANIEVLLLKQIEDDVWETLVKPAKKVKVGTVVSFGGGLLRAECTGILEHGGRHFKMIYDGIFYEILDALGEMPLPPYIREKLEDQDRYQTVFAKERGSAAAPTAGLHFTDELLDRIRAKGVEIAFITLHVGLGTFRPVSVDSIEDHEMHAEFYRISQQTADLINQTRQQGGRVISVGTTSTRTLESVARKFDGDLQEDSGWTDIFIYPGYRFQAIDGLITNFHLPKSTLVMLVSALSSRDHILNAYEEAVKERYRFFSFGDAMFIEPQKKETHE

SEQ ID NO: 70408 - protein, 360 aa, Planococcus sp.
  misc_feature (1)..(360): tr|A0A5C5T1Y7|A0A5C5T1Y7_9BACL S-adenosylmethionine:tRN A ribosyltransferase-isomerase OS=Planococcus sp. CPCC 101016 OX=2599617 GN=queA PE=3 SV=1
MTKLTTPPTTLNVQDFDFELPEELIAQTPLLDRTSSRLLVMNKSTGDTEHRHFRDITDHLHKGDTLVLNDTRVLPARLMGVKEDTGANIEVLLLKQIEDDVWETLVKPAKKVKVGTIVSFGEGLLRAECTGILDHGGRHFKMIYDGIFYEILDQLGEMPLPPYIREKLEDQDRYQTVFAKERGSAAAPTAGLHFTDELLEEIRAKGVNIAFITLHVGLGTFRPVSVDSIEDHEMHAEFYRITQETADLINQTKEQGGRIISVGTTSTRTLESVAQKFDGQLQEDSGWTDIFIFPGYEFKAIDGLITNFHLPKSTLVMLVSALSNRDHILNAYQQAVNERYRFFSFGDAMFIEPQKKETHQ

SEQ ID NO: 70409 - protein, 360 aa, Planococcus sp.
  misc_feature (1)..(360): tr|A0A5B0CTL5|A0A5B0CTL5_9BACL S-adenosylmethionine:tRN A ribosyltransferase-isomerase OS=Planococcus sp. ANT_H 30 OX=2597347 GN=queA PE=3 SV=1
MTKLITPNTTLNIQDYDFDLPEELIAQTPLLDRTSSRLLVMNKETGQTSHRHFRDIIDYLHKGDTLVLNDTRVLPARLMGVKEDTGANIELLLLKQVEDDVWETLTKPAKKVKVGTVVSFGDGLLRAECTGILDHGGRHFKMIYDGIFYEILDQLGEMPLPPYIREKLEDQDRYQTVFAKERGSAAAPTAGLHFTDELLEQIRDKGVNIAFITLHVGLGTFRPVSVDSIEDHEMHSEFYRIPKETADMINKTKQNGGRIVSVGTTSTRTLESVAQKFDGKLQEDSGWTDIFIFPGYEFKAVDGLITNFHLPKSTLVMLVSALSSRDYILNAYNQAVDERYRFFSFGDAMFIEPQKKETHP

SEQ ID NO: 70410 - protein, 360 aa, Planococcus versutus
  misc_feature (1)..(360): tr|A0A1B1RXG2|A0A1B1RXG2_9BACL S-adenosylmethionine:tRN A ribosyltransferase-isomerase OS=Planococcus versutus OX=1302659 GN=queA PE=3 SV=1
MTKQTTPNTTLNIQDYDFDLPEELIAQTPLLDRTSSRLLVMNKETGETSHRHFRDIIDYLHKGDTLVLNDTRVLPARLMGVKEDTGANIELLLLKQVEDDVWETLAKPAKKVKVGTIVSFGDGLLRAECTGILDHGGRHFKMIYDGIFYELLDQLGEMPLPPYIRGKLEDQNRYQTVFAKERGSAAAPTAGLHFTDELLTQIRDKGVNIAFITLHVGLGTFRPVSVESIEDHDMHSEFYRITQETAELINGTKQNGGRIVSVGTTSTRTLESVAQKFNGKLQEDSGWTDIFIFPGYEFKAVDGLITNFHLPKSTLVMLVSALSSRERILNAYTQAVDEQYRFFSFGDAMFIEPQKKETHP

SEQ ID NO: 70411 - protein, 350 aa, Planomicrobium glaciei
  misc_feature (1)..(350): tr|A0A1G8IP92|A0A1G8IP92_9BACL S-adenosylmethionine:tRN A ribosyltransferase-isomerase OS=Planomicrobium glacie i OX=459472 GN=queA PE=3 SV=1
MNVNDFDFHLPEELIAQTPLLDRTSSRLLVMNKETGDVDHRHFRDITDYLHEGDTLVLNDTRVLPARLMGVKEETGAHIELLLLKQVEDDVWETLVKPAKKVKVGTVISFGDGLLKAECTALLDHGGRHFKMIYDGIFYEILDQLGEMPLPPYIREKLEDQERYQTVFAKERGSAAAPTAGLHFTEELLDEIRAKGINIAFITLHVGLGTFRPVSVDSIDDHKMHAEFYRITQETADLINNTKKQGGRVISVGTTSTRTLESVAEKFGGELKEDSGWTDIFIFPGFEFQAIDGLITNFHLPKSTLVMLVSALSNRENILNAYNEAVNERYRFFSFGDAMFIEPQKKETHQ

SEQ ID NO: 70412 - protein, 356 aa, Planomicrobium soli
  misc_feature (1)..(356): tr|A0A2P8GMC6|A0A2P8GMC6_9BACL S-adenosylmethionine:tRN A ribosyltransferase-isomerase OS=Planomicrobium soli O X=1176648 GN=queA PE=3 SV=1
MNVNDFDFDLPEELIAQTPLLDRTSSRLLVMDKETGRVEHRYFRDIIGHLHAGDVLVLNDTRVLPARLMGVKEDTGANIELLLLKQIEDDVWETLVKPAKKVKVGTVVSFGEGLLRAECTAILDHGGRHFKMIYDGIFYEILDQLGEMPLPPYIREKLDDQDRYQTVFAKERGSAAAPTAGLHFTEELLDEIRAKGVEIAFITLHVGLGTFRPVSVDSIEEHAMHAEFYRITQETADLINKTKERGGRIISVGTTSTRTLESVANKFGGQLQEDSGWTDIFIFPGYKFKAVDGLITNFHLPKSTLVMLVSALSDRDHILNAYNEAINEQYRFFSFGDAMFIEPEKKETTHDTSSNV

SEQ ID NO: 70413 - protein, 356 aa, Planomicrobium sp.
  misc_feature (1)..(356): tr|A0A5C5UJI3|A0A5C5UJI3_9BACL S-adenosylmethionine:tRN A ribosyltransferase-isomerase OS=Planomicrobium sp. CP CC 101110 OX=2599619 GN=queA PE=3 SV=1
MNVNDFDFDLPEELIAQTPLLDRTSSRLLVMDKETGAVAHRYFRDILGHLHAGDVLVLNDTRVLPARLMGVKEDTGANIELLLLKQIEDDVWETLVKPAKKVKVGTVVSFGEGLLRAECTAILDHGGRHFRMIYDGIFYEILDALGEMPLPPYIREKLDDQDRYQTVFAKERGSAAAPTAGLHFTEELLAEIRAKGVQIAFITLHVGLGTFRPVSVDSIEDHAMHAEFYRITQETADVINAAKRRGGRIISVGTTSTRTLESVANKFGGKLKEDSGWTDIFIFPGYEFKAVDGLITNFHLPKSTLVMLVSALSNRDNILNAYNEAISEQYRFFSFGDAMFIEPQKKETSHDTSSNV

SEQ ID NO: 70414 - protein, 361 aa, Planomicrobium sp.
  misc_feature (1)..(361): tr|A0A3L7JMG2|A0A3L7JMG2_9BACL S-adenosylmethionine:tRN A ribosyltransferase-isomerase OS=Planomicrobium sp. Y7 4 OX=2478977 GN=queA PE=3 SV=1
MTKTTQQPNTLNVNDFDFELPEELIAQTPLLDRTSSRLLVMNKETGKTEHKHFRDIIDYLHEGDTLVLNDTRVLPARLMGVKEDTGANIELLLLKQIEDDIWETLVKPAKKVKVGTVVSFGEGLLRAECTGILDHGGRHFKMIYDGIFYEILDQLGEMPLPPYIREKLEDQDRYQTVFAKERGSAAAPTAGLHFTDELLKKIEEKGVNIAFITLHVGLGTFRPVSVESIEDHEMHAEFYRINKETAELINNTKAQGGRVISVGTTSTRTLESVASKFGGELKEDSGWTDIFIFPGYGFKAIDGLITNFHLPKSTLVMLVSALSNRDNILNAYNEAVNERYRFFSFGDAMFIEPQKKETHHD

SEQ ID NO: 70415 - protein, 345 aa, Plasticicumulans acidivorans
  misc_feature (1)..(345): tr|A0A317N130|A0A317N130_9GAMM S-adenosylmethionine:tRN A ribosyltransferase-isomerase OS=Plasticicumulans acid ivorans OX=886464 GN=queA PE=3 SV=1
MLRSDFHFDLPEELIAQQPPAQRGDSRLLVLDGASGALSDQRFTELPDWLRPGDLMVFNDTRVIPARLHGVKEGSGGKVEVLVERVLDSRRVLAHVRASKAPKPGTRLWLEQAVHARMLGRHEDLFELAFEDERGAFEVLERHGHIPLPPYIERADAAEDAERYQTVYARSPGAVAAPTAGLHFTPALLEQLAAGGIETAFVTLHVGAGTFLPVRSERIEDHRMHSEWLQVGEEVVAAVARTRARGGRVIAVGTTAVRSLESAAADGELRPFTGETAIFITPGYRFRVVDALVTNFHLPESTLLMLVSALAGHAEIMAAYRHAVAQRYRFFSYGDAMFITGKNTR

SEQ ID NO: 70416 - protein, 345 aa, Plasticicumulans lactativorans
  misc_feature (1)..(345): tr|A0A4R2LNS5|A0A4R2LNS5_9GAMM S-adenosylmethionine:tRN A ribosyltransferase-isomerase OS=Plasticicumulans lact ativorans OX=1133106 GN=queA PE=3 SV=1
MPMLRADFHFDLPPELIAQHPPAQRGASRLLVLDGPSGALADAAFADLPRWLRAGDLLVFNDTRVIPARLFGAKDSGGRVEALVERLLDAHRVLAHVRASKAPRPGSGIVFAGGLRASVRQRHEDLFELAFEDPRPVLELLDAYGHVPLPPYIDRPDAAGDADRYQTVYARAPGAVAAPTAGLHFTEALLEQLAAAGVERTFVTLHVGAGTFQPVRAERIADHHMHAEQVEVGPEVVAAVAATRARGGRVVAVGTTAVRSLEAAAAAGALAPFSGDTRIFITPGYRFRVVDALVTNFHLPESTLLMLVSAFAGHASVLAAYRHAVAARYRFFSYGDAMFLTRAPV

SEQ ID NO: 70417 - protein, 356 aa, Plautia stali
  misc_feature (1)..(356): tr|U3U5K4|U3U5K4_9ENTR S-adenosylmethionine:tRNA ribosy ltransferase-isomerase OS=Plautia stali symbiont OX=891 974 GN=queA PE=3 SV=1
MRVADFAFELPESLIAHYPQAQRSGCRLLSLDGPSGALNHGVFTDVLDKLNPGDLLVFNNTRVIPARVYGRKASGGKIEMLVERMLDDKRVLAHVRASKAPKPGAELLLGDDESVKATMVARHDALFEIEFADDRAVLDILNSVGHMPLPPYIDRPDEEADRELYQTVYSARPGAVAAPTAGLHFDEPLLAALKAKGVEMAFVTLHVGASTFQPVRVENINDHIMHSEYAEVPQDVVDAVQACKARGNKVVAVGTTSVRSLESAAQACQDGLIAPFFDDTQIFIYPGYHYQVIDALITNFHLPESTLIMLVSAFAGYQHTMAAYQSAVAEQYRFFSYGDAMYITRNPQAPDEIVGG

SEQ ID NO: 70418 - protein, 354 aa, Pleionea mediterranea
  misc_feature (1)..(354): tr|A0A316FTK0|A0A316FTK0_9GAMM S-adenosylmethionine:tRN A ribosyltransferase-isomerase OS=Pleionea mediterranea OX=523701 GN=queA PE=3 SV=1
MRLSDFKFELPDELIARYPAEQRDASRLLHLNAAAEICDRQFSDIVDLVGSDDCLIFNNTKVIPARLLGSRESGGKVEILIERVLDECEFIAMVKASNSPKPGSLINVADYQFEVTGREGQFFKLSTLDRSVPVMTVLEQHGHMPLPPYIDRGDTAFDAERYQTVYAKESGAVAAPTAGLHFTGQVFEQLKRKGVAWDFVTLHVGSGTFAPVRVDKIDEHQMHSERFSVPESVVELVKATRQRGGRVIAVGTTSVRCLESASLNGELQATSGDTDIFIYPGYRFKTIDALITNFHLPESTLIMLVSALCGKDNILKAYQHAVDNRYRFFSYGDAMFLEPQFLDSQPESTADDSL

SEQ ID NO: 70419 - protein, 364 aa, Pleomorphomonas carboxyditropha
  misc_feature (1)..(364): tr|A0A2G9WV52|A0A2G9WV52_9RHIZ S-adenosylmethionine:tRN A ribosyltransferase-isomerase OS=Pleomorphomonas carbo xyditropha OX=2023338 GN=queA PE=3 SV=1
MQVSAFDFDLPPERIALRPAVPRDASRLLVVKPGQPFEDRQALDLADLLSPGDALVFNDTKVIPAQLEGRRDRYGAEPVRFSATLHMREAPDRWRAFVKGARKLRAGDRVRFSGADPAAAALGAVVAEKGEDGEIVLAFDRAGPDLDVALMTVGHIPLPPYIAARRAEDEHDRADYQTVYARESGAVAAPTAGLHFTPELFERLDARGIGRHFVTLHVGAGTFLPMKVDDTEAHKMHAEIGHVSPETAEALNAVRARGGRVVAVGTTSLRLLESAAGEDGLVRPFAGATDIFITPGYRFRAVDLLMTNFHLPKSTLFMLVSAFSGLDTMRAAYAHAIAGGYRFYSYGDTSLLHPSEESRLTKNS

SEQ ID NO: 70420 - protein, 365 aa, Pleomorphomonas diazotrophica
  misc_feature (1)..(365): tr|A0A1I4QQ98|A0A1I4QQ98_9RHIZ S-adenosylmethionine:tRN A ribosyltransferase-isomerase OS=Pleomorphomonas diazo trophica OX=1166257 GN=queA PE=3 SV=1
MQVSAFDFDLPSDRIALRPAVPRDASRLLVVRPGEPLEDRHARDLADLLRPGDALVFNDTKVIPAHLEGRRDREGAEPARFSATLHMREAPDRWRAFVKGARKLRAGDRVAFAGADPSVAPLGAVVTEKGEDGEITLAFDRAGPDLDLALMAVGHIPLPPYIAARRPEDEHDRADYQTVYARESGAVAAPTAGLHFTPELFGRLEARGIDRHFVTLHVGAGTFLPMKVDDTEDHKMHSEIGSVSSETAEALNTVRARGGRVVAVGTTSLRLLESAAGEDGLVRPFAGPTDIFITPGYRFRAVDLLMTNFHLPKSTLFMLVSAFSGLDTMRAAYAHAIASGYRFYSYGDTSLLHPSPESRLTAQAS

SEQ ID NO: 70421 - protein, 361 aa, Pleomorphomonas sp.
  misc_feature (1)..(361): tr|A0A4R8FID7|A0A4R8FID7_9RHIZ S-adenosylmethionine:tRN A ribosyltransferase-isomerase OS=Pleomorphomonas sp. C F100 OX=2135722 GN=queA PE=3 SV=1
MLVSAFDFELPPERIALRPAVPRDASRLLVVRPGQPLEDRHARDLADLLSPGDALVFNDTKVIPAQLEGRRDREGAEPVRFSATLHMREAPDLWRAFVKGARKLRTGDRVLFAGVDPTATLSAVVAEKGEDGEITLVFDRAGPDLDVALMSVGHIPLPPYIAARRAEDEHDRADYQTVYARESGAVAAPTAGLHFTPELFDRLDARGIGRHFVTLHVGAGTFLPMKADDTEDHKMHSEVGHVASETADALNTVRARGGRVVAVGTTSLRLLESAAGEDGLIKSFAGATDIFITPGYRFRAVDLLMTNFHLPKSTLFMLVSAFSGLETMRAAYAHAIASDYRFYSYGDTSLLHPSEESRLAK

SEQ ID NO: 70422 - protein, 370 aa, Pleomorphomonas sp.; identical to SEQ ID NO: 69576
  misc_feature (1)..(370): tr|A0A2Z6HW59|A0A2Z6HW59_9RHIZ S-adenosylmethionine:tRN A ribosyltransferase-isomerase OS=Pleomorphomonas sp. S M30 OX=1885025 GN=queA PE=3 SV=1

SEQ ID NO: 70423 - protein, 304 aa, Plesiocystis pacifica
  misc_feature (1)..(304): tr|A6G499|A6G499_9DELT S-adenosylmethionine:tRNA ribosy ltransferase-isomerase OS=Plesiocystis pacifica SIR-1 O X=391625 GN=PPSIR1_03703 PE=3 SV=1
MVNDAATLPASLPGHAWIEGRAEAIELRLLGPVGVDEDRWRAVVFGGGDWREDTDERPAPPRLELGTNLVLAGGLGARVLERASASPRLIELAFDRAGASLYAALYSAGRPIQYSHLEQPEELWSFQTVFAGRPWAAEMPSAGRALSASLLGKLRAKGVLVERLTHAAGLSATGDPELDAQLPLPERYDIPARTVAAITAARARGARIIAVGTTVVRALEGAALEHGDGVLRPGPGETALVVTAATQLRVVDALLTGMHAPSESHYRLLRAFLPEALLERAWDAALGAGYRSHEFGDLALLVPG

SEQ ID NO: 70424 - protein, 365 aa, Plesiocystis pacifica
  misc_feature (1)..(365): tr|A6G9V5|A6G9V5_9DELT S-adenosylmethionine:tRNA ribosy ltransferase-isomerase OS=Plesiocystis pacifica SIR-1 O X=391625 GN=queA PE=3 SV=1
MFSPDDYDFELPTEQIAQAPASERSAARMFVLAEAGAAVSTHSRVGALEAVLDGVAEARGQRPLIVVNDSRVVPARIHVFRATGGRVELLVVDPAALGPGARVRAWARGARRLREGEVLRLPGAHGETALLELRYLGAEGEGEAADSRARVFEIVRGQLLDALEAVGELPLPPYIARPEGPDAADRERYQTLYARHRGSVAAPTAGLHFDAAMLERLEVAPITLHVGPGTFLPMDTEDVRAHRVGSERYSISEASAARIEAARAEGRPILAVGTTATRTLESVALANGGAIVPGSGRTELVITPGYRFSVVDLLLTNFHLPRSSLLMLVCCLGGRERVLAAYAEAVAAGYRFYSYGDCMLVERSG

SEQ ID NO: 70425 - protein, 348 aa, Plesiomonas shigelloides
  misc_feature (1)..(348): tr|A0A379CKB1|A0A379CKB1_PLESH S-adenosylmethionine:tRN A ribosyltransferase-isomerase OS=Plesiomonas shigelloi des OX=703 GN=queA PE=3 SV=1
MRVADFSFSLPETLIARYPQPERTSSRLLSLDGNSGALTHGTFADVVDKIQPGDLVVFNNTRVIPARMFGRKVSGGKLEVLVERVLDDKRILAHVRASKAPKPGTELLLGEDESVRATMLARHDALFEIGFDDERNVFAILDAIGHMPLPPYIDRPDEDSDKERYQTVYNKKPGAVAAPTAGLHFDEPLLEKLRAKGVEFAFVTLHVGAGTFQPVRVDTIEEHHMHSEYAEVPQEVVDAVLACKARGNRVIAVGTTSVRSLESAARAAGESAIIAPFHRDTDIFIYPGYQFKVVDALITNFHLPESTLIMLVSAFAGYEHVMHAYQEAVANQYRFFSYGDAMFITRQA

SEQ ID NO: 70426 - protein, 348 aa, Plesiomonas shigelloides
  misc_feature (1)..(348): tr|R8ATQ7|R8ATQ7_PLESH S-adenosylmethionine:tRNA ribosy ltransferase-isomerase OS=Plesiomonas shigelloides 302- 73 OX=1315976 GN=queA PE=3 SV=1
MRVADFSFSLPETLIARYPQPERTSSRLLSLDGNSGVLTHGTFADVVDKIQPGDLVVFNNTRVIPARMFGRKVSGGKLEVLVERVLDDKRILAHVRASKAPKPGTELLLGEDESVRATMLARHDALFEIGFDDERNVFAILDAIGHMPLPPYIDRPDEDSDKERYQTVYNKKPGAVAAPTAGLHFDEPLLEKLRAKGVEFAFVTLHVGAGTFQPVRVDTIEEHHMHSEYAEVPQEVVDAVLACKARGNRVIAVGTTSVRSLESAARAAGESAIIAPFHRDTDIFIYPGYQFKVVDALITNFHLPESTLIMLVSAFAGYEHVMHAYQEAVANQYRFFSYGDAMFITRQA

SEQ ID NO: 70427 - protein, 336 aa, Pleurocapsa sp.
  misc_feature (1)..(336): tr|A0A2T1CBH7|A0A2T1CBH7_9CYAN S-adenosylmethionine:tRN A ribosyltransferase-isomerase (Fragment) OS=Pleurocaps a sp. CCALA 161 OX=2107688 GN=C7B62_24850 PE=3 SV=1
SPADPRDSSRLLIVDSRRESTHATFRDLPHWLKPGDLLVLNNTRVIPARLYGHKISGSKLEILLIEERSPNCWLALVKPGKRFTLGATINFDAIGNSDSSNHTLQATVIDKDQATGGRILRFELPTGQSLWERLDDYGQLPLPPYIVNSDAPDERYQTVYANQPGAIAAPTAGLHFTPELLAKLQRLGIEQTQITLHVGIGTFRPVETEEIKNHAMHQEWIEVSAETVSKIKQTKARGGRVIAVGTTATRALEGAAREAKSDFIDPFRGKTDLFIYPGYQWQVVDGLITNFHLPGSSLLMLVSAMIGREQLLSLYQQAIALEYRFYSFGDAMLILP

SEQ ID NO: 70428 - protein, 373 aa, Pleurocapsa sp.
  misc_feature (1)..(373): tr|K9T806|K9T806_9CYAN S-adenosylmethionine:tRNA ribosy ltransferase-isomerase OS=Pleurocapsa sp. PCC 7327 OX=1 18163 GN=queA PE=3 SV=1
MTDPTEQTANQLLSDYDYELPTELIAQNPVVPRDNSRLLVVNSPTTHVHSIFRDLPDWLQPRDLLVLNNTRVIPARLYGHKSTGSPVEILLLEETQKNCWLALVKPGKRFKIGTKILFHPASGELPEGVFLKAKVIARDEATSGRLLEFELPPGQSLWDLLDKFGQIPFPPYVTHSQALPDQYQTIYAQQAGSVAAPTAGLHFTEELFQRLEEKGIQKAYITLHVGVGTFRPIEVEDITQHVMHQEWLEVPEATVEKIKETKAKGGRIIAVGTTVARALEGAAQETEKAGGEFLRPFCGKTDLFIYPGYRWRIVEGMITNFHLPRSSLLILLSALIGRDRVLALYREAVQERYRFYSFGDAMLILPAATISNQ

SEQ ID NO: 70429 - protein, 363 aa, Pluralibacter gergoviae
  misc_feature (1)..(363): tr|A0A0J5LXI6|A0A0J5LXI6_PLUGE S-adenosylmethionine:tRN A ribosyltransferase-isomerase OS=Pluralibacter gergovi ae OX=61647 GN=queA PE=3 SV=1
MRVADFSFELPESLIAHYPQPERSSCRLLSLDGPTGALTHGTFTDLLDKLNPGDLLVFNNTRVIPARLFGRKASGGKIEVLVERMLDDKRILAHIRASKAPKPGAELLLGDDESINATMVARHDALFEVQFNDERSVLDILNAIGHMPLPPYIDRPDEDADRELYQTVYSEKPGAVAAPTAGLHFDDPLLARLREKGIEMAFVTLHVGAGTFQPVRVDSIEDHIMHSEYAEVPQEVVDAVLAAKARGNRVIAVGTTSVRSLESAAQAAKNALIAPFFGDTQIFIYPGYKYQVIDCLVTNFHLPESTLIMLVSAFAGYQHTMNAYKSAVEQKYRFFSYGDAMFITYNPAAICERVGELVRGAGF

SEQ ID NO: 70430 - protein, 356 aa, Pluralibacter gergoviae
  misc_feature (1)..(356): tr|A0A1S2BLG6|A0A1S2BLG6_PLUGE S-adenosylmethionine:tRN A ribosyltransferase-isomerase OS=Pluralibacter gergovi ae OX=61647 GN=queA PE=3 SV=1
MRVADFSFELPESLIAHYPQPERSSCRLLSLDGPTGALTHGTFTDLLDKLNPGDLLVFNNTRVIPARLFGRKASGGKIEVLVERMLDDKRILAHIRASKAPKPGAELLLGDDESINATMVARHDALFEVQFNDERSVLDILNAIGHMPLPPYIDRPDEDADRELYQTVYSEKPGAVAAPTAGLHFDDPLLARLREKGIEMAFVTLHVGAGTFQPVRVDSIEDHIMHSEYAEVPQEVVDAVLAAKARGNRVIAVGTTSVRSLESAAQAAKNALIAPFFGDTQIFIYPGYKYQVIDCLVTNFHLPESTLIMLVSAFAGYQHTMNAYKSAVEQKYRFFSYGDAMFITYNPAAICERVGE

SEQ ID NO: 70431 - protein, 348 aa, Pokkaliibacter plantistimulans
  misc_feature (1)..(348): tr|A0A318C0I7|A0A318C0I7_9GAMM S-adenosylmethionine:tRN A ribosyltransferase-isomerase OS=Pokkaliibacter planti stimulans OX=1635171 GN=queA PE=3 SV=1
MQVKDFHFELPDELIARYPMAERSASRLLCLDGQSGDINFKVFRDIAGMISDKDLLVFNNTRVIPARLFGQKDSGGKVEVLVERIVDDKRVLAHIRSSKSPKPGTRLLLEGQVEAEMLARHDALFELAFLGDESVLSVLERVGHMPLPPYISREDELEDRERYQTVYNEKPGAVAAPTAGLHFDEPLLKVLQDKGVEFAFVTLHVGAGTFQPVRVDRIEDHHMHSEYLEVSAEVCEAVRRTRARGGRVIAVGTTSVRSLESASRSGHIEPYVGETDIFIYPGYVFRSVDALITNFHLPESTLLMLVSALAGYEHIMSAYQRAIAERMRFFSYGDAMFISCPQSGAKGE

SEQ ID NO: 70432 - protein, 349 aa, Polaribacter atrinae
  misc_feature (1)..(349): tr|A0A176TD36|A0A176TD36_9FLAO S-adenosylmethionine:tRN A ribosyltransferase-isomerase OS=Polaribacter atrinae OX=1333662 GN=queA PE=3 SV=1
MKLSHFEFDLPEELLATYPAEHRDESRLMVLNRKEQTIEHKVFKDVIDYFDEGDVMMLNNTKVFPARMYGNKEKTGARIEVFLLRELNSENRLWDVLVDPARKIRIGNKLFFGDDDSLVAEVIDNTTSRGRTLRFLFDGSYEEFRAKLLELGQTPLPKAIGRDVEPLDDERYQTIYAKHEGAVAAPTAGLHFSKHLMKRLEIKGIEFAETTLHVGLGTFSPVEVEDLSKHKMDSEQIDISDATAEKINKAKKEKRRVCAVGTTVMRAIESSVSSKGELNGYTGWTNKFIFPPHDFSIATAMITNFHTPKSTLLMQAAAFGGYDFVMEAYKEAIKEGYKFSTYGDAMLII

SEQ ID NO: 70433 - protein, 349 aa, Polaribacter butkevichii
  misc_feature (1)..(349): tr|A0A2P6CAE4|A0A2P6CAE4_9FLAO S-adenosylmethionine:tRN A ribosyltransferase-isomerase OS=Polaribacter butkevic hii OX=218490 GN=queA PE=3 SV=1
MKLSHFEFDLPDELLAQYPAEHRDESRLMVLNRKDGTIEHKVFKDVINYFEEGDVMMLNNTKVFPARMFGNKEKTGARIEVFLLRELNAENRLWDVLVDPARKIRIGNKLFFGDDDSLVAEVIDNTTSRGRTLRFLFDGSYEEFRAKLLELGQTPLPKAIGRDVEPIDDERYQTIYAKHEGAVAVPTAGLHFSKHLMKRLEIKGVEFAETTLHVGLGTFSPVEVEDLSKHKMDSEQIDISEATAEKINKAKKEKRRVCAVGTTVMRTIESSVSSKGELNGFTGWTNKFIFPPHDFSIATAMITNFHTPKSTLLMQAAAFGGYDFVMEAYKEAIKEKYRFSTYGDAMLII

SEQ ID NO: 70434 - protein, 349 aa, Polaribacter dokdonensis
  misc_feature (1)..(349): tr|A0A0N0CFK6|A0A0N0CFK6_9FLAO S-adenosylmethionine:tRN A ribosyltransferase-isomerase OS=Polaribacter dokdonen sis DSW-5 OX=1300348 GN=queA PE=3 SV=1
MKLSNFDFELPEELLAKYPAEHRDESRLMVLNRADQTIEHKTFKDVINYFDEGDVLMLNNTKVFPARMFGNKEKTGARIEVFLLRELNAENRLWDVLVDPARKIRIGNKLFFGEDDSLVAEVIDNTTSRGRTLRFLFDGSYEAFREKLLELGETPLPRSVNRDVEELDEERYQTIFAKNEGAVAAPTAGLHFSKHLLKRLEIKGVDFAEMTLHVGLGTFSPVEVEDLSKHKMDSEQIVIPANAADKINNAKAEKRRVCAVGTTVMRTVESSVSSNAQLNPFEGWTNKFIFPPYDFSIANTMITNFHPPKSTLMMQAAAFAGYDFLMEAYKTAVKEGYKFSTYGDAMLII

SEQ ID NO: 70435 - protein, 349 aa, Polaribacter filamentus
  misc_feature (1)..(349): tr|A0A2S7KZV3|A0A2S7KZV3_9FLAO S-adenosylmethionine:tRN A ribosyltransferase-isomerase OS=Polaribacter filament us OX=53483 GN=queA PE=3 SV=1
MKLSQFDFELPEESYAVYPAEHRDESRLMVLNRKDQTIEHKMFKDIIDYFEEGDVMMLNNTKVFPARMFGNKEKTGARIEVFLLRELNAENRLWDVLVDPARKIRIGNKLFFGDDESLVAEVIDNTTSRGRTLRFLYDGSYEAFREKLLELGQTPLPKSINREVEAIDDERYQTIYAKHEGAVAAPTAGLHFSKHLLKRLEIKGIDFAEMTLHVGLGTFSAVEVEDLSKHKVDSEQIVIPAAAVAKINQAKIDKRRICAVGTTVMRTVESSVSSKQELNAFEGWTNKFVFPPHDFSIANSMITNFHPPKSTLMMMAAAFAGYDFLMDAYKVAIKEGYKFSTYGDAMLII

SEQ ID NO: 70436 - protein, 349 aa, Polaribacter gangjinensis
  misc_feature (1)..(349): tr|A0A2S7WEH4|A0A2S7WEH4_9FLAO S-adenosylmethionine:tRN A ribosyltransferase-isomerase OS=Polaribacter gangjine nsis OX=574710 GN=queA PE=3 SV=1
MKLSHFEFTLPDELLAEYPSEHRDESRLMVLNRKTQTIEHKLFKDIIDYFDEGDVLMLNNTKVFPARMYGNKEKTGAKIEVFLLRELNAENRLWDVLVDPARKIRIGNKLFFGDDDSLVAEVIDNTTSRGRTLRFLFDGSYEAFREKLIELGETPLPKYINRELRPEDEERYQTIYAKHEGAVAAPTAGLHFSKHLMKRLEIKGIEFAEMTLHVGLGTFSPVEVEDLSKHKMDSEQIIIPASTAQKINQAKKEKRRICAVGTTVMRTVESSVSANQLLNPYEGWTNKFIFPPYDFSIANAMVTNFHTPKSTLMMMTAAFAGYDFLMKAYKEAVKEKYRFYSYGDAMLII

SEQ ID NO: 70437 - protein, 349 aa, Polaribacter glomeratus
  misc_feature (1)..(349): tr|A0A2S7WI41|A0A2S7WI41_9FLAO S-adenosylmethionine:tRN A ribosyltransferase-isomerase OS=Polaribacter glomerat us OX=102 GN=queA PE=3 SV=1
MKLSQFDFELPEELYAVYPAEHRDESRLMVLNRKDQTIEHKMFKDVIDYFEEGDVMMLNNTKVFPARMFGNKEKTGARIEVFLLRELNAENRLWDVLVDPARKIRIGNKLFFGDDDSLVAEVIDNTTSRGRTLRFLYDGSYEAFREKLLELGQTPLPKTLNREVEPIDDERYQTIYAKHEGAVAAPTAGLHFSKHLLKRLEIKGIDFAEMTLHVGLGTFSAVEVEDLSKHKVDSEQIVIPAAAVTKINQAKIDKRRICAVGTTVMRTVESSVSSKQELNAYEGWTNKFVFPPYDFSIANSMITNFHPPKSTLMMMSAAFAGYDFLMDAYKVAIKEGYKFSTYGDAMLII

SEQ ID NO: 70438 - protein, 349 aa, Polaribacter irgensii
  misc_feature (1)..(349): tr|A4C2J9|A4C2J9_9FLAO S-adenosylmethionine:tRNA ribosy ltransferase-isomerase OS=Polaribacter irgensii 23-P OX =313594 GN=queA PE=3 SV=1
MKLSHFEFELPEELLAIYPAEHRDESRLMVLNKAAGTIEHKQFKDVINYFDEGDVLMLNDTKVFPARMFGNKEKTGARIEVFLLRELNAENRLWDVLVDPARKIRIGNKLFFGEDDSLVAEVIDNTTSRGRTLRFLFDGSYEAFRAKLLELGQTPLPKAIAREVEPSDTERYQTIYAKNEGAVAAPSAGLHFSKHLLKRLEIKGVDFAKMTLHVGLGTFSAVEVEDLSKHKMDSEQIVIPEKTAVMINKAKKEKRRICAVGTTVMRTVESSVSSKQELNAFEGWTNKFLFPPHEFSIANAMITNFHLPKSTLLMQAAAFGGYDFIMEAYKVAIKEGYKFSTYGDAMLII

SEQ ID NO: 70439 - protein, 349 aa, Polaribacter porphyrae
  misc_feature (1)..(349): tr|A0A2S7WPK0|A0A2S7WPK0_9FLAO S-adenosylmethionine:tRN A ribosyltransferase-isomerase OS=Polaribacter porphyra e OX=1137780 GN=queA PE=3 SV=1
MKLSNFDFELPEELLAEYPAEHRDESRLMVLNREKQTIEHKLFKDVIDYFEEGDVMMLNNTKVFPARMFGNKEKTGARIEVFLLRELNAENRLWDVLVDPARKIRIGNKLFFGEDDSLVAEVIDNTTSRGRTLRFLYDGSYEAFREKLLELGQTPLPKYINREVEASDEERYQTIYAKHEGAVAAPTAGLHFSKHLLKRLEIKGVDFAEMTLHVGLGTFSAVEVEDLSKHKMDSEQIIIPANAADKINQAKKEKRRVCAVGTTVMRTVESSVSSNAELNPFEGWTNKFIFPPFDFSIANAMITNFHTPKSTLMMMTAAFAGYDFLMEAYKEAVKEKYRFYSYGDAMLII

SEQ ID NO: 70440 - protein, 349 aa, Polaribacter reichenbachii
  misc_feature (1)..(349): tr|A0A1B8TW13|A0A1B8TW13_9FLAO S-adenosylmethionine:tRN A ribosyltransferase-isomerase OS=Polaribacter reichenb achii OX=996801 GN=queA PE=3 SV=1
MKLSNFDFELPEELLAIYPAEHRDESRLMVLNRKDQTIEHKTFKDVINYFDEGDILMLNNTKVFPARMFGNKEKTGARIEVFLLRELNAENRLWDVLVDPARKIRIGNKLFFGEDDSLVAEVIDNTTSRGRTLRFLFDGSYEAFREKLLELGETPLPRTIKREVEASDEERYQTIYAKHEGAVAAPTAGLHFSKHLLKRLEIKGVDFAEMTLHVGLGTFSPVEVEDLSKHKMDSEQIVIPAASADKINKAKIEKRRICAVGTTVMRTVESSVSSNAELNAYEGWTNKFIFPPYDFSIANTMITNFHTPKSTLMMQAAAFAGYDFLMEAYKEAIKEGYKFSTYGDAMLII

SEQ ID NO: 70441 - protein, 349 aa, Polaribacter sejongensis
  misc_feature (1)..(349): tr|A0A2K8VIL4|A0A2K8VIL4_9FLAO S-adenosylmethionine:tRN A ribosyltransferase-isomerase OS=Polaribacter sejongen sis OX=985043 GN=queA PE=3 SV=1
MKLSHFEFDLPEELLATYPAEHRDESRLMVLNRKEQTIEHKVFKDVIDYFDEGDVMMLNNTKVFPARMYGNKEKTGARIEVFLLRELNSENRLWDVLVDPARKIRIGNKLFFGDDDSLVAEVIDNTTSRGRTLRFLFDGSYEEFRAKLLELGQTPLPKAIGRDVEPLDDERYQTIYAKHEGAVAAPTAGLHFSKHLMKRLEIKGVEFAETTLHVGLGTFSPVEVEDLSKHKMDSEQIDISDATADKINKAKKEKRRVCAVGTTVMRAIESSVSSKGELNGYTGWTNKFIFPPHDFSIATAMITNFHTPKSTLLMQAAAFGGYDFVMDAYKEAIKEGYKFSTYGDAMLII

SEQ ID NO: 70442 - protein, 349 aa, Polaribacter sp.
  misc_feature (1)..(349): tr|A0A1Y0M950|A0A1Y0M950_9FLAO S-adenosylmethionine:tRN A ribosyltransferase-isomerase OS=Polaribacter sp. SA4- 10 OX=754397 GN=queA PE=3 SV=1
MKLSHFEYELPEELLAKYPAEHRDESRLMVLNRKEGTIEHKLFKDVIDYFEEGDVMMLNNTKVFPARMYGNKEKTGARIEVFLLRELNAENRLWDVLVDPARKIRIGNKLFFGEDDSLVAEVIDNTTSRGRTLRFLYDGSYEEFRAKLLELGQTPLPKKIGRDVEAIDDERYQTIFAKNEGAVAAPTAGLHFSKHLIKRLEIKGIDFAEMTLHVGLGTFSPVEVEDLSKHKMDSEQIVISEETAAKINKAKIEKRRICAVGTTVMRTIESSVSSKQELNQFTGWTNKFIFPPFEFSIANSMITNLHEPKSTLMMQAAAFAGYDFLMEAYKVAIKEGYRFSTYGDAMLII

SEQ ID NO: 70443 - protein, 349 aa, Polaribacter sp.
  misc_feature (1)..(349): tr|A0A2U2JEY9|A0A2U2JEY9_9FLAO S-adenosylmethionine:tRN A ribosyltransferase-isomerase OS=Polaribacter sp. ZY11 3 OX=2100726 GN=queA PE=3 SV=1
MKLSNFEFDLPEELLAQYPVEHRDESRLMVLNRKEGTIEHKLFKDVINYFDEGDIMMLNNTKVFPARMYGNKEKTGARIEVFLLRELNAENRLWDVLVDPARKIRIGNKLFFGEDDSLVAEVIDNTTSRGRTLRFLFDGSYEEFRTKLVELGETPLPKAINRAVEPEDEERYQTIYAKHEGAVAAPTAGLHFSKHLLKRLEIKGVDFAETTLHVGLGTFSPVEVEDLSKHKMDSEQIIIPAASAEKINKAKAEKRKVCAVGTTVMRTIESSVSSNQQLNAYEGWTNKFIFPPYDFSIANAMITNFHLPKSTLMMQAAAFAGYDFLMEAYKVAVKEKYRFSSYGDAMLII

SEQ ID NO: 70444 - protein, 349 aa, Polaribacter vadi
  misc_feature (1)..(349): tr|A0A1B8TU64|A0A1B8TU64_9FLAO S-adenosylmethionine:tRN A ribosyltransferase-isomerase OS=Polaribacter vadi OX= 1774273 GN=queA PE=3 SV=1
MKLSQFDFELPEELLAVYPPEHRDESRLMVLNRKEQTIEHKKFKDLIDYFDEGDVMMLNNTKVFPARMYGNKEKTGARIEVFLLRELNSENRLWDVLVDPARKIRIGNKLFFGDDDSLVAEVIDNTTSRGRTLRFLFDGSYEAFREKLLELGETPLPRSINREVEASDEERYQTIYAKNEGAVAAPAAGLHFSKHLLKRLEIKGVDFAEMTLHIGLGTFSSVEVEDLSKHKMDSEQVIISAATADKINKAKKEKRRICAVGTTVMRTVESSVSSKQELNAYEGWTNKFIFPPYDFSIANAMITNFHPPKSTLMMQGAAFAGYDFLMEAYKLAIKEGYKFSTYGDALLII

SEQ ID NO: 70445 - protein, 352 aa, Polaromonas naphthalenivorans
  misc_feature (1)..(352): tr|A1VJ16|A1VJ16_POLNA S-adenosylmethionine:tRNA ribosy ltransferase-isomerase OS=Polaromonas naphthalenivorans (strain CJ2) OX=365044 GN=queA PE=3 SV=1
MKTTFSLSDFDFTLPDELIAQHPAAERSASRLLDGRGDAIADRRFADLPDLLLPGDLLVFNDTKVVKARLFGQKLSGGRLELLIERVLSPHLDAGHEVAAHMKVSKKPLPGAMLQMDGGFTATLLGRWPEAHGPLYRFRLSSDPYALMAQHGHVPLPPYITHTDSADDEQRYQTVFAKNPGAVAAPTAALHFDEAMLEKLQARGIARASVTLHVGAGTFQPVKTETIAEHHMHFERFDVPQATHEAIAACKARGGRVVAVGTTTVRALESAAKFGPDCCDTNIFITPGFDFKVVDVLLTNFHLPKSTLMMLVSAFSGHGHIMALYRHAIEARYRFFSYGDAMLLARQAPPAL

SEQ ID NO: 70446 - protein, 349 aa, Polaromonas sp.
  misc_feature (1)..(349): tr|A0A1S8FKJ5|A0A1S8FKJ5_9BURK S-adenosylmethionine:tRN A ribosyltransferase-isomerase OS=Polaromonas sp. A23 O X=1944133 GN=queA PE=3 SV=1
MKTHFSLSDFDFTLPDELIAQHPTAERSASRLLDGRGAAPVDRRFTELPDLLQPGDLLVLNDTKVVKARLFGQKSSGGRLELLIERVLSLSPDAGHEVAAHMKVSKKPLPGAVMQMDGGFTATLLGRWPNEDGPLYRFALSSDPYTLMESHGHVPLPPYITHSDSADDERRYQTVFAKNPGAVAAPTAALHFDNAVLAQLEARGIRRASVTLHVGAGTFQPVKAENIADHVMHFERFEVPETTLQAIRDCKARGGRVVAVGTTSVRALESAAKFGPACRDTNIFITPGFEFQVVDLLLTNFHLPKSTLMMLVSAFAGYEHIMALYRHAITQRYRFFSYGDAMLLQRTTP

SEQ ID NO: 70447 - protein, 370 aa, Polaromonas sp.
  misc_feature (1)..(370): tr|A0A1S8FPZ0|A0A1S8FPZ0_9BURK S-adenosylmethionine:tRN A ribosyltransferase-isomerase OS=Polaromonas sp. C04 O X=1945857 GN=queA PE=3 SV=1
MHHSLPGAPRTFLLGDFDFALPPELIAQHPAPERSASRLLDGRGAAPVDRIFHDLPALLNPGDLMVFNDTQVIKARLFGEKPTGGKVELLVERVLSGNQVAAHMRVSKKPEPGTTLVLAGGGGFRATLLGRWPDEQGAMFRFVLSNDAGDDPYALMERHGHVPLPPYIKRHQGAAITHTDSEEDERRYQTVFAKNPGAVAAPTAALHFDEALLAALDARGVQRASVTLHVGAGTFQPVKTEDLAEHQMHSEWYDVPEATQRAIEQCRARGGRLIAVGTTTVRTLESMAASGQARGDTRIFITPGFDFKLVDSLITNFHLPKSTLMMLVSAFAGYEHIMALYRHAIESRYRFFSYGDAMLLTRQAPDHAAI

SEQ ID NO: 70448 - protein, 380 aa, Polyangium fumosum
  misc_feature (1)..(380): tr|A0A4U1JI75|A0A4U1JI75_9DELT S-adenosylmethionine:tRN A ribosyltransferase-isomerase OS=Polyangium fumosum OX =889272 GN=queA PE=3 SV=1
MRRDLLAYDLPPELIAAHPSPDRESARLLVVDDAPGRLEHAFIRDLADRLPEGALVVVNDTRVLPARLLGRKASSGGKVEIFLVRKVADAYVDRSGERLPAERWRALGRSSKPLREGAEITIDGPASLVARIEGRDGGFGGAAPLAGAKPPSGERGLFDVVLFSPEGRSVPDAVEAAGHIPLPPYIRRDDDATDRARYQTVYAREPGAVAAPTAGLHLTEPLIERFSARGMELARVTLHVGLGTFQPVTVSDLDDHPMHAEAYRVPPETADAVARARQKGREIVAIGTTSVRALESAADPTREGHVVAREGETRLLIQPGYRFRVVDRLLTNFHLPESTLLALVGAFAGLPRVLESYRVAIEERYRFYSYGDAMLLRRQR

SEQ ID NO: 70449 - protein, 342 aa, Polyangium sp.
  misc_feature (1)..(342): tr|A0A4U1HSJ4|A0A4U1HSJ4_9DELT S-adenosylmethionine:tRN A ribosyltransferase-isomerase OS=Polyangium sp. SDU3-1 OX=2567896 GN=E8A73_02285 PE=3 SV=1
MKAAVGPRADPLAERLLGVDPRTGEMRDARVGDLGRFLRAGDLVVVNDAATLPGSLVGTSSRGEPIEARLAQPLGENRFVALLFGAGDHRQRTEDRPPPPPLAEGSVIAFGDDLEAVVERVSPVSARLVEIAFSARGAALWTALYRHGRPVQYAYVPAPLALWDVQTRYASRPIAAEMPSAGRPLAWELLFDLARRGVRFARVTHAAGLSSTGDPALDARLPLPEHFEIPEATVRAVSEARRAGGRVVAVGTTVTRALEGAARLAGGKLVAGAGVTDLVLGPEHVRAVVDGLFTGMHEPSESHFRLLGAFAPEGVLARAHAHAEAAGYLTHEFGDSMLLLAG

SEQ ID NO: 70450 - protein, 363 aa, Polyangium sp.
  misc_feature (1)..(363): tr|A0A4U1H1L9|A0A4U1H1L9_9DELT S-adenosylmethionine:tRN A ribosyltransferase-isomerase OS=Polyangium sp. SDU3-1 OX=2567896 GN=queA PE=3 SV=1
MRRALLDYTLPPELVATRPADDPEGARLLVVDGEPGRLEHAFIRDLPDRLPEGALVIVNDTRVLPARLLGRKVSSGGRVEIFLVRKIGPAEVAWSGRTLPAERWRALGRSSKPLRDGAEIELDSEGLLRARAFGRDAEGLLDVVLFSPAGRSIDEALEAVGRVPLPPYIRRDDDEADRARYQTVFAREPGAVAAPTAGLHLTERLVERMQARGLTIARVTLHVGLGTFQPVTADDLDDHPMHAELFRVSEETTRAIADARARGAEVVAIGTTAVRALESAADPEREGHVVPREGETRLLIQPGYRFRVVDRLLTNFHLPQSTLLALVGAFAGLDRILEAYRVAIEHRYRFYSYGDAMLLQRAS

SEQ ID NO: 70451 - protein, 341 aa, Polycyclovorans sp.
  misc_feature (1)..(341): tr|A0A2E2JCY5|A0A2E2JCY5_9GAMM S-adenosylmethionine:tRN A ribosyltransferase-isomerase OS=Polycyclovorans sp. O X=2024852 GN=queA PE=3 SV=1
MQLSDFDYVLPPALIAQRPLAERSQARLLVVSDRGLVDQQVRALPELLSPGDLLVVNDTRVVPARLFGNRATGGRIEVMVERVLDPRRFLAQLAFSRAPKVDEVLQVEGVPVRVVGRDGAFFELALVPDGETVLPFLERCGKLPLPPYIRHAPDAEDAVRYQTVFASTPGAVAAPTASLHFDDALLQALDDRGVRRVTVTLHVGAGTFQPVRVTDLSQHRMHAEHYAIPQATREAIARTRRDGGRVVAVGTTVCRALESAADEDGLPRVEQGDTRLFITPGYRFRVVDRLLTNFHLPQSTLLMLVSAFAGHAPIKDAYAHAIKQSYRFFSYGDAMLLSRAA

SEQ ID NO: 70452 - protein, 341 aa, Polymorphobacter sp.
  misc_feature (1)..(341): tr|A0A4Y9EPK3|A0A4Y9EPK3_9SPHN S-adenosylmethionine:tRN A ribosyltransferase-isomerase OS=Polymorphobacter sp. DJ1R-1 OX=2511025 GN=queA PE=3 SV=1
MRVSDFDFDLPTERIALRPVSPRDASRLLMVTQGGLADKMFADLPKLLRAGDLLVFNDTRVLPAQLAGMKFNAKIRVTLHKRIEPRRWWSFVKNAKRLKPDDRVDFGHGLTGVAEARDPRDGSILWHFESALPIEEALMAAGQMPLPPYISSKRNVDAQDLDDYQTVFGDKLGAVAAPTAGLHFTPELLAALDAAGIERRTVTLHVGAGTFQPVKVDDTDQHMMHAEWGQIDAATAAAIRAAKDEGRRVIAVGTTSARLLESAWTPEGVQAFSADTRIFITPGFRFAVVDGLLTNFHLPKSTLFMLVSALMGLDTMKAAYAHAVANDYRFYSYGDASLLLP

SEQ ID NO: 70453 - protein, 365 aa, Polymorphum gilvum
  misc_feature (1)..(365): tr|F2IZS4|F2IZS4_POLGS S-adenosylmethionine:tRNA ribosy ltransferase-isomerase OS=Polymorphum gilvum (strain LM G 25793 / CGMCC 1.9160 / SL003B-26A1) OX=991905 GN=queA PE=3 SV=1
MRVDVFDFDLPPERIALRPARPRDAARLLVVRPGQSPELADCGVRDLARELEPGDALVFNDTRVIPAQLEGTRTRGEAVAGIGATLHLRAGADRWWAFVRPAKKLAVGDRVRFGGEGRACLLGTLDATVADKRDSGEVLLAFDLAGPDLDQAIAAVGHIPLPPYIAARRGEDEQDRSDYQTMFADKDGAVAAPTAGLHFTPALIEALDARGIERHTVTLHVGAGTFLPVKAEDTADHRMHAEWGKVSAATAAALKAVRARGNRVVAVGTTSLRILESAAQGADGLTAFSGETSIFITPGYRFRAVDVLMTNFHLPRSTLFMLVSAFSGLQTMRRAYAHAIASGYRFYSYGDACLLFPAPQPDPDA

SEQ ID NO: 70454 - protein, 348 aa, Polynucleobacter aenigmaticus
  misc_feature (1)..(348): tr|A0A254Q1V8|A0A254Q1V8_9BURK S-adenosylmethionine:tRN A ribosyltransferase-isomerase OS=Polynucleobacter aeni gmaticus OX=1743164 GN=queA PE=3 SV=1
MQLSDFNYDLPPQLIAQHPLANRTDSRLLEVKAEGSNAALLIDRQFRDILNLIKLGDLLVFNDTKVIPARLHGKKETGGNVELLIERISAENQAWVQIRASKAPKTGTIVHVYNKAGETFPVEMIGYDGRFYEVRFPENVFSLLERFGELPLPPYIEHQPNQEDANRYQTVVAKNPGAVAAPTAGLHFDEAILNELRELGIKQATVTLHVGAGTFTPVREEDLSKHKMHYEWFSVPAETIAAIEATHKAGGRVIAVGTTSLRALESQAQTQQDSGETNLFITPGYVFKTVDCLLTNFHLPKSTLLMLVSAFAGVDNIRNAYQHAIQNEYRFFSYGDAMLLSRLNQTNS

SEQ ID NO: 70455 - protein, 348 aa, Polynucleobacter asymbioticus
  misc_feature (1)..(348): tr|A0A1J0DSZ3|A0A1J0DSZ3_9BURK S-adenosylmethionine:tRN A ribosyltransferase-isomerase OS=Polynucleobacter asym bioticus OX=576611 GN=queA PE=3 SV=1
MQLSDFNYELPPELIAQHPLANRTDSRLLEVRADGMNHAHLVDRQFKDILILAQPGDLLVFNDTKVIPARLHGKKETGGNVELLIERISGEKQAWVQIRASKVPKTGSTVHIYNQSGETFSVEMIGYDGRFYEVLFPDHVFSLLERFGKLPLPPYIEHQPDGEDAQRYQTVVAKNPGAVAAPTAGLHFDEVILQKLKDVGVNQATVTLHVGAGTFTPVREEDLSKHQMHYEWFSIPKETLQAIEKTKKNGGRIIAVGTTSLRALESQANSQQSSGETNLFITPGYQFKVVDCLLTNFHLPKSTLLMLVSAFAGVDNIRSAYQHAINQQYRFFSYGDAMFLCRLENIKP

SEQ ID NO: 70456 - protein, 348 aa, Polynucleobacter asymbioticus; identical to SEQ ID NO: 70455
  misc_feature (1)..(348): sp|A4SZT7|QUEA_POLAQ S-adenosylmethionine:tRNA ribosylt ransferase-isomerase OS=Polynucleobacter asymbioticus ( strain DSM 18221 / CIP 109841 / QLW-P1DMWA-1) OX=312153 GN=queA PE=3 SV=1

SEQ ID NO: 70457 - protein, 348 aa, Polynucleobacter campilacus
  misc_feature (1)..(348): tr|A0A254PT50|A0A254PT50_9BURK S-adenosylmethionine:tRN A ribosyltransferase-isomerase OS=Polynucleobacter camp ilacus OX=1743163 GN=queA PE=3 SV=1
MQLSDFNYELPADLIAQHPLANRTDSRLLEVKAERGNHAQLIDRQFKDILNIIKPGDLLVFNDTKVIPARLHGKKETGGIVELLIERISGDMQAWVQIRASKVPKTGSIVYIHNQSGETFPVEMIGHDGRFYEVRFPENIFELLERFGELPLPPYIEHQPDGEDAQRYQTVVAKNPGAVAAPTAGLHFDEKILQQLKDLGAHLASITLHVGAGTFTPVREEDLSKHKMHHEWFSIPQETLQAIEKTKQQGGRVIAVGTTSLRALESQALNQHSSGETNLFITPGFEFKTVDCLLTNFHLPKSTLLMLVSAFAGMGNIRAAYQHAIDQKYRFFSYGDAMFLSRLENTNS

SEQ ID NO: 70458 - protein, 345 aa, Polynucleobacter cosmopolitanus
  misc_feature (1)..(345): tr|A0A229FUI0|A0A229FUI0_9BURK S-adenosylmethionine:tRN A ribosyltransferase-isomerase OS=Polynucleobacter cosm opolitanus OX=351345 GN=queA PE=3 SV=1
MRLSDFNYNLPPELIAQHPLPNRTASRLLVLENHVTDVVIKDQQFTDLIDLLNPNDLLVFNDTKVIPARLFGKKESGGAVEVFLERITGETTAVAQIRASKSPKPGNKIILGSDEEPFEIEIIGRPDDSDNRFYEIKFSSPCLSLLEKHGQLPLPPYITHEANADDLERYQTVVAKNPGAVAAPTAGLHFDQATLDKIMAKGVNYTTLTLHVGAGTFTPVRTEDLSEHKMHSEWFSIPAETQELIKKTKLAGGKVIAVGTTSLRALESSAAFNIQEGETKLFITPGYEFKVIDQLITNFHLPCSTLLMLVSAFAGVEPIRKAYDHAIQQQYRFFSYGDAMLLTRQ

SEQ ID NO: 70459 - protein, 348 aa, Polynucleobacter duraquae
  misc_feature (1)..(348): tr|A0A0E3ZNE3|A0A0E3ZNE3_9BURK S-adenosylmethionine:tRN A ribosyltransferase-isomerase OS=Polynucleobacter dura quae OX=1835254 GN=queA PE=3 SV=1
MQLSDFNYDLPPELIAQHPLANRTDSRLLELNIEGGNVAQLIDRQFPDILKLMKTGDLLVFNDTKVIPARLHGKKETGGNVELLIERISGDKQAWVQIRASKVPKTGSIVHVHNQAGETFPVEMIGHDGRFYEVRFPENVLDLLERFGELPLPPYIEHQPDQEDANRYQTVIAKNPGAVAAPTAGLHFDETILQQLSELGVQQATVTLHVGAGTFTPVREEDLSKHKMHYEWFSIPAETLAAIKTTQQAGGRVIAVGTTSLRALESQAQTQQVTGETNLFITPGYTFKTVDCLLTNFHLPKSTLLMLVSAFAGVDNIRNAYQHAIQNKYRFFSYGDAMFLSRLNSISS

SEQ ID NO: 70460 - protein, 348 aa, Polynucleobacter hirudinilacicola
  misc_feature (1)..(348): tr|A0A210RWA8|A0A210RWA8_9BURK S-adenosylmethionine:tRN A ribosyltransferase-isomerase OS=Polynucleobacter hiru dinilacicola OX=1743166 GN=queA PE=3 SV=1
MQLSDFNYELPADLIAQHPLANRTDSRLLEVKADGGSHVQLIDRQFKDILSIIKPGDLLVFNDTKVIPARLHGKKETGGNVELLIERISGDRQAWVQIRASKVPKTGSIILIHNQAGETFPVEMLGYDGRFYEVRFPENVFELLERFGELPLPPYIEHQPDDEDAQRYQTVVAKNPGAVAAPTAGLHFDETILRQLNNLGIKQATITLHVGAGTFTPVREEDLTKHKMHHEWFSIPAETLQAIEETKQKGGRVIAIGTTSLRALESKAISQQSSGETNLFITPGFEFKTVDCLLTNFHLPKSTLLMLVSAFAGMDNIRAAYQHAIAQKYRFFSYGDAMVLCRLENTKS

SEQ ID NO: 70461 - protein, 348 aa, Polynucleobacter meluiroseus
  misc_feature (1)..(348): tr|A0A240DY68|A0A240DY68_9BURK S-adenosylmethionine:tRN A ribosyltransferase-isomerase OS=Polynucleobacter melu iroseus OX=1938814 GN=queA PE=3 SV=1
MQLSDFNYDLPNNLIAQHPLANRTDSRLLEVKLAGGNDAQLIDHAFPDFLGLVRAGDLLVFNDTKVIPARLHGKKETGGNIELLIERISGEQQAWVQLRASKVPKIGSTVHIHNHAGETFPVEMLGYDGRFYEVCFPENVFALLERFGELPLPPYIEHQPNEDDAQRYQTVVAKNPGAVAAPTAGLHFDEAILEQLSQLGVQRATITLHVGAGTFTPVREEDLSKHQMHHEWFSVPQATLDAIEATKRQCGRVIAVGTTSLRALESYALNQKLSGETNLFITPGYEFKMVDCLLTNFHLPKSTLLMLVSAFAGIENIRNAYQHAITQEYRFFSYGDAMFLSRLLEKNS

SEQ ID NO: 70462 - protein, 348 aa, Polynucleobacter necessarius
  misc_feature (1)..(348): sp|B1XRV8|QUEA_POLNS S-adenosylmethionine:tRNA ribosylt ransferase-isomerase OS=Polynucleobacter necessarius su bsp. necessarius (strain STIR1) OX=452638 GN=queA PE=3 SV=1
MQLSDFNYELPAALIAQHPLANRTDSRLLEVKADGLNHALLLDRQFKDILSLVKPGDLLVFNNTKVIPARLHGKKETGGIVELLIERISGEKQTWVQIRASKVLKTGSIVHIHNHAGETFSVEIIGYDGRFYEVSFPDNVFSLLERFGELPLPPYIEHQPDGEDAQRYQTVVAKNPGAVAAPTAGLHFDEAILQKIKNLGVNQATVTLHVGAGTFTPVREEDLSKHKMHYEWFSIPNETLQAIEATKENGGRVIAVGTTSLRALESQAASGQSGGETNLFITPGYQFKTVDCLLTNFHLPKSTLLMLVSAFAGMDHIRAAYQHAIEQKYRFFSYGDAMFLCRLENTKP

SEQ ID NO: 70463 - protein, 338 aa, Polynucleobacter paneuropaeus
  misc_feature (1)..(338): tr|A0A2Z4JND2|A0A2Z4JND2_9BURK S-adenosylmethionine:tRN A ribosyltransferase-isomerase OS=Polynucleobacter pane uropaeus OX=2527775 GN=queA PE=3 SV=1
MQLSDFNYELPARLIAQNPLAERTASRLLEVQAGSLVDRQFKEILSLLKPGDLLIMNDTKVIPARLHGKKSTGGAIELLIERITSNQRAWVQIRASKVPKLDSIVQIHNRNGESFEAKVVAYDGRFFEIEFPEAILDLLEKFGELPLPPYIEHQPNQVDANRYQTVLAKNPGAVAAPTAGLHFDEAILTELRAMGIEHTSITLHVGAGTFSPVREEDLSLHKMHSEWYSIPETSLAAIEKTRHAGGRIIAVGTTSLRTLESFAINQQRSGDTNLFITPGFTFKIVDCLITNFHLPKSTLLMLVSAFAGMENIRQAYQHAIAQEYRFFSYGDAMFLTRL

SEQ ID NO: 70464 - protein, 323 aa, Polynucleobacter sp.
  misc_feature (1)..(323): tr|A0A259ESY7|A0A259ESY7_9BURK S-adenosylmethionine:tRN A ribosyltransferase-isomerase (Fragment) OS=Polynucleo bacter sp. 17-46-58 OX=1970422 GN=B7X83_09490 PE=3 SV=1
SRLLELRVDGDKSAQLIDRQFRDILTLINPGDLLVFNDTKVIPARLHGKKETGGNVELLIERISAENQAWVQIRASKVPKTGSIVHIHNPAGESFPVEMIGYDGRFYEVRFPENVFSLLERFGELPLPPYIEHQPDAQDATRYQTVVAKNPGAVAAPTAGLHFDEDILGRLSQNGVRHATVTLHVGAGTFTPVREEDLSKHRMHYEWYSIPTQTLEAIAQTHGNGKRVIAVGTTSLRALESQALTQQSSGETNLFITPGFSFKAVDCLLTNFHLPKSTLLMLVSAFAGVDNIRNAYQHAIQNEYRFFSYGDAMFLSRLHHSHP

SEQ ID NO: 70465 - protein, 344 aa, Polynucleobacter sp.
  misc_feature (1)..(344): tr|A0A1G3CT67|A0A1G3CT67_9BURK S-adenosylmethionine:tRN A ribosyltransferase-isomerase OS=Polynucleobacter sp. GWA2_45_21 OX=1801989 GN=queA PE=3 SV=1
MQLSDFNYDLPPELIAQHPLANRTDSRLLELNIEGGNVAQLIDRKFPDILNLIKPGDLLVFNDTKVIPARLHGKKETGGNVELLIERISGDQQAWVQIRASKVPKTGSIVHVHNKAGETFPVEMLGYDGRFYEVRFPENVFDLLERFGELPLPPYIEHQPNQEDANRYQTVVAKNPGAVAAPTAGLHFDEVILKKLNELGVNQATVTLHVGAGTFTPVREEDLSKHKMHYEWFSVPADTIEAIKTTHKTGGRVIAVGTTSLRALESQAQSQQASGETNLFITPGYTFKAVDCLLTNFHLPKSTLLMLVSAFAGVDNIRHAYQHAIQNEYRFFSYGDAMFLSRTN

SEQ ID NO: 70466 - protein, 348 aa, Polynucleobacter sphagniphilus
  misc_feature (1)..(348): tr|A0A1R0HDF9|A0A1R0HDF9_9BURK S-adenosylmethionine:tRN A ribosyltransferase-isomerase OS=Polynucleobacter spha gniphilus OX=1743169 GN=queA PE=3 SV=1
MQLSDFNYTLPPHLIAQHPLEKRTDSRLLEVKAHGDSSAQFIDRTFREIVDLIRPGDLLVMNDTKVIPARLHGKKETGGIVELLIERISGDKQAWVQVRASKVPKTGSIVHIHNQAGETFPVEMIGYDGRFYEVRFPENVLGLLERFGELPLPPYIEHQPTQEDAQRYQTVVAKNPGAVAAPTAGLHFDQAILQQLSDAGVNQAGVTLHVGAGTFTPVREEDLSKHQMHYEWYSVPQATIDAIAQTKHQGGRVIAVGTTSLRALESHATTGQASGETNLFITPGYEFKAVDCLLTNFHLPKSTLLMLVSAFAGMDNIRNAYQHAIDQSYRFFSYGDAMLLTRVPNTNL

SEQ ID NO: 70467 - protein, 345 aa, Polynucleobacter victoriensis
  misc_feature (1)..(345): tr|A0A212TGC0|A0A212TGC0_9BURK S-adenosylmethionine:tRN A ribosyltransferase-isomerase OS=Polynucleobacter vict oriensis OX=2049319 GN=queA PE=3 SV=1
MRLSDFNYNLPPELIAQHPLPDRSSSRLLVLNQTINQEPIIEDKQFTDLLELLKPNDLLIFNDTKVIPARLFGKKESGGAVEVLLERIIDTNKAVVQIRASKPPKPGNQILIGHADDGFSIKVIGRQELNSPFYEVEFSSACIPLLEKYGQLPLPPYITHQANSDDQQRYQTVVAKNPGAVAAPTAGLHFDEHLLEKIKAKGTQYATITLHVGAGTFTPVRTEDLSEHKMHSEWFSIPKETQMAIDEAKRLGGSIIAVGTTSLRALESSAELGITEGETRLFITPGYTFKVIDKLITNFHLPCSTLLMLVSAFAGVEPIRKAYDHAITQQYRFFSYGDAMFLTRQ

SEQ ID NO: 70468 - protein, 348 aa, Polynucleobacter wuianus
  misc_feature (1)..(348): tr|A0A191UHJ5|A0A191UHJ5_9BURK S-adenosylmethionine:tRN A ribosyltransferase-isomerase OS=Polynucleobacter wuia nus OX=1743168 GN=queA PE=3 SV=1
MQLSDFNYELPTELIAQHPLANRTDSRLLEVKADRDDHVQLVDRQFKDILNLMKSGDLLVFNDTKVIPARLHGKKETGGNVELLIERISGDKQAWVQIRASKVPKTGSIVHIHNQAGETFPVEMIGYDGRFYEVRFPENVFVLLERFGELPLPPYIEHQPDGEDAQRYQTVVAKNPGAVAAPTAGLHFDEPILQQLNNLGVEQATVTLHVGAGTFTPVREEDLSKHKMHYEWFSIPEATLQAIAKTKSNGGRVIAVGTTSLRALESQAATCQSSGETNLFITPGFQFKTVDCLLTNFHLPKSTLLMLVSAFAGMENIRAAYQHAIHQKYRFFSYGDAMFLCRLENTKT

SEQ ID NO: 70469 - protein, 354 aa, Pontibaca methylaminivorans
  misc_feature (1)..(354): tr|A0A1R3WFK1|A0A1R3WFK1_9RHOB S-adenosylmethionine:tRN A ribosyltransferase-isomerase OS=Pontibaca methylamini vorans OX=515897 GN=queA PE=3 SV=1
MKLSDFDFDLPEELIATRPVTPRPSARLLVAADDAIRDAHVRDLPDWLRPGDRLVLNDTRVIPARLAGRRWRDGEAGRVAAQIAVTLLEPRPGGLWAALVKPLRRLRTGETIEFPGGLSARLEGVGEGQALLAFNLAGDAFDAALAEVGAMPLPPYIAARRAPDARDREDYQSVFARHRGAVAAPTASLHFDDDLLAQIRALGVDFTHVTLHVGAGTFLPVKSDDIEDHQMHAEWGRVSEAAAGEIAATRAAGGRVIPVGTTALRLIETAAQGGEIAPFEGRTDIFIYPGFRFRASDALMTNFHLPRSTLMMLVSALMGRGRIRAIYAHAIAQRYRFFSYGDASLLIPPEDRGG

SEQ ID NO: 70470 - protein, 341 aa, Pontibacillus chungwhensis
  misc_feature (1)..(341): tr|A0A0A2UQ66|A0A0A2UQ66_9BACI S-adenosylmethionine:tRN A ribosyltransferase-isomerase OS=Pontibacillus chungwh ensis BH030062 OX=1385513 GN=queA PE=3 SV=1
MNINDFDFDLPEELIAQTPLEDRTSSRLLVMDRDKETIDHKHFYNITSYLKPGDCLVLNNTRVLPARLYGVKEDTGAKVEVLLLHQRQGDEWEVLVKPAKKIKLGSKISFGDGKLVAECTELQDHGGRILTFSYEGIFLEVLESLGEMPLPPYIKEQVSDRERYQTVYSKEEGSAAAPTAGLHFTKELLQEIQDKGVEIAYITLHVGLGTFRPVSVDSVEEHDMHAEFYQMSKDTADQLNRVKESGGRVIPVGTTSTRTLETIARDHGSFKEASGWTDIFIYPPYDFKAIDGLITNFHLPKSTLIMLVSALAGKEFVMRAYKEAVDEQYRFFSFGDAMLIL

SEQ ID NO: 70471 - protein, 341 aa, Pontibacillus halophilus
  misc_feature (1)..(341): tr|A0A0A5ICG9|A0A0A5ICG9_9BACI S-adenosylmethionine:tRN A ribosyltransferase-isomerase OS=Pontibacillus halophi lus JSM 076056 = DSM 19796 OX=1385510 GN=queA PE=3 SV=1
MDIEQFDFDLPERLIAQTPLKDRTSSRMMAINRSEERIEHQHFYNITSYLKSGDCLVLNDTKVLPARLYGVKEDTGAKMEVLLLHQQEGDRWETLVKPAKKVKEGTRISFGDGKLVAECIGMKEHGGRILQFHYEGIFLEVLESLGEMPLPPYIKEQLPDRDRYQTVYAKEEGSAAAPTAGLHFTHELLEELQQKGVQIAYITLHVGLGTFRPVSADTVEDHDMHAEFYTMSEETAAQLNQVRAEGGRIISVGTTSTRTLETIARDYGQFQAVSGWTDIFIYPPYEFKAIDGLITNFHLPKSTLIMLVSAFAGKELTMEAYRKAVEEEYRFFSFGDAMFIE

SEQ ID NO: 70472 - protein, 341 aa, Pontibacillus litoralis
  misc_feature (1)..(341): tr|A0A0A5HZJ9|A0A0A5HZJ9_9BACI S-adenosylmethionine:tRN A ribosyltransferase-isomerase OS=Pontibacillus litoral is JSM 072002 OX=1385512 GN=queA PE=3 SV=1
MDIKDFDFHLPEELIAQTPLLNRTESRLMVLDREREQITHEHFYQLPQFLQPGDCLVLNNTRVLPARLFGLKEDTGGKVEVLLLHQIEGDEWEVLVKPAKKVKIGTRISFGDGALIAQCTQVKEHGGRVVTFHYEGLFLEVLESLGEMPLPPYIKEQLEDQERYQTVYAKEEGSAAAPTAGLHFTKALLAELQDKGIEIAYVTLHVGLGTFRPVSAGTVEEHEMHAEFYEMTRQTADQLKEVRKRGGRIITVGTTSTRTLETIVRDYGDFTEARGWTDIFIYPPYAFKAIDGLITNFHLPKSTLIMMISAFAGKELVMKAYEEAIEAQYRFFSFGDAMFIR

SEQ ID NO: 70473 - protein, 342 aa, Pontibacillus marinus
  misc_feature (1)..(342): tr|A0A0A5G4D0|A0A0A5G4D0_9BACI S-adenosylmethionine:tRN A ribosyltransferase-isomerase OS=Pontibacillus marinus BH030004 = DSM 16465 OX=1385511 GN=N783_13185 PE=3 SV= 1
MGVPYSFDIPDSLNASVPAELRTGARDHVKLMVLDGQEITHDHFSNLERYFREGDTLILNNSRTIPPVLKAKQGHHDIEVRLSRKVSSHEWEALLIGDLIQTNTPICFQKSGVEATVSGLGSEPPLVVLSFSLEGTDLFDFIYRFATPIRYEYIDAPWPLEMYQTVYASVPGSVEMPSAGRAFSWRLLKKLKKMGVQIGYVQLHTGLSYYERNRWPNPEAHPEEFHVPEETAHLVNQTRKNGGRVIATGTTVVRAMESCVNNDGLVTPHNGITRLYVGPGYQVRSIDGLLTGFHEPEASHLDMLTSFVEKDILMNAYQDALRKGYLWHEFGDMNLILQEKHV

SEQ ID NO: 70474 - protein, 342 aa, Pontibacillus marinus
  misc_feature (1)..(342): tr|A0A0A5FZU5|A0A0A5FZU5_9BACI S-adenosylmethionine:tRN A ribosyltransferase-isomerase OS=Pontibacillus marinus BH030004 = DSM 16465 OX=1385511 GN=queA PE=3 SV=1
MEIKDFDFDLPERLIAQTPLKDRTSSRMLVMHREEEKIEHKHFYDLTSYLKPGDCLVLNNTRVLPARLFGVKEDTGAKVEVLLLHQQEADEWEVLVKPAKKIKEGTRVSFGDGKLVAECTDLKEHGGRVMQFSYEGIFLEVLESLGEMPLPPYIKEQLPDRERYQTVYSKEEGSAAAPTAGLHFTNELLQEVQDMGVHIAYVTLHVGLGTFRPVSVDTVEEHDMHAEFYHMSQGTADLLTNVREAGGRILSVGTTSTRTLETIARDHDGAFTEASGWTDIFIYPPYQFKAIDGLITNFHLPKSTLIMLVSALAGKEFIMRAYKEAVQEEYRFFSFGDAMLIL

SEQ ID NO: 70475 - protein, 345 aa, Pontibacillus yanchengensis
  misc_feature (1)..(345): tr|A0A0A2TBN9|A0A0A2TBN9_9BACI S-adenosylmethionine:tRN A ribosyltransferase-isomerase OS=Pontibacillus yanchen gensis Y32 OX=1385514 GN=N782_18665 PE=3 SV=1
MNTLATSFHIPDSLHAEVPPEHRGLRRDDVRLMVLQKGEKNASHNRFDEIDKFLEAGDVLVVNNSRTIPPVLKGSQGKQNVEIRLSRKISTHQWEALLLGTFIQTNVPIQLSEGLEATISGLGSEPPLVTLSFSEGGSTLLDYIYRYGEPVRYEYIHHPWPLETYQTVYGAIPGSVEMPSAGRAFTWGLLSKLKAKGVRIASIQLHAGLSYYEKNRWPNPNNHPEAFAVPEETAKLINTAKQNGKRVIAVGTTVVRALESTVHEQGEVKASSGITKLYIDQHHRVTSVDGLLTGFHEPEASHLHMLRAFMPEKKLIKAYKEALNKGYLWHEFGDMNLILSERKGK

SEQ ID NO: 70476 - protein, 341 aa, Pontibacillus yanchengensis
  misc_feature (1)..(341): tr|A0A0A2TIK6|A0A0A2TIK6_9BACI S-adenosylmethionine:tRN A ribosyltransferase-isomerase OS=Pontibacillus yanchen gensis Y32 OX=1385514 GN=queA PE=3 SV=1
MNIKDFDFDLPEELIAQTPLLNRTHSKMLVLDRESETIDHKHFYDLPSYLNSGDCLVLNNTRVLPARLYGVKEDTGGKVEVLLLHQQEGDEWEVLVKPAKKVKEGTRISFGDGKLIAECTALKDHGGRIVKLHYDGIFLEVLESLGEMPLPPYIKEQLPDQERYQTVYSKEEGSAAAPTAGLHFTNELLEEIQEQGVEIAYITLHVGLGTFRPVSAETVEEHEMHAEFYDMDQQTAEQLKRIKANGGRIIPVGTTSTRTLETIVRDYGGFTEARGWTDIFIYPPYTFKAVDGLITNFHLPMSTLIMMVSALAGKDVVMKAYHEAIEQRYRFFSFGDAMFIK

SEQ ID NO: 70477 - protein, 403 aa, Pontibacter actiniarum
  misc_feature (1)..(403): tr|A0A1X9YMT6|A0A1X9YMT6_9BACT S-adenosylmethionine:tRN A ribosyltransferase-isomerase OS=Pontibacter actiniaru m OX=323450 GN=queA PE=3 SV=1
MTNPKKLAIKDFVYELPDKRIAKFPLPERDQSKLLHYRQGQIVDRTFTDLPQLLPPHTLLVFNDTKVVQARLLMQKETGGLVEIFCLEPVAPHREVQLAMQQTGSSTWKCLVGNNKRWKSGPVKLHFEGGILEAAREAQQEGHFLIRFTWDPAELTFAEVLERCGRLPLPPYLNRDLTPDDHTRYQTIYANQQGAVAAPTAGLHFTARVMHQLQAAGMDTAYLTLHVGAGTFKPVKAEVMEEHEMHAEQLYITRTFLQRLLRQLDNPVIPVGTTSMRSLESLYWLGAKVLEQPELPMQQLHVTQWQAYESTNPPAATNALQALLAYMDRQGTDYLHASTQIIIAPGYTFRICRGLVTNFHQPESTLLLLVSALIGENWRTVYKHALDNGYRFLSYGDSSLLLP

SEQ ID NO: 70478 - protein, 348 aa, Pontibacter actiniarum
  misc_feature (1)..(348): tr|A0A1X9YWN0|A0A1X9YWN0_9BACT S-adenosylmethionine:tRN A ribosyltransferase-isomerase OS=Pontibacter actiniaru m OX=323450 GN=queA PE=3 SV=1
MKLSEFKFDLPESYLATHPSENRDESRMMVVHRDSGKIEHRVFKDILEYFDEGDVMVVNDTKVFPARLYGNKEKTGAKIEVFLLRELNKEIHLWDVLVDPARKIRVGNKLYFGDSDLVAEVIDNTTSRGRTIKFLFDGPDEEFYKTINDLGETPLPKYIKREAEPEDRERYQTVYAKNVGAVAAPTAGLHFTKEVMKRLEIKGVDVEPVTLHVGLGTFRPVDVEDLTKHKMDSENFMVPAATAERVNKALDSKKRVCAIGTTTMRALESSVSANSRLKANEGWTDRFIFPPYDFKIANCLLTNFHMPESTLLMMAAAFGGYELVMKAYEEAVKENYRFFSYGDVMLIL

SEQ ID NO: 70479 - protein, 348 aa, Pontibacter akesuensis
  misc_feature (1)..(348): tr|A0A1I7HSU2|A0A1I7HSU2_9BACT S-adenosylmethionine:tRN A ribosyltransferase-isomerase OS=Pontibacter akesuensi s OX=388950 GN=queA PE=3 SV=1
MKLSEFKFELPEELLATHPTENRDESRMMVVHRDSGKIEHRIFKDILEYFDDGDVMVVNDTKVFPARLYGNKEKTGAKIEVFLLRELNKDIHLWDVLVDPARKIRVGNKLYFGESDLVAEVIDNTTSRGRTIKFLFDGPDEEFYKTINDLGETPLPKYIKREAEPEDRERYQTVYAKNVGAVAAPTAGLHFTKEVLKRLEIKGIDMAPLTLHVGLGTFRPVDVEDLTKHKMDSENFMVPGETAELVNRALDKKKRVCAIGTTTMRALESSVSANNRLKANEGWTDRFLFPPYDFKIANSLLTNLHMPESTLLMMAAAFGGYELVMKAYEEAVKEKYRFFSYGDVMLIL

SEQ ID NO: 70480 - protein, 404 aa, Pontibacter akesuensis
  misc_feature (1)..(404): tr|A0A1I7J1H5|A0A1I7J1H5_9BACT S-adenosylmethionine:tRN A ribosyltransferase-isomerase OS=Pontibacter akesuensi s OX=388950 GN=queA PE=3 SV=1
MLTDPKKLAIKDFVYDLPDERIAKFPLPERDQSKLLQYHGGQISDHTFTDLSGLLPPHTLLVFNNTKVVQARLLFQKETGGVVEIFCLEPVAPHREVQLAMQQTGSCTWKCLVGNNKRWKSGPVSLYFEGGMVQAEREAQQEGHFLIRFTWDPTDLTFAEVLERCGRLPLPPYLNRELTPDDHTRYQTIYADQQGAVAAPTAGLHFTERVLTQLQEKGIDTAYLTLHVGAGTFKPVKADVMEAHEMHAEQLYITKPLLQRLVQQLAHPIIPVGTTSMRSLESIYWLGAKVLEQPDLLEQALHVTQWQPYESTNPPTPAAAIQGLLDYMERRGTDYLHASTQIIIAPGYAFRICNGLVTNFHQPESTLLLLVSALIGDDWRKLYQHALANDYRFLSYGDSSLLLP

SEQ ID NO: 70481 - protein, 403 aa, Pontibacter chinhatensis
  misc_feature (1)..(403): tr|A0A1I2YH89|A0A1I2YH89_9BACT S-adenosylmethionine:tRN A ribosyltransferase-isomerase OS=Pontibacter chinhaten sis OX=1436961 GN=queA PE=3 SV=1
MSDPKKLAIKDFVYDLPEERIAKFPLPVRDQSKLLLYRQGQFIDHTFTELPTLLPPDTLLVFNDTKVVQARLLMQKETGGLVEIFCLEPVAPHREVQLAMQQTGSCTWKCLVGNNKRWKGGLVHLYFEGGVLQAEREAQQEGHFLIHFTWRQAELTFAEVLERCGRLPLPPYLNRDLTPEDHTRYQTIYASQQGAVAAPTAGLHFTDRVMDALKAQGIDTAYLTLHVGAGTFKPVKSETMEAHEMHAEQVYISRSILERLLKQQGNPVIPVGTTSMRSLESIYWLGAKVLAQPELTQQELHVSQWQAYESINQPTAAQALEALLHYLDRQGTDHLHANTQIIIAPGYTFRMCHGLVTNFHQPESTLLLLVSALIGEDWRKVYQHALAHDYRFLSYGDSSLLLP

SEQ ID NO: 70482 - protein, 348 aa, Pontibacter chinhatensis
  misc_feature (1)..(348): tr|A0A1I2TBV6|A0A1I2TBV6_9BACT S-adenosylmethionine:tRN A ribosyltransferase-isomerase OS=Pontibacter chinhaten sis OX=1436961 GN=queA PE=3 SV=1
MKLSEFKFDLPESYLATHPAENRDESRMMVVHRDTGKIEHRVFKDILEYFDEGDVMVVNDTKVFPARLYGNKEKTGAKIEVFLLRELNKDIHLWDVLVDPARKIRVGNKLYFGDSDLVAEVIDNTTSRGRTIKFLFDGPDEEFYKTINDLGETPLPKYIKREAEPEDRERYQTVYAKNVGAVAAPTAGLHFTKEVLKRLEIKGVDVEPITLHVGLGTFRPVDVEDLTKHKMDSENFIVPATTAERVNKALDNKKRVCAIGTTTMRALESSVSASNRLKSNEGWTDRFIFPPYDFKIANALVTNFHMPESTLLMMAAAFGGYDLVMKAYEEAIKENYRFFSYGDVMLIL

SEQ ID NO: 70483 - protein, 404 aa, Pontibacter diazotrophicus
  misc_feature (1)..(404): tr|A0A3D8L6S9|A0A3D8L6S9_9BACT S-adenosylmethionine:tRN A ribosyltransferase-isomerase OS=Pontibacter diazotrop hicus OX=1400979 GN=queA PE=3 SV=1
MMIDPKKLAIKDFVYELPEERIAKFPLPERDQSKLLLYRQGQIVDHTFTDLPQLLPPNTLLVFNDTKVVQARLLFQKETGGFVEIFCLEPVAPYREVQLAMQQTGNCVWKCLVGNNKRWKSGKISLRFDGGMLQAEREAQQEGHFLIRFTWEPAELPFAEVLERCGKLPLPPYLNRDLTPEDHTRYQTIYANQQGAVAAPTAGLHFTDRVMASLQEQNIAAAYLTLHVGAGTFRPVKADVMEEHEMHAEQLYLTKPLLQRLLKQLGKPIIPVGTTSMRSLESLYWLGAKVLQQPALPMQELQVSQWQAYETKEPPAAAEALNALLQYMERQGTNYLHASTQIIIAPGYTFRICGGLITNFHQPESTLLLLVSALIGEDWRKVYQHALQNNYRFLSYGDSSLLLP

SEQ ID NO: 70484 - protein, 348 aa, Pontibacter diazotrophicus
  misc_feature (1)..(348): tr|A0A3D8L961|A0A3D8L961_9BACT S-adenosylmethionine:tRN A ribosyltransferase-isomerase OS=Pontibacter diazotrop hicus OX=1400979 GN=queA PE=3 SV=1
MKLSEFKFDLPEEYLATHPSANRDESRMMVVHRDSGKIEHRVFKDILEYFDEGDVMVVNDTKVFPARLYGNKEKTGAKIEVFLLRELNKDIHLWDVLVDPARKIRVGNKLYFGESDLVAEVIDNTTSRGRTIKFLFDGSDEEFYKAINDLGETPLPKYIKREAEPEDRERYQTVYAKNVGAVAAPTAGLHFTKEVLKRLEIKGVDVTPLTLHVGLGTFRPVDVEDLTKHKMDSENFMVPAETVSMVNNALDNKKRVVAIGTTTMRALESSVSANNRLKANEGWTDRFIFPPYDFKIANSLVTNFHMPESTLLMMTAAFGGYELIMEAYQQAIKEKYRFFSYGDVMLVL

SEQ ID NO: 70485 - protein, 404 aa, Pontibacter indicus
  misc_feature (1)..(404): tr|A0A1R3XLR9|A0A1R3XLR9_9BACT S-adenosylmethionine:tRN A ribosyltransferase-isomerase OS=Pontibacter indicus O X=1317125 GN=queA PE=3 SV=1
MNANPKNLAIKDFVYELPEERIAKFPLPERDQSKLLYYKQQGIADHTFTDLPELLPAGSLLVFNNTKVVQARLIFRKPTGGAVEVFCLEPVKPHREVQLAMQQTRSCTWKCLVGNNKRWKEGPLKIFFEGGVVTAEREAQQEGHFLIRFTWTPAELTFAEVLERCGKLPLPPYLNRELIPEDRSRYQTIYARNEGAVAAPTAGLHFTDKVMAQLQAKGIDSTYLTLHVGAGTFKPVKADTMETHEMHAEQLMVSREVVAQLLEHLGRPLIPVGTTSMRSLESLYWLGTLLWRQPDLRPEDLHVTQWLPYEAETPPAAAEALQTLLNYMDRHQTQYLHASTQIIIAPGYTFRLCKGLVTNFHQPESTLLLLVAALIGEDWKQVYRHALDNDYRFLSYGDSSLLLP

SEQ ID NO: 70486 - protein, 348 aa, Pontibacter indicus
  misc_feature (1)..(348): tr|A0A1R3XF11|A0A1R3XF11_9BACT S-adenosylmethionine:tRN A ribosyltransferase-isomerase OS=Pontibacter indicus O X=1317125 GN=queA PE=3 SV=1
MKLSEFKFELPENLLATHPSANRDESRMMVLHRDTGKIEHRIFKDILEYFDEGDVMVVNDTKVFPARLYGNKEKTGAKIEVFLLRELNKDIHLWDVLVDPARKIRVGNKLYFGESDLVAEVIDNTTSRGRTIKFLFDGPDEEFYKTINELGETPLPKYIKREAEPEDKERYQTVYAKNVGAVAAPTAGLHFTREVLKRLEIKGVDVTPLTLHVGLGTFRPVDVEDLTKHKMDSENFMVPSETAEMVNKALDNKKRVCAIGTTTMRALESSVSASNRLKPNEGWTDRFIFPPYDFKIANALVTNFHMPESTLLMMTAAFGGYDLVMKAYEEAVKEKYRFFSYGDVMLIL

SEQ ID NO: 70487 - protein, 403 aa, Pontibacter korlensis
  misc_feature (1)..(403): tr|A0A0E3ZGN5|A0A0E3ZGN5_9BACT S-adenosylmethionine:tRN A ribosyltransferase-isomerase OS=Pontibacter korlensis OX=400092 GN=queA PE=3 SV=1
MNDPKKLAIKDFVYELPDERIAKFPLPERDQSKLLLYRQGNIADHTFTELTQLLPQDTLLVFNDTKVVQARLLMQKETGGLVEIFCLEPVAPHREVQLAMQQTGGSTWKCLVGNNKRWKSGPVRLDFEGGVLKAEREAQQEGHFLIRFTWEPAELPFAEVLERCGRLPLPPYLNRDLTPDDHTRYQTIYANQKGAVAAPTAGLHFTDRVMAALQAQGIGTAYLTLHVGAGTFKPVKAETMETHEMHAEQLYITRSILERLLHQVGKPVIPVGTTSMRSLESIYWLGAKVLEQPELSVQELHVSQWQAYESINPPSAETALQALLRYLDHLGTDHLHASTQIIIAPGYTFRMCHGLVTNFHQPESTLLLLVSALIGENWRKVYQHAMENDYRFLSYGDSSLLLP

SEQ ID NO: 70488 - protein, 348 aa, Pontibacter korlensis
  misc_feature (1)..(348): tr|A0A0E3ZD95|A0A0E3ZD95_9BACT S-adenosylmethionine:tRN A ribosyltransferase-isomerase OS=Pontibacter korlensis OX=400092 GN=queA PE=3 SV=1
MKLSEFKFELPESHLATHPTENRDESRMMVVHRDTGKIEHRIFKDILEYFDEGDVMVVNDTKVFPARLYGNKEKTGAKIEVFLLRELNKDIHLWDVLVDPARKIRVGNKLYFGDSDLVAEVIDNTTSRGRTIKFLFDGTDEEFYKTINDLGETPLPKYIKREAEPEDRERYQTVYAQNVGAVAAPTAGLHFTKEVLKRLEIKGVDVEPITLHVGLGTFRPVDVEDLTKHKMDSENFMVPAATADRVNKALDSKKRVCAIGTTTMRALESSVSANSRLKANEGWTDRFIFPPYDFKIANALLTNFHMPESTLLMMAAAFGGYDLIMKAYEEAVKEKYRFFSYGDVMLIL

SEQ ID NO: 70489 - protein, 348 aa, Pontibacter lucknowensis
  misc_feature (1)..(348): tr|A0A1N6UCT2|A0A1N6UCT2_9BACT S-adenosylmethionine:tRN A ribosyltransferase-isomerase OS=Pontibacter lucknowen sis OX=1077936 GN=queA PE=3 SV=1
MKLSEFKFELPESLLATHPSANRDESRMMVVHRDTGKIEHRVFKDILEYFDEGDVMVVNDTKVFPARLYGNKEKTGAKIEVFLLRELNKDIHLWDVLVDPARKIRVGNKLYFGDSDLVAEVIDNTTSRGRTIKFLFDGPDEEFYKTINELGETPLPKYIKREAEPEDKERYQTVYAKNVGAVAAPTAGLHFTKEVLKRLEIKGVDVTPLTLHVGLGTFRPVDVEDLTKHKMDSENFKVPNETAELVNKALDNKKRVVAIGTTTMRALESSVSASNRLKPNEGWTDRFIFPPYDFKIANALVTNFHMPESTLLMMTAAFGGYELVMKAYEEAVKEKYRFFSYGDVMLIL

SEQ ID NO: 70490 - protein, 404 aa, Pontibacter lucknowensis
  misc_feature (1)..(404): tr|A0A1N6T0H4|A0A1N6T0H4_9BACT S-adenosylmethionine:tRN A ribosyltransferase-isomerase OS=Pontibacter lucknowen sis OX=1077936 GN=queA PE=3 SV=1
MNTNPKHLAIKDFVYELPDERIAKYPLPERDQSKLLLYHNHTIADHTFTSLPDLLPAGSLLVFNNTKVVQARLIFHKPTGGAVEIFCLEPVKPHREVQLAMQHTRSCTWKCLVGNNKRWKEGVLKLFFEGGVVTAERDAQQEGHFLIRFTWTPAELTFAEVLERCGRLPLPPYLNRELTPEDRTRYQTIYARNEGAVAAPTAGLHFTDQVMASLQAKGIESTYLTLHVGAGTFKPVKADTMEDHEMHAEQLMVSKQVVKQLLQHLGQPIIPVGTTSMRSLESLYWLGTLLQQQPGLKPEELHVTQWLPYDISTPPATTEALQTLLGYMELYQVEHLHASTQIIIAPGYTFRICSGLVTNFHQPESTLLLLVSALIGGDWKQVYQHALDNDYRFLSYGDSSLLLP

SEQ ID NO: 70491 - protein, 403 aa, Pontibacter mucosus
  misc_feature (1)..(403): tr|A0A2T5YJ36|A0A2T5YJ36_9BACT S-adenosylmethionine:tRN A ribosyltransferase-isomerase OS=Pontibacter mucosus O X=1649266 GN=queA PE=3 SV=1
MSDPKKLAIKDFVYDLPEERIAKFPLPVRDQSKLLLYRQGQIIDHTFTELPALLPPNTLLVFNDTKVVQARLLMQKETGGLVEIFCLEPVAPHREVQLAMQQTGSCTWKCLVGNNKRWKGGPVHLYFEGGVLQAEREAQQEGHFLIRFTWQPAELTFAEVLEHCGRLPLPPYLNRDLTPEDHTRYQTIYASQQGAVAAPTAGLHFTDRVMDALKAQRIDMAYLTLHVGAGTFKPVKSETMEAHEMHAEQVYISRSILERLLKQQGNPVIPVGTTSMRSLESIYWLGAKVLAQPELPQQELHVSQWQAYESINPPTATQALESMLHYLDRQGTDHLHASTQIIIAPGYTFRMCHGLVTNFHQPESTLLLLVSALIGEDWRKVYQHALAHDYRFLSYGDSSLLLP

SEQ ID NO: 70492 - protein, 348 aa, Pontibacter mucosus
  misc_feature (1)..(348): tr|A0A2T5YSG2|A0A2T5YSG2_9BACT S-adenosylmethionine:tRN A ribosyltransferase-isomerase OS=Pontibacter mucosus O X=1649266 GN=queA PE=3 SV=1
MKLSEFKFDLPESYLATHPAENRDESRMMVVHRDTGKIEHRVFKDILEYFDEGDVMVVNDTKVFPARLYGNKEKTGAKIEVFLLRELNKDIHLWDVLVDPARKIRVGNKLYFGDSDLVAEVIDNTTSRGRTIKFLFDGPDEEFYKTINDLGETPLPKYIKREAEPEDRERYQTVYAKNVGAVAAPTAGLHFTKEVLKRLEIKGVDVEPITLHVGLGTFRPVDVEDLTKHKMDSENFIVPATTAERVNKALDNKKRVCAIGTTTMRALESSVSASNRLKSNEGWTDRFIFPPYDFKIANALVTNFHMPESTLLMMAAAFGGYDLIMKAYEEAIKENYRFFSYGDVMLIL

SEQ ID NO: 70493 - protein, 348 aa, Pontibacter ramchanderi
  misc_feature (1)..(348): tr|A0A2N3UCD5|A0A2N3UCD5_9BACT S-adenosylmethionine:tRN A ribosyltransferase-isomerase OS=Pontibacter ramchande ri OX=1179743 GN=queA PE=3 SV=1
MKLSEFKFELPESLLATHPSANRDESRMMVVHRDSGKIEHRIFKDILEYFDEGDVMVVNDTKVFPARLYGNKEKTGAKIEVFLLRELNKDIHLWDVLVDPARKIRVGNKLYFGESDLVAEVIDNTTSRGRTIKFLFDGPDEEFYKTINELGETPLPKYIKREAEPEDKERYQTVYAKNVGAVAAPTAGLHFTREVLKRLEIKGVDVTPLTLHVGLGTFRPVDVEDLTKHKMDSENFMVPAETAEMVNKALDNKKRVCAIGTTTMRALESSVSASNRLKPNEGWTDRFIFPPYDFKIANALVTNFHMPESTLLMMTAAFGGYELVMKAYEEAVKEKYRFFSYGDVMLIL

SEQ ID NO: 70494 - protein, 422 aa, Pontibacter ramchanderi
  misc_feature (1)..(422): tr|A0A2N3UAD0|A0A2N3UAD0_9BACT S-adenosylmethionine:tRN A ribosyltransferase-isomerase OS=Pontibacter ramchande ri OX=1179743 GN=queA PE=3 SV=1
MRNLFTDSYLYILTYLNFMHTNPKNLAIKDFVYELPDERIAKFPLPERDQSKLLYYQHHTISDHTFTELPELLPTGSLLVFNNTKVVQARLIFHKPTGGAVEIFCLEPVAPHREVQLAMQQTGSCTWKCLVGNNKRWKEGPLSLHFEGGTVTAERETQQDGHFLIRFAWTPAQLTFAEVLERCGRLPLPPYLNRELTPEDRTRYQTIYARNEGAVAAPTAGLHFTDNVMADLQAKGIDSTYLTLHVGAGTFKPVKADTMEAHEMHAEQLMVSRHVVDQLLSHLGRPLIPVGTTSMRSLESLYWLGTLLLQQPELKPEELHVTQWLPYETSTPPATKDALHALLDYMARHQTEHLHASTQIIIAPGYSFKVCNGLVTNFHQPESTLLLLVAALIGEDWKQVYRHALDNGYRFLSYGDSSLLLP

SEQ ID NO: 70495 - protein, 348 aa, Pontibacter sp.
  misc_feature (1)..(348): tr|A0A4P8RMV6|A0A4P8RMV6_9BACT S-adenosylmethionine:tRN A ribosyltransferase-isomerase OS=Pontibacter sp. SGAir 0037 OX=2571030 GN=queA PE=3 SV=1
MKLSEFKFDLPADLLATHPTENRDESRMMVVNRATGKIEHRIFKDILEYFDDGDIMVVNDTKVFPARLYGNKEKTGAKIEVFLLRELNKDIHLWDVLVDPARKIRVGNKLYFGESDLVAEVIDNTTSRGRTIKFLFDGPDEEFYKTINDLGETPLPKYIKREAEPEDRERYQTVYAKNIGAVAAPTAGLHFTKEVLKRLELQGVEVAPLTLHVGLGTFRPVDVEDLTKHKMDSENFMVPSATADMVNKALDNKKRVCSVGTTTMRALESSVSANSRLKPNEGWTDRFIFPPYDFKIANSLITNFHMPESTLLMMTAAFGGYELIMEAYELALKEKYRFFSYGDVMLII

SEQ ID NO: 70496 - protein, 348 aa, Pontibacter sp.
  misc_feature (1)..(348): tr|A0A501W305|A0A501W305_9BACT S-adenosylmethionine:tRN A ribosyltransferase-isomerase OS=Pontibacter sp. HB172 049 OX=2589816 GN=queA PE=3 SV=1
MKLSEFKFELPESYLATHPSENRDESRMMVVHRDTGKIEHRIFKDILEYFDEGDVMVVNDTKVFPARLYGNKEKTGAKIEVFLLRELNKEIHLWDVLVDPARKIRVGNKLYFGDSDLVAEVIDNTTSRGRTIKFLFDGTDEEFYKTINDLGETPLPKYIKREAEPEDRERYQTVYAKNVGAVAAPTAGLHFTKEVMKRLEIKGVDVEPITLHVGLGTFRPVDVEDLTKHKMDSENFMVPAGTADRVNQALDSKRRVCAIGTTTMRALESSVSASSRLKANEGWTDRFIFPPYEFKIANSLLTNFHMPESTLLMMAAAFGGYELIMKAYEEAVKENYRFFSYGDVMLIL

SEQ ID NO: 70497 - protein, 348 aa, Pontibacter ummariensis
  misc_feature (1)..(348): tr|A0A239GZD5|A0A239GZD5_9BACT S-adenosylmethionine:tRN A ribosyltransferase-isomerase OS=Pontibacter ummariens is OX=1610492 GN=queA PE=3 SV=1
MKLSEFKFDLPENLLATHPTENRDESRMMVLHRDSGKIEHRIFKDVLEYFDDGDVMVVNDTKVFPARLYGNKEKTGAKIEVFLLRELNKDIHLWDVLVDPARKIRVGNKLYFGESDLVAEVIDNTTSRGRTIKFLFDGPDEEFYKMINDLGETPLPKYIKREAEPEDRERYQTVYAKNVGAVAAPTAGLHFTKEVLKRLEIKGVDVAPLTLHVGLGTFRPVDVEDLTKHKMDSENFMVPSTTAEMVNKALDSKKRVCAIGTTTMRALESSVSASSRLKPNEGWTDRFIFPPYDFKIANSLITNFHMPESTLLMMAAAFGGYDLVMKAYEEAVKEKYRFFSYGDVMLIL

SEQ ID NO: 70498 - protein, 403 aa, Pontibacter ummariensis
  misc_feature (1)..(403): tr|A0A239K745|A0A239K745_9BACT S-adenosylmethionine:tRN A ribosyltransferase-isomerase OS=Pontibacter ummariens is OX=1610492 GN=queA PE=3 SV=1
MTDPKKLAIKDFVYELPEERIAKFPLPERDQSKLLLYRQGQMADHTFTDLPQLLPPRSLLVFNDTKVVQARLLFQKETGGTVEIFCLEPVAPYQEVQLAMQQTGNCVWKCLVGNNKRWKSGSVKLRFDGGMLTAERKAQQEGHFLIRFTWEPAELTFAEVLERCGKLPLPPYLNRDLTPDDHTRYQTIYANQQGAVAAPTAGLHFTERVMEKLREQQIATAYLTLHVGAGTFKPVKAEVMEEHEMHAEQLYITKPLLQRLLLQEEKPIIPVGTTSMRSLESLYWLGAKVLEQPELPLKDLSVSQWQAYETVAPPTATDALSALLAYMERQHANYLHASTQIIIAPGYTFRICKGLVTNFHQPESTLLLLVSALIGEDWRKVYQHALENDYRFLSYGDSSLLLP

SEQ ID NO: 70499 - protein, 404 aa, Pontibacter virosus
  misc_feature (1)..(404): tr|A0A2U1AZ34|A0A2U1AZ34_9BACT S-adenosylmethionine:tRN A ribosyltransferase-isomerase OS=Pontibacter virosus O X=1765052 GN=queA PE=3 SV=1
MHTNPKHLAIKDFVYELPDERIAKFPLPERDQSKLLYYKSHHIADHTFTDLPDLLPAGSLLVFNNTKVVQARLIFRKPTGGAVEIFCLEPVKPHREVQLAMQQTRSCTWKCLVGNNKRWKEGSLKIFFEGGVVTAEREAQQDGHFLIRFTWTPAELTFAEVLERCGRLPLPPYLNRELTPEDRTRYQTIYARNEGAVAAPTAGLHFTDKVMKQLQAKGIESNYLTLHVGAGTFKPVKADTMETHEMHAEQLMVSKQVVKQLLQHYGRPLIPVGTTSMRSLESLFWLGTLLLQQPDLRPEELHVTQWLPYETSTPPAAAEALQTLLDYMERHQTEHLHTSTQIIIAPGYTFRVCSGLVTNFHQPESTLLLLVAALIGEDWKQVYRHALSNGYRFLSYGDSSLLLP

SEQ ID NO: 70500 - protein, 348 aa, Pontibacter virosus
  misc_feature (1)..(348): tr|A0A2U1B6B6|A0A2U1B6B6_9BACT S-adenosylmethionine:tRN A ribosyltransferase-isomerase OS=Pontibacter virosus O X=1765052 GN=queA PE=3 SV=1
MKLSEFKFELPESLLATHPSANRDESRMMVLHRDSGKIEHRVFKDILEYFDEGDVMVVNDTKVFPARLYGNKEKTGAKIEVFLLRELNKDIHLWDVLVDPARKIRVGNKLYFGDSDLVAEVIDNTTSRGRTIKFLFDGPDEEFYKTINELGETPLPKYIKREAEPEDKERYQTVYAKNVGAVAAPTAGLHFTKEVLKRLEIKGVDVTPLTLHVGLGTFRPVDVEDLTKHKMDSENFMVPSETSEMVNKALDNKKRVCAIGTTTMRALESSVSASNRLKPNEGWTDRFIFPPYDFKIANALVTNFHMPESTLLMMTAAFGGYELVMKAYEEAVKEKYRFFSYGDVMLIL

SEQ ID NO: 70501 - protein, 352 aa, Ponticaulis sp.
  misc_feature (1)..(352): tr|A0A2E0U4V9|A0A2E0U4V9_9RHOB S-adenosylmethionine:tRN A ribosyltransferase-isomerase OS=Ponticaulis sp. OX=20 20902 GN=queA PE=3 SV=1
  misc_feature (204)..(204): Xaa can be any naturally occurring amino acid
  misc_feature (252)..(253): Xaa can be any naturally occurring amino acid
  misc_feature (273)..(273): Xaa can be any naturally occurring amino acid
MDLSEFDFHLPDERIALRPAEPRDASRLLVKIGNQPIKDAVFRDIGDFLKPGDLLIANNTRVFPALLFGQRLARDLNGQDIDVQVNLLEKDECGTWVCLARPGKRLKEGDRIRFSESLSAVLVEKRMLGEIRLDFDMPEPDFWAAIHEIGRMPIPPYIAKKRASDAQDHADYQTVYADQAGSVAAPTAGLHFTAPLIESLKKQXINMKFVTLHVGAGTFAPLTDEALSRGSLHSEWCEVSPETVAAVRAAKXXGNRVIAVGTTALRTLEARSXQTGQLEAGAGETDIFIQPGYEFKTVDGLVTNFHLPKSSLFMLVSALMGTDIMQSCYAHAIKSGYGFYSYGDASLLIPND

SEQ ID NO: 70502 - protein, 353 aa, Ponticaulis sp.
  misc_feature (1)..(353): tr|A0A2D7J2C7|A0A2D7J2C7_9RHOB S-adenosylmethionine:tRN A ribosyltransferase-isomerase OS=Ponticaulis sp. OX=20 20902 GN=queA PE=3 SV=1
MNLDPYDFDLPDTCIATRPTEPRDACKLLVQQGGDAPSDYVFRDIVDLLQPGDLLIANDTRVIPALLFGERPARDEQGQTVHVQLNLLEDKGEGEWLCLCKPGRRVKPGDTVEFGAGLSASLVEKYENGEMRFKFRPLGEAFWAALNELGRMPIPPYIQKLRASDRKDDEDYQTVFADKAGSVAAPTAGLHFTDGLMAKLKEKNIGLEYVTLHVGAGTFAGLSDDAFETGKLHSEWCEISESVKRKIDEARSLGGRVIAVGTTSLRTLESRADKQRSVISGAGDTDIFIQPGYQFQVVDGLITNFHLPRSSLFMLVSALMGTDVMQVAYNHAINSGYKFYSYGDACLLLPAHD

SEQ ID NO: 70503 - protein, 348 aa, Ponticoccus gilvus
  misc_feature (1)..(348): tr|A0A4R6LQT7|A0A4R6LQT7_9ACTN S-adenosylmethionine:tRN A ribosyltransferase-isomerase OS=Ponticoccus gilvus OX =519423 GN=C8D81_2699 PE=3 SV=1
MSRLALRPSTTFGGRTPGFADRPIEADARSRDAVRLLVAAGPFIRHRRFGDLVDELRPGDVLVVNTSATVNGEVDASWRGMPIVLHATEGPFGDWVVELRSAPDAGRSILDAAPGDHVAITEGPGLRLLAPHPHRSSPTGEGNRLWRAEAEGGLRTLLDAVGRPIAYGYLAGRWPLAAYQTVFGQVPGSAEMASAGRPFTDALVQALLRRGVLIAPVLLHTGFSSQEAGEGPQPERFEVGPATARTLNLARRSGGRVVAVGTTATRAVESAVVGGRVVASRGWTDRVVTPAEPPQIVNGLITGWHDAGASHLLLVEAIAGAEKTQRAYDAALAEGYAWHEFGNSCLIL

SEQ ID NO: 70504 - protein, 352 aa, Ponticoccus marisrubri
  misc_feature (1)..(352): tr|A0A0W7WLH1|A0A0W7WLH1_9RHOB S-adenosylmethionine:tRN A ribosyltransferase-isomerase OS=Ponticoccus marisrubr i OX=1685382 GN=queA PE=3 SV=1
MQLSDFDFDLPEDLIATRPARPRTAARLLVAGPDSIEDARVFDLPRMLRKGDRLVLNDTRVIPARLSGVRRRNSAEGETEARIEVTLLEPGADGCWSALIKPLKKVRDGEEIIFSNDLRGTLEARDEGQGRIRFNCSGDDFDAALNAAGAMPLPPYIAAKRPADARDREDYQTVWARRQGAVAAPTASLHFDADLLKTLEDQGVALTYVTLHVGAGTFLPVKVDDVTTHRMHGEWGQVTPEAAQAIRATKAEGGRVIPVGTTALRLIETAAQGGEIQPFEGVTEIFIYPGFTFRVTDALMTNFHLPKSTLMMLVSALMGPERIRQIYAHAIAERYRFFSYGDASLLLPQGMG

SEQ ID NO: 70505 - protein, 360 aa, Pontivivens insulae
  misc_feature (1)..(360): tr|A0A2R8AAG9|A0A2R8AAG9_9RHOB S-adenosylmethionine:tRN A ribosyltransferase-isomerase OS=Pontivivens insulae O X=1639689 GN=queA PE=3 SV=1
MALGDISGCMKLSDFDFELPEELIALRPVKPRPASRMLLAQGAQLSDHHVYDLPSLLRAGDLLVFNDTQVIPARLFGTRSRATQHGSGIAKVEATLLSQEGPESWAALARPGRKLALGDVLDFDGVSAELVEKRDDGQVLLRFDQSGEALDRAILQAGEMPLPPYIAGKRAADAADREDYQTVFAQKPGAVAAPTASLHFDADLLGRIQDAGINSTRVTLHVGAGTFLPVKVDDIEKHKMHSEWGEVSEEAAEAMQRTRANGGRVIPVGTTALRLIETAAADGAIGPWVGDTDIFIRPGHRFQIADGLMTNFHLPKSTLMMLVSALLGVDEIRAVYAHAIAQRYRFFSYGDSSLLLPDRG

SEQ ID NO: 70506 - protein, 345 aa, Porphyrobacter dokdonensis
  misc_feature (1)..(345): tr|A0A1A7BK44|A0A1A7BK44_9SPHN S-adenosylmethionine:tRN A ribosyltransferase-isomerase OS=Porphyrobacter dokdon ensis DSW-74 OX=1300349 GN=queA PE=3 SV=1
MKVDLFDFELPQDRIALRPVRPRDAARMLVVRGSEAPFEDRGVRDLPKVLDPGDVLVFNDTRVIPAQLEGRRADGEARIGATLHKRIDLRRWQAFLRNAKRVKIGDSLVFGGGVTARAEERHADGSLTLFFEGEEPVEVLLDRAGTMPLPPYIASKRGVDRQDLEDYQTMFAREEGAVAAPTASLHFTQRLVDAIDAAGIGRAMLTLHVGAGTFLPVKADDTDDHQMHAEFGRISQATADQLNEARAKGGKIIAVGTTVLRLLESAVDEDGLIQPFAGDTSIFITPGYRLKAVDGLMTNFHLPKSTLMMLVSALMGRERMLAAYQHAITNEYRFYSYGDSSLLLP

SEQ ID NO: 70507 - protein, 342 aa, Porphyrobacter mercurialis
  misc_feature (1)..(342): tr|A0A0B2BWD0|A0A0B2BWD0_9SPHN S-adenosylmethionine:tRN A ribosyltransferase-isomerase OS=Porphyrobacter mercur ialis OX=1572751 GN=queA PE=3 SV=1
MRVDLFDFALPPELIALRPARPRDAARMLVVPGQAGFQDRVVRDLPSALRAGDVLVFNDTRVIPAQLEGTRGEARIGATLHKRIDLRRWQAFIRNGKRLREGDTIAFPADVAAAAEQRHPDGSWTLAFAGEEPVEVLLERAGRMPLPPYIAGKRPTDEADRSDYQTMFAVEDGAVAAPTAALHFTPDLLAALEHAGIGRETLTLHVGAGTFLPVKADDTADHAMHAEWGRIEPDTADRLNAVRANGGRVIAVGTTVLRLLESATGEDRIIRPFAGDTAIFITPGYTFRAIDGLMTNFHLPRSTLFMLVSALMGLDRMQQTYAHAIAEGYRFYSYGDSSLLLP

SEQ ID NO: 70508 - protein, 345 aa, Porphyrobacter neustonensis
  misc_feature (1)..(345): tr|A0A192D4S5|A0A192D4S5_9SPHN S-adenosylmethionine:tRN A ribosyltransferase-isomerase OS=Porphyrobacter neusto nensis OX=1112 GN=queA PE=3 SV=1
MKVDLFDFDLPPERIALRPARPRDAARMLVVQGQDAPFEDRGVRDLPQLLEAGDVLVFNDTRVIPAQLEGRRAGGEAKVGATLHKRIDLRRWQAFLKNAKRVKLGDQLIFGGGVTAIAEDRHDDGSLTLMFEGDEPVEVLLHRAGTMPLPPYIASKRGVDRQDLEDYQTMFAAEEGAVAAPTASLHFTQELVDALDDAGIGRATLTLHVGAGTFLPVKADDTDDHRMHAEFGRISPATAAQLNAAREAGGRVIAVGTTSLRLLESAADADGIIHPFEGDTAIFITPGVRLRAVDGLMTNFHLPKSTLMMLVSALMGRERMMAAYAHAIASNYRFYSYGDSSLLLP

SEQ ID NO: 70509 - protein, 345 aa, Porphyrobacter sanguineus
  misc_feature (1)..(345): tr|A0A1M7RSE6|A0A1M7RSE6_9SPHN S-adenosylmethionine:tRN A ribosyltransferase-isomerase OS=Porphyrobacter sangui neus OX=198312 GN=queA PE=3 SV=1
MKVDLFDFDLPQSRIALRPVRPRDAARMLVVQGSDAPFEDRGVRDLPALLNPGDVLVFNDTRVIPAQLEGRRADGEAKIGATLHKRIDLRRWQAFIRNAKRVRQGDQIIFGGGVTALAEERLGDGSITLLFEGEEPVEVLLDRAGTMPLPPYIASKRGVDAQDLEDYQTMFAAEKGAVAAPTASLHFTPRLVDALDAAGIGRAMLTLHVGAGTFLPVKADDTDDHQMHAEFGRISQTTADQLNEARAKGGRIIAVGTTSLRLLESAVDENGIIQPFAGDTAIFITPGYRLRAVDGLMTNFHLPKSTLMMLVSALMGRDRMMAAYAHAIANEYRFYSYGDSSLLLP

SEQ ID NO: 70510 - protein, 345 aa, Porphyrobacter sp.
  misc_feature (1)..(345): tr|A0A0N0JRS3|A0A0N0JRS3_9SPHN S-adenosylmethionine:tRN A ribosyltransferase-isomerase OS=Porphyrobacter sp. AA P60 OX=1523423 GN=queA PE=3 SV=1
MKVDLFDFDLPQDRIALRPVRPRDAARMLVVRGQDAPFEDQHVHELPDLLNPGDVLVFNDTRVIPAQLEGRRADGEAKIGATLHKRIDLRRWQAFVRNAKRVKEGDQLVFGGGVTAIAEGRLPDGSITLFFEGEEPVEVLLTRAGTMPLPPYIASKRGVDAQDLEDYQTMFAAEEGAVAAPTASLHFTQRLVDALDARGIDRAMLTLHVGAGTFLPVKAEDTDDHQMHAEFGRISQCTAERLNQARAKGGRIIAVGTTSLRLLESAVNENGVIQPFAGDTAIFITPGYKLRAVDGLMTNFHLPKSTLMMLVSALMGRDRMMAAYAHAIANEYRFYSYGDSSLLLP

SEQ ID NO: 70511 - protein, 345 aa, Porphyrobacter sp.
  misc_feature (1)..(345): tr|A0A2N4WWE5|A0A2N4WWE5_9SPHN S-adenosylmethionine:tRN A ribosyltransferase-isomerase OS=Porphyrobacter sp. TH 134 OX=2067450 GN=queA PE=3 SV=1
MKVDLFDFELPPERIALRPVRPRDAARMLVVRGADAPFADMGVRDLPGLLSPGDVLVFNDTRVIPAQLEGRRADGEAKLGATLHKRLDLRRWQAFIRNAKRLKIGDQIIFGGGVTALAEERFDDGSITLFFEGDEPVEVLLDRAGTMPLPPYIASKRGVDAQDLEDYQTMFAAEKGAVAAPTASLHFTQRLVDAIDAAGIGRAMLTLHVGAGTFLPVKADDTDNHQMHAEFGRISAETAAQLNEARARGGRIIAVGTTSLRLLESAVDADGVIHPFAGDTAIFITPGYKLRAVDGLMTNFHLPKSTLMMLVSALMGRERMMAAYAHAIANEYRFYSYGDSSLLLP

SEQ ID NO: 70512 - protein, 411 aa, Porphyromonadaceae bacterium
  misc_feature (1)..(411): tr|A0A348V793|A0A348V793_9PORP S-adenosylmethionine:tRN A ribosyltransferase-isomerase OS=Porphyromonadaceae ba cterium OX=2049046 GN=DCS09_06055 PE=3 SV=1
MKKDDIGELQISRFNYHLPDEKIAKYPLSQRDSSKLLQYRDGALSSCRFNELPALLPEESLLLFNNTRVIHARLLFHKVTGAQIEIFCLSPHKPADYAMSFQQRQQCSWNCMIGNAKRWKEEPLFMEVPCDGGMVILKAEKTAADGEEWVVRFSWNRNELTFSELLELAGKLPIPPYLNRPADARDDETYQTVYSRIEGSVAAPTAGLHFTPQVMEELHEKGIADAEVTLHVGAGTFRPVKSNTIAGHAMHTEVIAVERDTIEKLLDHRGKLIVVGTTSLRTVESLYYIGRKLHLHPETSAQELNVKQWEPYDEVGDAVSARQALQLILNYLDRQGLDRLIANTQIIIVPGYRFHYADAIITNFHQPQSTLLLLIAAFVGDDWERIYDYAMHHDYRFLSYGDSSILWKKPK

SEQ ID NO: 70513 - protein, 411 aa, Porphyromonadaceae bacterium; identical to SEQ ID NO: 70216
  misc_feature (1)..(411): tr|A0A1I7EWR4|A0A1I7EWR4_9PORP S-adenosylmethionine:tRN A ribosyltransferase-isomerase OS=Porphyromonadaceae ba cterium KHP3R9 OX=1855398 GN=SAMN05216364_100295 PE=3 S V=1

SEQ ID NO: 70514 - protein, 357 aa, Porphyromonas asaccharolytica
  misc_feature (1)..(357): tr|F4KP43|F4KP43_PORAD S-adenosylmethionine:tRNA ribosy ltransferase-isomerase OS=Porphyromonas asaccharolytica (strain ATCC 25260 / DSM 20707 / BCRC 10618 / JCM 6326 / LMG 13178 / VPI 4198) OX=879243 GN=Poras_1641
MRHKAKLSHFDYKLPEELIAQYPTTFRDQSRMMVLHRTDGSIEHKNFVDIIDYFGEKDTFVFNDTKVFPARLYGLKEKNQAKIEVFLLRELNESLRLWDVLVDPARKIRIGNKLEFGEEGGAPVLVAEVIDNTISRGRILRFLYDGSHEDFLKDLYSLGEAPLPEEIKRPAEPSDLERYQSVFAKHIGAVCAPAASLHFSDIILHKLRLQGCNLAFLTLHHNLSSYQEIEVEAISKYKVENEEMYISAECCDIVNQARDDKAQIVAVGATVMRALETGVSTDGYLKEFSGWTNEFIYPPYHIHLPTAMLTNFNAPKSINLMCAATMGGEKNVMNAMNVAVKEKYRFGCYGDALLIMD

SEQ ID NO: 70515 - protein, 425 aa, Porphyromonas asaccharolytica
  misc_feature (1)..(425): tr|F4KNZ6|F4KNZ6_PORAD S-adenosylmethionine:tRNA ribosy ltransferase-isomerase OS=Porphyromonas asaccharolytica (strain ATCC 25260 / DSM 20707 / BCRC 10618 / JCM 6326 / LMG 13178 / VPI 4198) OX=879243 GN=Poras_1594
MCDKPHTQHWVDIDINDYDYPLPDERIAEHPLAERDQCRLLMSDATGRLEDHTFAELPQLLPPHALLIRNNTRVIKARIFFVKATGARIEILCLDPYRPVSYEESLSSLGSCSWHCLVGNSKKWRPEQTISCTLPLAGGQTITLQASRAVETPDVVTFSWSDETKSFGEILELCGQLPIPPYLNRETESSDLTDYQTVYARIEGSVAAPTAGLHFTPELDDRLLAEGHRITELTLHVGAGTFLPVKGRQVAEHQMHSEYCSVPTATLETLLEHIDSPFVPIGTTSVRTLESLYWYAVALQQAAQEGGDVAEPFHLDQWYSYRMRQSCGAALPSRREALEILLCYARHRGLGRLTFSTALLIAPGYQYHMVDILVTNFHQPKSTLLLLVSALIGPRWRTLYEHALADVQYRFLSYGDACLLYRQDL

SEQ ID NO: 70516 - protein, 406 aa, Porphyromonas cangingivalis
  misc_feature (1)..(406): tr|A0A0A2ETD5|A0A0A2ETD5_PORCN S-adenosylmethionine:tRN A ribosyltransferase-isomerase OS=Porphyromonas canging ivalis OX=36874 GN=queA PE=3 SV=1
MHDYKNTKIESFSYHLPDERIAKYPLSRRDESKLLRYSGGEITDHTFRDISDIVEEDTLLVSNDTKVIRARLEFFKPTGGRIEIFLLDPVAPSVYETVFEERSRCTWHCLVGNAKKWKEDSITSTVTLPDGREIVLTATKASPATPDGQEIALSWDGGADFGAILEAYGELPIPPYLNRETEESDLTTYQTLFARVQGSVAAPTAGLHFTPEVMQALSEKGIRSTQVTLHVGAGTFRPVKSETMEGHTMHTEAIVVSLETLKALKTHLGHITAVGTTSTRTLESLYYIGVHLIEGKDSPFEVEQWEPYERDYKYSTEESLSAIIRHLEASGEDHFVGATRIIIVPGFTFRLVGTLITNFHQPHSTLLLLISAFVGNDWKSIYDHALANDYRFLSYGDSSILFRPQA

SEQ ID NO: 70517 - protein, 349 aa, Porphyromonas cangingivalis
  misc_feature (1)..(349): tr|A0A099WTH1|A0A099WTH1_PORCN S-adenosylmethionine:tRN A ribosyltransferase-isomerase OS=Porphyromonas canging ivalis OX=36874 GN=queA PE=3 SV=1
MKLSQFNFKLPEELIAQHPAKYRDESRLLVLHSKTGEIEHKVFKEITEYFGKDDVFVFNNTKVFPARLYGNKEKTNAKIEVFLLRELKAEQLLWDVLVDPARKIRIGNKLFFGEDESLVAEVIDNTTSRGRTLRFLYDGTHEEFKQALFALGHTPLPKYIQRDPEPEDEERYQTIFAEVEGAVVAPAAGLHFSRELMKRLEIQDCRFGYLTLHTGLTAYRDIDVDDLTKYKMGSELMNVDKRCCDSVNEALARGGRMCAVGTSVLKALETCISTDGFIKQYEGWTSRFIFPPYEFRAKAAMVTNFHMPYSSLLMMTAALGGYEHVMNAYEIAVKEGYRFGAYGDAMLIL

SEQ ID NO: 70518 - protein, 353 aa, Porphyromonas catoniae
  misc_feature (1)..(353): tr|L1NBY0|L1NBY0_9PORP S-adenosylmethionine:tRNA ribosy ltransferase-isomerase OS=Porphyromonas catoniae F0037 OX=1127696 GN=queA PE=3 SV=1
MKDTKLSHFELDVPENLIAKKPATFRDESRMLVLHKKTGEIEHRQFKDILEYFQKDDVFVFNDTKVFPARMYGNKEKTGAQIEVFLLRELNPALKLWDVVVDPARKIRIGNKLYFGKNDELVAEVIDNTTSRGRTLRFLYDGNSEEFRRILYAMGETPLPKYINRSPNNDDAHRYQSLFAENEGAVVGPAASFHFSRELLLRMEIKDIHKAFITVHNGLGNYRDIDVEDLTKYKMESEQIIVPETACTIVNKASDAGRNICAIGTSVLRAMETAAGTERHIKVFDGWTSRFIFPPYDFNVPNALVTNFHLSKSILLMMAAAFGGYEETMNAYAVAIKEKYRFGAYGDAMLIID

SEQ ID NO: 70519 - protein, 421 aa, Porphyromonas catoniae
  misc_feature (1)..(421): tr|Z4WPK5|Z4WPK5_9PORP S-adenosylmethionine:tRNA ribosy ltransferase-isomerase OS=Porphyromonas catoniae ATCC 5 1270 OX=887901 GN=queA_1 PE=3 SV=1
MPSTKPQDIAIADYDYDLPDERIARYPLSERSSSKLLVYRSGEISTHTFRELPDLLPEGSLIVRNNSKVIRARLIFHKDSGARIEIFCLDPALPESYELSLSSTQGCSWHCMLGNAKRFRLGTSLSAPLSGGKGEVTLQACRIGEGEVSFTWDNESYTFGELLELMGILPIPPYLDRETEERDLVTYQTVYAEREGSVAAPTAGLHFTPEVFEALRHRGIETLDVTLHVGAGTFRPVKADHIGEHEMHAELISVSREAVEKLRKRLGSIIAIGTTSVRTLESLYHLGASLLKHPDTSPETLHVTQWQPYGDVEGELPPAQSGEALKACVSSPSTEEAFAALIDYMQRWELTQLVFPTSIIIAPGYRYRVIRGMVTNFHQPHSTLLLLIAALVGSDWRRIYDHALTHDFRFLSYGDSSLLLP

SEQ ID NO: 70520 - protein, 416 aa, Porphyromonas circumdentaria
  misc_feature (1)..(416): tr|A0A1T4LBA3|A0A1T4LBA3_9PORP S-adenosylmethionine:tRN A ribosyltransferase-isomerase OS=Porphyromonas circumd entaria OX=29524 GN=SAMN02745171_00342 PE=3 SV=1
MDERLKQFTNTMKRETETISMKEYDYMLPDKAIACYPLEDRSSCKLLYYNHGDISTYFFSSIASLLPSNSLLVRNNTRVIRARIYLQKRTGAQIELLCLEPVIPSQYEQSLTATQSCVWRCMVGNARKWKEGVLEREVSIEGRESFIFSAERIEKDLIRFSWQNASFTFGQILDQVGILPIPPYLNRDTEERDNRDYQTVYAVNKGSVAAPTAGLHFTDKEFEEIAQRGIPVLDVTLHVGAGTFLPVKSDDIKEHLMHQELCIVTRDTIEQLLGRIETVIAIGTTSVRTLESLYYIARNHLEELGASLEGVLPSVSQWEPYETTEEVDTKELLQKLLLTMEEKGLSSLVFSTSLLIIPGYRFRIIKGLITNFHQPKSTLLLMIAALLGHKWKDMYEYALANGYRFLSYGDASLLLP

SEQ ID NO: 70521 - protein, 349 aa, Porphyromonas circumdentaria
  misc_feature (1)..(349): tr|A0A1T4NF42|A0A1T4NF42_9PORP S-adenosylmethionine:tRN A ribosyltransferase-isomerase OS=Porphyromonas circumd entaria OX=29524 GN=queA PE=3 SV=1
MKLSEFDFNLPEHLIASHPTQHRDESRLMVLNRKDGSIEHRIFKDILNYFGKGDTFVFNNTKVIPARLYGKKEKTMARIEVFLLRELNKDIKLWDVLVDPARKIRIGNKLYFGPDDALVAEVIDNTINGGRTLRFLYDGTHEEFKSYLYALGAAPLPKYMNREAEPEDLERFQTIYASEEGAVIAPAAGLHFSRELLKRLQIADCNFAYLTLHNGLGNFENQDIEDLSKHRKNNEQMIITKECCDITNKGKEEGGQIVAVGTSVLRALETAVSTDGRIKEFDGWTNKYIYPPYNIAFATSLITNFHMPLSLLLMMAASMGGYEHVMNAYEVAIKEEYRFGAYGDAMLII

SEQ ID NO: 70522 - protein, 349 aa, Porphyromonas crevioricanis
  misc_feature (1)..(349): tr|A0A2X4Q069|A0A2X4Q069_9PORP S-adenosylmethionine:tRN A ribosyltransferase-isomerase OS=Porphyromonas crevior icanis OX=393921 GN=queA_2 PE=3 SV=1
MKLSMFKFKLPEELIAKYPARFRDESRMMVLHRATGEIEHKQFSDIIDYFDKDDAFVFNNTKVFPARIYGNKEKTGAKIEVFLLRELNEQQKLWDVVVDPARKIRIGNKLYFGEDDSLIAEVIDNTTSRGRTLRFLYDGPHDEFKKVLFDFGETPIPKYLDREAEPEDEERFQSVFAQEEGAVIAPAASLHFSRQLLKRLEIKDCRFAYLTVHNSLGNYREIDVEDLSKHKMESEQMFVGAEACQVINKAKDGGHKVCAVGTSILRAMETAVSTDGHIKEFEGWTNLFIFPPYNFSLPNAMISNFNMPYSILLMMTAAFGGYEHVMNAYDVAIKEKYRFGVYGDALLII

SEQ ID NO: 70523 - protein, 414 aa, Porphyromonas crevioricanis
  misc_feature (1)..(414): tr|A0A2X4PZ46|A0A2X4PZ46_9PORP S-adenosylmethionine:tRN A ribosyltransferase-isomerase OS=Porphyromonas crevior icanis OX=393921 GN=queA_1 PE=3 SV=1
MISFAVMKTTEICISDYTYELPDERIAKYPLPERSHSKLLFYNRGGISDHLFVDLPDLLPSDAILVRNNTKVIRARLLFRKNGDGARIEVFCLEPHLPAGYDTNLTTTETCSWICMIGNAKKWRGAPLECQIQHRDGSQVTLRAERTGEREGEGEIVRFSWDNPQLCFGDLLELCGVLPIPPYLHRETEEQDLQTYQTVYAQAKGSVAAPTAGLHFTPKVFTDLARKQIPVLDLTLHVGAGTFRPVKTATIGEHHMHRELVVASQSLIKELATTARKPIAVGTTSVRSLESLYYLAVLIAENPSIPVSELQVEQWSPYIRSTSLPNRTEAFATLLRYMERNELEQLIFPTGILIAPGYTYRVVEGILTNFHQPQSTLILLVAAFVGEQWRDIYRHALDRDYRFLSYGDSSLLLR

SEQ ID NO: 70524 - protein, 445 aa, Porphyromonas endodontalis
  misc_feature (1)..(445): tr|C3J8B2|C3J8B2_POREA S-adenosylmethionine:tRNA ribosy ltransferase-isomerase OS=Porphyromonas endodontalis (s train ATCC 35406 / BCRC 14492 / JCM 8526 / NCTC 13058 / HG 370) OX=553175 GN=queA PE=3 SV=1
MGVSILSLRDGKSIRSVVGYLYFCPRFVGDNRKSPSNYKAMNETRQVEIESYDYPLPDERIARYPLEDRAACRLLVYRSGEIISSQFRQITDFIPEHSLLIRNNTRVIRARIHVQKPSGAQIEIMCLEPASPAQYERALSATSGCSWHCLVGNARRWKEGALETLVTLPGETDPILFRIERGEGDVIHFSWNSDHCTFGELLSVVGILPIPPYLRRETEESDNINYQTVYAQCDGSVAAPTAGLHFTPELFEALKEKGVSLGEITLHVGAGTFMPVKTSKIGDHRMHQEVCRVERGIVAQLAGGSYSPIIAVGTTSVRTLESLYLLALNHIDELGQEDHLPFVTQWEPYETDYPEASMPQVMAALLSKMDSLSLEEVVFSTALLIAPGYTFRVVGGMVTNFHQPKSTLLLMISAFLGEEWERIYDYALSHDYRFLSYGDGSLLLP

SEQ ID NO: 70525 - protein, 349 aa, Porphyromonas endodontalis
  misc_feature (1)..(349): tr|C3JA74|C3JA74_POREA S-adenosylmethionine:tRNA ribosy ltransferase-isomerase OS=Porphyromonas endodontalis (s train ATCC 35406 / BCRC 14492 / JCM 8526 / NCTC 13058 / HG 370) OX=553175 GN=queA PE=3 SV=1
MKLSEFGFDLPQELIASHPVEHRDESRLMILHRKDGSIEHGIFKDILKYFGKGDTFVFNNTKVIPARLYGKKEKTNAKIEVFLLRELNPQIKLWDVLVDPARKIRIGNKLYFGPDDGLMAEVIDNTINGGRTLRFLYDGSHEEFKSYLYALGEAPLPKYMERDATEEDLERFQTIYASEEGAVIAPAAGLHFSRELLKRLEIADCRLAYLTLHNGLGNFENQDIEDLSKHKKNNEQMFIGPECCEITRKARDEGKHIVAVGTSVLRALETAVSTDGYVKEFDGWTNKYIYPPYPIEFVTSLITNFHMPQSLLLMNAAAVAGYQNIMNAYEVAKQEKYRFGAYGDAMLII

SEQ ID NO: 70526 - protein, 405 aa, Porphyromonas gingivalis
  misc_feature (1)..(405): tr|A0A212G9W3|A0A212G9W3_PORGN S-adenosylmethionine:tRN A ribosyltransferase-isomerase OS=Porphyromonas gingiva lis SJD12 OX=1297567 GN=queA PE=3 SV=1
MITTTDISIADYDYPLPEERIAKHALPQRDACKLLVYDKGEIKDVVFSQLSEVLPSGSMLVRNNTRVIRARLLFHKSTGAIIEVFCLEPVSPAQYELSLTARGSCVWHCMVGNAKRWRSGDLQMEIPSPQGGSILLTASHDPAADGCIRFSWENDHYTFGEILEMAGILPIPPYLNRDTEEEDLETYQTVYAKNQGSVAAPTAGLHFTEEEFERLRAQGTPVVDVTLHVGAGTFRPVKSETIGEHRMHCELIVIERSSLEALRDWQGSIVAVGTTSVRTLESLYWQGRSLSTASHTSQESLKVNQWEAYENEDAALSRSEAIRIILNWMDEQGVETLIFPTEILIAPGYRYRMVDAMITNFHQPRSTLLLLVSAFIGEDWKAVYHHALESGYRFLSYGDGSLLIP

SEQ ID NO: 70527 - protein, 350 aa, Porphyromonas gingivalis
  misc_feature (1)..(350): tr|A0A1R4DYF8|A0A1R4DYF8_PORGN S-adenosylmethionine:tRN A ribosyltransferase-isomerase OS=Porphyromonas gingiva lis OX=837 GN=queA PE=3 SV=1
MKLSKFKFNLPEELIALEPTKFRDESRMMVVHRRTGEIEHRVFKDILEYFDKGDTFVFNNTRVFPARLYGNKEKTGAQIEVFLLRELNERLKLWDVLVDPARKIRIGNKLYFGNDEELVAEVIDNTTSRGRTLRFLYDGSHDEFKELLFQLGQTPLPKYIDRDVNKEDPERYQSIFAEVEGAVVAPAASLHFSRELMKRLEIKDCHFSYITVHHALGAYRDIDVEDLTKHKMDSEEMYITEESCININRAWDEEKKICAVGTSILRALETAVSTDGHLKPFEGWTNRFIFPPYEFHLPSALVTNFHMPLSTLLMMTAAFGGHELIMSTYDLAVKEKYRFGAYGDAMLIID

SEQ ID NO: 70528 - protein, 349 aa, Porphyromonas gingivicanis
  misc_feature (1)..(349): tr|A0A0A2GC53|A0A0A2GC53_9PORP S-adenosylmethionine:tRN A ribosyltransferase-isomerase OS=Porphyromonas gingivi canis OX=266762 GN=queA PE=3 SV=1
MKLSEFDFKLPEHLIASHPTQHRDESRLMVLNRKDGSIEHRVFKDIISYFGKGDTFVFNNTKVIPARLYGKKEKTMARIEVFLLRELNKDIKLWDVLVDPARKIRIGNKLYFGPDDALVAEVIDNTINGGRTLRFLYDGTHEEFKSYLYALGAAPLPKYMNREAEEEDLERFQTIYASEEGAVIAPAAGLHFSRELLKRLQIADCNFAYLTLHNGLGNFENQDIEDLSKHRKNNEQMIITKECCDVANKGKEGGGQIVAVGTSVLRALETAVSTDGRIKEFDGWTNKYIYPPYNIAFATSLITNFHMPLSLLLMMAASMGGYEHVMNAYEMAIKEEYRFGAYGDAMLII

SEQ ID NO: 70529 - protein, 407 aa, Porphyromonas gingivicanis
  misc_feature (1)..(407): tr|A0A0A2G671|A0A0A2G671_9PORP S-adenosylmethionine:tRN A ribosyltransferase-isomerase OS=Porphyromonas gingivi canis OX=266762 GN=HQ36_03020 PE=3 SV=1
MKREIESISMKEYDYLLPDEAIARYPLEDRSSCQLLHYNRGNLSTHLFSEIASLLPTNSLLIRNNTRVIRARIYLHKSTGAQIELLCLEPVSPSQYECSLTATESCVWRCMVGNARKWKEGALEREVCFKGENSFTFRAERIEKDLIRFSWDNPSFSFGHILEQVGILPIPPYLNRATEERDNRDYQTVYAVNKGSVAAPTAGLHFTDREFEQIAQRGIPVADVTLHVGAGTFLPVKSDSIAEHSMHQELCIVERATIEQLLDHTDQIIAIGTTSVRTLESLYYVALNHLDELTTSAEGASLPVVDQWEPYTTPDSEETTRDLLQRLLFRMQELELSSVVFATTLLIIPGYRFHIVKGLVTNFHQPKSTLLLMIAALLGENWKAMYDYALAHNYRFLSYGDASLLLP

SEQ ID NO: 70530 - protein, 350 aa, Porphyromonas gulae
  misc_feature (1)..(350): tr|A0A0A2F2P3|A0A0A2F2P3_9PORP S-adenosylmethionine:tRN A ribosyltransferase-isomerase OS=Porphyromonas gulae O X=111105 GN=queA PE=3 SV=1
MKLSKFKFNLPEELIALEPTKFRDESRMMVVHRRTGEIEHRVFKDILEYFDKGDTFVFNNTRVFPARLYGNKEKTGAQIEVFLLRELNERLKLWDVLVDPARKIRIGNKLYFGNDEELVAEVIDNTTSRGRTLRFLYDGSHEEFKELLFQLGQTPLPKYIDREVNEEDPERYQSIFAEVEGAVVAPAASLHFSRELMKRLEIKDCRFSYITVHHALGAYRDIDVEDLTKHKMDSEEMYITEEPCININRSWDEEKKICAVGTSVLRALETAVSTDGHLKPFEGWTNRFIFPPYEFHLPSALVTNFHMPLSTLLMMTAAFGGHELIMSAYDLAVKEKYRFGAYGDAMLIID

SEQ ID NO: 70531 - protein, 405 aa, Porphyromonas gulae
  misc_feature (1)..(405): tr|A0A0A2F9T7|A0A0A2F9T7_9PORP S-adenosylmethionine:tRN A ribosyltransferase-isomerase OS=Porphyromonas gulae O X=111105 GN=queA PE=3 SV=1
MITTTDISIADYDYPLPEERIAKHALPQRDACKLLVYDKGEIKDAVFSQLSEVLPSGSMLVRNNTRVIRARLLFRKSTGATIEVFCLEPVSPAQYELSLTARGSCVWHCMVGNAKRWRSGDLQMKIPSPHGDSILLTASHDTAADGYIRFSWENDHYTFGEILEMAGILPIPPYLNRDTEEEDLETYQTVYAKNQGSVAAPTAGLHFTEEEFERLRAQGTPVVDVTLHVGAGTFRPVKSETIGGHRMHRELIVIERSSLEALRDWQGSIVAVGTTSVRTLESLYWLGRSLSIGPHTPQESLKVNQWEAYENEDATLSRSETIRIILDWMDEQGVETLIFPTEILIAPGYRYRMVDAMITNFHQPRSTLLLLVSAFIGEDWKAVYHHALESGYRFLSYGDGSLLIP

SEQ ID NO: 70532 - protein, 403 aa, Porphyromonas levii
  misc_feature (1)..(403): tr|A0A4Y8WMR6|A0A4Y8WMR6_9PORP S-adenosylmethionine:tRN A ribosyltransferase-isomerase OS=Porphyromonas levii O X=28114 GN=queA PE=3 SV=1
MIDKNIDPRNIKIEDYTYNLPDDMIAKYPLQKRDDAKLLYYNGEETSTHIFSDMPKLLPENAVLVMNTTKVIRARLEFFRATGARIEVFCLEPYAPALYELSLATKGKVVWHCLVGQAKKWKEQYLERTLPEGGTLRVSRVVDGHLICFEWDSDITFGTLLEQLGELPIPPYLNRKTEESDLSDYQTVYAKQEGSVAAPTAGLHFTDELLNNLRDKGIETIPLTLHVGAGTFLPVKSDTMGGHEMHTEVIEVPLSSIESLRDSVMEGKPIVSVGTTSTRTLESLYYMGAQLLLGVEHAFSVTQWLPYQLQEEPTLLQSLEAIIARLKEGKAEKLFGQTQLMIAPGYRYKVVDYLVTNFHQPHSTLLLLVAAFIGEEWRKVYDYALENNYRFLSYGDGSLLKKK

SEQ ID NO: 70533 - protein, 351 aa, Porphyromonas levii
  misc_feature (1)..(351): tr|A0A4Y8WRW8|A0A4Y8WRW8_9PORP S-adenosylmethionine:tRN A ribosyltransferase-isomerase OS=Porphyromonas levii O X=28114 GN=queA PE=3 SV=1
MAEYKLSNFNFKLPKDQIAMYPVRHRDESRLLVLHKDTGVIEHKQFKQIIEYFGKDDLFVMNNTRVFPAKMVGNKEKTNAMIDVFLLRELNEPMLWDVLVDPARKIRIGNKLFFGENDELVAEVVDNTTSRGRILKFAYDGSYEDFKKTLFKLGETPLPDYIKRPVEEEDEERYQTIYATEEGAVVAPAAGLHFSRELIKRLELQDVRFTNLTLHTSRVMYDEIDVDDLSKYKMGSERMIVTQETCDVINKAVENKKRIVAVGTSVAKALETAVSMDGFVKPYDGWSSKFIFPEYKYGLQNAMVTGFHLPSSWLLMLAAAFGGYDHVMKAYKVAVKEGYRFGQYGDAMLIL

SEQ ID NO: 70534 - protein, 404 aa, Porphyromonas loveana
  misc_feature (1)..(404): tr|A0A2U1FPS7|A0A2U1FPS7_9PORP S-adenosylmethionine:tRN A ribosyltransferase-isomerase OS=Porphyromonas loveana OX=1884669 GN=queA PE=3 SV=1
MRTKDIAIADYDYPLPEERIAKHALPQRDACKLLVYEGGRITDAVFSQLADLLPDKSMLVRNNTRVIRARLLFKKETGATIEVFCLEPVAPAQYELALTSRGSCVWNCMVGNAKRWKSGELLMEVPSPAGRSIILKAVHDESGTNHVRFSWEDTAFTFGDILELAGILPIPPYLNRETEEEDLDTYQTVYAVNKGSVAAPTAGLHFTEEEFERLRARGTPVIDVTLHVGAGTFRPVKSETIGEHQMHRELIVIERASLDALLHEERTIVAVGTTSVRTLESLYWLGKRLIASPETQEDALRVDQWEAYEGAEESISRAEILQALLRWMDRQEAEKLIFPTEILIAPGYRYRMVDAMITNFHQPRSTLLLLVSAFIGEDWQRVYRHALETGYRFLSYGDGSLLIP

SEQ ID NO: 70535 - protein, 350 aa, Porphyromonas loveana
  misc_feature (1)..(350): tr|A0A2U1F6K1|A0A2U1F6K1_9PORP S-adenosylmethionine:tRN A ribosyltransferase-isomerase OS=Porphyromonas loveana OX=1884669 GN=queA PE=3 SV=1
MKLSKFKFNLPDELIAREPSKFRDESRLMVVHRKTGDVEHRVFKDILDYFDKGDTFIFNNTRVFPARLYGNKEKTGAQIEVFLLRELNERLKLWDVLVDPARKIRIGNKLYFGENEELVAEVIDNTTSRGRTLRFLYDGPHDEFKELLFRLGETPLPKYMARNVNEDDPERYQSIFADVEGAVVAPAASLHFSRELMKRLEIKDTRFSFITVHHALGSYRDIDVEDLTKHKMDSEEMYIDDEACININRAWDEEKKICAVGTSVLRAIETAVSTDGHLKPFEGWTSRFIFPPYEFHLPSALVTNFHMPLSTLLMMTSAFGGHEQIMNAYNLAVKEKYRFGAYGDAMLIID

SEQ ID NO: 70536 - protein, 349 aa, Porphyromonas macacae
  misc_feature (1)..(349): tr|A0A0A2EBM7|A0A0A2EBM7_9PORP S-adenosylmethionine:tRN A ribosyltransferase-isomerase OS=Porphyromonas macacae OX=28115 GN=queA_1 PE=3 SV=1
MKLSQFKFDLPDNLVAKKPAHFRDEAKLMVLHKETGEVEHRIFKDILDYFQKDDTFVFNNTRVFPARLYGNKEKTGARIEVFLLRELNEQQRLWDVLVDPARKIRIGNKLYFGKDDSMVAEVIDNTTSRGRTLRFLFDGSHDEFKKQLFDLGETPIPKYMEREAIPEDAERYQTLFAEVEGAVVAPAAGLHFSRELLKRIEIKDVRKAFLTVHNGLGNYRDIEVEDLTKHKMDSEQMAIDAECCQIVNKAYDMGRQICAVGTSVLRAMETAASTDKHLKEYEGWTNRFIFPPYEFQIATSLISNFSHPYSTLLMMQAAFGGYENVMEAYKKAIKHKYHFGGYGDALLII

SEQ ID NO: 70537 - protein, 405 aa, Porphyromonas macacae
  misc_feature (1)..(405): tr|A0A379EAY2|A0A379EAY2_9PORP S-adenosylmethionine:tRN A ribosyltransferase-isomerase OS=Porphyromonas macacae OX=28115 GN=queA_2 PE=3 SV=1
MIKTTDIVMQDYAYDLPDERIAKYPLPERDSSKLLLYKHGKITETVFRNLPSHLPSKTLLVRNNTRVIRARLFFRKPTGARIEIFCLDPVLPGSYETALSARKECVWHCMLGNAKRWTVNSEPLVKEIPTDKGPLALSAKRICENQVAFSWDDNTFTFGELLESMGILPIPPYLNRDTEPADLKTYQTVYARHKGSVAAPTAGLHFTEAVFADLAKSDIPIVDVTLHVGAGTFKPVKSETIGGHEMHREIIIVDDKTLRCLNRSGRTVVAVGTTSVRTLESLYWLAVRILNNPDIQPEELIVTQWESYGRDENSLPSKKEAFAALLEWLENNELTQLIFPTEILIAPGYRFRVVEAIITNFHQPNSTLLLLIGAFIGNDWQRVYRYALEHSFRFLSYGDSSLLIP

SEQ ID NO: 70538 - protein, 406 aa, Porphyromonas somerae
  misc_feature (1)..(406): tr|A0A134B8A3|A0A134B8A3_9PORP S-adenosylmethionine:tRN A ribosyltransferase-isomerase OS=Porphyromonas somerae OX=322095 GN=queA PE=3 SV=1
MNIRPQEIQIADYDYPLPDERIAKYPLADRSSSKLLRYQAGQIEEFTFRDLPRLLPEGAVLVRNNSKVIRARLLFHKDSGARIEIFCLDPASPTSYELSLGERHSCSWHCLIGNAKRFKEGTQLTRLLHREGQGEVTLTAERGEEGIIHFSWDNDAYTFGELLELMGILPIPPYLGRETEEQDLTTYQTVYAETEGSVAAPTAGLHFTPAVFEELRAQGTPVLDVTLHVGAGTFRPVKADHIGDHEMHAELISVSRLTLLALREHIGQIIAVGTTSVRTLESLYHLAIALRRQPDTPPTALHVEQWLPYEEGADEELTTEEALDTLLSYLDAQGEDTLVFPTSIIIAPSYRYRVIRGMVTNFHQPHSTLLLLIAALIGDDWHRVYDWALTHDFRFLSYGDSSLLLP

SEQ ID NO: 70539 - protein, 353 aa, Porphyromonas somerae
  misc_feature (1)..(353): tr|A0A134BB71|A0A134BB71_9PORP S-adenosylmethionine:tRN A ribosyltransferase-isomerase OS=Porphyromonas somerae OX=322095 GN=queA PE=3 SV=1
MKDTKLSHFEIEIPETLIAKKPATFRDESRLMVLHRSTGEIEHRHFKDILDYFSKDDVFVFNDTKVFPARMYGNKEKTGAQIEVFLLRELNPAFKLWDVVVDPARKIRIGNKLYFGKNDELVAEVIDNTTSRGRTLRFLFDGSQEEFRELLHAMGETPLPKYMNRSPNSDDAQRYQSLFAKNEGAVVGPAASFHFSRELLLRMEIKDIRKAFITVHNGLGNYREIDVEDLTKYKMESEQMIIPEEACTIVNAASAAGQNICAVGTSVLRAMETASGTQRHLKAFDGWTSKFIFPPYDFNVPNALVTNFHMSKSILLMMTAAFGGYEETMRAYSIAIKEKYRFGAYGDAMLIID

SEQ ID NO: 70540 - protein, 349 aa, Porphyromonas sp.
  misc_feature (1)..(349): tr|A0A0A2DRW3|A0A0A2DRW3_9PORP S-adenosylmethionine:tRN A ribosyltransferase-isomerase OS=Porphyromonas sp. COT -239 OH1446 OX=1515613 GN=queA PE=3 SV=1
MKLSQFKLDIPEALIAKKPAYFRDESRMMVLNKTTGEIEHRIFKEILDYFGKDDVFVFNNTRVFPARLYGNKEKTGAQIEVFLLRELNSQFKLWDVLVDPARKIRIGNKLYFGQDDNLVAEVIDNTTSRGRTLRFLFDGTHEEFKRTLFSLGETPLPKYMERSPTAEDAERYQSLFATEEGAVVAPAASLHFSRELLKRMEIRDIRKAYLTVHNGLGNYRDIDVEDLTKHKMESEQMIVGREACQIVNEAKTHDHKICVVGTSALRAMETASSTEHRLKEYDGWTNRFIFPPYDFAIPTSLVTNLHMSKSTLLMMTAAFGGYDHVMNAYAVAIKEKYRFGAYGDAMLII

SEQ ID NO: 70541 - protein, 349 aa, Porphyromonas sp.; identical to SEQ ID NO: 69863
  misc_feature (1)..(349): tr|A0A073I3R9|A0A073I3R9_9PORP S-adenosylmethionine:tRN A ribosyltransferase-isomerase OS=Porphyromonas sp. 31_ 2 OX=658663 GN=queA PE=3 SV=1

SEQ ID NO: 70542 - protein, 425 aa, Porphyromonas uenonis
  misc_feature (1)..(425): tr|C2MAW4|C2MAW4_9PORP S-adenosylmethionine:tRNA ribosy ltransferase-isomerase OS=Porphyromonas uenonis 60-3 OX =596327 GN=queA PE=3 SV=1
MCDKPHTQHWVDIDINDYDYPLPDERIAAHPLAERDQCRLLLSDATGRLEDHTFAELPKLLPPHALLIRNNTRVIKARIFFVKATGARIEILCLDPYKPVSYEESLSSLGSCSWHCLVGNSKKWRPEQTISCTLPLAGGQTITLQANREADTPDVVTFSWSDETKSFGEILELCGQLPIPPYLNRETESSDLTDYQTVYARIEGSVAAPTAGLHFTPELDDQLLAEGHRITELTLHVGAGTFLPVKGRQVADHQMHSEYCSVPTATLETLLEHIDSPFVPIGTTSVRTLESLYWFAVALQQAEQEGRDVAEPFHLDQWYSYRMHQSCGASLPSRREALEILLRYVRHKGLDRLTFSTALLIAPGYQYQMVDILVTNFHQPKSTLLLLVSALIGPHWRTLYEHALADAHYRFLSYGDACLLYRREL

SEQ ID NO: 70543 - protein, 357 aa, Porphyromonas uenonis
  misc_feature (1)..(357): tr|C2MD77|C2MD77_9PORP S-adenosylmethionine:tRNA ribosy ltransferase-isomerase OS=Porphyromonas uenonis 60-3 OX =596327 GN=queA PE=3 SV=1
MRHKAKLSHFDYKLPEELIAQYPTTFRDQSRMMVLHRTDGSIEHKNFVDILDYFGEKDTFVFNDTKVFPARLYGLKEKNQAKIEVFLLRELNESLRLWDVLVDPARKIRIGNKLEFGEEGGAPVLVAEVIDNTISRGRILRFLYDGSHEDFLKDLYSLGEAPLPQEIKRPAEPSDLERYQSVFAKHIGAVCAPAASLHFSDIILHKLRLQGCNLAFLTLHHNLSSYQEIEVEAISKYKVENEEMYIPLECCDIVNQARDDNAQIVAVGATVMRALETGVSTDGYLKEFSGWTNEFIYPPYHIHLPTAMLTNFNAPKSINLMCAATMGGEKNVMNAMNVAVKEKYRFGCYGDALLIMD

SEQ ID NO: 70544 - protein, 335 aa, Porticoccaceae bacterium
  misc_feature (1)..(335): tr|A0A522B1L1|A0A522B1L1_9GAMM S-adenosylmethionine:tRN A ribosyltransferase-isomerase (Fragment) OS=Porticocca ceae bacterium OX=2026782 GN=queA PE=3 SV=1
MRRELFHYDLPPELIATHPPQRRRDSRLLVLDGPRGALSHRHFPDLLQLVRRDDLLVFNDTRVMPARLLGRKDSGGRVEVLIERLGDDPQRALAMMRASKTPRAGTRIHFDQGVTAQVGGRRDDLFELCFEGSVPIVEILEAIGEIPLPPYLGRPATAADRERYQTLYARESGAVAAPTAGLHFDQELLAQLAAQDIGMGFVTLHVGAGTFRPVRADDIREHRMHAERVTVTAELCAQVTATRAAGGRVIAVGTTAVRSLETAAAGGVLRSFVGDTDIFIFPGYEFRSVDALITNFHLPESSLLMLVCAFAGHRATLAAYRAAVAERYRFFSYGD

SEQ ID NO: 70545 - protein, 348 aa, Porticoccaceae bacterium
  misc_feature (1)..(348): tr|A0A2E8UEY6|A0A2E8UEY6_9GAMM S-adenosylmethionine:tRN A ribosyltransferase-isomerase OS=Porticoccaceae bacter ium OX=2026782 GN=queA PE=3 SV=1
MHLKLFDYLLPEELIARFPLDDRSASSMMVLNESGKISHRKFPDLMNYLKEGDLLVFNNTRVIPARLFGKKDSGGMVEILIERTVDENLAWAMVRSNKKMKMRTKINFVNHSYADVIDCRDGLFLLSFSQKVSIIMDLIGQTPIPPYLNRDAERIDSERYQTVYASAPGAIAAPTAGLHFDEPLLDRLKNKGINSCFVTLHVGLGTFKPVKVDNIKEHSMHSEWISVSKKTCDMITETKKNGGRVVAVGTTSLRSLETIAIKPDLEPFQGDTDIFICPGYEFKLVDALITNFHLPKSTLLMLVCAFAGYSQIMDAYKEAINKKYRFYSYGDAMFLNKNIDAKFDLPGL

SEQ ID NO: 70546 - protein, 350 aa, Porticoccus sp.
  misc_feature (1)..(350): tr|A0A2E5C5J4|A0A2E5C5J4_9GAMM S-adenosylmethionine:tRN A ribosyltransferase-isomerase OS=Porticoccus sp. OX=20 24853 GN=queA PE=3 SV=1
MRRDHFHYPLPDELIARQPAAERSGSRLLVVDGVTGALQHLQFPAISSLVNPGDLLVFNDTRVIPARLFGQKDSGGKVEMLVERLLDDQRLLAHLRASKSPKAGTRLQFEGGVEAEVEGRDGDLFQLLFLGDRTALDILESHGHMPLPPYIDRADNPADRERYQTVYAEKPGAVAAPTAGLHFDQPLLDQLRAKGVDFAFVTLHVGAGTFQPVRVDDIHDHRMHSEVIEVSAEVCQQVRETRARGGRVIAVGTTSVRCLESAAAGGQIQPMTGETDIFIYPGYSFKLVDALLTNFHLPESTLLMLVSAFSGYTHMMNAYRQAVAERYRFFSYGDAMFLTRNPAATEDTPQ

SEQ ID NO: 70547 - protein, 350 aa, Porticoccus sp.
  misc_feature (1)..(350): tr|A0A2G2QRV8|A0A2G2QRV8_9GAMM S-adenosylmethionine:tRN A ribosyltransferase-isomerase OS=Porticoccus sp. OX=20 24853 GN=queA PE=3 SV=1
MRRDHFHYPLPDELIARQPAAERRGSRLLVVDGVTGALQHLQFPAISSLVNPGDLLVFNNTRVIPARLFGQKDSGGKVEMLVERLLGDQRLLAHLRASKSPRAGTRLQFEGGVEAEVEGRDGDLFQLCFLGDRTALDILESHGHMPLPPYIDRADNPADRERYQTVYAEKPGAVAAPTAGLHFDQPLLDQLRAKGVDFAFVTLHVGAGTFQPVRVDHIHDHHMHSEVIEVSAEVCQQVRETRARGGRVIAVGTTSVRCLESAAAGGQIQPMTGETDIFIYPGYPFKLVDALLTNFHLPESTLLMLVSAFSGYTHMMNAYRQAVAERYRFFSYGDAMFLTRNPAATEDIPQ

SEQ ID NO: 70548 - protein, 369 aa, Poseidonocella pacifica
  misc_feature (1)..(369): tr|A0A1I0V9L0|A0A1I0V9L0_9RHOB S-adenosylmethionine:tRN A ribosyltransferase-isomerase OS=Poseidonocella pacifi ca OX=871651 GN=queA PE=3 SV=1
MQLSDFDFDLPEALIATRPARPRSSARLLVAEGDAIHDQHVLDLTQWLRPGDRLVLNDTKVIPARLSGLRRREGPEGSTEARIEATLLEPKPGGQWSALLKPLRKVRDGEEIRFSEALSARVENRKEGTATLSFNLAGEDFDAALAEAGAMPLPPYIAARRAADAQDHEDYQTVWARNTGAVAAPTASLHFDDALLAALRERGVEISYVTLHVGAGTFLPVKVEDVSRHKMHGEWGEISETAAAEIAATKAAGGRVIPVGTTALRLIETAARSTGAIAPWQGTTDIFIYPGFAFHVADALMTNFHLPRSTLMMLVSAFMGMERIRAIYAHAVAESYRFFSYGDASLLLPTSRNDTATVADGQSGDGARP

SEQ ID NO: 70549 - protein, 349 aa, Poseidonocella sedimentorum
  misc_feature (1)..(349): tr|A0A1I6DYQ1|A0A1I6DYQ1_9RHOB S-adenosylmethionine:tRN A ribosyltransferase-isomerase OS=Poseidonocella sedime ntorum OX=871652 GN=queA PE=3 SV=1
MQLSDFDFDLPEDLIATRPAKPRSSARLLVAEGARFSDARVSDLPRWLRPGDRLVLNDTKVIPARLTGFRSRGSGPTATRARIEATLLEPQADGVWLALIKPLKKIREGEEIVFSDALTATFEGRAGEGVRLRFNLSGSDFDAALNAAGAMPLPPYIAAKRPADAQDHEDYQTVWAARRGAVAAPTASLHFDAPLLAELEAQGVAFTHVTLHVGAGTFLPVKVEDVTQHKMHAEWGQVSAAAAQEIAVTMAAGGRIIPVGTTALRLIETAARESGEIAPWEGETDIFIYPGFEFHVASALMTNFHLPKSTLMMLVSAFLGADTIRAVYAHAIEARYRFFSYGDASLLIP

SEQ ID NO: 70550 - protein, 342 aa, Pradoshia eiseniae
  misc_feature (1)..(342): tr|A0A2S7N2X8|A0A2S7N2X8_9BACI S-adenosylmethionine:tRN A ribosyltransferase-isomerase OS=Pradoshia eiseniae OX =2064768 GN=queA PE=3 SV=1
MKVDLFDFHLPEELIAQTPLEKRAESRLMVLDKQTGNLEHTKFKEITSFLKPGDCLVLNDTKVLPARLYGTKKDTGANIELLLLKQIEGDVWETLAKPAKRIQVGTEVVFGDGQLTAVCVGELEHGGREFEFRYDGIFYEVLEELGEMPLPPYIKERLTERSRYQTVYAREEGSAAAPTAGLHFTEELLEEIKAMGVHIAFITLHVGLGTFRPVSSDTIEGHDMHAEFYQMSSETAELLTKVRDEGGKIYSVGTTSTRTLETITRDHDGKFAEASGWTNIFIYPGFEFRAIDGMITNFHLPKSTLIMLISALAGREHVLNAYEVAVKEHYRFFSFGDAMFIK

SEQ ID NO: 70551 - protein, 333 aa, Pradoshia eiseniae
  misc_feature (1)..(333): tr|A0A2S7MZA5|A0A2S7MZA5_9BACI S-adenosylmethionine:tRN A ribosyltransferase-isomerase OS=Pradoshia eiseniae OX =2064768 GN=CYL18_12080 PE=3 SV=1
MGAIRKSFSIPVELNACIPPEERGVRRDGVKLMVIEKETGKIVHDVFYHLGHYLRKGDLLLLNNSRTIPAVLWTHCGKEVRLARSWTSGYWDVLIIGDEVEAGADLHFPNQLMAKIKNRVDGTPLWTVSFNQENELFFDTLYRHGEPIRYEYIDTPWKLESYQTVYASVPGSAEMPSAGRAFSWELLFELQKKGIKLGFLQLHTGLSDFCDDEYPVKPAVNPEYYHVPEETLKSIHAAKKVGGRIIAVGTTVVRAAESAILTGKAEGITTLSIGEHDQLQVIDGLLTGFHEAEASHLDLLCSLIDSQKLVAAYEMAIKERYLWHEFGDMNLII

SEQ ID NO: 70552 - protein, 342 aa, Pradoshia sp.
  misc_feature (1)..(342): tr|A0A5J6XR90|A0A5J6XR90_9BACI tRNA preQ1(34) S-adenosy lmethionine ribosyltransferase-isomerase QueA OS=Prados hia sp. D12 OX=2651284 GN=queA PE=4 SV=1
MKVDLFDFHLPEELIAQTPLEKREESRLMVLDKETGDVNHTQFKHIKEFLKPGDCLVLNDTKVLPARLHGEKKDTGAHIELLLLKQIKGDVWETLAKPAKRIRVGTEVVFGDGQLTAVCVKEMEHGGREFEFKYDGIFYEVLEELGEMPLPPYIKERLSDKDRYQTVYAREEGSAAAPTAGLHFTEELLAEIKEMGVHLAFITLHVGLGTFRPVSSDTIEGHDMHSEFYQMNAETAQLLNRVRAEGGNIFSVGTTSTRTLETIARDHNGSFAEASGWTNIFIYPGFEFKAIDGMITNFHLPKSTLIMLISALAGREHVLNAYNTAVREKYRFFSFGDAMFIK

SEQ ID NO: 70553 - protein, 357 aa, Pragia fontium
  misc_feature (1)..(357): tr|A0A0G3CUG0|A0A0G3CUG0_9GAMM S-adenosylmethionine:tRN A ribosyltransferase-isomerase OS=Pragia fontium OX=829 85 GN=queA PE=3 SV=1
MRVTDFSFELPESLIARYPQAERSACRLLSLDGPSGSLADDVFTDVLNKLEAGDLLVFNNTRVIPARLFGKKASGGKIEVLVERVLDDKRVLAHVRASKAPKPGAELLLGDDESIPVTMVARHDALFELRFDDGRDVLSILNTAGHMPLPPYIDRPDEASDRELYQTVYSERPGAVAAPTAGLHFDQPLLEALRAKGIEMAFVTLHVGAGTFQPVRVDDIHQHVMHSEYAEVPQDVVDAVLACKSRGGKVVAVGTTSVRSLESAAQATKNGLIAPFFGDTNIFIYPGYQFQIIDTLITNFHLPESTLIMLVSAFAGYTNTMKAYQQAVEKQYRFFSYGDAMYITRNPQAVNEIPGGN

SEQ ID NO: 70554 - protein, 357 aa, Pragia fontium
  misc_feature (1)..(357): tr|A0A379DTA2|A0A379DTA2_9GAMM S-adenosylmethionine:tRN A ribosyltransferase-isomerase OS=Pragia fontium OX=829 85 GN=queA PE=3 SV=1
MRVTDFSFELPESLIARYPQAERSACRLLSLDGPSGSLADDVFTDVLNKLEAGDLLVFNNTRVIPARLFGKKASGGKIEVLVERVLDDKRVLAHVRASKAPKPGAELLLGDDESIPVTMVARHDALFELRFDDGRDVLSILNTAGHMPLPPYIDRPDEASDRELYQTVYSERPGAVAAPTAGLHFDQPLLEALRAKGIEMAFVTLHVGAGTFQPVRVDDIQQHVMHSEYAEVPQDVVDAVLACKSRGGKVVAVGTTSVRSLESAAQATKNGLIAPFFGDTNIFIYPGYRFQIIDTLITNFHLPESTLIMLVSAFAGYTNTMKAYQQAVEKQYRFFSYGDAMYITRNPQAVNEIPGGN

SEQ ID NO: 70555 - protein, 358 aa, Pragia sp.
  misc_feature (1)..(358): tr|A0A411WHE1|A0A411WHE1_9GAMM S-adenosylmethionine:tRN A ribosyltransferase-isomerase OS=Pragia sp. CF-458 OX= 2498113 GN=queA PE=3 SV=1
MRVTDFSFELPESLIARYPQAERSACRMLSLDGISGTLSDDTFTDVLNKLNPGDLLVFNNTRVIPARLFGKKASGGKIEVLVERVLDDRRVLAHVRASKAPKPGTELLLGDDESIPAIMAARHDALFELHFTDGRDVLTILNAAGHMPLPPYIDRPDEDADRELYQTVYSQRPGAVAAPTAGLHFDEPLLEALRAKGVNMEFVTLHVGAGTFQPVRVDDIKQHVMHAEYAEVPQSVVDAVLACKARGNKVIAVGTTSVRSLESAAQAAKQDLIEPFFGDTSIFIYPGYQFRVIDTLITNFHLPESTLIMLVSAFAGYSNTMRAYQQAVEKQYRFFSYGDAMFITRNPEAINEIPGGKS

SEQ ID NO: 70556 - protein, 372 aa, Prevotella aff.
  misc_feature (1)..(372): tr|A0A1I0NVC3|A0A1I0NVC3_9BACT S-adenosylmethionine:tRN A ribosyltransferase-isomerase OS=Prevotella aff. rumin icola Tc2-24 OX=81582 GN=queA PE=3 SV=1
MKLSQFKFKLPEEQIALEPSYHRDECRLMVVHRKSGEIEMTKKDENGEDLKDEEGNPVYLDFRNILDYFDEDDTFIFNDTQVFPARLYGTKEKTDAKIEVFLLRELNADLRLWDVLVEPARKIRIGNKLFFEEDGPMVAEVIDNTTSRGRTLRFLYDCPHDEFKRELFALGAAPLPRYIIDRRPAHEEDMDMFQTIYAKNEGAVTAPATGLHFSRELMKRMEIRGINFAYITLHCGLGNFDPIEVEDLTKHKMSSEQMFIPKEACDIVNKTKLSGHRVCAVGVSTARATETAVGTDGMLKEYEGWTNKFIFPPYEFGMANALVANFYHPESTMMMTQCSFGGYELVYEAYKKAVKNGYRFGCYGDAMLIVDD

SEQ ID NO: 70557 - protein, 420 aa, Prevotella aff.
  misc_feature (1)..(420): tr|A0A1I0MBT4|A0A1I0MBT4_9BACT S-adenosylmethionine:tRN A ribosyltransferase-isomerase OS=Prevotella aff. rumin icola Tc2-24 OX=81582 GN=SAMN04487850_0477 PE=3 SV=1
MSCSIKESDPRHIHISDYNYPLPDDRIAKFPIARRDQSKLLLYRNGEVGEDVFCHLPDYLPKGALMVFNNTKVIQARMHFRKANANGEPLGALIEVFLLEPADPSDYELMFQTTGHCAWYCLVGNLKKWKEGTLSREIDIKGEKVLVMATRGAIHGTSHRIDFEWKAADNSRISFAEIIDAMGELPIPPYLNRETQESDKTTYQTVYSKIKGSVAAPTAGLHFTPEVLAALDAHGIDREELTLHVGAGTFKPVKSEEIEGHEMHTEYISVRRSTIEKLIRHDGKAIAVGTTSVRTLESLYYMGVKVMRNANLTEEQLHVCQWEPYDSPCDVPAVEALRSLAAWMDVRGLEVLHSSTQIIIAPGYNYKIVKMLVTNFHQPQSTLLLLVSAFVKGDWHKIYDYALSHDFRFLSYGDSSLLIP

SEQ ID NO: 70558 - protein, 394 aa, Prevotella amnii
  misc_feature (1)..(394): tr|A0A096D541|A0A096D541_9BACT S-adenosylmethionine:tRN A ribosyltransferase-isomerase OS=Prevotella amnii DNF0 0058 OX=1401066 GN=HMPREF9302_02670 PE=3 SV=1
MKLSQFKFSLPEDQVALYPHSSERILKRADGSEQKFTVVRRDEGRLMVVHRKSGKIDMFKGEVTGEPKEEDYIRFRDVLNYFDDGDAFIFNDTKVFPARLYGTKEKTDAKIEVFLLRELNADMRLWDVLVEPARKIRIGNKLFFDESGTMVAEVIDNTTSRGRTLRFLYDCDHDEFKRELFSLGEAPLPRYIIDNRPKKEGEDFAHATEDDLEYFQSVFAKNEGAVSAPGTNIHFSEHMMKMMEIKGIKSAFITLHCALGSFHDIEVEDLTKHKMDSEEMHINAEACAVVNSTKKDGHKVCAVGASVVKACETAVGTDGLLKEYDGWTNKFIFPPYKFGLADSMLVNFYHPYSVLLMETAAFGGYDLIMQAYDLAVKNGYMFGCFGDSMLILDD

SEQ ID NO: 70559 - protein, 394 aa, Prevotella amnii; identical to SEQ ID NO: 70558
  misc_feature (1)..(394): tr|A0A134BJ47|A0A134BJ47_9BACT S-adenosylmethionine:tRN A ribosyltransferase-isomerase OS=Prevotella amnii OX=4 19005 GN=HMPREF1860_00449 PE=3 SV=1

SEQ ID NO: 70560 - protein, 394 aa, Prevotella baroniae
  misc_feature (1)..(394): tr|U2P7R3|U2P7R3_9BACT S-adenosylmethionine:tRNA ribosy ltransferase-isomerase OS=Prevotella baroniae F0067 OX= 1115809 GN=queA_1 PE=3 SV=1
MKLSQFDFKLPKEQVALYPHSIYREFENENGQKETFRISRRDEARMMVLHRKSQTIDMYRKDEKGNPMEGQYIEFRDILNYFEEGDTFIFNDTKVFPARLYGTKEKTDAKIEVFLLRELNEEMRLWDVLVEPARKIRIGNKLFFDESGTMVAEVIDNTTSRGRTLRFLYDCPHDEFKRELFSLGESPLPRYILDSRPMRDTEETVHADAEDMADFQTIYAKTEGAVTAPATGLHFTRELMKRMEILGINEAYITLHCGLGNFNAIEVEDLTKHKMDSEQMVIDKEACDVVNAAKAAGRRVCAIGTSVVKATETAVGTDGLLKEYDGWTNKFIFPPYDFGLANNMVANFYHPLSTLVMETAAFGGYDIVMEAYHLAVEHGYMFGCFGDALLILDD

SEQ ID NO: 70561 - protein, 418 aa, Prevotella baroniae
  misc_feature (1)..(418): tr|U2P8H2|U2P8H2_9BACT S-adenosylmethionine:tRNA ribosy ltransferase-isomerase OS=Prevotella baroniae F0067 OX= 1115809 GN=queA_2 PE=3 SV=1
METRHIHISDFDYPLADDRIAKYPMAERDHSKLLVYNRGKLSDDLFFQLPRYLPQGALMVFNNTRVIQARMHFRKETGALIEVFLMEPAAPTDYEQMFQTSGQCSWLCMIGNLKKWKEGQLKREFEIKGRRLTLCARRNVAQDEALGSRSGTNYWVDFSWDNAQVSFAEILEAVGELPIPPYLNRETQESDKVTYQTVYSKVKGSVAAPTAGLHFTDNVLAALDRCGIDREEVTLHVGAGTFKPVKSEEIDGHRMHTEFICVHRHSLEKLLRHECRTIAVGTTSVRTLESLYYMGVYLEKHPQAQEEELHVNQWVPYENGRDGRLVDGIGPVRAIRNIVDWLDRNGLEALHSSTQIIIAPGYEYKIVTMLITNFHQPKSTLLLLVSAFVKGDWRKIYDYALSHDFRFLSYGDSSLLIP

SEQ ID NO: 70562 - protein, 397 aa, Prevotella bergensis
  misc_feature (1)..(397): tr|D1PVQ4|D1PVQ4_9BACT S-adenosylmethionine:tRNA ribosy ltransferase-isomerase OS=Prevotella bergensis DSM 1736 1 OX=585502 GN=queA PE=3 SV=1
MKLSQFKFKLPEELVALYPHSFMREFTNDDGTKGSIRVTRRDESRLMVLHRTTGEIEMYRKDAKGNPIEGEYLDFRNLLDYFDEHDTFILNDTKVFPARLYGTKEKTDAKIEVFILRELNRETHLWDVLVEPARKIRIGNKLFFDEVGTMVAEVYDNTTSRGRSLRFLYDCSHEQFREDLFALGEMPLPTYILNGRPEHPEMKGMHVRSRALPEDSEYFQCVYAKNEGAVTAPATGLHFSRELMKRMEIKGIHTAFITLHCGLGNFTPIEVEDLTKHKMDSEQMIITKKACDIVNRTRKEGHRLCAIGTSVLKATETAVGTDGMLKEYNGWTSKFIFPKYDFGLADSMVANFYHPESTMVMATAAFGGYEKVMECYDLAVKHGYKFGCFGDSLLIVD

SEQ ID NO: 70563 - protein, 421 aa, Prevotella bergensis
  misc_feature (1)..(421): tr|D1PYJ9|D1PYJ9_9BACT S-adenosylmethionine:tRNA ribosy ltransferase-isomerase OS=Prevotella bergensis DSM 1736 1 OX=585502 GN=queA2 PE=3 SV=1
MNTKNIHISDYNYELADERIAKFPLTQRDHSKLLLYNKGKVSDDVFYNLPNYLPEGALLVCNNTRVIQARMHFRKETGALIEVFLMEPALPADYEQMFQSTGRCSWLCMVGNLKKWKEGTLERDFQIKGHRLTLTASMDRDRTQEQSGGTNYWIDFVWDNSEVNFADILETVGELPIPPYLNREAQESDKTTYQTVYSKINGSVAAPTAGLHFTDEVLQAIDAKGITRDEVTLHVGAGTFRPVKSETIDGHSMHTEYVVIHRHTLQRLLEHDCQAIAVGTTSVRTLESLYYMGVKLSQCSDLTEDQLHVNQWEPYDLPHDAEGLVLVEDKAVTVRSAIQNLLDYLDRDNLDTLHSSTQIIIAPGYTYKIVKMLITNFHQPQSTLLLLVSAFLKGDWRKVYDYALANDFRFLSYGDSSLLIP

SEQ ID NO: 70564 - protein, 423 aa, Prevotella bivia
  misc_feature (1)..(423): tr|A0A096ABQ8|A0A096ABQ8_9BACT S-adenosylmethionine:tRN A ribosyltransferase-isomerase OS=Prevotella bivia DNF0 0320 OX=1401068 GN=HMPREF0647_06270 PE=3 SV=1
MSEETKHISISDYNYLLPDERIAKFPLAKRDNSKLLLYKHGEVVEDIFYNLPKYLPKGGLMVFNNTKVIQARIHFRKETGALIEVFLLEPTAPTDYELMFQTTHTCSWLCMVGNLKKWKDGVLKREFEIKGHKLTLIASLNRDKTANTPGGTNHWIDFSWDNANVSFAEILEMVGELPIPPYLNRETEESDKETYQTVYSKIKGSVAAPTAGLHFTPEVLQALDASGIVRDELTLHVGAGTFKPVKSEEIEGHNMHTEYVVVHRHTLENLLAHDCSAIAVGTTSVRTLESLYYMGVHLAINPDATEAELHVNQWEPYDLEHNEAGLVIINGKVITVASAIENILNYLKKDNLQALHSSTQIIIAPGFTYKIVKALVTNFHQPQSTLLLLVSAFVKGDWRKIYDYALSHDFRFLSYGDSSLLIP

SEQ ID NO: 70565 - protein, 394 aa, Prevotella bivia
  misc_feature (1)..(394): tr|A0A137SZS6|A0A137SZS6_9BACT S-adenosylmethionine:tRN A ribosyltransferase-isomerase OS=Prevotella bivia OX=2 8125 GN=HMPREF3202_00634 PE=3 SV=1
MKLSQFKFNLPEEQVALYPHSSERVLKRADGSEQKFTVVRRDEGRLMVVHRKSGKIDMFKGDITDKPKEEDYIRFRDVLDYFDEGDTFIFNDTKVFPARLYGTKEKTDAKIEVFLLRELNAEMRLWDVLVEPARKIRIGNKLFFDESGTMVAEVIDNTTSRGRTLRFLYDCDHEEFKRELFALGEAPLPRYIIDNRPKEEGEEFAHATADDLENFQSVFAKNEGAVSAPGTNIHFSEHMMKMMEIKGLKSAFVTLHCGLGSFHDIEVEDLTKHKMDSEEMHINAEACEIVNKTKLGGHKLCAVGASVVKACESSVGTDGLLKEYDGWTNKFIFPPYNFGLADSMLVNFYHPYSVLLMETAAFGGYDLIMEAYDLAVKNGYMFGSFGDSMLILND

SEQ ID NO: 70566 - protein, 424 aa, Prevotella bryantii
  misc_feature (1)..(424): tr|D8DWL4|D8DWL4_PREBR S-adenosylmethionine:tRNA ribosy ltransferase-isomerase OS=Prevotella bryantii B14 OX=75 2555 GN=queA PE=3 SV=1
METKHIKISDYSYDLPDERIAKFPLSQRDHSKLLLYKHGEVSEDVFYNIPNHLPKGALMVCNNTRVIQARMHFRKATGALIEVFLMEPAAPTDYELMFQTTGHCAWLCMIGNLKKWKEGSLKRDFSINGHEFTLVASLRRGEALTPEQEKLTTHSGGTNYWVDFEWNTEKVNFAEILEAVGELPIPPYLNRETQESDKTTYQTVYSKIKGSVAAPTAGLHFTDSVLSDLDKHGIVRDEVTLHVGAGTFKPVKSVEIDGHEMHTEYIVVHRHTFERLLEHDCSAIAVGTTSVRTLESLYYMGVYLEHHPDASEDELHVHQWTPYDDGRDGKLVDGITAVKAMQNILDYLDRNNLEALHSSTQIIIAPGYEYKIVKMLITNFHQPQSTLLLLVSAFLKGDWRKVYDYALSHEFRFLSYGDSSLLIP

SEQ ID NO: 70567 - protein, 424 aa, Prevotella bryantii; identical to SEQ ID NO: 70566
  misc_feature (1)..(424): tr|A0A255SKH9|A0A255SKH9_PREBR S-adenosylmethionine:tRN A ribosyltransferase-isomerase OS=Prevotella bryantii O X=77095 GN=CIK91_12600 PE=3 SV=1

SEQ ID NO: 70568 - protein, 424 aa, Prevotella buccae
  misc_feature (1)..(424): tr|D3HY72|D3HY72_9BACT S-adenosylmethionine:tRNA ribosy ltransferase-isomerase OS=Prevotella buccae D17 OX=5756 11 GN=HMPREF0649_01204 PE=3 SV=1
METKHIRISDYNYELLEERIAKFPIVPRDHSKLLLYKHGEVGEDVFYHLTDHLPNRALMVFNNTRVIQARMHFRKETGALIEVFLMEPAMPTDYELMFQTSGHCSWLCMIGNLKKWKEGMLRRNFDIKGNRLTLTATMLRDEQLDDRQKNMTVHGGGTNYWVDFDWDNQQVSFAEILEAVGELPIPPYLNRATQESDKTTYQTVYSKIKGSVAAPTAGLHFTDDVLADVDRHGIVRDEVTLHVGAGTFKPVKSMEIAGHKMHAEYIVVHRHTFERLLEYGCSAIAVGTTSVRTLESLYYIGLYLEHHPEASEEDLHVGQWDPYDNGRNGKTVEGITPEQAIRNILSYLDRNGLEALHSSTQIIIAPGYEYKIVKMLITNFHQPQSTLLLLVSAFLKGDWKKVYDYALKHDFRFLSYGDSSLLIP

SEQ ID NO: 70569 - protein, 393 aa, Prevotella buccae
  misc_feature (1)..(393): tr|E6K369|E6K369_9BACT S-adenosylmethionine:tRNA ribosy ltransferase-isomerase OS=Prevotella buccae ATCC 33574 OX=873513 GN=queA PE=3 SV=1
MKLSQFKFKLSEEQIALYPHTAEHVITRKDGTQSTFHVTRREESRLMVLHKKSERIDMYKTDETGEPLKDAEGRPQYIQFRDIVDYFGDGDTFIFNDTKVFPARLYGTKEKTDAKIEVFLLRELNEEMRLWDVLVEPARKIRIGNKLFFDDTSTMVAEVIDNTTSRGRTLRFLYDSPHDEFKQNLYALGESPLPRYIIDRRESHHATPEDMDDFQTVFAKNEGAVTAPATGLHFSRELLKRMEIYGINFAYITLHCGLGNFHDIEVEDLTKHKMDSEQMKISAEACKVVNEAKRAGNHICAVGTSVVKATETAVGTDGMLKEFDGWTNKFIFPPYDFGLADCMVANFYHPLSTLLMSTAAFGGYDMVMECYNRAAADGYKFGCFGDSLLILDD

SEQ ID NO: 70570 - protein, 388 aa, Prevotella buccalis
  misc_feature (1)..(388): tr|A0A2N6QN71|A0A2N6QN71_9BACT S-adenosylmethionine:tRN A ribosyltransferase-isomerase OS=Prevotella buccalis O X=28127 GN=queA PE=3 SV=1
MKLSQFKFNLPEELVALYPHSVYHEVVDDKGEKHISRMTRRDESRLMVLHRKSQTIDMFQKNKKGKPVEGQYLEFRHVLDYFDEGDTFIFNDTKVFPARLYGTKEKTDAKIEVFLLRELNREMRLWDVLVEPARKIRIGNKLFFDESGTMVAEVIDNTTSRGRTLRFLYDCPHEEFKRELFALGEAPLPRYILNQREVPHADAHDMEDFQTIFAKNEGAVTAAATGLHVSREMMKRMEIKGIHFAYITLHCGLSAFNNIEVEDLTKHKMDSEPMKIDAQACKIVNKAKQEGHRVCAVGTSVVKATETAVGTDGLLKEYDGWTSKFIFPPYDFGLADTMIANFYHSMSPLLMETAAFGGYELVMEAYNLAVKHGYKFGCYGDSLLILDD

SEQ ID NO: 70571 - protein, 432 aa, Prevotella buccalis
  misc_feature (1)..(432): tr|A0A2N6QRN2|A0A2N6QRN2_9BACT S-adenosylmethionine:tRN A ribosyltransferase-isomerase OS=Prevotella buccalis O X=28127 GN=CJ231_04650 PE=3 SV=1
MDTKHIHISDYQYDLPDDRIAKFPIAQRDHSKLLLYNQGKVGEDVFYHLKDHLPQGALMIFNNTKVIQARMYFMKSTGARIEVFLMEPAAPTDYEQIFQTRGHCAWYCMIGNLKKWKEGPLTRSYEIKGRSLTLTITRKSQHNENHAEGNLLLSAPATHHWIEFDWDAEDISFSEILEDMGELPIPPYLNRETQESDKTTYQTVYSKIKGSVAAPTAGLHFTNDVLKSLDEHGIDREEVTLHVGAGTFKPVKSQEIEDHDMHTEYICVHQQTLEKLLRHDASAIAVGTTSVRTLESLYYMGVYLSARPDASEAELHVNQWAPYERMREDGTTEQLDGGLIDGITPMQAIQNVLDYLKRNQLGALHSSTQIIIAPGYEYKIVKMLITNFHQPQSTLLLLVSAFVHGDWRKIYDYALAHDFRFLSYGDSSLLIP

SEQ ID NO: 70572 - protein, 396 aa, Prevotella colorans
  misc_feature (1)..(396): tr|A0A2U0U4R2|A0A2U0U4R2_9BACT S-adenosylmethionine:tRN A ribosyltransferase-isomerase OS=Prevotella colorans O X=1703337 GN=C7379_11550 PE=3 SV=1
MKLSQFKFKLPQELVALYPHSFEREYTNDDGTKGSFRVTRRDESRLMVLHRSTGEIEMYRKDAKGKPIEGDYLDFRNILDYFDEHDTFILNDTKVFPARLYGTKEKTDAKIEVFVLRELNEETHLWDVLVEPARKIRIGNKLFFDEVGTMVAEVYDNTTSRGRSLRFLYDCSHEQFKKDLFALGEPPLPAYILNGRPADPAMKDMHVRSHALPEDAENFQCVFAKNVGAVTAPATGLHFSRELMKRMEIKGINAAYITLHCGLGNFTPIEVEDLTKHKMDSEQMIIDKKACDIVNKTKMAGHRVCAVGTSVVKATETAVGTDGLLKEYDGWTSKFIFPSYDFGLADSMVANFYHPESILLMSTAAFGGYEQVMECYRLAVEHGYKFGCFGDSLLIV

SEQ ID NO: 70573 - protein, 421 aa, Prevotella colorans
  misc_feature (1)..(421): tr|A0A2U0U1J3|A0A2U0U1J3_9BACT S-adenosylmethionine:tRN A ribosyltransferase-isomerase OS=Prevotella colorans O X=1703337 GN=queA PE=3 SV=1
MDTKNIHISDFNYELPDERIAKYPLPQRDHSKLLVYDRGEVSDDVFRNLPDHLPKGSLMVFNNTRVIQARIHFRKDTGALIEVFLMEPTLPADYEQMFQTTHKCSWLCMVGNLKKWKEGALNRSFEIKGHSFTLSVTMNRDKTAERVGGSNYWIDFEWDNNDINFADILESVGELPIPPYLNRETQESDKTTYQTVYSKIKGSVAAPTAGLHFTDEVLRRIDAKGIVRDELTLHVGAGTFRPVKSDTIDGHNMHSEYVVVHRHTLERLLNHDCRAIAVGTTSVRTLESLYYMGAKLAANPNLSEEELHVNQWEPYDLPHDAEGLAIVNGKSLPVRQAIQNILDYLDRDKIDALHSGTQIIIAPGYTYKVVKMLITNFHQPQSTLLLLVSAFLKGDWRKVYDYALGHDFRFLSYGDSSLLIP

SEQ ID NO: 70574 - protein, 424 aa, Prevotella copri
  misc_feature (1)..(424): tr|D1P9Y7|D1P9Y7_9BACT S-adenosylmethionine:tRNA ribosy ltransferase-isomerase OS=Prevotella copri DSM 18205 OX =537011 GN=queA PE=3 SV=1
MDTKHIKISDYNYDLPDERIAKFPIAQRDHSKLLVYKHGEVSDDVFHHLPTYLPQGALMIFNNTKVIQARLHFRKETGALIEVFLMEPAEPTDYELMFQTTGHCSWLCMIGNLKKWKEGSLKRDFEIKGHKLTLSATMRRGDALGSEAQKMVAKGGGTNYWVDFDWDNDKVSFAEILEAVGELPIPPYLNRKTEESDKTTYQTVYSKVKGSVAAPTAGLHFTDAVLKDLDAHGIDREEVTLHVGAGTFKPVKSLEIEGHQMHTEYIVVHRRSLEKLIKHECRVIAVGTTSVRTIESLYYMGVHLLKHPEANEEDLHVNQWDPYELSEDGNLVDGITPMQAIQAIIDYLDRNGLEALHSSTQIIIAPGYQYKIVKMLVTNFHQPQSTLLLLVSAFLKGDWKKVYDYALSHDFRFLSYGDSSLLIP

SEQ ID NO: 70575 - protein, 394 aa, Prevotella copri
  misc_feature (1)..(394): tr|A0A3E4SBA8|A0A3E4SBA8_9BACT S-adenosylmethionine:tRN A ribosyltransferase-isomerase OS=Prevotella copri OX=1 65179 GN=DW064_07215 PE=3 SV=1
MKLSQFNFKLPKDQVALYPHKAKHVVKTASGERTFEITRRDESRLMVLHKKSETIEMYKKDENGKDMVDADGNPVFLQFKDIVNYFEEGDTFIFNNTKVFPARLYGTKEKTDAKIEVFLLRELNPEMRLWDVLVEPARKIRIGNKLFFDDVNEMVAEVIDNTTSRGRTLRFLYDEDGNHDVFKRSLFALGEAPLPRYVIDAREDHHATEDDMDDFQCVFAEVEGAVTAPATGLHFSRELMKRMEINGINEAYITLHCGLGNFHDIEVEDLTKHKMDSEQMMISQEACDLVNKTKLAGHRVCAIGTSVMKATETAVGTDGMMKAFDGWTNKFIFPPYDFGLADCAVVNFYHPESTLMMSTAAFGGYELVYEAYKMAVKNGYMFGCYGDSLLMLPD

SEQ ID NO: 70576 - protein, 423 aa, Prevotella corporis
  misc_feature (1)..(423): tr|A0A133Q1Z3|A0A133Q1Z3_9BACT S-adenosylmethionine:tRN A ribosyltransferase-isomerase OS=Prevotella corporis O X=28128 GN=HMPREF3226_01834 PE=3 SV=1
MIQDTKHIKISDYSYQLPDERIAKFPITQRDHSKLLLYKHGNVSEDVFYNLNKHLPKGALMVFNNTKVIQARLHFRKETGALIEIFLMEPANPTDYELMFQTNGNCSWLCMIGNLKKWKEGVLSRAFEINGKKLVLSATRQETKNTATGGGTNHWIDFTWDNTNVSFAEILEAVGELPIPPYLNRDTQESDKTTYQTVYSKIKGSVAAPTAGLHFTDAVLKSLDDSGIVRDELTLHVGAGTFKPVKSTEIAGHSMHTEYVVVHRHTLERLLEHDCNAIAVGTTSVRTLESLYYMGVKLETRPDAQETDLHVSQWEPYEYAHDENGLVYVNGEIISVTKAIANLLNYLKRDELEGLHSSTQIIIAPGYKYKIVKMLITNFHQPQSTLLLLVSAFLNGDWRKVYDYALSHDFRFLSYGDSSLLIP

SEQ ID NO: 70577 - protein, 394 aa, Prevotella corporis
  misc_feature (1)..(394): tr|A0A133QQJ7|A0A133QQJ7_9BACT S-adenosylmethionine:tRN A ribosyltransferase-isomerase OS=Prevotella corporis O X=28128 GN=HMPREF3226_00094 PE=3 SV=1
MKLSQFKFDLPDDQVALYPHSSERVLNRADGTSQVFKITRRDESRLMVLHRKSGTIDMFKNKVKGKPKEEDFIRFKDVLDYFNEGDAFILNDTKVFPARLYGTKEKTDAKIEVFLLRELNQEMRLWDVLVEPARKIRIGNKLFFDESGTMVAEVIDNTTSRGRTLRFLYDCPHDEFKQELYALGEAPLPRYIIDNRPKAEGEDFAHADDEDMEYFQSVFADKEGAVTAPGTNIHFSEHMMKMMEIKGIKPAFITLHCGLGNFHDIEVEDLTKHKMDSEEMHITAEACKVVNETKEAGHHVCAVGASVVKATESAVGTDGFLKEYDGWTNKFIFPPYDFGLADSMLVNFYHPYSTLLMITAAFGGYDLVMEAYDKAVKGGYKFGCFGDSLLILND

SEQ ID NO: 70578 - protein, 397 aa, Prevotella dentalis
  misc_feature (1)..(397): tr|F9D458|F9D458_PREDD S-adenosylmethionine:tRNA ribosy ltransferase-isomerase OS=Prevotella dentalis (strain A TCC 49559 / DSM 3688 / JCM 13448 / NCTC 12043 / ES 2772 ) OX=908937 GN=queA PE=3 SV=1
MKLSQFKFKLPESQVALYPHSFEREFTNDDGTKGSFRVTRRDEARLMVLHRTTGEIELFHKDAKGNPVEGQYLDFRNVLDYFDEGDTFILNDTKVFPARLYGTKEKTDAKIEVFILRELNEETHLWDVLVEPARKIRIGNKLFFDEVGTMVAEVYDNTTSRGRSLRFLYDCPHEQFKRDLFALGEAPLPAYILNGRPEDPKMSGMHVRSHATAEDMENFQCVFARNEGAVTAPATGLHFSRELLKRMEIKGINAAFITLHCGLGNFTPIEVEDLTKHKMDSEQMMIGREACDLVNRTKRAGRHVCAVGTSVVKATETAVGTDGLLKEYDGWTSKFIFPPYDFGLADTMIANFYHPESTLMMSTAAFGGYDNVMRCYDLAVKHGYMFGCFGDSLLIVD

SEQ ID NO: 70579 - protein, 421 aa, Prevotella dentalis
  misc_feature (1)..(421): tr|F9D6M7|F9D6M7_PREDD S-adenosylmethionine:tRNA ribosy ltransferase-isomerase OS=Prevotella dentalis (strain A TCC 49559 / DSM 3688 / JCM 13448 / NCTC 12043 / ES 2772 ) OX=908937 GN=queA2 PE=3 SV=1
MDTKHIHITDYQYNLPDERIAKFPLARRDHSKLLVYRHGELTDDVFCQLPHYLPQGALMVFNNTRVIQARMHFRKETGALIEVFLMEPAQPADYEQMFQTTGRCSWLCMVGNLKKWKEGPLRRDFDVKGRHLTLTATIDRDRAAQTSGGTNYWVDFGWDNAQVSFAEILETVGELPIPPYLNRATEESDKTTYQTVYSKIKGSVAAPTAGLHFTDDVLAALDAHGIVRDEVTLHVGAGTFKPVKSEEIESHSMHTEYIVVHRHTFERLLAHGCRAIAVGTTSVRTLESLYYMGVKLLLRPGAAEADLHVGQWEPYDLPHNADGLVMAGDEPVSPRRAIQAILDYLDRDGLEALHSSTQIIIAPGYAYKMVQMLVTNFHQPQSTLLLLVSAFLGGDWRRVYDYALAHDFRFLSYGDSSLLIP

SEQ ID NO: 70580 - protein, 436 aa, Prevotella denticola
  misc_feature (1)..(436): tr|F2KZK4|F2KZK4_PREDF S-adenosylmethionine:tRNA ribosy ltransferase-isomerase OS=Prevotella denticola (strain F0289) OX=767031 GN=HMPREF9137_1252 PE=3 SV=1
MRHSVPSYQYKKIMSEDTKHICISDYNYPLPDARIAKFPLSERDHSKLLLYKHGEVSEDKFYQLPEYLPKGALMVFNNTKVIQARMHFRKETGALIEVFLMEPAQPTDYELMFQTNHACAWLCMVGNLKKWKEGALRRTFEIKGHKLTLTATMDRSKVQEQAGGTNHWVNFEWDNTNVSFAEILEAVGELPIPPYLNRATEESDKETYQTVYSKIKGSVAAPTAGLHFTDKVLEALDEHGIDREELTLHVGAGTFKPVKSHEIEGHSMHTEFIVVRRQTLEKLLKHGCRAIAVGTTSVRTLESLYYMGVKLVSDPETAEKDLHVNQWEPYDLPHNAEGLVETDGKVITVEDAVRHLLAYLDRDGLNALHSSTQIIIAPGYTYKLVKALVTNFHQPQSTLLLLVSAFVKGDWRKIYDYALGHDFRFLSYGDSSLLIP

SEQ ID NO: 70581 - protein, 423 aa, Prevotella denticola
  misc_feature (1)..(423): tr|A0A347AX28|A0A347AX28_9BACT S-adenosylmethionine:tRN A ribosyltransferase-isomerase OS=Prevotella denticola OX=28129 GN=DYJ25_00830 PE=3 SV=1
MSEDTKHICISDYNYPLPDARIAKFPLSERDHSKLLLYKHGEVSEDKFYRLPEYLPKGALMVFNNTKVIQARMHFRKETGALIEVFLMEPAQPTDYELMFQTNHACAWLCMVGNLKKWKEGALRRAFKIKGHKLTLTATMDRSKVQEQAGGTNHWINFEWDNTNVSFAEILEAVGELPIPPYLNRATEESDKETYQTVYSKIKGSVAAPTAGLHFTEKVLEALDEHGIDREELTLHVGAGTFKPVKSHEIEGHSMHTEFIVVRRQTLEKLLKHGCRAIAVGTTSVRTLESLYYMGVKLVSDPETAEKDLHVNQWEPYDLPHNAEGLVETDGKVITVEDAVRHLLAYLDRDGLNALHSSTQIIIAPGYTYKLVKALVTNFHQPQSTLLLLVSAFVKGDWRKIYDYALGHDFRFLSYGDSSLLIP

SEQ ID NO: 70582 - protein, 430 aa, Prevotella disiens
  misc_feature (1)..(430): tr|U2J688|U2J688_9BACT S-adenosylmethionine:tRNA ribosy ltransferase-isomerase OS=Prevotella disiens JCM 6334 = ATCC 29426 OX=1235811 GN=HMPREF0653_01922 PE=3 SV=1
MFKIHKPMLDETKHIKISDYDYPLPDERIAKFPLNQRDQSKLLLYKHGEVSEDVFCNLPKYLPNGALMVFNNTKVIQARMHFRKETGALIEIFLMEPAQPTDYELMFQTNSECSWLCMIGNLKKWKEGELRRSFEINGNKLVLTASVDRSKASDLAGGTNHWVDFKWDNAKVSFAEILEAVGELPIPPYLNRETQESDKETYQTIYSKIKGSVAAPTAGLHFTDAVLEQLDKAGILRDELTLHVGAGTFKPVKSSEIEGHNMHTEYIVVHRHTLENLLSHDCSAIAVGTTSVRTLESLYYMGVKLERNANATEDDLHVNQWEPYAEDVTEDGFIKVNGQVVTVQRAIQNLLDYLKKDDLEALHSSTQIIIAPGFQYKIVKMLVTNFHQPQSTLLLLVSAFLHGDWHKVYDYALQHDFRFLSYGDSSLLIP

SEQ ID NO: 70583 - protein, 423 aa, Prevotella disiens
  misc_feature (1)..(423): tr|A0A096AR94|A0A096AR94_9BACT S-adenosylmethionine:tRN A ribosyltransferase-isomerase OS=Prevotella disiens DN F00882 OX=1401075 GN=HMPREF0654_04570 PE=3 SV=1
MLDETKHIKISDYDYPLPDERIAKFPLNQRDQSKLLLYKHGEVSEDVFCNLPKYLPNGALMVFNNTKVIQARMHFRKETGALIEIFLMEPAQPTDYELMFQTNSECSWLCMIGNLKKWKEGELRRSFEINGNKLVLTVSVDRSKASDLAGGTNHWVDFKWDNAKVSFAEILEAVGELPIPPYLNRETQESDKETYQTVYSKIKGSVAAPTAGLHFTDAVLAQLDKAGILRDELTLHVGAGTFKPVKSSEIEGHNMHTEYIVVHRHTLENLLSHDCSAIAVGTTSVRTLESLYYMGVKLERNANATEDDLHVNQWEPYDEDVTEDGFIKVNGQVVTAQRAIQNLLDYLKKDDLEALHSSTQIIIAPGFQYKIVKMLVTNFHQPQSTLLLLVSAFLHGDWHKVYDYALQHDFRFLSYGDSSLLIP

SEQ ID NO: 70584 - protein, 416 aa, Prevotella enoeca
  misc_feature (1)..(416): tr|A0A0S2KM12|A0A0S2KM12_9BACT S-adenosylmethionine:tRN A ribosyltransferase-isomerase OS=Prevotella enoeca OX= 76123 GN=AS203_07890 PE=3 SV=1
MTETKHIKISDYSYPLPENRIAKFPIPQRDHSKLLIYQHGNVSEDVFYHLPEYLPQGALMVFNNTKVIQARLHFRKETGALIEVFLLEPAQPTDYELMFQTTSHCAWLCMIGNLKKWKNGVLKRDFEINGHRLTLTATRQSPEMLSITGQTSGETYHWVDFQWDNDNVSFAEILEEVGELPIPPYLNRETQERDKTTYQTVYSKIKGSVAAPTAGLHFTDAVLAALDKRGIDREELTLHVGAGTFKPVKSEEIEGHRMHTEYICVHRQTLEKLLRHSGEAIAVGTTSVRTLESLYYIGLKLMRHPDASEAELHVNQWEPYEQPAQQVTPTDAIRAVLDYLDRNHLPALHTSTQIIIAPGYDYKIVKMLVTNFHQPQSTLLLLVSAFVKGDWRKIYDYALGHDFRFLSYGDSSLLIP

SEQ ID NO: 70585 - protein, 393 aa, Prevotella enoeca
  misc_feature (1)..(393): tr|A0A0S2KLT3|A0A0S2KLT3_9BACT S-adenosylmethionine:tRN A ribosyltransferase-isomerase OS=Prevotella enoeca OX= 76123 GN=AS203_09275 PE=3 SV=1
MKLSQFKFKLPEEQIALYPHSIIHSVTNDDGLEESVRVTRRDECRLMVLHRKSQTIDMYKKDKKGKPIEGEFLDFRNVLDYFDENDTFVFNDTKVFPARLYGMKEKTDSKIEVFLLRELNAEMRLWDVLVEPARKIRIGNKLFFDDSGTMVAEVIDNTTSRGRTLRFLYDCPHDEFKRELFALGAAPLPHYIIDHKDADGNLDRPATKEDLEDFQTIYAKNEGAVTAPVSGLHFSREMLKRMEIRGINFAYITLHCGLGNFRSIEVEDLTKHKMDSEQMIISAEACDIVNRTKAAGHHICAVGTSMVKAMETAAGTDGQLKEYDGWTNRFIFPPYDFNIADTMIANFYHPMSTLLMSTAAFGGYDLVMKAYELAVENGYKFGCYGDALLILDD

SEQ ID NO: 70586 - protein, 424 aa, Prevotella fusca
  misc_feature (1)..(424): tr|A0A0K1NM56|A0A0K1NM56_9BACT S-adenosylmethionine:tRN A ribosyltransferase-isomerase OS=Prevotella fusca JCM 17724 OX=1236517 GN=queA PE=3 SV=1
MSKDTKHICISDYNYSLPDERIAKFPLAERDQSKLLLYKHGEVSEDTFYNLPEHLPLGALMVFNNTKVIQARMHFRKETGALIEVFLMEPAEPTDYELMFQTNHECAWLCMVGNLKKWKEGTLKRAFEIKGNRLTLTATMNRSKMQEQAGGTNHWINFEWDNTNVSFAEILEAVGELPIPPYLNRATEESDKKTYQTVYSKIKGSVAAPTAGLHFTDRVLKALDEHGIDREELTLHVGAGTFKPVKSREIEGHSMHTEFIVVRRQTLEKLLAHDCRAIAVGTTSVRTLESLYYMGVKLVLDPESTEKDLHVNQWEPYDLPHNADGLVEVDGRVITAEESIRHLLAYLDKDGFEMLHSSTQIIIAPGYSYKIIKALVTNFHQPQSTLLLLVSAFVKGGNWHKIYDYALSHGFRFLSYGDSSLLIP

SEQ ID NO: 70587 - protein, 394 aa, Prevotella fusca
  misc_feature (1)..(394): tr|A0A0K1NIQ6|A0A0K1NIQ6_9BACT S-adenosylmethionine:tRN A ribosyltransferase-isomerase OS=Prevotella fusca JCM 17724 OX=1236517 GN=ADJ77_03870 PE=3 SV=1
MKLSQFKFNLPKEQVALYPHSSERVLTRTDGSTQTFTVTRRDEGRLMVLHRKSGKIEMFKGEVNGEPKEEDYIRFKDVFNYFDEGDAFIFNDTKVFPARLYGTKEKTDAKIEVFLLRELNQEMRLWDVLVEPARKIRIGNKLFFDESGTMVAEVIDNTTSRGRTLRFLYDCPHDEFKRELFALGEAPLPRYIIDNRPKEEGEEFAHATADDMEHFQSVFAKNEGAVSAPGTNIHFSEHMMKMMDIRGIKKAFITLHCGLGNFHDIEVEDLTKHKMDSEEMHINADACRIANGAKQAGHRLCAVGASVVKATETAVGTDGMLKEYDGWTNEFIFPPYNFGFADSMLVNFYHPYSTLLMETAAFGGYDLVMEAYDKAVENGYMFGCFGDSLLILND

SEQ ID NO: 70588 - protein, 423 aa, Prevotella histicola
  misc_feature (1)..(423): tr|A0A096BA43|A0A096BA43_9BACT S-adenosylmethionine:tRN A ribosyltransferase-isomerase OS=Prevotella histicola JCM 15637 = DNF00424 OX=1236504 GN=HMPREF2132_01535 PE= 3 SV=1
MSKDTKHICISDYNYPLPDERIAKFPLAERDHSKLLLYKHGVITEDVFYNLPNYLPKGALMVFNNTKVIQARMHFRKDTGALIEVFLMEPAQPTDYELMFQTNHQCAWFCMVGNLKKWKEGSLQREFEIKGHRLTLTATLDRVRSQEHGGGTNHWITFVWDNENISFAEILEVVGELPIPPYLNRATEESDKETYQTVYSKIKGSVAAPTAGLHFTEKVLSALDAHGVDREELTLHVGAGTFKPVKSHEIEGHNMHTEFIVVRRQTLEKLLKHNCKAIAIGTTSVRTLESLYYMGVKLVTNPDASENKLHVNQWEPYDLPHNQEGLVEVDGNVITVEDSIRRLLDYLEREDLMSLHSSTQIIIAPGYTYKIVNALVTNFHQPQSTLLLLVSAFVKGDWRKIYDYAIGHDFRFLSYGDSSLLIP

SEQ ID NO: 70589 - protein, 394 aa, Prevotella histicola
  misc_feature (1)..(394): tr|A0A095YWV8|A0A095YWV8_9BACT S-adenosylmethionine:tRN A ribosyltransferase-isomerase OS=Prevotella histicola JCM 15637 = DNF00424 OX=1236504 GN=HMPREF2132_06905 PE= 3 SV=1
MKLSQFKFNLPKDQVALYPHSSKRVLTRTDGSTQTFTVTRRDEGRLMVLHRKSGTIDMFKNEVKGEPKEEDYIRFKDVFDYFDEGDAFIFNDTKVFPARLYGTKEKTDAKIEVFLLRELNQEMRLWDVLVEPARKIRIGNKLFFDESGTMVAEVIDNTTSRGRTLRFLYDCPHEEFKRELFALGEAPLPRYIIDNRPKEEGEEFAHATAEDMENFQSVFARNEGAVSAPGTNIHFSEHMMKMMDIRGIHKSFITLHCGLGNFHDIEVEDLTKHKMDSEEMHINAEACRIANEAKQSGHRLCAVGASVVKATETAVGTDGMLKEYDGWTNEFIFPPYKFGFADSMLVNFYHPYSTLLMETAAFGGYELVMEAYDKAVKNGYMFGCFGDSLLILND

SEQ ID NO: 70590 - protein, 424 aa, Prevotella intermedia
  misc_feature (1)..(424): tr|A0A1P8JGN8|A0A1P8JGN8_PREIN S-adenosylmethionine:tRN A ribosyltransferase-isomerase OS=Prevotella intermedia ATCC 25611 = DSM 20706 OX=1122984 GN=BWX39_09300 PE=3 SV=1
MLEKTRHIKISDYDYPLPDERIAKFPLAQRDHSKLLLYKHGEVGEDVFCNLPTHLPKGALMVFNNTRVIQARMHFRKETGALIEIFLMEPAQPTDYELMFQTNARCSWLCMIGNLKKWKEGTLKRSFEINGNTLELTATVDRTKANAAAAGGTNHWVDFAWDNSKVSFAEILEAVGELPIPPYLNRNTQESDKQTYQTVYSKIKGSVAAPTAGLHFTNKVLAALDEAGIVRDELTLHVGAGTFKPVKSTEIEGHNMHTEYVVVHRHTLENLLSHGCSAIAVGTTSVRTLESLYYMGVKLERNPQAAEDELHVCQWEPYEQEHNADGLVIVNGTAVTVERALQNLLAYLDSNDLSALHSSTQIIIAPGFNYKIVKMLVTNFHQPQSTLLLLVSAFLKGDWHKVYDYALANNFRFLSYGDSSLLIP

SEQ ID NO: 70591 - protein, 395 aa, Prevotella intermedia
  misc_feature (1)..(395): tr|A0A0D9NJS4|A0A0D9NJS4_PREIN S-adenosylmethionine:tRN A ribosyltransferase-isomerase OS=Prevotella intermedia ZT OX=1347790 GN=M573_102059 PE=3 SV=1
MKLSQFKFNLPNEQVALYPHSSERVLNRADGTSQVFKVTRRDEARLMVVHKKSGTIDMYNNKKIKGEPKEEDYIRFKDVVNYFDEGDTFIFNDTKVFPARLYGTKEKTDAKIEVFLLRELNQEMRLWDVLVEPARKIRIGNKLFFDESGSMVAEVIDNTTSRGRTLRFLYDCSHEEFKRELYALGEAPLPRYIIDNRPKGADEDFAHADADDLENFQTVFAKHEGAVTAPGTNLHFSEHLMKMMEIKGIQAAYITLHCGLGNFHDIEVEDLTKHKMDSEEMHISAEACKIVNETKAANHRVCAVGASVVKATETAVGTDGMLKEYDGWTNKFIFPPYDFGLADSMLVNFYHPYSTLLMETAAFGGYDLIMEAYDKAVKAGYKFGCFGDALLILND

SEQ ID NO: 70592 - protein, 423 aa, Prevotella jejuni
  misc_feature (1)..(423): tr|A0A2K9HB39|A0A2K9HB39_9BACT S-adenosylmethionine:tRN A ribosyltransferase-isomerase OS=Prevotella jejuni OX= 1177574 GN=CRM71_10430 PE=3 SV=1
MSEDTKHICITDYNYPLPDERIAKFPLTERDHSKLLLYKHGEVSENIFYNLPEYLPKGALMVFNNTKVIQARMHFRKETGALIEVFLMEPAQPTDYELMFQTNHECAWLCMVGNLKKWKEGALKRAFEIKGHKLTLTATMDRSKVHEQAGGTNHWIHFEWDNANISFAEILEAVGELPIPPYLNRATEESDKETYQTVYSKIKGSVAAPTAGLHFTDKVLNALDEYGIDREELTLHVGAGTFKPVKSHEIEGHSMHTEYVVVRRQTLEKLLQHNCNAVAVGTTSVRTLESLYYMGVKLVSAPDMAEKDLHVNQWEPYDLPHNEEGLVEVNGKAVSVDEAIRNLLTYLDRDGLNALHSSTQIIIAPGYSYKIVKALVTNFHQPQSTLLLLVSAFLKGDWRKVYDYALSHDFRFLSYGDSSLLIP

SEQ ID NO: 70593 - protein, 394 aa, Prevotella jejuni
  misc_feature (1)..(394): tr|A0A2K9H9G6|A0A2K9H9G6_9BACT S-adenosylmethionine:tRN A ribosyltransferase-isomerase OS=Prevotella jejuni OX= 1177574 GN=CRM71_02735 PE=3 SV=1
MKLSQFKFNLPKEQVALYPHSSERVLTRTDGSTQTFTVTRRDEGRLMVLHRKSGKIDMFKADIDGEPTEEDYIRFKDVFNYFDEGDAFIFNDTKVFPARLYGTKEKTDAKIEVFLLRELNQEMRLWDVLVEPARKIRIGNKLFFDESGTMVAEVIDNTTSRGRTLRFLYDCPHDEFKRELFALGEAPLPRYVIDNRPKEDGEEFAHATADDMENFQSVFAKHEGAVSAPGTNIHFSEHMMKMMDIKGIKKAFITLHCGLGTFHDIEVEDLTKHKMDSEEMHINADACRIANGAKQAGHHICAVGASVVKATETAVGTDGMIKEYDGWTNEFIFPPYNFGFADSMLVNFYHPYSTLLMETAAFGGYDLVMEAYDKAVRNGYMFGCFGDSLLILND

SEQ ID NO: 70594 - protein, 407 aa, Prevotella loescheii
  misc_feature (1)..(407): tr|A0A069QGG4|A0A069QGG4_PRELO S-adenosylmethionine:tRN A ribosyltransferase-isomerase OS=Prevotella loescheii DSM 19665 = JCM 12249 = ATCC 15930 OX=1122985 GN=HMPREF 1991_02033 PE=3 SV=1
MNTKHIRIKDYNYDLPDKRIAKFPLPERDKSKLLVYNHGEVSQDVFSNITHYLPQGALMVFNNTKVIQARLHFRKETGSLIEIFLLEPALPADYEQMFQTTGACSWYCLVGNLKKWKGGPLTTTVEMPGQPSVQLSAERDMSCETALKIDFKWTGDDKLSFAELIDKVGELPIPPYLNRNTQESDKTTYQTVYSKIKGSVAAPTAGLHFTQKVLADIDQHGIDREELTLHVGAGTFKPVKSEEIEGHAMHTEYVCIRRSTLEKLLQHNCEAVAVGTTSVRTLESLYYMGCKVKANPNVSLDQLHVNQWEPYASTTTTITPAEAIGELIAYMDRNNLPSLHSSTQIIIAPGYQYKIVKRLITNFHQPQSTLLLLVSAFVGGDWKSIYRYALDNDFRFLSYGDSSILIP

SEQ ID NO: 70595 - protein, 388 aa, Prevotella loescheii
  misc_feature (1)..(388): tr|A0A069QKL4|A0A069QKL4_PRELO S-adenosylmethionine:tRN A ribosyltransferase-isomerase OS=Prevotella loescheii DSM 19665 = JCM 12249 = ATCC 15930 OX=1122985 GN=HMPREF 1991_00723 PE=3 SV=1
MKLSQFNFKLPQELIALYPHSVYHEIENEKGEKEMSRLTRRDECRLMVLHKKSNTIDLFKKDKKGKPIKGEFIQFRDIIDYFDEGDTFIFNDTKVFPARLYGMKEKTDAKIEVFLLRELNQEMRLWDVLVEPARKIRIGNKLFFDDSGTMVAEVIDNTTSRGRTLRFLYDCDHDEFKRSLFALGESPLPRYIIDARENHHGTEEDMEDFQTIYAANEGAVTAPATGLHFSRELLKRMEIRGINSAAITLHCGLGNFHDIEVEDLTKHKVDSESMHIGSEACAIVNKAKSEGKHICAVGTSVVKATETAVGTDGMLKEYSGWTNRFIFPPYDFGLADTMVANFYHPLSTLLMSTAAFGGYDLVMEAYRLAVENEYKFGCFGDALLILND

SEQ ID NO: 70596 - protein, 388 aa, Prevotella maculosa
  misc_feature (1)..(388): tr|H1HM90|H1HM90_9BACT S-adenosylmethionine:tRNA ribosy ltransferase-isomerase OS=Prevotella maculosa OT 289 OX =999422 GN=HMPREF9944_01344 PE=3 SV=1
MKLSQFKFNLEQEQVALYPHSFTRTFKNEDGTTDSFQVTRQDECRLMVLHKRSGKIDMFKKDAEGNPIEGAFLDFRNILDYFDEGDTFIFNDTKVFPARLYGTKEKTDAKIEVFLLRELNPEMRLWDVLVEPARKIRIGNKLFFDETGTMVAEVIDNTTSRGRTLRFLYDCDHDEFKRELFALGEAPLPRYVIDNRKEPHATATDLADFQTVFAKHEGAVTAPATGLHFSRELLKRMEIRGIHDAYITLHCGLGNFNPIEVEDLTKHKIDSEKMVISAKACARVNQTKRERHHVLAVGVSVVKATETAVGTDGMLKEYDGWTNKFIFPPYDFGLADSMVANFYHPLSTLLMATAAFGGYDAVMECYRLASENGYMFGCYGDALLILDD

SEQ ID NO: 70597 - protein, 416 aa, Prevotella maculosa
  misc_feature (1)..(416): tr|H1HIR8|H1HIR8_9BACT S-adenosylmethionine:tRNA ribosy ltransferase-isomerase OS=Prevotella maculosa OT 289 OX =999422 GN=HMPREF9944_00062 PE=3 SV=1
MDTKHIKTGDYDYALPDERIAKFPLARRDHSKLLIYEHGKVYEDIFYNLPDHLPKHALMVFNNTRVIQARMHFRKETGALIEVFLMEPAAPTDYEQMFQTKGKCSWLCMIGNLKKWKEGALKHEFAIKGEPLTLSVTMNREKSVHHATGTNYRVDFTWDNTNISFAEILEAVGELPIPPYLNRETQESDKITYQTVYSKIKGSVAAPTAGLHFTDEVLKAIDNRAIEREEVTLHVGAGTFKPVKSKEIEGHEMHTEYVVVHRHTLESLLKHDCKAIAVGTTSVRTLESLYYIGVKLASNPDATEEELHVNQWEPYEDEREGKTVKYIMPTEAIQNIIDWLDRSGTEVLHGSTQIIIAPGYEYKIVKMLITNFHQPQSTLLLLVSAFVNGDWKKIYDYALHNGFRFLSYGDSSLLIP

SEQ ID NO: 70598 - protein, 439 aa, Prevotella marshii
  misc_feature (1)..(439): tr|E0NQI6|E0NQI6_9BACT S-adenosylmethionine:tRNA ribosy ltransferase-isomerase OS=Prevotella marshii DSM 16973 = JCM 13450 OX=862515 GN=queA PE=3 SV=1
MFRNGSTGKKWKVENRLPITYRHRDYSNRKRYYTTKGFHIYMKLSQFNFKLTDDKVALYPHTDEHRVTNAEGKKSVFKVKRRDECKLMVLHRKSQKIDMYKTDKDGKPLKDKKKKPVFLDFRNILDYFDEGDAFIFNDTKVFPARLYGTKEKTDAKIEVFLLRELNAEMRLWDVLVEPARKIRIGNKLFFDDSGTMVAEVIDNTTSRGRTLRFLYDCPHEEFKRELYALGEAPLPRYIIDHKDKDGNPDRPTLEEDFEDFQCVFAKNEGAVTAPATGLHFSRELMKRMEIKGINFAFITLHCGLGNFNNIEVEDLTKHKMESEQMYIGAEACRTVNEAKKTGHRICAVGSSVIKATETAVGPDGQLKEYDGWTSKFIFPPYEFGLADTMVANFYHPLSTLLMATAAFGGYDLVMEAYDLALKNDYKFGCYGDAMLILND

SEQ ID NO: 70599 - protein, 406 aa, Prevotella marshii
  misc_feature (1)..(406): tr|E0NQN3|E0NQN3_9BACT S-adenosylmethionine:tRNA ribosy ltransferase-isomerase OS=Prevotella marshii DSM 16973 = JCM 13450 OX=862515 GN=queA PE=3 SV=1
MEMDTKHIRIADYNYLLPEERIAKYPVTPRDHSKLLVYRHGAITEEKFYRLPQLLPQGALMVYNNTKVIQARIHFRKDTGAQIEVFLLEPLTPADYELMFQSRRRCTWLCLVGNLKKWKEGTLTRTLSIQGEPFTLTATREEAMRSGHRITFEWDNPRVSFAEILEAVGELPIPPYLNRATQESDKQTYQTVYSKIKGSVAAPTAGLHFTNDVLQALDTAGIEREEVTLHVGAGTFKPVKAEEIEGHEMHTEYICVHQETLEKLIMHKGHAIAVGTTSVRTLESLYYIGLKLKANPQLSEEELHVNQWEPYEQEATLTPVEAIIRVLDYLYRNQLKTLHTSTQIIIAPGYEYKIVKMLITNFHQPQSTLLLLVSAFVKGDWRRIYDYALDHDFRFLSYGDSSLLIP

SEQ ID NO: 70600 - protein, 394 aa, Prevotella melaninogenica
  misc_feature (1)..(394): tr|A0A250KG72|A0A250KG72_9BACT S-adenosylmethionine:tRN A ribosyltransferase-isomerase OS=Prevotella melaninoge nica OX=28132 GN=queA PE=3 SV=1
MKLSQFKFNLPKEQVALYPHSSERVLTRTDGSTQTFTVTRRDEGRLMVLHRKSGKIDMFKGEVNGEPKEEDYIRFKDVFNYFDEGDAFIFNDTKVFPARLYGTKEKTDAKIEVFLLRELNQEMRLWDVLVEPARKIRIGNKLFFDESGTMVAEVIDNTTSRGRTLRFLYDCPHDEFKRELFALGEAPLPRYIIDNRPKEDGEEFAHATADDMEHFQSVFAKNEGAVSAPGTNIHFSEHMMKMMDIKGIKKAFITLHCGLGNFHDIEVEDLTKHKMDSEEMHINADACRIANGAKKAGHHLCAVGASVVKATETAVGTDGMLKEYDGWTNEFIFPPYNFGFADSMLVNFYHPYSTLLMETAAFGGYDLVMEAYDMAVKNGYKFGCFGDSLLILND

SEQ ID NO: 70601 - protein, 423 aa, Prevotella melaninogenica
  misc_feature (1)..(423): tr|D3I404|D3I404_9BACT S-adenosylmethionine:tRNA ribosy ltransferase-isomerase OS=Prevotella melaninogenica D18 OX=575612 GN=queA PE=3 SV=1
MSEDTKHISISDYNYPLPDERIAKFPLTERDHSKLLLYKHGEVSEDIFYNLPEYLPKGALMIFNNTKVIQARMHFRKETGALIEVFLMEPAQPTDYELMFQTNHECAWLCMVGNLKKWKEGALKRAFEIKGHKLTLTATMDRSKVQEQAGGTNHWIQFEWDNTNISFAEILEAVGELPIPPYLNRATEESDKETYQTVYSKIKGSVAAPTAGLHFTDKVLKALDEHGVDREELTLHVGAGTFKPVKSQEIEGHNMHTEFVVVRRQTLEKLLKHKCHAVAVGTTSVRTLESLYYMGVKLVLSPETAEKDLHVNQWEPYDLPHNEEGLVVVNGKVITAEESIRHLLAYLDKDGLNVLHSSTQIIIAPGYTYKIVKALVTNFHQPQSTLLLLVSAFLKGDWRKVYDYALSHDFRFLSYGDSSLLIP

SEQ ID NO: 70602 - protein, 416 aa, Prevotella micans
  misc_feature (1)..(416): tr|H1Q1K8|H1Q1K8_9BACT S-adenosylmethionine:tRNA ribosy ltransferase-isomerase OS=Prevotella micans F0438 OX=88 3158 GN=queA PE=3 SV=1
MLTDSKHIKIVDYDYSLPEERIAKHPIAQRDRSKLLVYRKGTITHDSFRNLPKYLPKGALMVFNNTRVIQARMHFRKETGALIEIFLMEPVRPADYERVFQSNGQCSWLCMVGNLKKWKDGRLKRIVDIKGTSAVLSASINGTSGSMQSIDFEWDGRFSFAEVLEAVGELPIPPYLNRETQESDKTDYQTVYSKINGSVAAPTAGLHFSSEVLDALDSRGIEREELTLHVGAGTFKPVKSAEIAGHQMHSEYVVVRRHTLERLIAHQSHAIAVGTTSVRTLESLYYMGVKLEINPDTTQHNLHVSQWEPYDLEHNEAGLVVVRNRAVSVEKSLRNLLNCLERDGSEALHSSTQIIIAPGYRYKIVDMLVTNFHQPKSTLLLLVSAFVKGDWRQIYNYALRHDFRFLSYGDSSLLIP

SEQ ID NO: 70603 - protein, 394 aa, Prevotella micans
  misc_feature (1)..(394): tr|H1Q2M7|H1Q2M7_9BACT S-adenosylmethionine:tRNA ribosy ltransferase-isomerase OS=Prevotella micans F0438 OX=88 3158 GN=HMPREF9140_01165 PE=3 SV=1
MKLSQFNFTLPEEQVALYPHVSERIHKLADGTTKTFKVTRRDEARLMVLHRKSQKIDKFKRDSRGRIKKGEYIRFKDALDYFTEGDTFVLNDTKVFPARLYGTKEKTDAKIEVFLLRELNADMRLWDVLVEPARKIRIGNKLFFDDTGSMVAEVIDNTTSRGRTLRFLYDCSHEEFKRELFTLGEAPLPRYIIDKRPKADDEQFAHADADDIINFQTVFAANEGAVTAPGTNLHFSEQMMKIMELRGMGTAFVTLHCGLGNFHEIEVEDLTKHKMDSEEMHINAKACEVVNRAKRAGKHICVVGASMLKATETAVGTDKMLKEYDGWTNKFIFPKYEFGLADTMLVNFYQPFSTALMATAAFAGYDLVMEAYNQAVQDGYRFGCFGDSILILDD

SEQ ID NO: 70604 - protein, 423 aa, Prevotella multiformis
  misc_feature (1)..(423): tr|F0F5E2|F0F5E2_9BACT S-adenosylmethionine:tRNA ribosy ltransferase-isomerase OS=Prevotella multiformis DSM 16 608 OX=888743 GN=tgt PE=3 SV=1
MAEDTKHICISDYSYPLPDSRIAKFPLAERDHSKLLLYRHGEVSEDTFYRLPEYLPEGALMVFNNTKVIQARMHFRKETGALIEVFLMEPARPTDYELMFQTNHACAWLCMVGNLKKWKEGSLKRVFEIKGHRLTLTAAMDRSREQELAGGTHHWISFEWDNTNVSFAEILEAVGELPIPPYLNRATEESDKETYQTVYSKVKGSVAAPTAGLHFTDKVLKSLDGHGIDREELTLHVGAGTFKPVKSREIEGHSMHTEFVVVRRQTLEKLLKHGCCAIAVGTTSVRTLESLYYMGVKLVSDPDAAEKDLHVDQWEPYDLPHNAEGLVEVDGRAVTVEDAVRQLLAYLDRDGLDVLHSSTQIIIAPGYDYKIVKILVTNFHQPQSTLLLLVSAFVKGDWRKIYDYALSHEFRFLSYGDSSLLIP

SEQ ID NO: 70605 - protein, 394 aa, Prevotella multiformis
  misc_feature (1)..(394): tr|F0F6H2|F0F6H2_9BACT S-adenosylmethionine:tRNA ribosy ltransferase-isomerase OS=Prevotella multiformis DSM 16 608 OX=888743 GN=queA PE=3 SV=1
MKLSQFKFNLPKEQVALYPHSSDRVLTRSDGSTQTFTVTRRDEGRLMILHRKSGRIDMFKGDVKGEPKEEDFIRFKDVLDYFDEGDAFIFNDTKVFPARLYGTKEKTDAKIEVFLLRELNQEMRLWDVLVEPARKIRIGNKLFFDESGTMVAEVIDNTTSRGRTLRFLYDCPHDEFKRELYALGEAPLPRYIIDNRPKEKGAEFAHASADDMENFQSVFAKNEGAVSAPGTNIHFSEQMMKMMDIRGIKKAFITLHCGLGTFHDIEVEDLTKHKMDSEEMHINADACRIANGAKQAGHHLCAVGASVVKATETAVGTDGMMKEYDGWTNEFIFPPYNFGFADSMLVNFYHPYSTLLMETAAFGGYELVMEAYDKAVKNGYMFGCFGDSLLILDD

SEQ ID NO: 70606 - protein, 397 aa, Prevotella multisaccharivorax
  misc_feature (1)..(397): tr|F8N9P4|F8N9P4_9BACT S-adenosylmethionine:tRNA ribosy ltransferase-isomerase OS=Prevotella multisaccharivorax DSM 17128 OX=688246 GN=Premu_1257 PE=3 SV=1
MKLSQFNFNLPQDLVALYPHSIEREFVNDEGAKESFRVFRRDESRLMVLHRTTGEIELFKKDTKGQPVEGDYLDFRNVLDYFGEDDTFVLNDTKVFPARLYGTKEKTDAKIEVFILRELNEETHLWDVLVEPARKIRIGNKLFFDDAGVMVAEVYDNTTSRGRSLRFLYDCPHDQFVHDLYALGECPLPTYILNNRPVEPGMENMHVHSHATKEDMENFQTIYARNVGAVTAPATGLHFSRELMKRMEIKGINTAFITLHCSLSNFSKIEVEDLSKHKMDSEAMIVNKECCDIVNKTKDAGHHICAVGCSVAKATETATGTDGYLKEYDGWTSKFIFPPYDYQLADTMIANFYHPESTLVMATAAFGGYENVMECYRLAVKHGYKFGCFGDSLLIVD

SEQ ID NO: 70607 - protein, 421 aa, Prevotella multisaccharivorax
  misc_feature (1)..(421): tr|F8NBN9|F8NBN9_9BACT S-adenosylmethionine:tRNA ribosy ltransferase-isomerase OS=Prevotella multisaccharivorax DSM 17128 OX=688246 GN=Premu_2647 PE=3 SV=1
MNTKHIRIDDYSYDLPEDRIAKFPLQARDHSKLLIYNKGALSDDLFFNLPHYLPQGALMVFNNTRVIQARLHFRKETGALIEVFLMEPAQPADYEQMFQSTGHCSWLCMIGNLKKWKEGTLKRVFEIKGHRLTLTASMDRSKSVEKSGGSNYWVEFVWDNDQVNFAEILDAVGELPIPPYLNRKTEESDKTTYQTVYSKIKGSVAAPTAGLHFTDKVLKDLDNYGVLRDEVTLHVGAGTFKPVKTEEIEGHKMHSEYIVVHRHTFEHLLEHDCWAIAVGTTSVRTLESLYYIGVKLLSNPNATEEDLHVNQWEPYDLPHTDEGCVLVDGRAVSVHDAIQAILDYLDRDGLEALHTSTQIIIAPGYTYKIVKMLVTNFHQPKSTLLLLVSAFLKGDWRKVYDYALSHNFRFLSYGDANLLIP

SEQ ID NO: 70608 - protein, 395 aa, Prevotella nigrescens
  misc_feature (1)..(395): tr|A0A246ENT0|A0A246ENT0_9BACT S-adenosylmethionine:tRN A ribosyltransferase-isomerase OS=Prevotella nigrescens OX=28133 GN=CBG57_05395 PE=3 SV=1
MKLSQFKFNLPEEQVALYPHSSERVLNRADGTSQVFKVTRRDEARLMVVHKKSETIDMYNNKKIKGEPKEEDYIRFKDVVNYFDEGDTFIFNDTKVFPARLYGTKEKTDAKIEVFLLRELNQEMRLWDVLVEPARKIRIGNKLFFDESGAMVAEVIDNTTSRGRTLRFLYDCSHEEFKRELYALGEAPLPRYIIDNRPKGADEDFAHADADDLENFQTVFAKHEGAVTAPGTNLHFSEHLMKMMEIKGIHAAYITLHCGLGNFHDIEVEDLTKHKMDSEEMHISAEACKIVNETKAANHRVCAVGASVVKATETAVGTDGMLKEYDGWTNKFIFPPYDFGLADSMLVNFYHPYSTLLMETTAFGGYDLIMEAYDKAVKAGYKFGCFGDALLILND

SEQ ID NO: 70609 - protein, 395 aa, Prevotella nigrescens
  misc_feature (1)..(395): tr|F9D7X5|F9D7X5_9BACT S-adenosylmethionine:tRNA ribosy ltransferase-isomerase OS=Prevotella nigrescens ATCC 33 563 OX=997352 GN=queA PE=3 SV=1
MKLSQFKFNLPEEQVALYPHSSERVLNRADGTSQVFKVTRRDEARLMVVHKKSGTIDMYNNKKIKGEPKEEDYIRFKDVVNYFDEGDTFIFNDTKVFPARLYGTKEKTDAKIEVFLLRELNQEMRLWDVLVEPARKIRIGNKLFFDESGAMVAEVIDNTTSRGRTLRFLYDCSHEEFKRELYALGEAPLPRYIIDNRPKGADEDFAHADADDLENFQTVFAKHEGAVTAPGTNLHFSEHLMKMMEIKGIHAAYITLHCGLGNFHDIEVEDLTKHKMDSEEMHISAEACKIVNETKAANHRVCAVGASVVKATETAVGTDGMLKEYDGWTNKFIFPPYDFGLADSMLVNFYHPYSTLLMETTAFGGYDLIMEAYDKAVKAGYKFGCFGDALLILND

SEQ ID NO: 70610 - protein, 388 aa, Prevotella oralis
  misc_feature (1)..(388): tr|E7RPV2|E7RPV2_9BACT S-adenosylmethionine:tRNA ribosy ltransferase-isomerase OS=Prevotella oralis ATCC 33269 OX=873533 GN=queA PE=3 SV=1
MKLSQFKFKLPEEQVALYPHSFERKFKNEDGTKETFRVTRRDESRLMVLHKKTQAIEMFKKDKKGKPIEGDYLDFRNILDYFDEGDTFIFNDTKVFPARLYGTKEKTDAKIEVFLLRELNEEMRLWDVLVEPARKIRIGNKLFFDDTSTMVAEVIDNTTSRGRTLRFLYDCPHEEFKRELFALGEAPLPRYIIDNRENHHAVKEDLENFQCIFAKHEGAVTAPATGLHFSRELMKRMEIRGINFAFITLHCGLGNFHEIEVEDLTKHKMDSEQMIIDAEACEVVNATKKGGHRICAVGTSVVKATETAVGTDGMLKEFSGWTNKFIFPPYDFGLANTMIANFYHPLSTLLMQTAAFGGYDLVMQAYEMAVENGYKFGCFGDSLLILDD

SEQ ID NO: 70611 - protein, 404 aa, Prevotella oralis
  misc_feature (1)..(404): tr|V8C2W5|V8C2W5_9BACT S-adenosylmethionine:tRNA ribosy ltransferase-isomerase OS=Prevotella oralis CC98A OX=10 73367 GN=queA PE=3 SV=1
MDTKHIHISDYNYQLPDERIAKFPISQRDHSKLLVYKHGKVSDDLFYNLPEYLPKGALMVFNNTKVIQARIHFRKETGALIEVFLLEPVDPTDYELMFQTSEHCSWLCMIGNLKKWKEGTLKRDFEINGHRLTLIAARKEEYGTGHWVDFSWNNNKVSFAEILETAGELPIPPYLNRDTQESDKTTYQTVYSKIKGSVAAPTAGLHFTDSVLKDLDTHGIDREELTLHVGAGTFKPVKSDEIEGHKMHTEYICVHRQTLEKLLKHDCQAIAVGTTSVRTLESLYYMGVYLAAHPDATEEELHVGQWTPYETKAALTPMEAIKNVLNYLDRNGLSALHSSTQIIIAPGYEYKIVKMLVTNFHQPQSTLLLLVSAFVHGDWRTIYDNALSHDFRFLSYGDSSLLIP

SEQ ID NO: 70612 - protein, 416 aa, Prevotella oris
  misc_feature (1)..(416): tr|D7NAL9|D7NAL9_9BACT S-adenosylmethionine:tRNA ribosy ltransferase-isomerase OS=Prevotella oris C735 OX=56300 8 GN=HMPREF0665_00037 PE=3 SV=1
METKHIKISEYDYVLPDERIAKFPLPQRDHSKLLIYEHGKVSDDVFFNLPKYLPQHALMVYNNTRVIQARMHFRKETGALIEVFLMEPAAPTDYELMFQTKGQCSWLCMIGNLKKWKEGSLKRDFDIKGEHLTLSVLLNYEKSAHGATGTNYWVDFSWDNANINFAEILEVVGELPIPPYLNRETEESDKLTYQTVYSKIKGSVAAPTAGLHFTDDVLRAIEARGIEREEVTLHVGAGTFKPVKSKEIYGHEMHTEYIVVHRHTLVNLIKYECKAIAVGTTSVRTLESLYYMGVKLENNPDATEEELHVSQWEPYEREREGGLINGITPVHAIQNLIDWLDKAGVEVLHSSTQILIAPGYEYKIVKMLVTNFHQPQSTLLLLVSAFVKGDWRKIYDYALANNFRFLSYGDSSLLIP

SEQ ID NO: 70613 - protein, 416 aa, Prevotella oris
  misc_feature (1)..(416): tr|A0A3S4T5M8|A0A3S4T5M8_9BACT S-adenosylmethionine:tRN A ribosyltransferase-isomerase OS=Prevotella oris OX=28 135 GN=queA_1 PE=3 SV=1
METKHIKISEYDYVLPDERIAKFPLPQRDHSKLLIYEHGKVSDDVFFNLPKYLPQHALMVYNNTRVIQARMHFRKETGALIEVFLMEPAAPTDYELMFQTKGQCSWLCMIGNLKKWKEGSLKRDFDIKGEHLTLSVLLNYEKSAHSATGTNYWVDFSWDNANINFAEILEVVGELPIPPYLNRETEESDKLTYQTVYSKIKGSVAAPTAGLHFTDDVLRAIEARGIEREEVTLHVGAGTFKPVKSKEIYGHEMHTEYIVVHRHTLVNLIKYECKAIAVGTTSVRTLESLYYMGVKLENNPDATEEELHVSQWEPYEKEREGGLINGITPVHAIQNLIDWLDKAGVDVLHSSTQILIAPGYEYKIVKMLVTNFHQPQSTLLLLVSAFVKGDWRKIYDYALANNFRFLSYGDSSLLIP

SEQ ID NO: 70614 - protein, 388 aa, Prevotella oulorum
  misc_feature (1)..(388): tr|G1WBT3|G1WBT3_9BACT S-adenosylmethionine:tRNA ribosy ltransferase-isomerase OS=Prevotella oulorum F0390 OX=7 02438 GN=HMPREF9431_01284 PE=3 SV=1
MKLSQFKFNLPQELIALYPHSFTREFKHEDGSVERFHVTRRDECRLMVLHTKSGEIELFHKDADGKPIEGDYLDFRNLLDYFDEGDTFIFNDTKVFPARLYGTKEKTDAKIEVFLLRELNAEMRLWDVLVEPARKIRIGNKLFFDDTGSMVAEVIDNTTSRGRTLRFLYDCDHEEFKRELYSLGEAPLPRYVIDYREDHHATAEDLEQFQTVFAQAEGAVTAPATGLHFSRELMKRMEIRGIRHAFITLHCGLGTFNPIEVEDLTKHKMDSEQMLIHAEACRIVNAAKREGKRILSVGTSVVKATETAVGTDGMLKEYDGWTNKFIFPPYDFGLSNAMVANFYHPLSTLLMETAAFGGYDAVMECYRLAVEHGYKFGCYGDALLILND

SEQ ID NO: 70615 - protein, 416 aa, Prevotella oulorum
  misc_feature (1)..(416): tr|A0A1T4PGF7|A0A1T4PGF7_9BACT S-adenosylmethionine:tRN A ribosyltransferase-isomerase OS=Prevotella oulorum OX =28136 GN=SAMN02745202_01429 PE=3 SV=1
MDTKHIKISDYQYCLPDARIAKFPLAQRDHSKLLVYRKGEISESQFFNLPTFLPRHSLMVYNNTRVIQARMHFRKATGALIEVFLMEPAHPVDYERMFQSKGHCAWLCMIGNLKKWKEGVLKRNFDINGQTFTLTVERREDTVQTLGKGTNYWVDFRWDNAQINFADILEAVGELPIPPYLNRETEERDKITYQTVYSKIKGSVAAPTAGLHFTHEVLQAIQQRGIVEEEVTLHVGAGTFKPVKSESIDEHEMHSEYIVVHRHTLENLLHFHGEAIAVGTTSVRTLESLYYMGVKLAANPDATEEMLHVTQWEPYEAGRDGTWVDGISSEQAIRNVLDWLQRNNLEALHSSTQIIIAPGYHYKIVKMLITNFHQPQSTLLLLVSAFVHGDWRRIYDYALSHDFRFLSYGDSSLLIP

SEQ ID NO: 70616 - protein, 395 aa, Prevotella pallens
  misc_feature (1)..(395): tr|A0A379F314|A0A379F314_9BACT S-adenosylmethionine:tRN A ribosyltransferase-isomerase OS=Prevotella pallens OX =60133 GN=queA_1 PE=3 SV=1
MKLSQFKFNLPEEQVALYPHSSERVLNRADGTSQVFKVTRRDEARLMVVHKKSGTIDMYNKDIDGKEPTEEDYIRFKDVVNYFDEGDTFIFNDTKVFPARLYGTKEKTDAKIEVFLLRELNQEMRLWDVLVEPARKIRIGNKLFFDESGSMVAEVIDNTTSRGRTLRFLYDCSHEEFKRELYALGEAPLPRYIIDNRPKNAGEDFAHADADDLENFQTVFAKYEGAVTAPGTNLHFSEHLMKMLEIKGIHAAYITLHCGLGNFHDIEVEDLTKHKMDSEEMHISAEACKIVNETKQAGHHVCAVGASVVKATETAVGTDGMLKEYEGWTNKFIFPPYDFGLADSMLVNFYHPYSTLLMETAAFGGYDLVMEAYDKAVKAGYKFGCFGDALLILND

SEQ ID NO: 70617 - protein, 424 aa, Prevotella pallens
  misc_feature (1)..(424): tr|F9DKS8|F9DKS8_9BACT S-adenosylmethionine:tRNA ribosy ltransferase-isomerase OS=Prevotella pallens ATCC 70082 1 OX=997353 GN=tgt2 PE=3 SV=1
MLEDTKHIKISDYDYPLPDERIAKFPLSKRDHSKLLLYKHGEVGEDVFCNLPKYLPQNALMVFNNTRVIQARMHFRKETGALIEIFLMEPAQPTDYEQMFQTNQQCSWLCMIGNLKKWKEGTLKRAFQINGHDLVLTATVNRTKTNAAVAGGTNHWVDFVWDNCHVTFAEILEAVGELPIPPYLNRETEESDKQTYQTVYSKVKGSVAAPTAGLHFTQNVLHNIDKAGITRDELTLHVGAGTFKPVKSSEIEGHNMHSEYVVVHRHTIENLLSHNCKAIAVGTTSVRTLESLYYMGVKLERNSNATEDELHVEQWEPYEQEHNSNGLILVNGTPVSVERALQNLLSYLDNNGLTALHTSTQIIIAPGFTYKIVQMLVTNFHQPQSTLLLLVSAFLGGNWRKVYNYALENNFRFLSYGDSSLLIP

SEQ ID NO: 70618 - protein, 416 aa, Prevotella pleuritidis
  misc_feature (1)..(416): tr|U2L7D0|U2L7D0_9BACT S-adenosylmethionine:tRNA ribosy ltransferase-isomerase OS=Prevotella pleuritidis F0068 OX=1081904 GN=queA_1 PE=3 SV=1
MIETKHIKISDYDYPLPENRIAKYPIPQRDHSKLLFYKHGEVGEDVFYNLPEYLPQGALMVFNNTKVIQARMHFRKETGALIEVFLLEPAQPTDYELMFQTTKYCAWLCMVGNLKKWKDGSLIRSFDINGHELVLTATRRMSESLSMTGHKSADTYHWVDFEWDNDKVSFAEILEAVGELPIPPYLNRETQESDKTTYQTVYSKIKGSVAAPTAGLHFTDSVLAALDERGIEREELTLHVGAGTFKPVKSEEIEGHRMHTEYICVHRQILEKLLCHNGEAIAVGTTSVRTLESLYYIGLKLMHNSDASEADLHVNQWEPYEYQAVNVLPKEAIREVLDYLDRNHLPALHTSTQIIIAPGYDYKIVKMLVTNFHQPQSTLLLLVSAFVKGDWRKIYDYALAHDFRFLSYGDSSLLIP

SEQ ID NO: 70619 - protein, 393 aa, Prevotella pleuritidis
  misc_feature (1)..(393): tr|U2L025|U2L025_9BACT S-adenosylmethionine:tRNA ribosy ltransferase-isomerase OS=Prevotella pleuritidis F0068 OX=1081904 GN=queA_2 PE=3 SV=1
MKLSQFKFKLPEEQIALYPHSIIHSVTNDDGSEGLFRVTRRDECRLMVLHRKSQTIDMYKKDKKGKPIEGEFLDFRNVLDYFDENDTFVFNDTKVFPARLYGMKEKTDAKIEVFLLRELNAEMRLWDVLVEPARKIRIGNKLFFDDSGTMVAEVIDNTTSRGRTLRFLYDCPHDEFKRELFALGEAPLPHYIIDHKDADGNPDRPATKEDLDDFQTIYAKNEGAVTAPASGLHFSREMMKRMEIKGINFAYITLHCGLGNFHGIEVEDLTKHKMDSEQMIISAEACNTVNRTKEAGHRICAVGTSVIKATETAAGTDGLLKEYDGWTNRFIFPPYDFNIADAMIANFYHPLSTLLMSTAAFGGYDLVMKAYELAVENGYLFGCYGDALLIVDD

SEQ ID NO: 70620 - protein, 354 aa, Prevotella ruminicola
  misc_feature (1)..(354): tr|A0A1M7FBL4|A0A1M7FBL4_PRERU S-adenosylmethionine:tRN A ribosyltransferase-isomerase OS=Prevotella ruminicola OX=839 GN=queA PE=3 SV=1
MKLSQFKFKLPEEQIALEPPFHRDECKLMVLHRKSKRIESGLDFRNILDYFDEDDAFIFNDTKVFPARLYGTKEKTDAKIEVFLLRELNADQRLWDVLVEPARKIRIGNKLFFEEDGPMVAEVIDNTTSRGRTLRFLYDCPHDEFKQMLFGLGEAPLPRYIIDRRPATEEDMTNFQTIYAKNEGAVTAPATGLHFSRELMKRMEIKGINFAFITLHCGLGNFDAIEVEDLTKHKMSSEQMFIPAEACEIVNKAKEEGHRVCCVGVSTARATESAVGTDGMLKEFEGWTNKFIFPPYEFGLCNALIGNFYHPESPMMMTEASFAGYELLYEGYQRALKEGYKFGCYGDALLMLDD

SEQ ID NO: 70621 - protein, 354 aa, Prevotella ruminicola
  misc_feature (1)..(354): tr|A0A1H6JI07|A0A1H6JI07_PRERU S-adenosylmethionine:tRN A ribosyltransferase-isomerase OS=Prevotella ruminicola OX=839 GN=queA PE=3 SV=1
MKLSQFKFKLPEEQIALEPPFHRDECKLMVLHRKSKRIESGLDFRNILDYFDEDDAFIFNDTKVFPARLYGTKEKTDAKIEVFLLRELNADQRLWDVLVEPARKIRIGNKLFFEEDGPMVAEVIDNTTSRGRTLRFLYDCPHDEFKQMLFGLGEAPLPRYIIDRRPATEEDMTNFQTIYAKNEGAVTAPATGLHFSRELMKRMEIKGINFAFITLHCGLGNFDAIEVEDLTKHKMSSEQMFIPAEACEIVNKAKEEGHRVCCVGVSTARATESAVGTDGMLKEFEGWTNKFIFPPYEFGLCNALIGNFYHPESPMMMTEASFAGYDLLYEGYQRALKEGYKFGCYGDALLMLDD

SEQ ID NO: 70622 - protein, 388 aa, Prevotella saccharolytica
  misc_feature (1)..(388): tr|L1NFD7|L1NFD7_9BACT S-adenosylmethionine:tRNA ribosy ltransferase-isomerase OS=Prevotella saccharolytica F00 55 OX=1127699 GN=HMPREF9151_00833 PE=3 SV=1
MKLSQFSFNLPEEQIALYPHSVYHEIKDEKGKKQTVRVTRRDECRLMVLHRQSGTIDMFKQDKKKKPVKGDFLDFRNVLDYFDEGDTFIFNDTKVFPARLYGTKEKTDAKIEVFLLRELNAEMRLWDVLVEPARKIRIGNKLFFDDTSTMVAEVIDNTTSRGRTLRFLYDCPHDEFKRSLFALGETPLPRYIIDARDQHHDTKEDMEDFQCIFARNEGSVTAPASGLHFSREMLKRMEIRGINQAFITLHCGLGSFHNIEVEDLTKHKLDSEQMIIGAEACQIVNKTKTERKHICAVGTSVIKATETAVGTDGLLKEYDGWTNRFIFPPYDFGLADSMIANFYHPLSPLMMATAAFGGYDLVMEAYRLAVENGYMFGCYGDAMLIVND

SEQ ID NO: 70623 - protein, 407 aa, Prevotella saccharolytica
  misc_feature (1)..(407): tr|L1NJE8|L1NJE8_9BACT S-adenosylmethionine:tRNA ribosy ltransferase-isomerase OS=Prevotella saccharolytica F00 55 OX=1127699 GN=queA PE=3 SV=1
MNTKHIRIKDYNYDLPDERIAKFPLPQRDKSKLLVYNHGEVSQDEFSNITRYLPQGALMVFNNTKVIQARLHFRKETGSLIEIFLLEPALPADYEQMFQTTDACSWYCMVGNLKKWKGGPLTTTVEIAGQPAAVQLTAERDMSCETALKIDFKWTGNKLSFAELLDKAGELPIPPYLNRNTQESDKTTYQTVYSKIKGSVAAPTAGLHFTQRVLADIDQHGIDREELTLHVGAGTFKPVKSEEIEGHSMHTEYVCIHRTTLEKLLQHNCEAIAVGTTSVRTLESLYYMGCKVKANPNVSLEQLHVNQWEPYDQMPTNITPTEAIGELIAYMDRNNLPSLHSSTQIIIAPGYQYKIVKRLVTNFHQPQSTLLLLVSAFVGGDWKSIYRYALDNDFRFLSYGDSSILIP

SEQ ID NO: 70624 - protein, 388 aa, Prevotella salivae
  misc_feature (1)..(388): tr|E6MP16|E6MP16_9BACT S-adenosylmethionine:tRNA ribosy ltransferase-isomerase OS=Prevotella salivae DSM 15606 OX=888832 GN=queA2 PE=3 SV=1
MKLSQFKFNLAKEQVALYPHSFTRVFENEDGTKGSFQVTRRDECRLMVLHKRSGQIDMFKKDADGNPIEGEYLDFRNILDYFDKGDTFIFNDTKVFPARLYGTKEKTDAKIEVFLLRELNQEMRLWDVLVEPARKIRIGNKLFFDETGSMVAEVIDNTTSRGRTLRFLYDCDHEEFKRELFALGEAPLPRYVIDNRTEPHATPDDLVDFQTVFAKKEGAVTAPATGLHFSRELMKRMEIRGIHDAYLTLHCGLGNFNSIEVEDLTKHKMDSEQMVIDAEACAKVNQAKREGHHVLAVGVSVVKATETAVGTDGMLKEYDGWTNKFIFPPYDFHLADSMVANFYHPYSTLLMTTAAFGGYDAVMECYNLASENGYMFGCYGDALLIVDD

SEQ ID NO: 70625 - protein, 388 aa, Prevotella salivae; identical to SEQ ID NO: 70624
  misc_feature (1)..(388): tr|U2LDG6|U2LDG6_9BACT S-adenosylmethionine:tRNA ribosy ltransferase-isomerase OS=Prevotella salivae F0493 OX=1 395125 GN=queA_1 PE=3 SV=1

SEQ ID NO: 70626 - protein, 394 aa, Prevotella scopos
  misc_feature (1)..(394): tr|A0A1B1I8N5|A0A1B1I8N5_9BACT S-adenosylmethionine:tRN A ribosyltransferase-isomerase OS=Prevotella scopos JCM 17725 OX=1236518 GN=AXF22_06620 PE=3 SV=1
MKLSQFKFNLPKAQVALYPHSSERVLTRTDGSTQTFTVTRRDEGRLMVLHRKSGKIDMFKGEVNGEPKEEDYIRFKDVFNYFDEGDAFIFNDTKVFPARLYGTKEKTDAKIEVFLLRELNQEMRLWDVLVEPARKIRIGNKLFFDESGTMVAEVIDNTTSRGRTLRFLYDCPHDEFKRELFALGEAPLPRYIIDNRPKKDGEEFAHATADDMEQFQSVFAKNEGAVSAPGTNIHFSEHMMKMMDIKGIKKAFITLHCGLGNFHDIEVEDLTKHKMDSEEMHINADACRIANSAKQAGHRLCAVGASVVKATETAVGTDGMLKEYDGWTNEFIFPPYNFGFADCMLVNFYHPYSTLLMETAAFGGYDLVMEAYDKAVKNGYMFGCFGDSLLILND

SEQ ID NO: 70627 - protein, 425 aa, Prevotella scopos
  misc_feature (1)..(425): tr|A0A1B1IBV1|A0A1B1IBV1_9BACT S-adenosylmethionine:tRN A ribosyltransferase-isomerase OS=Prevotella scopos JCM 17725 OX=1236518 GN=AXF22_12745 PE=3 SV=1
MSEDTKHICISDYNYSLPDERIAKFPLAERDHSKLLLYKHGEVSEDIFYNLPEYLPTGALMVFNNTKVIQARMHFRKETGALIEIFLMEPAQPTDYELMFQTNHECAWLCMVGNLKKWKEGALKREFEIKGHKLTLTASMDREKVHEQAGGTNHWINFEWDNSNVSFAEILEAVGELPIPPYLNRATEESDKETYQTVYSKIKGSVAAPTAGLHFTDRVLRALDEHGIDCEELTLHVGAGTFKPVKSYEIEGHSMHTEFVVVRRQTLEKLLKHGYQAIAVGTTSVRTLESLYYMGVKLVLSPDTNEKELHVNQWEPYDLPHNSEGLVEKDGKVITVEDAIHHLLAYLDKGGLDVLHSSTQIIIAPGYSYKIVKALVTNFHQPQSTLLLLVSAFLKGDWRKVYDYALTHDFRFLSYGDSSLLIPKE

SEQ ID NO: 70628 - protein, 407 aa, Prevotella shahii
  misc_feature (1)..(407): tr|A0A318HZC8|A0A318HZC8_9BACT S-adenosylmethionine:tRN A ribosyltransferase-isomerase OS=Prevotella shahii DSM 15611 = JCM 12083 OX=1122991 GN=queA PE=3 SV=1
MDTKHIRIKDYNYDLPDERIAKFPLPQRDQSKLLVYNHGDISQDVFTNITRYLPQGALMVFNNTKVIQARLHFRKDTGSLIEIFLLEPALPADYEQMFQTTNACSWYCMVGNLKKWKTGALTTIVDIPGQPPVTLTAERDLSCDTALKIDFKWRGDDKLSFAELIDKVGELPIPPYLNRNTQESDKTTYQTVYSKVKGSVAAPTAGLHFTQRVLSDIDQHGIDREELTLHVGAGTFKPVKSDEIEGHAMHTEYVSVRLSTLEKLLKHNCEAIAVGTTSVRTLESLYYMGCKVMADANIALEKLHVNQWEPYAPTAINIKPAEAIGQLIAYMQRNNLPTLHSSTQIIIAPGYNYKIVKRLVTNFHQPQSTLLLLVSAFVGGNWKNIYRYALDNDFRFLSYGDSSILIP

SEQ ID NO: 70629 - protein, 388 aa, Prevotella shahii
  misc_feature (1)..(388): tr|A0A318I2K6|A0A318I2K6_9BACT S-adenosylmethionine:tRN A ribosyltransferase-isomerase OS=Prevotella shahii DSM 15611 = JCM 12083 OX=1122991 GN=EJ73_00159 PE=3 SV=1
MKLSQFNFKLPQELIALYPNSVYHEIHNEKGEKEMSRLTRRDECRLMILHKKSGTIDLYRKDKKGKPVKGDYLQFRDVIDYFDEGDTFIFNDTKVFPARLYGMKEKTDAKIEVFLLRELNQEMRLWDVLVEPARKIRIGNKLFFDDSGTMVAEVIDNTTSRGRTLRFLYDCDHDEFKRSLFALGESPLPRYIIDAREDHHGTEDDMEDFQTIYAQNEGAVTAPATGLHFSRELLKRMEIRGINSAFITLHCGLGNFHDIEVEDLTKHKVDSESMHIGAEACAIVNKAKAEGRRVCAVGTSVIKATETAVGTDGMLKEYTGWTNRFIFPPYDFGLADTMLANFYHPLSTLLMSTAAFGGYDLVMEAYRLAVENEYKFGCFGDALLILND

SEQ ID NO: 70630 - protein, 407 aa, Prevotella sp.
  misc_feature (1)..(407): tr|C9Q1A0|C9Q1A0_9BACT S-adenosylmethionine:tRNA ribosy ltransferase-isomerase OS=Prevotella sp. oral taxon 472 str. F0295 OX=619693 GN=queA PE=3 SV=1
MNTKHIRIKDYNYDLPDERIAKFPLPERDKSKLLVYNHGEVSQDVFSNITRYLPQGALMVFNNTKVIQARLHFRKETGSLIEIFLLEPALPADYEQMFQTTGACSWYCLVGNLKKWKSGPLTTTVEMPGQPSVQLSAERDMSCETALKIDFKWTGDDKLSFAELIDKVGELPIPPYLNRNTQESDKTTYQTVYSKIKGSVAAPTAGLHFTQKVLADIDQHGIDREELTLHVGAGTFKPVKSEEIEGHAMHTEYVCIRRSTLEKLLQHNCEAVAVGTTSVRTLESLYYMGCKVKANPNVSLDQLHVNQWEPYASTTTTITPAEAIGELIAYMDRNNLPSLHSSTQIIIAPGYQYKIVKRLITNFHQPQSTLLLLVSAFVGGDWKSIYRYALDNDFRFLSYGDSSILIP

SEQ ID NO: 70631 - protein, 388 aa, Prevotella sp.
  misc_feature (1)..(388): tr|R6VJ02|R6VJ02_9BACT S-adenosylmethionine:tRNA ribosy ltransferase-isomerase OS=Prevotella sp. CAG:474 OX=126 2926 GN=BN673_02277 PE=3 SV=1
MKLSQFKFKLPEEQIALYPHSIYHDFVDDNGNKVTSRITRRDECKLMVLHSKSQTIELYKKDADGNPIEGEYLDFRNVLDYFDEGDTFVFNDTKIFPARLYGTKEKTDAKIEVFLLRELNQEMRLWDVLVEPARKIRIGNKLFFDDSGTMVAEVFDNTTCRGRTLRFLYDCPHEEFKRELFALGEAPLPRYIIDRRDNHHGTAEDLEDFQCIFAKNEGGVTVPASGLHFSRELMKRMEIKGIETAFVTLHCGLGAFHDIEVEDLTKHKMDSEQMIITREACDRVNSAKAAGHHICAVGTSVVKATETAVGTDGLLKEYDGWTNKFIFPPYDFGLADTMIANFYHPYSTLLMETAAFGGYDLVMEAYNLALKHGFMFGCYGDAMLIMND

SEQ ID NO: 70632 - protein, 406 aa, Prevotella stercorea
  misc_feature (1)..(406): tr|A0A415GMX6|A0A415GMX6_9BACT S-adenosylmethionine:tRN A ribosyltransferase-isomerase OS=Prevotella stercorea OX=363265 GN=DW060_06175 PE=3 SV=1
METKHIHIKDYNYALPDERIAKFPLAQRDHSKLLLYKHGEVSEDTFCNIANHLPEGALMVFNNTRVIQARMHFRKATGALIEVFLLEPYAPADYEQMFQTRGECEWLCMIGNLKKWKGEVLQRTFDVNSESVTLKAERLEDVGKSYRVRFTWDNAEVSLAELLDAVGELPIPPYLNRETQESDKTTYQTVYSKVKGSVAAPTAGLHFTPEVLAAIDRRGIDREELTLHVGAGTFKPVKSEEIQDHEMHTEYVCVHRETLDKLIKHGAEAIAVGTTSVRTLESLYYMGVKLEQNMDLSEEELHVNQWEPYENEAAKGVTPMKALENIVAYLDKHGLRALHSSTQIIIAPGYEYKIVKMLVTNFHQPQSTLLLLVSAFLHGDWHKVYDYALAHDFRFLSYGDSSLLIP

SEQ ID NO: 70633 - protein, 388 aa, Prevotella stercorea
  misc_feature (1)..(388): tr|A0A415GL74|A0A415GL74_9BACT S-adenosylmethionine:tRN A ribosyltransferase-isomerase OS=Prevotella stercorea OX=363265 GN=DW060_07760 PE=3 SV=1
MKLSQFKFKLPEELIALYPHSIYREFENDNGEKETFRITRRDECRLMVLHKKSQTIEMYKKDDKGNPIEGEYLDFRNVLDYFGEHDTFIFNDTKVFPARLYGTKEKTDAKIEVFLLRELNEEMRLWDVLVEPARKIRIGNKLFFDDSGTMVAEVIDNTTSRGRTLRFLYDCPHDEFKRELYSLGEAPLPRYIVDRRPDKRSTEDDFDDFQCIFAKHEGAVTAPATGLHFSRELMKRMEIRGINFAYITLHCGLGNFHDIEVEDLTKHKMDSEQMRVDADCCKLVNDTKRAGHHVCAVGTSVVKATETAVGTDGMLKEYDGWTNKFIFPPYDFGLADSMISNFYHPYSTLLMETCAFGGYDLVMEAYNLAVKHGFKFGSYGDALLIVND

SEQ ID NO: 70634 - protein, 432 aa, Prevotella timonensis
  misc_feature (1)..(432): tr|A0A2N6Q6L1|A0A2N6Q6L1_9BACT S-adenosylmethionine:tRN A ribosyltransferase-isomerase OS=Prevotella timonensis OX=386414 GN=CJ232_04770 PE=3 SV=1
METKHIHISDYQYELPDERIAKFPIAQRDHSKLLIYNHGKVGEDVFYNLYEYLPQGALMIFNNTKVIQARMHFKKDTGALIEVFLMEPAMPADYEQIFQSKRHCAWYCMIGNLKKWKSGSLTRIYHINQKSVTLQVTRREPATDEHQPAQGLHATPSTHHWIDFDWDAEDVSFAEILESIGELPIPPYLNRETQESDKTTYQTVYSKIKGSVAAPTAGLHFTDSVLQSLDEHGIDREELTLHVGAGTFKPVKSEEIKGHAMHTEYICVHRQTLEKLLRHNVEAIAVGTTSVRTLESLYYMGVFLETHPDATEEELHVKQWAPYERLHTDGQVEHLDGGLIDNISPKQAIQNVLDYLVRNELESLHSSTQIIIAPGYQYKIVKMLITNFHQPQSTLLLLVSAFVNGDWRTIYDYALAHQFRFLSYGDSSLLIP

SEQ ID NO: 70635 - protein, 388 aa, Prevotella timonensis
  misc_feature (1)..(388): tr|A0A098YS96|A0A098YS96_9BACT S-adenosylmethionine:tRN A ribosyltransferase-isomerase OS=Prevotella timonensis S9-PR14 OX=1401062 GN=HMPREF9304_09385 PE=3 SV=1
MKLSQFKFNLPEELIALYPHSVYHEIKNAHGKKEISRMTRRDESRLMVLHRKSQTIDMFQKDKKGKDIKGQYLEFRHVLDYFDEGDTFIFNDTKVFPARLYGTKEKTDAKIEVFLLRELNQEMRLWDVLVEPARKIRIGNKLFFDESGTMVAEVIDNTTSRGRTLRFLYDCPHDEFKHELFALGETPLPRYIINRREVPHADAHDQEDYQTIFAKHEGAVRAPSTGLHFSREMLKRMEIKGIHDTYITLHCSLSAFNSIEVEDLTKHKMDSEQMKIDAKVCEIVNRTKQEGHHVCAVGTSVVKATETAVGTDGLLKEYDGWTSKFIFPPYDFGLADTMIANFYHSMSPLLMETAAFGGYELVMEAYDLAVKNGYKFGCYGDSMLILND

SEQ ID NO: 70636 - protein, 394 aa, Prevotella veroralis
  misc_feature (1)..(394): tr|C9MQX4|C9MQX4_9BACT S-adenosylmethionine:tRNA ribosy ltransferase-isomerase OS=Prevotella veroralis F0319 OX =649761 GN=HMPREF0973_02141 PE=3 SV=1
MKLSQFKFNLPKEQVALYPHSSKRVLTRSDGSTQTFTITRRDESRLMVVHRKSGKIDMFKGEVNGDPTEDDYIRFKDVFDYFEEGDAFIFNDTKVFPARLYGTKEKTDAKIEVFLLRELNQEMRLWDVLVEPARKIRIGNKLFFDESGTMVAEVIDNTTSRGRTLRFLYDCPHEEFKRELFALGEAPLPRYIIDNRPKEEGEEFAHATKEDMENFQSVFARNEGAVSAPGTNIHFSEHMMKMMEIRGIKKSFITLHCGLGNFHDIEVEDLTKHKMDSEEMHINAEACEIANNAKKAGHHLCAVGASVVKATETAVGTDGMLKEYDGWTNEFIFPPYNFGFADSMLVNFYQPYSTLLMETAAFGGYDLIMEAYDKAVKNGYMFGCFGDSLLILND

SEQ ID NO: 70637 - protein, 423 aa, Prevotella veroralis
  misc_feature (1)..(423): tr|C9MQR3|C9MQR3_9BACT S-adenosylmethionine:tRNA ribosy ltransferase-isomerase OS=Prevotella veroralis F0319 OX =649761 GN=queA PE=3 SV=1
MSEDTKHISISDYNYPLPDERIAKFPLTERDHSKLLLYKHGDVSEDIFYNLPEYLPKGALMVFNNTKVIQARMHFRKETGALIEVFLMEPAQPTDYELMFQTNHECAWLCMVGNLKKWKEGALKRAFEIKGQKLTLTATMDRSKVQEQAGGTNHWIQFEWDNTNISFAEILEAVGELPIPPYLNRATEESDKETYQTVYSKIKGSVAAPTAGLHFTDKVLKALDEHGVDREELTLHVGAGTFKPVKSHEIEGHNMHTEFIIVRRQTLIKLLKHKCRAIAVGTTSVRTLESLYYMGVKLVSNNNATEDDLHVNQWEPYDLPHNSDGLVKVNGKVISVEESIQNLLDYLDRDGLNALHSSTQIIIAPGYTYKIVKALITNFHQPQSTLLLLVSAFVKGDWRKIYDYALSHDFRFLSYGDSSLLIP

SEQ ID NO: 70638 - protein, 380 aa, Prevotellaceae bacterium
  misc_feature (1)..(380): tr|A0A239R0V4|A0A239R0V4_9BACT S-adenosylmethionine:tRN A ribosyltransferase-isomerase OS=Prevotellaceae bacter ium MN60 OX=1945887 GN=SAMN06298211_103152 PE=3 SV=1
MKLSQFKFKLPEDLVALEPPHRVFKNDDGTEEKVYRRDECRLMVVHRKSQTVDMFEKDAEGKDTENYLTFRNIVDYFDEGDTFIFNDTKVFPARLYGTKEKTDAQIEVFLLRELNEELRLWDVLVEPARKIRIGNKLFFNEQGPMVAEVIDNTTSRGRTLRFLYDCPHDEFKEELYALGSAPLPRYIVDKRPATADDMENFQTIYAKHEGAVTAPASGLHFSRELMKRLEIRGVNFSYITVHCGLGCFDPIEVEDLTKHKMSSEQMIVSQEACEVVNEAKAGGHHVCAIGISTLRATETAAGTDGMLKEFSGWTNKFIFPPYDFGMADSMVTNFYHPESTMVMATAAFGGYDLVMKAYEMAVENGYKFGCYGDAMLILDD

SEQ ID NO: 70639 - protein, 406 aa, Prevotellaceae bacterium
  misc_feature (1)..(406): tr|A0A1K1NIG2|A0A1K1NIG2_9BACT S-adenosylmethionine:tRN A ribosyltransferase-isomerase OS=Prevotellaceae bacter ium HUN156 OX=1520830 GN=queA PE=3 SV=1
MNTKDIHISNYNYELPDERIAKFPKEERDHSKLLIYNKGQVGEDVFFHLPEYLPQGALMVFNNTKVIQARLHFRKDTGALIEIFLLEPAQPADYEQMFQQSERCSWLCLVGNQKKWKEGTLCRVIDVKGTSVEVRVTRKGEHGTSQWIDFEWTGGVSFAEILDAMGELPIPPYLNRETQESDKTTYQTVYSKIKGSVAAPTAGLHFTERVLSAVDERGIEREEVTLHVGAGTFKPVKSETIGEHAMHTEYIAVRRHTIERLLAHGGSAIAVGTTSVRTLESLYYMGMKVMRNPDIKEEQLHVNQWEPYEVESSELKVESSEALQALLNWMDRHELTVLHSSTQIIIAPGYTYKIVKMLVTNFHQPQSTLLLLVSAFVHGDWHKIYDYALAHDFRFLSYGDSSLLIP

SEQ ID NO: 70640 - protein, 349 aa, Pricia antarctica
  misc_feature (1)..(349): tr|A0A1G7GPP8|A0A1G7GPP8_9FLAO S-adenosylmethionine:tRN A ribosyltransferase-isomerase OS=Pricia antarctica OX= 641691 GN=queA PE=3 SV=1
MKLSHFNFELPDNLLAEYPAENRDESKLMVVHRETGKIEHKMFKDMIDYFEEDDVMVLNNTKVFPARLYGNKEKTGARIEVFLLRELNEEQRLWDVLVDPARKIRIGNKLYFGDDEDLVAEVIDNTTSRGRTLRFLYDGSYIDFRRKLRDLGQTPLPKYIKRDVEPEDETRYQTIYAKHEGAVAAPTAGLHFSKHLLKRLEIKGIDFAEVTLHVGLGTFNPVEVEDLSKHKMDSEELIIDEKATDIVNRAKAKKKRICAIGTTAMRGLESAVSSDHLLNTHDGWTNKFIFPPYEFSIADAMVTNFHLPKSTLLMMVSAFMGHDLMKRAYKEAILEQYKFYSYGDAMLII

SEQ ID NO: 70641 - protein, 348 aa, Primorskyibacter insulae
  misc_feature (1)..(348): tr|A0A2R8AWY6|A0A2R8AWY6_9RHOB S-adenosylmethionine:tRN A ribosyltransferase-isomerase OS=Primorskyibacter insu lae OX=1695997 GN=queA PE=3 SV=1
MQLSDFDFDLPDTLIATRPAKPRSYARLLVADGDAITDAIVRDLPDWLRAGDLLVLNDTKVIPARLSGLRRRMGDTGMTEARIEVTLLEPRADGAWSALVKPLKKVRDGEEIRFSDALSATVESRADGQAALRFNLAGDDFDAALAEAGAMPLPPYIAAKRPADAQDKEDYQTVWARNSGAVAAPTASLHFDAPLLEALAAKGVGFVHVTLHVGAGTFLPVKVDDVTQHKMHAEWGQVTEDAAKRIAEAKANGGRVIPVGTTALRLIESAAAGGQIAPWEGETDIFIYPGYQFRVADALMTNFHLPKSTLMMLVSALMGKDRITRIYGHAVDNGYRFFSYGDASLLLP

SEQ ID NO: 70642 - protein, 356 aa, Primorskyibacter sedentarius
  misc_feature (1)..(356): tr|A0A4R3J8T3|A0A4R3J8T3_9RHOB S-adenosylmethionine:tRN A ribosyltransferase-isomerase OS=Primorskyibacter sede ntarius OX=745311 GN=queA PE=3 SV=1
MKLAEFDFDLPDDLIATRPAQPRSSARLLVAEGDAIHDAVVTDIVNWLRPGDRLVLNDTRVIPARLSGLRSRDGAEGATQARIEVTLLEPTSDGSWMALLKPLKKVRDGEVITFSPKLEATVVSRDEGQAKLRFSLSGTDFDAALAEAGAMPLPPYIAAKRPADDRDKTDYQTVWARRPGAVAAPTASLHFDDALLGALKDRGIAFTHVTLHVGAGTFLPVKVEDVTTHRMHAEWGEVTQTAAVEIAATRADGGRIIPVGTTALRLIESAAADGEIRAWSGDTDIFIYPGYEFRITDALMTNFHLPKSTLLMLVSALMGQDRIRRIYAHAVDAQYRFFSYGDASLLLPGCKSDSKA

SEQ ID NO: 70643 - protein, 353 aa, Primorskyibacter sp.
  misc_feature (1)..(353): tr|A0A4R6ALE1|A0A4R6ALE1_9RHOB S-adenosylmethionine:tRN A ribosyltransferase-isomerase OS=Primorskyibacter sp. SS33 OX=2547833 GN=queA PE=3 SV=1
MKLSDFNFDLPEELIATRPARPRSSARMLVADGARIADCRAIDLPEWLAPGDRLVLNDTRVIPARLTGRRDRAGAAGARIEATLLEPLADGAWRALLKPLRKVRDGETLVFSDALSAVVEGREEGTARLRFDAEGDAFDAALEQAGAMPLPPYIAARRPADARDHEDYQTIWARRRGAVAAPTASLHFDAALMAGLAARGVDLTHVTLHVGAGTFLPVKVDDIAQHRMHAEWGEVTPEAAAAIAATRAAGGRVIAVGTTALRLVETAARENGGRIGSWTGETDIFITPGFRFAVADGLMTNFHLPKSTLMMLVSAFMGVEPIRRIYAHAIEERYRFFSYGDASLLLPGDRPAR

SEQ ID NO: 70644 - protein, 370 aa, Prochlorococcus marinus
  misc_feature (1)..(370): sp|Q7VDH4|QUEA_PROMA S-adenosylmethionine:tRNA ribosylt ransferase-isomerase OS=Prochlorococcus marinus (strain SARG / CCMP1375 / SS120) OX=167539 GN=queA PE=3 SV=1
MVIDPRDFLLSSYDYELNSSLIAQEPIEPRHNARMLHVSKRSGEGLKAFHLKVWDLLAELRAGDLLVMNDTRVLKARLKVRLRNGTFVELFLLEPKGQGRWLCLAKPAKKLRAGDCIWMESSGEESIPLKIIDQDISTGGRIVQFPELFSDRRKIEPLLEKFGEIPLPPYINRCDFKDVNRYQTRYASTPGAVAAPTAGLHLSDQFLEALSQQGIKDAKVTLHVGLGTFRPLVEENLANLHLHSEWVEVKEEVVSAIKECRDRGGRVIAIGTTTVRSLEASFLAGDGCLKPFKGEVDLVIKPGYKFGIVDGLLTNFHLPKSSLLLLVSALIGRENLLELYKEAIDQKYRFFSYGDAMFISPEGVLPSARL

SEQ ID NO: 70645 - protein, 371 aa, Prochlorococcus marinus
  misc_feature (1)..(371): sp|A2CBJ6|QUEA_PROM3 S-adenosylmethionine:tRNA ribosylt ransferase-isomerase OS=Prochlorococcus marinus (strain MIT 9303) OX=59922 GN=queA PE=3 SV=1
MVLDPRDSLLSSYDYPLDPERIAQLPVEPRHAARLLIVQPLGMKPPIARHAEVWDWQEELRAGDLLVINDTRVLKARLRVRRSGGGLAELLVLEPRGEGRWLCLGRPAKRLRPGDQLWLEALGEEPIALQVISKDSASGGRVVQFPSHYANAEQLELLLERYGEVPLPPYIKCHDPSDSERYQTRYASRPGAVAAPTAGLHLSDELLEALKQRGVMLTSVTLHVGLGTFRPVETEDLRHLQLHSEWVEVRDEVVAAVMACRARAGRVIAVGTTSVRALEGAALAGGGFLQSFCGPVDLVIQPGYRFAVVDGLLTNFHLPKSSLLLLVSAMVGRERLLALYAEAIEHHYRFFSYGDAMWIDPGAVLPAARPC

SEQ ID NO: 70646 - protein, 378 aa, Prochlorococcus sp.
  misc_feature (1)..(378): tr|A0A2E6GHE5|A0A2E6GHE5_9PROC S-adenosylmethionine:tRN A ribosyltransferase-isomerase OS=Prochlorococcus sp. S P3034 OX=2024877 GN=queA PE=3 SV=1
MNTSKEEIDSDYNLNSYDYKLNTSLIANKPSNIRHQSRMMVVNDMSSLDSYSVDKLTLNIIDELNPGDAIIINDTKVMKARIYVELESGSIVELLVLELIRDSIWLCLAKPAKKLKINKILKLNSQNNKSVELKVVGIHKDTGGRLIEFPNHINDLLSMSNFLAKYGQIPLPPYITNEDSLFLHEETYQTRYAKNPGAIAAPTAGLHLSDFILSELTNKGVKILPITLHVGYGTFKPIDKVNLIDLKLHKEFVNVDQTVINEIKDVKRKGKKIIAIGTTSVRALESCYCSLNKDILPISKNVDLVIKPGFKFRVVDGLLTNFHLPKSSLLLLVSAIIGRKRLLDLYRIAIREKFRFFSYGDAMYITPEAFLREAKFKP

SEQ ID NO: 70647 - protein, 365 aa, Prochlorococcus sp.
  misc_feature (1)..(365): tr|A0A089PEH0|A0A089PEH0_9PROC S-adenosylmethionine:tRN A ribosyltransferase-isomerase OS=Prochlorococcus sp. M IT 0801 OX=1501269 GN=queA PE=3 SV=1
MLDQKDNLLSSYSYDLPNDLIAQSPTKSRHDAKLMIVKDGLDDSLNLVHAKVWDIKDILKTGDLLVVNNTRVVKARLKIRLSGGGTGELLLMEPRGDGRWLCLGRPARRMRGGDQLWLDTSPDNSLILKVIDKDERTGGRIIQFSNEFTSWTEMETLLDLCGEVPLPPYIDKDKSSGHEESYQTRFASKPGAIAAPTAGLHLSDELIENLKTRGIKIAQITLHVGLGTFRPLEKEDLSQLHLHSEWIEVTEETIKAITNCKEDGGKVFAVGTTSVRALEATYLSGRGTLEPYEGKVDLVIKPGFKFSVIDGLLTNFHLPKSSLLLLVSALIGRKRMLKLYKHAIYNKYRFFSYGDAMLITPESVI

SEQ ID NO: 70648 - protein, 415 aa, Prochlorothrix hollandica
  misc_feature (1)..(415): tr|A0A0M2PW44|A0A0M2PW44_PROHO S-adenosylmethionine:tRN A ribosyltransferase-isomerase OS=Prochlorothrix hollan dica PCC 9006 = CALU 1027 OX=317619 GN=queA PE=3 SV=1
MAFSIAPQPIDSQLSSYDYLLPPDRIAQNPVVPRDRSRLLVVNSPHSHEHQWFYQIPHWLKPGDLLVLNNTQVIPARLRGHKLVDAGSLGAGPGLTGSGLGAGPGLGAEVEVLLLEALGDDRWLTLVKPGRRLKPGAQIIFTPPQADGGSAADRGATATVPDRTAPNLTASALTASALTATVLATDIPTGGRVLQFSPPPNTSLWDCFQTLGEVPIPPYITASQATPDQYQTVYSSQPGAVAAPTAGLHFTPELLAQLQAQGIDQAQITLHVGVGTFRPVEVENINHHAMHGEWIEISPETVAKIHETQSRGGRIIAVGTTVVRALEGAAALGTLQPYQGKVNLFIHPGYPWQVVEGLVTNFHLPRSSLMMLVSALVGRQRLLDLYALAIEHHYRFYSFGDAMVILPEARPSFSA

SEQ ID NO: 70649 - protein, 344 aa, Prolinoborus fasciculus
  misc_feature (1)..(344): tr|A0A2U3MG07|A0A2U3MG07_9NEIS S-adenosylmethionine:tRN A ribosyltransferase-isomerase OS=Prolinoborus fascicul us OX=1056810 GN=queA PE=3 SV=1
MQLSDFNFDLPDELIARYPLETRSASRLLHLDAQGQYHDHQFTDILDLLEDGDLLVLNDTKVMKARLKGKRASGGAVEVLVERMQDRFIAYCHIKASNTPKAGAELFIGPDAVKVTVQGRHENLFIVEFSQPILDVLDQYGALPIPPYFNREAEEIDTERYQTVFNDPTKLASVAAPTASLHFDADLLAKLEAKGIQKTFVTLHVGAGTFLPVRTDDIQNHIMHSEWCDVPETAVEMIRQTKARGNKVISVGTTATRAVESAAQAHNGELAAWTGDTQIFIYPGYQFKVVDRLITNFHLPESTLLMLVSALSNRDNILNAYKHAVDSKYRFFSYGDAMLIDQAK

SEQ ID NO: 70650 - protein, 409 aa, Prolixibacter denitrificans
  misc_feature (1)..(409): tr|A0A2P8CCC8|A0A2P8CCC8_9BACT S-adenosylmethionine:tRN A ribosyltransferase-isomerase OS=Prolixibacter denitri ficans OX=1541063 GN=queA PE=3 SV=1
MVQTKNLQNISVQEFTYELPDERIAKYPLAERDQSQLLIWNRGAISDDAFKNLSTHLPESSLLVFNNTRVIRARLHFRKQTGARIEIFCLEPTTPADYALSFTQTEKCRWKCIVGNLKKWKGEILEQTLELDNQPIKFRAERIGEAGNAQEIEFSWDNPAFTFSELLEATGNIPIPPYLHRESEESDLTRYQTVYSRIKGSVAAPTAGLHFTERVFDSLPEKGIERAELTLHVGAGTFQPVKSDTIGGHEMHTEHILVEKTFIEQLRDKLDSVVAVGTTSIRTLESLYWIGKKLMENQNLSEKELLVAQWEPYQEENHLPSPKEALTAVIDYLSRKNMDKLNTATQIIILPGYEFRIVRGMITNFHQPQSTLLLLISAFLGDDWKRVYQHALENNYRFLSYGDSNLYIK

SEQ ID NO: 70651 - protein, 349 aa, Prolixibacter denitrificans
  misc_feature (1)..(349): tr|A0A2P8CLB6|A0A2P8CLB6_9BACT S-adenosylmethionine:tRN A ribosyltransferase-isomerase OS=Prolixibacter denitri ficans OX=1541063 GN=queA PE=3 SV=1
MKLSKFKYNLPENLIALHPAQNRDESRMMVLHRETGEIEHKTFKDIIDYFDDEDVMVFNNTKVFPARLYGNKEKTGAQIEVFLLRELNREQRLWDVLVDPARKIRIGNKLYFGDDDLLVAEVIDNTTSRGRTLRFLYDGPYEEFKKTLYSLGETPLPKFIDRPVEESDAERYQTIFAKHEGAVAAPTAGLHFSRELLKRLEIKGVDFAEITLHVGLGNFRSVDVEDLTKHKMDSEQIWINDKAAKQVNGAKKSKHRVCAVGTTVMRTLESSVSTMGTLKPYEGWTNKFIFPPYEFSVADSMVSNFHLPLSTLLMMVAAFGGYDKVMNAYQVAIKEKYRFGTYGDAMLII

SEQ ID NO: 70652 - protein, 349 aa, Prolixibacteraceae bacterium
  misc_feature (1)..(349): tr|A0A399T579|A0A399T579_9BACT S-adenosylmethionine:tRN A ribosyltransferase-isomerase OS=Prolixibacteraceae ba cterium XSD2 OX=2305463 GN=queA PE=3 SV=1
MKLSKFKYELNPERIALHPADNRDESKLMVLNRATRTIEHRLFKDVLDYFDDQDVMIFNDTKVFPARLYGNKEKTGAEIEVFLLRELNREQRLWDVLVDPARKIRIGNKLYFGDDDLLVAEVIDNTTSRGRTLRFLFDGPYDEFKKALYGLGETPLPKFINRQVQPEDKDRYQTIFAKHEGAVAAPTAGLHFSRELMKRLEIKGIDFAYVTLHVGLGNFRSVDVEDLTKHKMDSEQIWIRQEACDVVNNAKENKRNVCAVGTTVMRTLESSVSTQGHLKPYEGWTNKFIFPPYDFSVANSMITNFHLPYSTLLMMVAAFGGYDFVMEAYKSAIKEDYRFGTYGDAMLII

SEQ ID NO: 70653 - protein, 348 aa, Prolixibacteraceae bacterium
  misc_feature (1)..(348): tr|A0A4V5SBU7|A0A4V5SBU7_9BACT S-adenosylmethionine:tRN A ribosyltransferase-isomerase OS=Prolixibacteraceae ba cterium JC036 OX=2528631 GN=queA PE=3 SV=1
MKLSKFKYELPDELIALHPAYNRDESRLMVLHKESGEIEHKLFKDIVTYFNDKDVMVFNNTKVFPARLYGNKEKTGAEIEVFLLRELNREQRLWDVLVDPARKIRIGNKLYFGDDELVAEVIDNTTSRGRTLRFLYDGPYDEFKKTLYGLGQTPLPKFITRDVEPEDKDRYQTIFAKHEGAVAAPTAGLHFSRELLKRLEIIGVDFSEITLHVGLGNFRNVDVEDLTKHKMDSEQIWIPENACDVVNTAKDARKNVCAVGTTVMRTLETSVSTQGHLKPFEGWTNKFIFPPYEFRVANRMVTNFHLPYSTLLMMVCAFGGYDKVMNAYEVALKEKYRFGTYGDAMLIL

SEQ ID NO: 70654 - protein, 348 aa, Propionibacteriaceae bacterium
  misc_feature (1)..(348): tr|A0A2A9H0R0|A0A2A9H0R0_9ACTN S-adenosylmethionine:tRN A ribosyltransferase-isomerase OS=Propionibacteriaceae bacterium ES.041 OX=1945889 GN=B0O41_3671 PE=3 SV=1
MSRLALRPSTTFGGRTPGFADRPIEADARSRDAVRLLVAAGPFIRHRRFGDLVDELRPGDVLVVNTSATVNGEVDASWRGMPIVLHATEGPFGDWVVELRSAPDAGRSILDAAPGDHVAITEGPGLRLLAPHPHRSSPTGEGNRLWRAEAEGGLRTLLDAVGRPIAYGYLAGRWPLAAYQTVFGQVPGSAEMASAGRPFTDALVQALLRRGVLIAPVLLHTGFSSQEAGEGPQPERFEVGPATARTLNLARRSGGRVVAVGTTATRAVESAVVGGRVVASRGWTDRVVTPAEPPQIVNGLITGWHDAGASHLLLVEAIAGAEKTQRAYDAALAEGYAWHEFGDSCLIL

SEQ ID NO: 70655 - protein, 348 aa, Propionibacteriaceae bacterium
  misc_feature (1)..(348): tr|A0A255GQA4|A0A255GQA4_9ACTN S-adenosylmethionine:tRN A ribosyltransferase-isomerase OS=Propionibacteriaceae bacterium NML 030167 OX=2016500 GN=CGZ94_02460 PE=3 SV= 1
MSRLALRPSTTFGGRTPGFADRPIEADARSRDAVRLLVAAGPFIRHRRFGDLVDELRAGDVLVVNTSATVNGEVDASWRGMPIVLHATEGPFGDWVVELRSAPDAGRSILDAAPGDHVAITEGPGLRLLAPHPHRSSPTGEGNRLWRAEAEGGLRALLDAVGRPIAYGYLAGRWPLAAYQTVFGQVPGSAEMASAGRPFTDALVQALLRRGVLIAPVLLHTGFSSQEAGEGPQPERFEVGPATARTLNLVRRSGGRVVAVGTTATRAVESAVVGGRVVASRGWTDRVVTPAEPPQIVNGLITGWHDAGASHLLLVEAIAGAEKTQRAYDAALAEGYAWHEFGDSCLIL

SEQ ID NO: 70656 - protein, 346 aa, Propionispira arboris
  misc_feature (1)..(346): tr|A0A1H6WCG3|A0A1H6WCG3_9FIRM S-adenosylmethionine:tRN A ribosyltransferase-isomerase OS=Propionispira arboris OX=84035 GN=queA PE=3 SV=1
MLLSDFDYNLPEELIAQTPCEPRNHSRLMVLDKTAKTIEHHHFYDLKDQLVPGDTLIFNDTRVMPARLIGHRESTGGKVEVFLLRRINGDEWETLVKPGKKALAGNIISFGTELSCEIMSHTDFGGRIVKFHYKGIFEEILDRLGETPLPPYIHEELADKERYQTVYSKEKGSAAAPTAGLHFTTEMLEELKAMGVNLGFVTLHVGLGTFRPVNVEKIEDHVMHKEYYCVPEATAKLICDTKARGDRVIAVGTTSIRTLESASERKGFIEAKSGWTEIFIYPGYEFKIVDAIITNFHLPKSTLLMLISAFSDKEFILQAYEEAIKEKYRFFSFGDAMIILNQKIKK

SEQ ID NO: 70657 - protein, 339 aa, Propionispora hippei
  misc_feature (1)..(339): tr|A0A1M6AHH7|A0A1M6AHH7_9FIRM S-adenosylmethionine:tRN A ribosyltransferase-isomerase OS=Propionispora hippei DSM 15287 OX=1123003 GN=queA PE=3 SV=1
MRLEDFDYLLPEERIAQLPCEPRDASRLLVLDRGRDELEHKQFFNLPEYLRPGDTLVFNDTRVIPARLIGHKEQTGAKIEVFLLNRLTATDWEVLVKPGKKARPGTVIVFSEALRCEILDGTDFGGRVIRFQFDGVFEEILDQLGETPLPPYIKEQLTDKERYQTVYARERGSAAAPTAGLHFTQGLLEHLRQQGINLAFVTLHVGLGTFRPVQVEDITQHNMHKEYYTITPEAAELINATKQAGNRVIAVGTTSVRTLETAAVGGQVKSGSGWTSIFIYPGCQFQVVDAIITNFHLPKSTLLMLISAFAGREKVLAAYREAVARQYRFFSFGDAMLII

SEQ ID NO: 70658 - protein, 340 aa, Propionispora sp.
  misc_feature (1)..(340): tr|A0A0K8J925|A0A0K8J925_9FIRM S-adenosylmethionine:tRN A ribosyltransferase-isomerase OS=Propionispora sp. 2/2 -37 OX=1677858 GN=queA PE=3 SV=1
MLVDEFDYDLPEELIAQHPCEPRDASRLLVLERNGQKINHRHFYDLPEFLQTGDLLVFNDTKVIPARLFGIKAGSGGKVEVFLLNRLTGNTWEVLVKPGKKVRPGTVVVFSDELQCEVLSTTDFGGRIVRFSFQGIFEEILDRLGEMPLPPYIKERLSDQERYQTVYARKRGAAAAPTAGLHFTHSLLEQIKLKGVQIVFVTLHVGLGTFRPVQVHDISEHSMHREYYNISEQAACQISEAKQAGRRVIAVGTTSVRTLETAAAEDGRITSCSGWTNIFIYPGYRFKMVDAMITNFHLPKSTLLMLISAFAGKDAVLKAYRAAVSERYRFFSFGDAMLIL

SEQ ID NO: 70659 - protein, 339 aa, Propionispora vibrioides
  misc_feature (1)..(339): tr|A0A1H8NXS6|A0A1H8NXS6_9FIRM S-adenosylmethionine:tRN A ribosyltransferase-isomerase OS=Propionispora vibrioi des OX=112903 GN=queA PE=3 SV=1
MRLEDFDYLLPEDRIAQLPCEPRDASRLLVLDRGRDELEHKQFFNLPEYLRPGDTLVFNDTRVIPARLIGHKEQTGAKIEVFLLNRLTATDWEVLVKPGKKARPGTVIVFSEALRCEILDCTDFGGRVIRFQFDGVFEEILDKLGETPLPPYIKEQLTDKERYQTVYARERGSAAAPTAGLHFTQGLLEHLRQQGINLAFVTLHVGLGTFRPVQVEDITQHTMHKEYYTITPEAAELINATKQAGNRVIAVGTTSVRTLETAAAGGQVRSGSGWTSIFIYPGCQFQVVDAIITNFHLPKSTLLMLISAFAGRERVLAAYREAVVRQYRFFSFGDAMLII

SEQ ID NO: 70660 - protein, 344 aa, Propionivibrio dicarboxylicus
  misc_feature (1)..(344): tr|A0A1G8BR21|A0A1G8BR21_9RHOO S-adenosylmethionine:tRN A ribosyltransferase-isomerase OS=Propionivibrio dicarb oxylicus OX=83767 GN=queA PE=3 SV=1
MLTLDDFDFPLPPALIAQHPALERTSSRLLHVAGERLDDRLFAELPTLVAPGDLLVFNNTKVIKARLFGRKESGGQIEVMIERVVDARHAIAQIRASKSPKPGSRILLEDAFTLTVTGRTGEQGEFFALELDGDGDLYALTERHGRLPLPPYITHAAAAEDETRYQTVYARHVGAVAAPTAGLHFDEAMLARLQEAGAELAWLTLHVGAGTFQPVRVHDVAAHRMHSETYELPQATVDAIARTRARGGRVIAVGTTTLRTLEAAAQGGELRAGTAETDIFITPGYRFRVIDRLITNFHLPKSTLLMLVSAFAGMAPIRAAYRHAVDEHYRFFSYGDAMLLERQP

SEQ ID NO: 70661 - protein, 298 aa, Prosthecobacter debontii
  misc_feature (1)..(298): tr|A0A1T4Y9L8|A0A1T4Y9L8_9BACT S-adenosylmethionine:tRN A ribosyltransferase-isomerase OS=Prosthecobacter debon tii OX=48467 GN=SAMN02745166_02772 PE=3 SV=1
MLVVDRQSGTITHRMFTDLPEFVREGDLFVMNNTRVVPARYFSNEGSREVLRLEPLTATRWRCMVKPGKKFRIGHTVEIGEATGTVEQILENGERVIQWDREVDEAAHGHLALPHYMGRDDQPADRERYQTVFAQAAGAIAAPTAGLHFTPEILAQLPHAFVTLHVGVGTFQPVKAEKIAEHVMHSEQYEVTEETAVAIGQAKRVVAVGTTAMRTLETVARDNAGRVVAQSGSTDIFIYPGYEFRAVGAMLTNFHLPKSTLIMLVSAFAGKELILRAYEEAIRERYRFFSYGDCMLIL

SEQ ID NO: 70662 - protein, 353 aa, Prosthecobacter fusiformis
  misc_feature (1)..(353): tr|A0A4R7RKI3|A0A4R7RKI3_9BACT S-adenosylmethionine:tRN A ribosyltransferase-isomerase OS=Prosthecobacter fusif ormis OX=48464 GN=queA PE=3 SV=1
MASGCLQDRRIIFHFLALAASRRSALPTVLTSDFDYSLPPELIASEPLPDRAASRMLVVHRETGTLEHRLFSDLPKFARAGDLWVMNNTRVVPARYFSNDGSREVLRLEPLTETRWRCMVKPGKRFRVGHTVEVGEATGTVIEILENGERIIQWDRVVDEEAHGHLALPHYMGRDDQPADRERYQTVFAQAAGAIAAPTAGLHFTPEILAGLPHAFVTLHVGVGTFQPVKVDHIQEHVMHRECYVVPPETAVAVQNAQRVVAVGTTAMRTLETVARDNNGQIVAQSGSTDIFIYPGFQFKAVGAMLTNFHLPKSTLIMLVSAFAGRELIMRAYEEAIRERYRFFSYGDCMLIL

SEQ ID NO: 70663 - protein, 341 aa, Prosthecochloris aestuarii
  misc_feature (1)..(341): tr|B4S6I6|B4S6I6_PROA2 S-adenosylmethionine:tRNA ribosy ltransferase-isomerase OS=Prosthecochloris aestuarii (s train DSM 271 / SK 413) OX=290512 GN=queA PE=3 SV=1
MNVSDFDYELPESSIALYPPAERGTTRLEVLCRETGSITHARYADLHRFLEPGDLLVLNNTRVILARLFASKKTGAKIELVLLEKHERDQNLVMYRGRLKRGDILISHGEELLVDSLVGNGIASVSCLSGRQIASFFQEFAEVPIPPYLRRDAEEVDRERYQTVFAEIPGSVAAPTASLNMTPELIDTLRLKGVQIASITLHVGLGTFMPIRVDDLASHVMHREYYDIPVSVVSAIRDARDRRKRVIAVGTTVTRALEHASQTVLHTNPVMPVRGEADIFIYPGYQFQTIDALVTNYHAPRSTVLMLTAAFAGWDLLRKGYQEALQNDYRFLSYGDSMLIV

SEQ ID NO: 70664 - protein, 346 aa, Prosthecochloris aestuarii
  misc_feature (1)..(346): tr|B4S8U6|B4S8U6_PROA2 S-adenosylmethionine:tRNA ribosy ltransferase-isomerase OS=Prosthecochloris aestuarii (s train DSM 271 / SK 413) OX=290512 GN=queA PE=3 SV=1
MRLSNFRYSLPKTKIADRPVSPRDSSKLMVLNRRKKEIEHKTFGDIVSFFKKGDLLILNNSRVFPAKIFGQKEKTDAKIEVFLLRELNKEAGLWDVLVDPARKVRVGNKIYFQDDVVAEVVDNTTSRGRTIRFLNPEIDVFDLVEKIGTVPLPPYFSRKPDAGDREDYQTVYASQTGAVVAPMAGLHFTMPLLEAIKKKGVKILPITLHPSLSSFNAIEVEDVSKHKMDSEYFNIPYQTAMEVNETKLNKSGRIIAVGTTTCRVLEANATVEGKIKFGQGWTDKFIYPPYQFKVTDALVANFQQPETTLLMMVSAFAEHRFLMDSYKTAMKENYRFLAYGDAMFIH

SEQ ID NO: 70665 - protein, 346 aa, Prosthecochloris marina
  misc_feature (1)..(346): tr|A0A317T8B7|A0A317T8B7_9CHLB S-adenosylmethionine:tRN A ribosyltransferase-isomerase OS=Prosthecochloris mari na OX=2017681 GN=queA PE=3 SV=1
MRLSNFRYSLPKTRIADRPVADRDTCKLMVLNRRKKEIDHKVFSDIVSYFKKGDLLVLNNSRVFPAKIFGQKEKTDAKIEVFLLRELNKEAGLWDVLVDPARKVRVGNKIYFQDDVVAEVVDNTTSRGRTIRFLNPEIDVFELVEKIGTVPLPPYFTRKPDESDRKDYQTVYASQTGAVVAPMAGLHFTMPLLEEIKKKGVKILPLTLHPSLSSFNAIEVEDVSKHKMDSEYFNIPYQTAMEINETKLNKTGRVIAVGTTTCRVLEANATVEGKIKFGQGWTDKFIYPPYQFKVTDALVTNFQQPETTLLMMVSAFAEYRLLMDAYKKALKSDYHFLAYGDAMFIH

SEQ ID NO: 70666 - protein, 341 aa, Prosthecochloris marina
  misc_feature (1)..(341): tr|A0A317T4E6|A0A317T4E6_9CHLB S-adenosylmethionine:tRN A ribosyltransferase-isomerase OS=Prosthecochloris mari na OX=2017681 GN=queA PE=3 SV=1
MKVSDYDYELPESSIAIYPPADRGTTRLEVLSRDTGAIIHAAYAELGRFIEPGDLLVLNNSRVVQARLFAQKTTGAKVELVLLEKHGDHQDLVMYRGRLKPGDVLLAHGNKLLVSAVEGEGVARVVCQDGRSVPDFFADYGDVPIPPYLKRAAEEVDRERYQTVFAEIPGSVAAPTASLNMTRELLDSLEEKGVVFAYVTLHVGLGTFLPIRGDDLDSHVMHREYYCIPADTVRKIRETKGKKKKVVAVGTTVTRSLEHAASVIEQQQSPREIAGEADIFIYPGYSFRVIDGLVTNYHAPRSTVLMLTAAFAGWENLKHAYEEALDRDYRFLSYGDSMLIV

SEQ ID NO: 70667 - protein, 341 aa, Prosthecochloris sp.
  misc_feature (1)..(341): tr|A0A422HIM6|A0A422HIM6_9CHLB S-adenosylmethionine:tRN A ribosyltransferase-isomerase OS=Prosthecochloris sp. ZM_2 OX=2045206 GN=queA PE=3 SV=1
MKTSGFDYDLPQERIAVYPPEERGSTRLEVLDRTAREIGHARYRDLGSYLRTGDLLVLNNSQVVQARMHARKTTGGRVELVLLEKHEGVQNRVMYRGRLKDGDVLHAHGHELHVQRVEGDGVALLELPEGGTLAGFFARYGETPIPPYLQRSAEEVDRERYQTVFAEIPGSVAAPTASLNMTPELLASLQQNGVKTAYVTLHVGLGTFMPIRVEDLSSHVMHREYYEIPVDTLEAIRAAKQNGGRVVAVGTTVTRALEHAAAGVLDPAENSCIEGEADIFIYPGYAFRVIDALLTNFHAPRSTVLMLTAAFAGRELLQEAYREALERDYRFLSYGDSMLIV

SEQ ID NO: 70668 - protein, 340 aa, Prosthecochloris sp.
  misc_feature (1)..(340): tr|A0A1B1Q3H8|A0A1B1Q3H8_9CHLB S-adenosylmethionine:tRN A ribosyltransferase-isomerase OS=Prosthecochloris sp. CIB 2401 OX=1868325 GN=queA_2 PE=3 SV=1
MRPSDFDYELPAERIAQYPPEERGSTRLEVLDRNTGRITHARYAGLSGFLAEGDLLVLNNTKVILARLQARKITGAKIELVLLEKHEGEQELAMYRGRLRQGDRLVTEGGELVVDAIMGEGVACLSSPDGPVAALFQRYGEVPIPPYLRRDAEEVDRERYQTVFAEIPGSVAAPTASLNLTPDILRELGEKGVEITSMTLHVGLGTFLPIRADDLANHVMHREYYHIPASTVEAVRRVRSGRGRVVAVGTTVTRALEHAASRLIAEGAPVALSGEADIFIYPGYEFRVIEGLLTNYHAPRSTVLMLTAAFAGPDFLRRAYAEALEREYRFLSYGDSMLIL

SEQ ID NO: 70669 - protein, 346 aa, Prosthecochloris vibrioformis
  misc_feature (1)..(346): tr|A0A5C4S1J8|A0A5C4S1J8_PROVB S-adenosylmethionine:tRN A ribosyltransferase-isomerase OS=Prosthecochloris vibr ioformis OX=1098 GN=queA PE=3 SV=1
MRLSNFRYTLPKTKIADRPASPRDSCKMMVLNRRKKEVEHKVFSDIVSFFKKGDLLILNNTRVFPAKIFGQKEKTDAKIEVFLLRELNKEAGLWDVLVDPARKVRVGNKIYFQDDVVAEVVDNTTSRGRTIRFLNPEIDVFELVEKIGTVPLPPYFSRKPDDADRQDYQTVYASQTGAVVAPMSGLHFTMPLLEEIRKKGVKILPITLHPSLSSFNAIEVEDVSKHKMDSEYFNIPYQTAMEINETKINKSGRVIAVGTTTCRVLEANATVDGKIKFGQGWTDKFIYPPYQFKVTDALVTNFQQPETTLLMMVSAFADHRFLMDSYKTALKNNYRFLAYGDAMFIY

SEQ ID NO: 70670 - protein, 340 aa, Prosthecochloris vibrioformis; identical to SEQ ID NO: 70668
  misc_feature (1)..(340): tr|A0A5C4S015|A0A5C4S015_PROVB S-adenosylmethionine:tRN A ribosyltransferase-isomerase OS=Prosthecochloris vibr ioformis OX=1098 GN=queA PE=3 SV=1

SEQ ID NO: 70671 - protein, 361 aa, Prosthecomicrobium hirschii
  misc_feature (1)..(361): tr|A0A0P6VUK5|A0A0P6VUK5_9RHIZ S-adenosylmethionine:tRN A ribosyltransferase-isomerase OS=Prosthecomicrobium hi rschii OX=665126 GN=queA PE=3 SV=1
MRVDLFDFDLPAERIALRPASPREAARLMVVRPDEGCRIEDRTVGDLPELVRPGDALVFNDTRVIPAELHGTRIRDEGRVAVAFTLLKREGADRWRAFARPGKRLKVGDRILFGEQGRACLLGEVWATVAEKAEDGQVLIAFDLAGPDLDQAIHAVGTVPLPPYISSKRAADAQDLADYQTVYARAEGAVAAPTAGLHFTPDLIARLDAAGVERHFVTLHVGAGTFLPVKAEDTAEHRMHSEWGTIDVATADALNAVRARGGRIVAVGTTSLRLLESAADGEGRIQPFSGETDIFITPGKPIRAVDMLMTNFHLPRSTLFMLVSAFAGLDCMRAAYAQAIATGYRFYSYGDTSLLFRATGR

SEQ ID NO: 70672 - protein, 341 aa, Proteiniborus ethanoligenes; identical to SEQ ID NO: 67033
  misc_feature (1)..(341): tr|A0A1H3QRN4|A0A1H3QRN4_9FIRM S-adenosylmethionine:tRN A ribosyltransferase-isomerase OS=Proteiniborus ethanol igenes OX=415015 GN=queA PE=3 SV=1

SEQ ID NO: 70673 - protein, 341 aa, Proteiniborus sp.
  misc_feature (1)..(341): tr|A0A1M4M7A4|A0A1M4M7A4_9FIRM S-adenosylmethionine:tRN A ribosyltransferase-isomerase OS=Proteiniborus sp. DW1 OX=1889883 GN=queA PE=3 SV=1
MKREDFYFDLPEELIAQVPIENREGSRLLVLDKNTGEIVHGVFSDIVQYLDKGDCLVLNNTRVIPARLFGRRKDTGSSVEFLLLKRIDNNKWEVLVKPGKKARPGGVFDFGEGLMEGEILAVQDGGTRIIEFKYDGVFEQILDELGEMPLPPYIKEKLEDKERYQTVYSKKEGSAAAPTAGLHFTEFLLQKIKEKGVNIVYVTLHVGLGTFRPVKVEDIEEHDMHYEYYEIDEESANIINESKKAGGKIVAVGTTSVRTIESASNEEGQVLPKNGWTNIFIYPGYKYKVIDRLITNFHLPESTLIMLVSALAGRENILHAYNEAIKLKYRFFSFGDAMFIK

SEQ ID NO: 70674 - protein, 342 aa, Proteiniclasticum ruminis
  misc_feature (1)..(342): tr|A0A1I4YK24|A0A1I4YK24_9CLOT S-adenosylmethionine:tRN A ribosyltransferase-isomerase OS=Proteiniclasticum rum inis OX=398199 GN=queA PE=3 SV=1
MKVEDFYFDLPEELIAQHPLEKRDSSRLLVLDKKTGEINHQHFGDLPDFLKKGDVLVLNDTRVIPARLLGVKEDTEGKIEFLLLNRKMLDTYECLAKPGKRARKGAKFIFGEGLLTAEVVDVLENGNRIVKFSYDGVFEEILDRLGEMPLPPYIKEKLEDRERYQTVYSREEGSAAAPTAGLHFTKELLDKLQSMGVQTAFLTLHVGLGTFRPVKVESVENHDMHEEFYSLDAKNAEIINNAKNEGRRIISVGTTSTRTLETIADEKGFVREASGYTKIFIYPGYRFKCVDCLITNFHLPESTLIMLVSALAGQENVMRAYRTAVKEKYRFFSFGDSMLIKE

SEQ ID NO: 70675 - protein, 342 aa, Proteiniclasticum ruminis
  misc_feature (1)..(342): tr|A0A1G8GCX9|A0A1G8GCX9_9CLOT S-adenosylmethionine:tRN A ribosyltransferase-isomerase OS=Proteiniclasticum rum inis OX=398199 GN=queA PE=3 SV=1
MRVEDFNFELPEELIAQHPLEKRDSSRLLVLDKKTGEINHKHFGDLPDFLKKGDVLVLNDTRVIPARLLGVKEDTEGKIEFLLLNRKKLDTYECLAKPGKRARKGAKFTFGEGLLKAEVLDVLENGNRIVKFSYEGVFEEILDRLGEMPLPPYIKEKLEDRERYQTVYSREEGSAAAPTAGLHFTKELLDKLQSMGVETAFLTLHVGLGTFRPVKVESVENHDMHEEFYSLDAKNAEIINTAKNEGRRIISVGTTSTRTLETIADEKGFVREASGYTKIFIYPGYQFKCVDCLITNFHLPESTLIMLVSALAGQENVMNAYRTAVKEKYRFFSFGDSMLIKE

SEQ ID NO: 70676 - protein, 342 aa, Proteiniclasticum sp.
  misc_feature (1)..(342): tr|A0A358S4V6|A0A358S4V6_9CLOT S-adenosylmethionine:tRN A ribosyltransferase-isomerase OS=Proteiniclasticum sp. OX=2053595 GN=queA PE=3 SV=1
MKVEDFYFDLPEELIAQHPLEKRDSSRLLVLDKKTGEINHQHFGDLPDFLRKGDVLVLNDTRVIPARLLGVKEDTEGKIEFLLLNRKMLDTYECLAKPGKRARKGAKFTFGEGLLKAEVLDVLENGNRIVKFFYDGVFEEILDRLGEMPLPPYIKEKLEDRERYQTVYSREEGSAAAPTAGLHFTKELLDKLQSMGVQTAFLTLHVGLGTFRPVKVESVENHDMHEEFYSLDAKNAEIINNAKNEGRRIISVGTTSTRTLETIADEKGFVREASGYTKIFIYPGYHFKCVDCLITNFHLPESTLIMLVSALAGQENVMSAYRTAVKEKYRFFSFGDSMLIKE

SEQ ID NO: 70677 - protein, 350 aa, Proteiniphilum saccharofermentans
  misc_feature (1)..(350): tr|A0A1R3T5U0|A0A1R3T5U0_9BACT S-adenosylmethionine:tRN A ribosyltransferase-isomerase OS=Proteiniphilum saccha rofermentans OX=1642647 GN=queA PE=3 SV=1
MKLSQFKFNLPEELIAKYPAAHRDESRLLVVHKKSDQLEHKTFKEVLDYFNKGDFFIFNNTKVFPARLFGNKEKTGAKIEVFLLRELNPEQHLWDVLVNPARKIRIGNKLYFGENEELVAEVIDNTTSRGRTLRFLYDGPYDEFKNQLFSIGETPIPEYLERSAEPEDVERYQNIFAQHEGAVVAPAAGLHFSRELMKRMEIRDIDFGFLTLHNGLGAYRMIDVEDLTKHKMESEQMIITEELCEKVNRAKDAEKNICAVGTSVLRAIETTVSTDGHLKPRNGWTNKFIFPPYDFTLTNSLITNFHLPYSTLLMMACAFGGYEKVMNVYEEAIKEKYTFGAYGDAMLIVD

SEQ ID NO: 70678 - protein, 413 aa, Proteiniphilum saccharofermentans
  misc_feature (1)..(413): tr|A0A1R3T832|A0A1R3T832_9BACT S-adenosylmethionine:tRN A ribosyltransferase-isomerase OS=Proteiniphilum saccha rofermentans OX=1642647 GN=queA PE=3 SV=1
MQKEKIQQLQISRYNYHLPDDKIAKYPLERRDASKLLLYDGVGIDTHRFGELPDLLPEGSLLLFNNTRVIHARLLFLKETGAQVEVFCLSPHYPADYVVNFQQRRHCSWYCMIGNAKRWKEGTLQMQISTHDGIVNLKAEKADIAGSDTVVRFCWDNEGFTFSELLEIAGKLPIPPYLNRPSEAIDDETYQTVYSRSEGSVAAPTAGLHFTEAVMEELRNKGILTAEVTLHVGAGTFKPVKSEIIAGHEMHTEFISVPKETIEKLLTHNSGKIVVVGTTSMRTVESLYYIGRKLSTNPDISPEELGVKQWEPYDDTVEISPEQALLNILNYLEETGLQQLISSTQLMIAPGYEFHFPDAIITNFHQPQSTLLLLISAFAGDDWRKIYNYALENDYRFLSYGDSSLLFKKPIFG

SEQ ID NO: 70679 - protein, 414 aa, Proteiniphilum sp.
  misc_feature (1)..(414): tr|A0A117MIH5|A0A117MIH5_9BACT S-adenosylmethionine:tRN A ribosyltransferase-isomerase OS=Proteiniphilum sp. 51 _7 OX=1641377 GN=queA PE=3 SV=1
MKKEEIAHLSISRFHYHLPEEKIARYPLPQRDASRLLIYDEGAIGSAHFIDLPQHLPEGSLLLFNNTRVIHARLLFYKPGGARIEIFCLTPSHPADYAVNFQQRQSCSWHCMTGNARRWREEPLVMKVPTDKGEMTLQAERVSRQGSETEIRFSWDDDRFTFSELLEAAGQLPIPPYLNRPSEVQDEVTYQTVYSRIEGSVAAPTAGLHFTPRVMERLHARGVAIAEVTLHVGAGTFRPVKSEIIADHEMHTEFISVERETIEKLLHHQGKLIVVGTTSLRTVESLYYIGRKLQDQPNLQPHELTVRQWEPYEEEKAITPADALQNILLYLDRTGEKRLMADTQIIIVPGYGFHYPDALMTNFHQPQSTLLLLIAAFVGEDWRKIYDYALREGYRFLSYGDSSLLWKKMKEACK

SEQ ID NO: 70680 - protein, 408 aa, Proteiniphilum sp.
  misc_feature (1)..(408): tr|A0A3M8EEY5|A0A3M8EEY5_9BACT S-adenosylmethionine:tRN A ribosyltransferase-isomerase OS=Proteiniphilum sp. X5 2 OX=2382159 GN=queA PE=3 SV=1
MQKEKIRQLQISQYNYPLPDDRIAKYPLPQRDASKLLLYSGLQISTFQFSELPELLPEGSLLLFNDTRVIHARLLFQKETGAQIEVFCLSPHYPADYGVNFQQRRACSWNCMIGNAKRWKGEPLQMRIPVNKGIVGLKVEKAGVTDGDDTVVRFSWDNEEFTFSELLEIAGKLPVPPYLNRPSEAKDDETYQTVYSRFEGSVAAPTAGLHFTEGMMGRLRQKGIRTAEVTLHVGAGTFKPVKSETIADHEMHAEFISVPKETIEQLLHHSGKVVAVGTTSMRTVESLYYIGKKLGVNPGLSGHELDVKQWEPYDGTPDIAPKQALRNILRHLEETGRQRLISSTRLMIVPGYEFHFPNAIITNFHQPQSTLLLLVSAFVGDDWHKIYDYALENDYRFLSYGDSSLLWK

SEQ ID NO: 70681 - protein, 213 aa, Proteobacteria bacterium
  misc_feature (1)..(213): tr|R6A861|R6A861_9PROT S-adenosylmethionine:tRNA ribosy ltransferase-isomerase OS=Proteobacteria bacterium CAG: 139 OX=1262986 GN=BN492_01151 PE=3 SV=1
MLEVLDEYGKVPLPPYIQHAAEKSDESRYQTVYAKYPGAVAAPTAGLHFTDELLQQIRDKGCEEVFVTLHVGAGTFQPVRVENLSEHIMHSEWYSISPEAAEKINKAKAEGRRVVCVGTTSLRTVEASASQNPEGKVRAESADTRLFIKPGYEFKVCDAMVTNFHLPKSTLVMLVSALCGRDEILAAYKHAVDEKYRFFSYGDACFLEKKVNQ

SEQ ID NO: 70682 - protein, 355 aa, Proteobacteria bacterium
  misc_feature (1)..(355): tr|A0A1W9I0M4|A0A1W9I0M4_9PROT S-adenosylmethionine:tRN A ribosyltransferase-isomerase OS=Proteobacteria bacter ium SG_bin8 OX=1827387 GN=queA PE=3 SV=1
MQTDDFDFELPAERIALRPAVPRECARLLVIKRHRGIIAETTIADLPLYLRGGDALIVNDTRVIPCALKGYRQRGEARVALNVTLHRRTRGDAWWAFAKPGRRLAVDDMLVFSSADEKLTVMARLCEKGEGGEVLLEFDRAGVALDQAVAAVGDMPLPPYIASRRAADQRDRSDYQTIYASRDGSVAAPTAGLHLTEKMMTRLAVHEIGLERVTLHVGGGTFLPVKSAAIADHRMHAEWGEIDSATAARLAARRAGGGRLIAVGTTAARLLESAARPSGSVNAFRGETDIFMTPGYRFAAVDGLMTNFHLPRSTLFMLVCAFAGYDVMRQAYAHAIATGYRFFSYGDACLLLPEG

SEQ ID NO: 70683 - protein, 356 aa, Proteus hauseri
  misc_feature (1)..(356): tr|A0A410XAV8|A0A410XAV8_PROHU S-adenosylmethionine:tRN A ribosyltransferase-isomerase OS=Proteus hauseri OX=18 3417 GN=queA PE=3 SV=1
MRVSDFRFELPEALIAHYPQPQRSGCRLLSLDGTTGELSHDVFTDVLDKLNAGDLLVFNNTRVIPARLYGRKASGGKIEVLVERMLDEHRVLAHVRASKSPKEGAALILGEDESVQATMVARHDTLFEIRFDDERDVLTILNSIGHMPLPPYIDRPDEESDKELYQTVYNERPGAVAAPTAGLHFDEPLLEALRNKGVEMAFVTLHVGAGTFQPVRVDNIEEHTMHSEYAEVPQDVVDAVLACKARGNKVVAVGTTSVRSLESAANAAKDALIAPFFDDTQIFIYPGYNYQVIDALITNFHLPESTLIMLVSAFAGYKNTMNAYKEAVEQQYRFFSYGDAMFITRNPLAIDEKVGI

SEQ ID NO: 70684 - protein, 357 aa, Proteus hauseri
  misc_feature (1)..(357): tr|V6MWE4|V6MWE4_PROHU S-adenosylmethionine:tRNA ribosy ltransferase-isomerase OS=Proteus hauseri ZMd44 OX=1312 367 GN=tgt PE=3 SV=1
MRVSDFTFELPEALIAHYPQPQRSGCRLLSLDGETGALSHGIFTDVLDKINAGDLLVFNNTRVIPARIYGRKASGGKIEVLVERMLDEHRVLAHVRASKSPKEGAELVLGEDESVQATMVARHDTLFEIRFDDERDVLTILNSIGHMPLPPYIDRPDEESDKELYQTVYNERPGAVAAPTAGLHFDEPLLQALKEKGVEMAFVTLHVGAGTFQPVRVDNIEEHTMHSEYAEVPQEVVDAVLACKARGNRVIAVGTTSVRSLESAAKAAKDALIAPFFDDTQIFIYPGYQYQIIDALITNFHLPESTLIMLVSAFAGYKNTMNAYKEAVEQEYRFFSYGDAMFITCNPFAINEKVGQE

SEQ ID NO: 70685 - protein, 357 aa, Proteus mirabilis
  misc_feature (1)..(357): sp|B4EU12|QUEA_PROMH S-adenosylmethionine:tRNA ribosylt ransferase-isomerase OS=Proteus mirabilis (strain HI432 0) OX=529507 GN=queA PE=3 SV=1
MRVSDFRFDLPESLIAHYPHPQRSGCRLLSLEGKTGNLSHGVFTDVLDKLNAGDLLVFNNTRVIPARIYGRKASGGKIEVLVERMLDEHRVLAHVRASKSPKEGASLILGEDESVQATMIARHDTLFEIRFDDERDVLTILNSIGHMPLPPYIDRPDERSDKELYQTVYNERPGAVAAPTAGLHFDEPLLEALRNKGVEMAFVTLHVGAGTFQPVRVDNIEEHTMHSEYAEVPQEVVDAVLACKARGNRVIAVGTTSVRSLESAAKAAKDALIAPFFDDTQIFIYPGYQYQIIDALITNFHLPESTLIMLVSAFAGYKNTMNAYNVAVEQKYRFFSYGDAMFITRNPLAINEKVGEE

SEQ ID NO: 70686 - protein, 357 aa, Proteus mirabilis
  misc_feature (1)..(357): tr|A0A1Z1SZM5|A0A1Z1SZM5_PROMI S-adenosylmethionine:tRN A ribosyltransferase-isomerase OS=Proteus mirabilis OX= 584 GN=queA PE=3 SV=1
MRVSDFRFDLPESLIAHYPHPQRSGCRLLSLEGKTGNLSHGVFTDVLDKLNAGDLLVFNNTRVIPARIYGRKASGGKIEVLVERMLDEHRVLAHVRASKSPKEGASLILGEDESVQATMIARHDTLFEIRFDDERDVLTILNSIGHMPLPPYIDRPDEGSDKELYQTVYNERPGAVAAPTAGLHFDEPLLEALRNKGVEMAFVTLHVGAGTFQPVRVDNIEEHTMHSEYAEVPQEVVDAVLACKARGNRVIAVGTTSVRSLESAAKAAKDALIAPFFDDTQIFIYPGYQYQVIDALITNFHLPESTLIMLVSAFAGYKNTMNAYNVAVEQKYRFFSYGDAMFITRNPLAINEKVGEE

SEQ ID NO: 70687 - protein, 357 aa, Proteus penneri
  misc_feature (1)..(357): tr|A0A379EIF8|A0A379EIF8_9GAMM S-adenosylmethionine:tRN A ribosyltransferase-isomerase OS=Proteus penneri OX=10 2862 GN=queA PE=3 SV=1
MRVSDFTFELPEALIAHYPQPQRSGCRLLSLEGETGALSHGIFTDVLDKINAGDLLVFNNTRVIPARIYGRKASGGKIEVLVERMLDEHRVLAHVRASKSPKEGAALVLGEDESVQATMVARHDTLFEIRFDDERDVLTILNSIGHMPLPPYIDRPDEESDKELYQTVYNERPGAVAAPTAGLHFDEPLLQALKEKGVEMAFVTLHVGAGTFQPVRVDNIEEHTMHSEYAEVPQDVVDAVLACKARGNRVIAVGTTSVRSLESAAKATNDALIAPFFDDTQIFIYPGYQYQVIDALITNFHLPESTLIMLVSAFAGYRNTMNAYKEAVEQEYRFFSYGDAMFITRNPLAINEKVGQE

SEQ ID NO: 70688 - protein, 307 aa, Proteus penneri
  misc_feature (1)..(307): tr|C0AYU6|C0AYU6_9GAMM S-adenosylmethionine:tRNA ribosy ltransferase-isomerase OS=Proteus penneri ATCC 35198 OX =471881 GN=queA PE=3 SV=1
MLVICWFFNNTRVIPARIYGRKASGGKIEVLVERMLDEHRVLAHVRASKSPKEGAALVLGEDESVQATMVARHDTLFEIRFDDERDVLTILNSIGHMPLPPYIDRPDEESDKELYQTVYNERPGAVAAPTAGLHFDEPLLQALKEKGVEMAFVTLHVGAGTFQPVRVDNIEEHTMHSEYAEVPQDVVDAVLACKARGNRVIAVGTTSVRSLESAAKATNDALIAPFFDDTQIFIYPGYQYQVIDALITNFHLPESTLIMLVSAFAGYRNTMNAYKEAVEQEYRFFSYGDAMFITRNPLAINEKVGQE

SEQ ID NO: 70689 - protein, 354 aa, Proteus sp.; identical to SEQ ID NO: 67669
  misc_feature (1)..(354): tr|A0A1F2HCN9|A0A1F2HCN9_9GAMM S-adenosylmethionine:tRN A ribosyltransferase-isomerase OS=Proteus sp. HMSC10D02 OX=1581079 GN=queA PE=3 SV=1

SEQ ID NO: 70690 - protein, 357 aa, Proteus vulgaris
  misc_feature (1)..(357): tr|A0A379F7A4|A0A379F7A4_PROVU S-adenosylmethionine:tRN A ribosyltransferase-isomerase OS=Proteus vulgaris OX=5 85 GN=queA PE=3 SV=1
MRVSDFTFKLPEALIAHYPQPQRSGCRLLSLEGETGALSHGIFTDVLDKINAGDLLVFNNTRVIPARIYGRKASGGKIEVLVERMLDEHRVLAHVRASKSPKEGATLVLGEDESVQATMVARHDTLFEIRFDDERDVLTLLNSIGHMPLPPYIDRPDEESDKELYQTVYNERPGAVAAPTAGLHFDEPLLQALKEKGVEMAFVTLHVGAGTFQPVRVDNIEEHTMHSEYAEVPQEVVDAVLACKARGNRVIAVGTTSVRSLESAAKATNDALIAPFFDDTQIFIYPGYQYQVIDALITNFHLPESTLIMLVSAFAGYKNTMNAYKEAVEQAYRFFSYGDAMFITRNPLAINEKIGQE

SEQ ID NO: 70691 - protein, 357 aa, Proteus vulgaris
  misc_feature (1)..(357): tr|A0A0G4Q7F7|A0A0G4Q7F7_PROVU S-adenosylmethionine:tRN A ribosyltransferase-isomerase OS=Proteus vulgaris OX=5 85 GN=queA PE=3 SV=1
MRVSDFTFELPEALIAHYPQPQRSGCRLLSLEGETGALSHGIFTDVLDKINAGDLLVFNNTRVIPARIYGRKASGGKIEVLVERMLDEHRVLAHVRASKSPKEGAALVLGEDESVQATMVARHDTLFEIRFDDERDVLTILNSIGHMPLPPYIDRPDEESDKELYQTVYNERPGAVAAPTAGLHFDEPLLQALKEKGVEMAFVTLHVGAGTFQPVRVDNIEEHTMHSEYAEVPQDVVDAVLACKARGNRVIAVGTTSVRSLESAAKATNDALIAPFFDDTQIFIYPGYQYQIIDALITNFHLPESTLIMLVSAFAGYRNTMNAYKEAVEQEYRFFSYGDAMFITRNPLAINEKVGQE

SEQ ID NO: 70692 - protein, 360 aa, Providencia alcalifaciens
  misc_feature (1)..(360): tr|B6XA46|B6XA46_9GAMM S-adenosylmethionine:tRNA ribosy ltransferase-isomerase OS=Providencia alcalifaciens DSM 30120 OX=520999 GN=queA PE=3 SV=1
MRVSDFTFELPEELIAHYPQAERSSCRLLGLDGATGQLTHGVFTDILEKLEPGDLLVFNNTRVIPARLFGRKASGGKIEVLIERMLDEHRVLAHVRASKAPKEGAALLLGEDESVNATMVARHGALFELRFDDARDVLSILNQIGHMPLPPYIDRPDEESDKELYQTVYSQRPGAVAAPTAGLHFDEPLLDALRQKGVEMAFVTLHVGAGTFQPVRVDSIEDHIMHSEYAEVPQEVVDAVLACKARGNRVIAVGTTSVRSLESAAKASQNALIAPFFDDTQIFIYPGYEYQVIDALITNFHLPESTLIMLVSAFAGYQNTMRAYKEAVEQKYRFFSYGDAMFITPNANARFEQVGSAEQE

SEQ ID NO: 70693 - protein, 360 aa, Providencia alcalifaciens; identical to SEQ ID NO: 70692
  misc_feature (1)..(360): tr|X6Q6E5|X6Q6E5_9GAMM S-adenosylmethionine:tRNA ribosy ltransferase-isomerase OS=Providencia alcalifaciens F90 -2004 OX=1256987 GN=queA PE=3 SV=1

SEQ ID NO: 70694 - protein, 356 aa, Providencia burhodogranariea
  misc_feature (1)..(356): tr|K8W199|K8W199_9GAMM S-adenosylmethionine:tRNA ribosy ltransferase-isomerase OS=Providencia burhodogranariea DSM 19968 OX=1141662 GN=queA PE=3 SV=1
MRVSDFTFELPEELIAHYPQAQRSACKLLNLDGPTGQLTHGVFTDILEKLNPGDLLVFNNTRVIPARLFGRKASGGKIEVLVERMLDEHRVLAHIRASKAPKEGAELILGEDESVNATMVARHGALFELQFEDDRDVLTILNQIGHMPLPPYIDRPDEESDKELYQTVYSQRPGAVAAPTAGLHFDEPLLEALRAKGIEMAFVTLHVGAGTFQPVRVDTIEDHVMHSEYAEVPQDVVDAVLACKARGNRVVAVGTTSVRSLESAAKASQNALIAPFFDDTQIFIFPGFEYQIVDILITNFHLPESTLIMLVSAFAGYQNTMQAYKEAVAQKYRFFSYGDAMYITRNPLARLEQVGE

SEQ ID NO: 70695 - protein, 358 aa, Providencia heimbachae
  misc_feature (1)..(358): tr|A0A4D7IM40|A0A4D7IM40_9GAMM S-adenosylmethionine:tRN A ribosyltransferase-isomerase OS=Providencia heimbacha e OX=333962 GN=queA PE=3 SV=1
MRVSDFTFELPEELIAHYPQAQRSSCRLLSLDGETGKLTHGIFTDILDKLEEGDLLVFNNTRVIPARLFGRKVSGGKIEVLIERMLDEHRVLAHVRASKSPKEGAELLLGEDESVKATMIARHGALFELRFDDERDVLSILNQIGHMPLPPYIDRPDEESDKELYQTVYSQRPGAVAAPTAGLHFDEPLLEALRQKGVEMAFVTLHVGAGTFQPVRVDTIEDHIMHSEYAEVPQDVVDAVLACKARGNRVIAVGTTSVRSLESAAKASRSALIAPFFDDTQIFIYPGYEYQVVDTLITNFHLPESTLIMLVSAFAGYQNTMNAYKEAVEQQYRFFSYGDAMFITPNSKARFESIGEKA

SEQ ID NO: 70696 - protein, 358 aa, Providencia heimbachae; identical to SEQ ID NO: 70695
  misc_feature (1)..(358): tr|A0A1B7JQH9|A0A1B7JQH9_9GAMM S-adenosylmethionine:tRN A ribosyltransferase-isomerase OS=Providencia heimbacha e ATCC 35613 OX=1354272 GN=queA PE=3 SV=1

SEQ ID NO: 70697 - protein, 356 aa, Providencia rettgeri
  misc_feature (1)..(356): tr|A0A1J0E370|A0A1J0E370_PRORE S-adenosylmethionine:tRN A ribosyltransferase-isomerase OS=Providencia rettgeri OX=587 GN=queA PE=3 SV=1
MRVSDFTFQLPEELIAHYPQAERSACRLLSLDGSSGQLTHGVFTDVLEKLEKGDLLVFNNTRVIPARLFGRKVSGGKIEVLIERMLDQHRVLAHVRASKAPKEGAELLLGEDESVKATMMARHGALFELRFDDERDVLSILNQIGHMPLPPYIDRPDEEADKELYQTVYSEKPGAVAAPTAGLHFDEPLLEALRQKGVEMAFVTLHVGAGTFQPVRVDTIEDHIMHSEYAEVPQDVVDAVLACKARGNRVVAVGTTSVRSLESAAKASQDALIAPFFDDTQIFIYPGYEYQVIDALITNFHLPESTLIMLVSAFAGYKNTINAYKEAVEQKYRFFSYGDAMFITPNANAPFEKIGE

SEQ ID NO: 70698 - protein, 356 aa, Providencia rettgeri
  misc_feature (1)..(356): tr|A0A2A5Q3B8|A0A2A5Q3B8_PRORE S-adenosylmethionine:tRN A ribosyltransferase-isomerase OS=Providencia rettgeri OX=587 GN=queA PE=3 SV=1
MRVSDFTFELPEELIAHYPQAERSACRLLSLDGGSGQLTHGVFTDILEKLEHGDLLVFNNTRVIPARLFGRKVSGGKIEVLIERMLDEHRVLAHVRASKAPKEGAELLLGEDESVKATMVARHGALFELRFDDERDVLSILNQIGHMPLPPYIDRPDEESDKELYQTVYSEKPGAVAAPTAGLHFDEPLLEALRQKGVEMAFVTLHVGAGTFQPVRVDTIEDHIMHSEYAEVPQEVVDAVLACKARGNRVIAVGTTSVRSLESAAKASQDALIAPFFDDTQIFIYPGYEYQVIDALITNFHLPESTLIMLVSAFAGYKNTMNAYEEAVKQKYRFFSYGDAMFITPNTNARFEKIGE

SEQ ID NO: 70699 - protein, 358 aa, Providencia rustigianii
  misc_feature (1)..(358): tr|A0A379G0Q5|A0A379G0Q5_9GAMM S-adenosylmethionine:tRN A ribosyltransferase-isomerase OS=Providencia rustigian ii OX=158850 GN=queA PE=3 SV=1
MRVSDFTFELPEELIAHYPQAERSSCRLLSLDGATGQLTHGVFTDILEKLEPGDLLVFNNTRVIPARLFGRKASGGKIEVLVERMLDEHRVLAHVRASKAPKEGAALLLGEDESVNATMVARHGALFELRFDDARDVLSILNQIGHMPLPPYIDRPDEESDKELYQTVYSQRPGAVAAPTAGLHFDEPLLEALRQKGIEMAFVTLHVGAGTFQPVRVDSIEDHIMHSEYAEVPQDVVDAVLACKARGNRVIAVGTTSVRSLESAAKASQDALIAPFFDDTQIFIYPGYQYQVVDALITNFHLPESTLIMLVSAFAGYKNTMQAYQEAVEQKYRFFSYGDAMFITPNANARFESIGEAN

SEQ ID NO: 70700 - protein, 358 aa, Providencia rustigianii; identical to SEQ ID NO: 70699
  misc_feature (1)..(358): tr|D1P6C3|D1P6C3_9GAMM S-adenosylmethionine:tRNA ribosy ltransferase-isomerase OS=Providencia rustigianii DSM 4 541 OX=500637 GN=queA PE=3 SV=1

SEQ ID NO: 70701 - protein, 356 aa, Providencia sneebia
  misc_feature (1)..(356): tr|K8W7V6|K8W7V6_9GAMM S-adenosylmethionine:tRNA ribosy ltransferase-isomerase OS=Providencia sneebia DSM 19967 OX=1141660 GN=queA PE=3 SV=1
MRVSDFTFELPEELIAHYPQAQRSACRLLSLDGPSGQLTHGVFTDILDKLAPGDLLVFNNTRVIPARLFGRKASGGKIEVLVERMLDEHRVLAHVRASKAPKEGAELILGEDESVKAEMVARHGALFELRFEDQRDVLSILNQIGHMPLPPYIDRPDEESDKELYQTVYSQRPGAVAAPTAGLHFDDPLLDALREKGVEMAFVTLHVGAGTFQPVRVDSIEDHIMHSEYAEVPQDVVDAVLACKARGNRVIAVGTTSVRSLESAAQASKDALIAPFFDDTQIFIYPGYEYQIIDALITNFHLPESTLIMLVSAFAGYQNTMKAYKEAVEQQYRFFSYGDAMYITRNPDAQFEQVGQ

SEQ ID NO: 70702 - protein, 356 aa, Providencia sp.
  misc_feature (1)..(356): tr|A0A345LX59|A0A345LX59_9GAMM S-adenosylmethionine:tRN A ribosyltransferase-isomerase OS=Providencia sp. WCHPH u000369 OX=2027290 GN=queA PE=3 SV=1
MRVSDFTFELPEELIAHYPQAERSACRLLSLDGGSGQLTHGVFTDILEKLERGDLLVFNNTRVIPARLFGRKVSGGKIEVLIERMLDEHRVLAHVRASKAPKEGAELLLGEDESVKATMVARHGALFELRFDDERDVLSILNQIGHMPLPPYIDRPDEESDKELYQTVYSEKPGAVAAPTAGLHFDEPLLEALRQKGVEMAFVTLHVGAGTFQPVRVDTIEDHIMHSEYAEVPQEVVDAVLACKARGNRVIAVGTTSVRSLESAAKVSQGALIAPFFDDTQIFIYPGYEYQVIDALITNFHLPESTLIMLVSAFAGYKNTMNAYKEAVEQKYRFFSYGDAMFITPNAHASSEKIGE

SEQ ID NO: 70703 - protein, 356 aa, Providencia sp.
  misc_feature (1)..(356): tr|A0A356D992|A0A356D992_PROSP S-adenosylmethionine:tRN A ribosyltransferase-isomerase OS=Providencia sp. OX=58 9 GN=queA PE=3 SV=1
MRVSDFTFELPEELIAHYPQTERSSCRLLSLDGETGKLTQGVFTDIFEKLEQGDLLVFNNTRVIPARLFGRKVSGGKIEVLIERMLDEHRVLAHVRASKAPKEGAELLLGDDESVKATMLARHGALFELRFDDERDVLSILNQIGHMPLPPYIARPDEESDKELYQTVYSQRPGAVAAPTAGLHFDEPLLEALRQKGVEMAFVTLHVGAGTFQPVRVDTIEDHIMHSEYAEVPQDVVDAVLACKARGNRVVAVGTTSVRSLESAAKASQNALIAPFFDDTQIFIYPGYEYQVIDALITNFHLPESTLIMLVSAFAGYKNTMRAYQEAITQKYRFFSYGDAMFITPNSNARFEQVGE

SEQ ID NO: 70704 - protein, 356 aa, Providencia stuartii
  misc_feature (1)..(356): tr|A0A140NHN4|A0A140NHN4_PROSM S-adenosylmethionine:tRN A ribosyltransferase-isomerase OS=Providencia stuartii (strain MRSN 2154) OX=1157951 GN=queA PE=3 SV=1
MRVSDFTFELPEELIAHYPQAQRSACRLLSLDGPTGQLTHGIFTDILEKLSPGDLLVFNNTRVIPARLFGRKASGGKIEMLVERMLDEHRVLAHIRASKAPKEGAELILGEDESVNATMVARHGALFEVQFDDQRDVLSILNEIGHMPLPPYIDRPDEESDKELYQTVYSQRPGAVAAPTAGLHFDEPLLDALREKGVEMAFVTLHVGAGTFQPVRVDTIEDHVMHSEYAEVPQEVVDAVLACKVRGNRVVAVGTTSVRSLESAAKASQDALIAPFFDDTQIFIYPGFEYQVVDALITNFHLPESTLIMLVSAFAGYQNTMQAYKEAVAQKYRFFSYGDAMYITRNPDARFEQIGQ

SEQ ID NO: 70705 - protein, 356 aa, Providencia stuartii
  misc_feature (1)..(356): tr|B2Q6X2|B2Q6X2_PROST S-adenosylmethionine:tRNA ribosy ltransferase-isomerase OS=Providencia stuartii ATCC 258 27 OX=471874 GN=queA PE=3 SV=1
MRVSDFTFELPEELIAHYPQAQRSACRLLSLDGPTGQLTHGIFTDILEKLSPGDLLVFNNTRVIPARLFGRKASGGKIEMLVERMLDEHRVLAHIRASKAPKEGAELILGEDESVNATMVARHGALFEVQFDDQRDVLSILNEIGHMPLPPYIDRPDEESDKELYQTVYSQRPGAVAAPTAGLHFDEPLLDALREKGVEMAFVTLHVGAGTFQPVRVDAIEDHVMHSEYAEVPQEVVDAVLACKARGNRVVAVGTTSVRSLESAAKASQDALIAPFFDDTQIFIYPGFEYQVVDALITNFHLPESTLIMLVSAFAGYQNTMQAYKEAVAQKYRFFSYGDAMYITRNPDARFEQIGL

SEQ ID NO: 70706 - protein, 362 aa, Unknown
  misc_feature (1)..(362): tr|A0A368DZQ9|A0A368DZQ9_9PROT S-adenosylmethionine:tRN A ribosyltransferase-isomerase OS=PS1 clade bacterium O X=2175152 GN=queA PE=3 SV=1
MQVEAFDFDLPDELIALRPASPRDSAKLLHVAPNGHLTDKFIRDLSSYFVKGDVLLVNDTRVIPAKLSGTRLRESVAGDTQQSGAHVELNLIERQGTSTWKCLLKPAKKVKPGDIIRFQDKEGVVYPATVLEKDQGEALIDFKLSLDKMDALLGLIGSMPLPPYIAGKRRPDEKDNQDYQTLFAEHDGAVAAPTAGLHFTPNLQAELEAMGVEICRVTLHVGAGTFLPVKVENTANHKMHAEWGEVKPEIADKLNNAKQNGHRICCVGTTSLRLLESATKKDGIIEPFADATDIFIKPSYCFRAADMLLTNFHLPKSTLFMLVSAFSGLDTMKKAYEHAVQNNYRFYSYGDACLLELADKNN

SEQ ID NO: 70707 - protein, 356 aa, Unknown
  misc_feature (1)..(356): tr|A0A368DMF6|A0A368DMF6_9PROT S-adenosylmethionine:tRN A ribosyltransferase-isomerase OS=PS1 clade bacterium O X=2175152 GN=queA PE=3 SV=1
MKSSPVDLKLFDFQLDKNKIALEPVSPRDHSRLLVLDKNYSDLNFYDLPSFLDAGDTLVLNETKVIPSYFECIRKRADKSSKIKLNLIKELEDGSWLILVKPKKRVRINDKIIFSATDEIEAIVLAFEEDDHVKISFNLDKEKLIKWIFVNGTMPLPPYIMSQRDIKKEDELDYQTVYARTHGSAAAPTAGLHFTENLIEEIKSKGVNICTVILHVGSGTFSPIKTNDILDHKIHSEWCCLGADQVKILNQTKENKNKIVAVGTTSMRILETAVNMEGVFSEYIGETDIYITPGFKFNAVDILVTNFHLPRSSLFVLVCAFYGIQNMQKAYRYAIKNNYRFYSYGDACLIKKNYDI

SEQ ID NO: 70708 - protein, 360 aa, Pseudacidovorax intermedius
  misc_feature (1)..(360): tr|A0A370FNL2|A0A370FNL2_9BURK S-adenosylmethionine:tRN A ribosyltransferase-isomerase OS=Pseudacidovorax inter medius OX=433924 GN=queA PE=3 SV=1
MSRTDFTLSDFDFALPPELVAQQPAPERSASRLLDGTGPGLTDRIFRDLPSLLREGDLLVFNDTQVVKARLFGEKPTGGRLELLIERVLDGQEVAAHMKVSKKPAVGTVLRMDAAPGQPAFRATLLGRWPEEGGPLFRFALESDDGAAPYTLMERHGHVPLPPYIERQQAQESATDAAEDARRYQTVFARVPGAVAAPTAALHFDEALLAQLEARGVRRANVTLHVGAGTFQPVKTENIAEHVMHAERYDVPPATQQAIADCRARGGRVVAVGTTTVRTLESWAASGQAQGDTQIFITPGFRFQHVDLLVTNFHLPKSTLMMLVSALAGYERVMSLYAHAIRERYRFFSYGDAMLLERAA

SEQ ID NO: 70709 - protein, 360 aa, Pseudacidovorax intermedius
  misc_feature (1)..(360): tr|A0A147GX39|A0A147GX39_9BURK S-adenosylmethionine:tRN A ribosyltransferase-isomerase OS=Pseudacidovorax inter medius OX=433924 GN=queA PE=3 SV=1
MSRTDFTLSDFDFALPPELIAQQPAPERSASRLLDGTGPEPTDRIFRDLPALLREGDLLVFNDTQVVKARLFGEKPTGGRLELLIERVLDGQEVAAHMKVSKKPAVGTVLRMDTPPGQPAFRATLLGRWPEEGGPLFRFALASDDGADPYTLMERHGHVPLPPYIERQQAQETAADAAEDARRYQTVFARVPGAVAAPTAALHFDEALLAQLEARGVRRANVTLHVGAGTFQPVKAENIAEHVMHAERYHVPPATQQAIADCRARGGRVVAVGTTTVRTLESWAASGQAQGDTQIFITPGFRFRHVDLLVTNFHLPKSTLMMLVSALAGYERVMALYAHAIRERYRFFSYGDAMLLERAA

SEQ ID NO: 70710 - protein, 361 aa, Pseudacidovorax sp.
  misc_feature (1)..(361): tr|A0A1N6VJ70|A0A1N6VJ70_9BURK S-adenosylmethionine:tRN A ribosyltransferase-isomerase OS=Pseudacidovorax sp. R U35E OX=1907403 GN=queA PE=3 SV=1
MSRTDFTLSDFDFALPPELIAQQPAPERSASRLLDGTGPDPTDRIFRDLPTLLRDGDLLVFNDTQVVKARLFGEKPTGGRLELLIERVLAGQEVAAHMKVSKKPAVGTVLRMDAAPGQPAFRATLLGRWPEEGGPLFRFALESDDGADPYMLMERHGHVPLPPYIERQQAQESASDAAEDARRYQTVFARVPGAVAAPTAALHFDEALLAQLEARGVRRANVTLHVGAGTFQPVKTENIAEHVMHAERYDVPPATQQAIADCRARGGRVVAVGTTTVRTLESWAASGQAQGDTQIFITPGFRFRHVDLLVTNFHLPKSTLMMLVSALAGYERVMALYAHAIRERYRFFSYGDAMLLQRTAP

SEQ ID NO: 70711 - protein, 348 aa, Pseudaestuariivita atlantica
  misc_feature (1)..(348): tr|A0A0L1JN52|A0A0L1JN52_9RHOB S-adenosylmethionine:tRN A ribosyltransferase-isomerase OS=Pseudaestuariivita at lantica OX=1317121 GN=queA PE=3 SV=1
MKLSDFDFDLPEGRIALRPARPRSSARLLVAGRDSIADRIVSDLPQVLRPGDLLVLNDTRVIPARLSGERVRGEARARIEATLLEPQGDGAWTALLKPLRKVKDGEEIVFSPRLSARVTGRADGQATLDFTVADGTFDAALKEAGAMPLPPYIEALRPADAADRDDYQTVWAAEDGAVAAPTASLHFDAPLLKALEARGVGFAHVTLHVGAGTFLPVKVDDVRDHKMHAEWGRVPQAAAEAIARTRAEGGRVIPVGTTALRLIETAARETGEVAAWEGWTDIFITPGFSFRAADALMTNFHLPKSTLMMLVSALMGPERIREIYAHAIAREYRFFSYGDASILLPQEP

SEQ ID NO: 70712 - protein, 358 aa, Pseudaminobacter manganicus
  misc_feature (1)..(358): tr|A0A1V8RJ43|A0A1V8RJ43_9RHIZ S-adenosylmethionine:tRN A ribosyltransferase-isomerase OS=Pseudaminobacter mang anicus OX=1873176 GN=queA PE=3 SV=1
MRVDLFDFELPENRIALRPAEPRDSARLLVVRPEKASEDRIVRDLPSLLEAGDVLVFNDTKVIPAQLNGTRRRGDASAQVEATLHMRVGPDRWHAFMRPGKRIAAGDHIHFGHDGNSCFLGQLDAKVIEKGEGGEVLLEFDLSGPFLDEALHAVGHIPLPPYIASKRDEDERDRTDYQTIYAREEGAVAAPTAGLHFTPELFAALDAKGIERHFVTLHVGAGTFLPVKADDTANHKMHAETGFVPQSVADALNAAKARGGRIVAVGTTSLRLLESAVQPDGTIAAWSGSTDIFITPGYRFRLVDALMTNFHLPRSTLFMLVSALSGLDTMRAAYAHAVDTGYRFYSYGDASLLFRADR

SEQ ID NO: 70713 - protein, 358 aa, Pseudaminobacter salicylatoxidans
  misc_feature (1)..(358): tr|A0A316C8Z1|A0A316C8Z1_PSESE S-adenosylmethionine:tRN A ribosyltransferase-isomerase OS=Pseudaminobacter sali cylatoxidans OX=93369 GN=queA PE=3 SV=1
MRVDLFDFDLPEERIALRPAEPRDAARMLVVRAEAPLEDKRVGDLPSLLEPGDVLVFNDTKVIPAQLKGLRQRGEAVAHVDATLHMRVGADRWKAFVRPGKRVAEGDRIRFGHSAEACMLGALDATVIEKGEAGEVLLAFDLSGPMLDEALHAVGHIPLPPYIASKRPDDERDRKDYQTVYAREEGAVAAPTAGLHFTPELFAALDARRIERRFVTLHVGAGTFLPVKADDTADHKMHAEIGYVSEETAAAINAARAEGRRVVAVGTTSLRLLESAATPDGTMSAWSGATDIFITPGYKFRAVDVLMTNFHLPRSTLFMLVSAFSGLETMRVAYQHAIDTGYRFYSYGDASLLFRTDK

SEQ ID NO: 70714 - protein, 358 aa, Pseudaminobacter sp.
  misc_feature (1)..(358): tr|A0A432V6R0|A0A432V6R0_9RHIZ S-adenosylmethionine:tRN A ribosyltransferase-isomerase OS=Pseudaminobacter sp. CB3 OX=1851146 GN=queA PE=3 SV=1
MRVDLFDFELPEERIALRPAHPRDAARLMVVEPGEAVEDRLVADLPSLLSPGDVVVFNDTKVIPAQLKGIRRRGEAVAQVEATLHMRAGADRWHAFMRPGKRVAAGDRIHFGHDENACFLGALDATVVEKGEGGEALLAFDVSGPFLDEAIRSVGHIPLPPYIASKRPDDASDRADYQTIYAREDGAVAAPTAGLHFTPALLAALDERGIEGHFVTLHVGAGTFLPVKADDTDEHKMHAEIGYVSEATANAINAAKAGGRRIVSIGTTSLRLLESAAGEDGRIKAWSGPTDIFITPGYRFKLVDVLMTNFHLPRSTLFMLVSAFSGIDIMRQAYAHAIETGYRFYSYGDASLLFRADP

SEQ ID NO: 70715 - protein, 351 aa, Pseudanabaena biceps
  misc_feature (1)..(351): tr|L8N6N5|L8N6N5_9CYAN S-adenosylmethionine:tRNA ribosy ltransferase-isomerase OS=Pseudanabaena biceps PCC 7429 OX=927668 GN=queA PE=3 SV=1
MTSSPAELAPDFALSAYDYELPSDRIAQDPVTPRDSSRLLVIERDRNLRHHHFYDLPDFLQAGDLLVFNNTKVIPARMYGQKLSGVPVEILLMEPVGHNRWLALVKPGKRLPVGSTIVFAERVKATVEGIETSTRARELQFHIPEDADLDKIIDQLGKVPLPPYVTDSHTDAERYQTIYAEVSGAIAAPTAGLHFTESLFQTLSDRGIDKSFVTLHVGIGTFRPVETEDITQHVMHNEWCEVPEETIAKIKETKAKGGRVIGVGSTVARSLENANYEAFRGKTNLMIYPGYEWKVLDGMITNFHLPKSTLLMMVASFLGESGREFLMSVYQEAIAKDYRFYSFGDAMLILR

SEQ ID NO: 70716 - protein, 352 aa, Pseudanabaena frigida
  misc_feature (1)..(352): tr|A0A2W4WKY9|A0A2W4WKY9_9CYAN S-adenosylmethionine:tRN A ribosyltransferase-isomerase OS=Pseudanabaena frigida OX=945775 GN=queA PE=3 SV=1
MTSSPVPELELDYTLSAYDYELPSDRIAQDPVTPRDTSRLLVIDAERNLLHHHFYDLPNFLRAGDLLVFNNTKVIPARMYGHKLSGVPVEILLMEPLGNDRWLALVKPGKRLPIGSTIVFADNVKATVEGIETTTRARELQFHIPADANLDLIIDRLGKLPLPPYVTDSHTDPARYQTIYAEVSGAIAAPTAGLHFTDELFQQLQDRGIDKAFVTLHVGIGTFRPVETEDITQHVMHNEWCEVPEQTIAKIKETKARGGRVIGVGSTVARSLESSNFQVFKGKTNLMIYPGYEWKVIDAMVTNFHLPKSTLLMMVASFLGKDGREFLMSVYQEAIAKDYRFYSFGDAVLILR

SEQ ID NO: 70717 - protein, 352 aa, Pseudanabaena sp.
  misc_feature (1)..(352): tr|A0A256BBU7|A0A256BBU7_9CYAN S-adenosylmethionine:tRN A ribosyltransferase-isomerase OS=Pseudanabaena sp. SR4 11 OX=1980935 GN=queA PE=3 SV=1
MTSQPVTELEPDYALSAYDYELPSDRIAQDPVTPRDTSRLLVIDGDRNLLHQHFYDLPNFLRAGDLLVFNNTKVIPARMYGQKLSGVPVEILLMEPIGLNRWLALVKPGKRLPIGSTIVFAENVKATVEGIETTTRARELQFHIPAEADLDKIIQQLGKLPLPPYVTDSHTDPDRYQTIYAEVSGAIAAPTAGLHFTEPLFQKLEDQGIDKAFVTLHVGIGTFRPVETEDITQHVMHNEWCEVSEETIAKIKETKARGGRVIGVGSTVARSLENSNFQAFKGKTNLMIYPGYEWRVLDGMVTNFHLPKSTLLMMMSSFLGEGGREFLMSVYQEAIAKEYRFYSFGDAMLMLR

SEQ ID NO: 70718 - protein, 352 aa, Pseudanabaena sp.
  misc_feature (1)..(352): tr|A0A2W6YTJ1|A0A2W6YTJ1_9CYAN S-adenosylmethionine:tRN A ribosyltransferase-isomerase OS=Pseudanabaena sp. OX= 1153 GN=queA PE=3 SV=1
MTSSPASELAPDFALSAYDYDLPSDRIAQDPVTPRDTSRMLVVDSDRCLHHQHFYDLPQFLQAGDLLVFNNTKVIPARMFGQKLSGVPVEILLMEPVGIDRWLALVKPGKRLPIGSTIIFREDVKATVEGIDAASRARELQFHIPAGADLDKIIEQLGQVPLPPYVTTSNSEPERYQTIYAEISGAIAAPTAGLHFTESLFQTLADKGIDKSFITLHVGLGTFRPVETEDITQHIMHNEWCEVSSETIAKIKETKANGGRVIGVGSTVARSLESANYQAYRGKTNLMIYPGYEWKVLDAMVTNFHLPKSTLLMMVSSFLGKNGREFLMSTYQEAIAKEYRFYSFGDAMLLFK

SEQ ID NO: 70719 - protein, 410 aa, Pseudarcicella hirudinis
  misc_feature (1)..(410): tr|A0A1I5Z3J1|A0A1I5Z3J1_9BACT S-adenosylmethionine:tRN A ribosyltransferase-isomerase OS=Pseudarcicella hirudi nis OX=1079859 GN=queA PE=3 SV=1
MNIPEINLELYTYDLPDERIAKFPLPKRDESKLQVYRQGEIIHTGFKAIGDFLPEESLLVFNNTKVIPARLLFPKTTGAVIQIFLLHPVLPTPVINLAMNIRSECVWECMIGNRKRWKLGDSLEMTLQIDGKEVEVKAEWFDDEKSHVKFSWQLKTESHEDIPDFLEIIQAFGQIPLPPYLNRETTEEDLKTYQTVYSEKQGAVAAPTAGLHFTEEVLQDLSQRGIRQDFLTLHVGAGTFQPIKVKNILEHKMHNEQLVFSRKNIETLLQNIGNIIPVGTTSMRALESLYWYGVKLLTEKDQNPDFFIEKLYPYQYGNNSATAEDALHAILNRMIEDQVEEITGETEIFIFPGYVFKLCKGIVTNYHQPESTLILLIAALIGEDWRKIYREALEKDYRFLSYGDSSLLLP

SEQ ID NO: 70720 - protein, 350 aa, Pseudarcicella hirudinis
  misc_feature (1)..(350): tr|A0A1I5SV88|A0A1I5SV88_9BACT S-adenosylmethionine:tRN A ribosyltransferase-isomerase OS=Pseudarcicella hirudi nis OX=1079859 GN=queA PE=3 SV=1
MKLSEFRFDLPQSLIALHPPENRGDSRLMVVNRKTKTIEHRMFSDILEYFDDGDVMVTNNTKVFPARLYGNKEKTGAKIEVFLLRELNREHRLWDVLVDPARKIRVGNKLYFGDSDLVAEVIDNTTSRGRTIRFLYDGDHNALMKAIDELGETPLPDEIRFKRKAEASDRERYQTIYAEHVGAVAAPTAGMHFSKIIMKRMELKGVHFSPVTLHVGLGTFRQVDVEDLTKHKTDSENFVITEATCQSVNDAIDNSKRVCAVGTTVLKALESSVSADGHLKPIEGWTDKFIFPPYDFRIPNALLTNFHLPESILIMMTSAFGGYELITSAYEQAIKEKYKFFSYGDAMLIL

SEQ ID NO: 70721 - protein, 407 aa, Pseudarcicella sp.
  misc_feature (1)..(407): tr|A0A2S2DTY4|A0A2S2DTY4_9BACT S-adenosylmethionine:tRN A ribosyltransferase-isomerase OS=Pseudarcicella sp. HM E7025 OX=2183547 GN=queA PE=3 SV=1
MKLELAPLSIQAFDYHLPESSIALHPSPSRDASRLLVSQNGQISHHHFYDILDVLPKNSLLVFNNTRVIPARIHLQKSTGATIELFLLKPLASQIATQLTMESQHEVEWECLVGNKKRWKDGEILRHELLIGDEEIQLALHWIDREKNWVKITWNSTHLFAEILNAFGQIPLPPYLGRDLDEEDQERYQTIFSKELGAVAAPTASLHFTQALLDQIPTKGHQSTFITLHVGAGTFLPVKEENVANHPMHREQLIFSIPMMEAILKHEGPIVPVGTTALRALESLYWSGVYLLEEREIPSEGFVLAKEFAYLPRAESYSVKESLEKVIAYLQGHGQDQWIAETELLIMPGYTLHLCDALITNFHQPKSTLLVLVAALIGDHWKEVYAEAQEQGYRFLSYGDTSLLFKQ

SEQ ID NO: 70722 - protein, 350 aa, Pseudarcicella sp.
  misc_feature (1)..(350): tr|A0A2S2DUW5|A0A2S2DUW5_9BACT S-adenosylmethionine:tRN A ribosyltransferase-isomerase OS=Pseudarcicella sp. HM E7025 OX=2183547 GN=queA PE=3 SV=1
MKLSEFRFDLPQSLIALHPTDNREDARMMVVNRKNKTIEHKKFTDIVDYFGEGDVLVTNNTKVFPARLYGNKEKTGAQIEVFLLRELNREHRLWDVLVDPARKIRVGNKLYFGDSDLVAEVIDNTTSRGRTIRFLYDGDHDALMAAIHELGETPLPEEIRSKREATPEDAERFQTIYAEHVGAVAAPTAGLHFSKIIMKKMELNGAQFTPITLHVGLGTFRQVDVEDLTKHKTDSEHFIINQDTCDYVNQAIDNKKHVLSVGTTVMKALESSVSASGHLKPINSWTDKFIFPPYEFKIPTALLTNFHLPESILLMMTSAFGGYELIHEAYQQAIKEKYRFFSYGDVMLII

SEQ ID NO: 70723 - protein, 356 aa, Pseudescherichia vulneris
  misc_feature (1)..(356): tr|A0A090V157|A0A090V157_PSEVU S-adenosylmethionine:tRN A ribosyltransferase-isomerase OS=Pseudescherichia vuln eris NBRC 102420 OX=1115515 GN=queA PE=3 SV=1
MRVADFSFELPESLIAHYPQPERSSCRLLSLDGPTGALTHGTFTDLLDKLNPGDLLVFNNTRVIPARLFGRKASGGKIEVLVERMLDDKRILAHIRASKAPKPGAELLLGDDESIQATMVARHDALFEVEFNDARPVLDILNAIGHMPLPPYIDRPDEDADRELYQTVYSEKPGAVAAPTAGLHFDEPLLAALREKGIEQAFVTLHVGAGTFQPVRVDSIEDHIMHSEYAEVPQEVVDAVLAAKARGNRVIAVGTTSVRSLESAAQAAKSDLIEPFFGDTQIFIYPGYQYKVIDALVTNFHLPESTLIMLVSAFAGYQHTMNAYHAAVEEKYRFFSYGDAMFITYNPSAIHERVGE

SEQ ID NO: 70724 - protein, 348 aa, Pseudidiomarina sp.
  misc_feature (1)..(348): tr|A0A443YY96|A0A443YY96_9GAMM S-adenosylmethionine:tRN A ribosyltransferase-isomerase OS=Pseudidiomarina sp. R 04H25 OX=2487740 GN=queA PE=3 SV=1
MNVKDFSFELPDELIARYPQPERSASRLLNLDGASGKVMHQQFKDIVSHLNAGDLLVFNDTRVIPARMLGEKVSGGKVEVLIERIVDEHRVLAHLRSNRSPKVGARMILEGAVEVEMLGRQDALFELYFHTSEPVLNVLEAHGHMPLPPYIDRPDEDSDRERYQTVYNKKPGAVAAPTAGLHFDDAILKQLQDKGVEFAYVTLHVGAGTFQPVRVDNIEEHHMHSEYAEVPEEVVQAIKATRARGGRVIAVGTTSVRSLESAAQASKMKGQELQPFFADTDIFIYPGYAFQIVDAMITNFHLPESTLIMLVSAFAGRENVLNAYAEAVAERYRFFSYGDAMFVTRTAR

SEQ ID NO: 70725 - protein, 343 aa, Pseudoalteromonadaceae bacterium
  misc_feature (1)..(343): tr|A0A2D6VNI1|A0A2D6VNI1_9GAMM S-adenosylmethionine:tRN A ribosyltransferase-isomerase OS=Pseudoalteromonadacea e bacterium OX=2026783 GN=queA PE=3 SV=1
  misc_feature (259)..(259): Xaa can be any naturally occurring amino acid
  misc_feature (282)..(282): Xaa can be any naturally occurring amino acid
  misc_feature (287)..(287): Xaa can be any naturally occurring amino acid
  misc_feature (296)..(296): Xaa can be any naturally occurring amino acid
  misc_feature (298)..(298): Xaa can be any naturally occurring amino acid
  misc_feature (321)..(322): Xaa can be any naturally occurring amino acid
  misc_feature (328)..(328): Xaa can be any naturally occurring amino acid
MRVADFSFDLPDELIARFPKADRTSSRLLTLDGPSGQVEHKVFSDILSLVNENDLLVFNNTKVIPARMFGQKESGGKLEVLVERVLDEHRVLAHVRASKSPKPGSKIILEGKAEATMVARHGELFELEFAKDENVLDILNDIGHMPLPPYIDRPDNESDRERYQTVYGEKPGAVAAPTAGLHFDDKLMAALKDKGINMAFVTLHVGAGTFQPVRVDSVDEHVMHSEYIEVPDEVVKAVAETKAKGGRVIAVGTTSVRSXESAAKVHGGKLDTYFGDTDIFIXPGYQXNVVDAMVTXFXLPESTLIMLVSAFAGQENIMGAXXTAIEQXYRFFSYGDAMFLTRK

SEQ ID NO: 70726 - protein, 343 aa, Pseudoalteromonadaceae bacterium
  misc_feature (1)..(343): tr|A0A2D7MZU9|A0A2D7MZU9_9GAMM S-adenosylmethionine:tRN A ribosyltransferase-isomerase OS=Pseudoalteromonadacea e bacterium OX=2026783 GN=queA PE=3 SV=1
MRVADFSFDLPDELIARFPKQDRTSSRLLTLDGPTGNVEHKVFSDILDLVNEGDLLVFNNTRVIPARMFGQKASGGKVEVLVERVVDEHRVLAHVRASKSLKPGNEVILEGKAKATMIARHDTLFELEFDRSQNVLDILNDIGHMPLPPYIDRPDTEADRERYQTVYGEKPGAVAAPTAGLHFDDKLMAALKQKGVNMAFVTLHVGAGTFQPVRVESVDEHVMHSEYIEVPDEVVHAVANTKANGGRVIAVGTTSVRSLESAAKVHGGKLESYFGDTDIFIFPGYQFNVVDAMVTNFHLPESTLIMLVSAFSGQDNIMGAYNTAIEQKYRFFSYGDAMFLTRK

SEQ ID NO: 70727 - protein, 343 aa, Pseudoalteromonas agarivorans
  misc_feature (1)..(343): tr|A0A290RSR9|A0A290RSR9_9GAMM S-adenosylmethionine:tRN A ribosyltransferase-isomerase OS=Pseudoalteromonas aga rivorans DSM 14585 OX=1312369 GN=queA PE=3 SV=1
MRVADFSFDLPDELIARFPKQDRTSSRLLTLDGPTGNVEHKVFSDLLDLVNEGDLLVFNNTRVIPARMFGQKASGGKVEVLVERVVDEHRVLAHVRASKSLKPGNEVILEGKAKATMITRHDTLFELEFDRSQNVLDILNDIGHMPLPPYIDRPDTEADRERYQTVYGEKPGAVAAPTAGLHFDDKLMAALKQKGVNMAFVTLHVGAGTFQPVRVESVDEHVMHSEYIEVPDEVVHAVANTKANGGRVIAVGTTSVRSLESAAKVHGGKLESYFGDTDIFIFPGYQFNVVDAMVTNFHLPESTLIMLVSAFSGQDNIMGAYNTAIEQKYRFFSYGDAMFLTRK

SEQ ID NO: 70728 - protein, 343 aa, Pseudoalteromonas agarivorans
  misc_feature (1)..(343): tr|N6V998|N6V998_9GAMM S-adenosylmethionine:tRNA ribosy ltransferase-isomerase OS=Pseudoalteromonas agarivorans S816 OX=1307437 GN=queA PE=3 SV=1
MRVADFSFDLPDELIARFPKQDRTSSRLLTLDGPTGNVEHKVFSDLLDLVNEGDLLVFNNTRVIPARMFGQKASGGKVEVLVERVVDEHRVLAHVRASKSLKPGNEVILEGKAKATMIARHDTLFELEFDRSQNVLDILNDIGHMPLPPYIDRPDTEADRERYQTVYGEKPGAVAAPTAGLHFDDKLMAALKQKGVNMAFVTLHVGAGTFQPVRVESVDEHVMHSEYIEVPDEVVHAVANTKANGGRVIAVGTTSVRSLESAAKVHGGKLESYFGDTDIFIFPGYQFNVVDAMVTNFHLPESTLIMLVSAFSGQDNIMGAYNTAIEQKYRFFSYGDAMFLTRK

SEQ ID NO: 70729 - protein, 344 aa, Pseudoalteromonas aliena
  misc_feature (1)..(344): tr|A0A1Q2GYD1|A0A1Q2GYD1_9GAMM S-adenosylmethionine:tRN A ribosyltransferase-isomerase OS=Pseudoalteromonas ali ena OX=247523 GN=queA PE=3 SV=1
MRVADFSFDLPDELIARFPKTDRTSSRLLKLDGPSGEIEHKVFSDILELVHENDLLVFNNTRVIPARMFGQKASGGKVEVLVERVLDEHRVLAHVRASKSLKPGNEVILEGKAKAIMVARHDTLFELEFDHSQNVLDILNDIGHMPLPPYIDRPDNEADRERYQTVYGEKPGAVAAPTAGLHFDKQLMAALKEKGVQMVFVTLHVGAGTFQPVRVETIDEHVMHSEYIEVPQDVVDAVAQTKANGGRVIAVGTTSMRSLESAAKIHGGKLDTYFGDTDIFIYPGYQFNVVDVMVTNFHLPESTLIMLVSAFSGQENIMGAYNTAIEQQYRFFSYGDAMFLTRKY

SEQ ID NO: 70730 - protein, 346 aa, Pseudoalteromonas amylolytica
  misc_feature (1)..(346): tr|A0A1S1MS38|A0A1S1MS38_9GAMM S-adenosylmethionine:tRN A ribosyltransferase-isomerase OS=Pseudoalteromonas amy lolytica OX=1859457 GN=queA PE=3 SV=1
MRVADFSFELPDELIARHPKKERSSSRLLALDGDSGEISHKVFTDILEMLQPNDIMIFNNTKVIPARMFGQKSTGGKVEVLVERVLDEHRVLAHIRSSKSPKAGATLILEGKAEATMLGRQGELFELEFSAEQGVLSILEEIGHMPLPPYIDRPDEEEDKQRYQTVYNEKPGAVAAPTAGLHFDEKLLQQIKDKGVETAFITLHVGAGTFQPVRVDSVDEHVMHSEYIEVPESVVEAIAAAKAKGGRVIAVGTTSVRSLESAAKVHGGELQAFTGDTDIFIYPGYEFKVVDAMVTNFHLPESTLIMLVSAFAGQTHIMNAYHQAIEQRYRFFSYGDAMFLTKHTRS

SEQ ID NO: 70731 - protein, 343 aa, Pseudoalteromonas arctica
  misc_feature (1)..(343): tr|A0A290S702|A0A290S702_9GAMM S-adenosylmethionine:tRN A ribosyltransferase-isomerase OS=Pseudoalteromonas arc tica A 37-1-2 OX=1117313 GN=queA PE=3 SV=1
MRVADFSFDLPDELIARFPKADRTSSRLLTLDGPSGTLEHKVFSDILDLVNEGDLLVFNNTRVIPARMFGQKASGGKVEVLVERVLDEHRVLAHVRASKSLKVGNEVILEGKAKAIMVARHDTLFELEFDHSQNVLDILNDIGHMPLPPYIDRPDTEADRERYQTVYGEKPGAVAAPTAGLHFDDKLMTALKDKGVNMAFVTLHVGAGTFQPVRVDSVDEHVMHSEYIEVPDDVVAAVAQTKASGGRVIAVGTTSVRSLESAAKVHGGKLDTYFGDTDIFIFPGYQFNVVDAMVTNFHLPESTLIMLVSAFSGQDNIMGAYNTAIEQKYRFFSYGDAMFLTRK

SEQ ID NO: 70732 - protein, 346 aa, Pseudoalteromonas atlantica
  misc_feature (1)..(346): sp|Q15WI5|QUEA_PSEA6 S-adenosylmethionine:tRNA ribosylt ransferase-isomerase OS=Pseudoalteromonas atlantica (st rain T6c / ATCC BAA-1087) OX=342610 GN=queA PE=3 SV=1
MKVSEFQFDLPEALIARYPTKERTASRLMHLATTGLSHLQFTDVVNLINPGDLLIFNNTRVIPARLLGQKASGGKVEVLIERIIDEHHVLAHVRASKSPKEGTQLLLEGKVEMEMVGRQDALFTLKLLNPEPILEILEQYGHMPLPPYIDRPDEESDKERYQTVYNEKPGAVAAPTAGLHFDDVILKQLRDKGVNTEFVTLHVGAGTFQPVRVDNILEHQMHSEYAEVPQNVVDAIAKTKTAGKRVIAVGTTSVRSLESAAKAALENGTALASFFSDTDIFIYPGYKFQVIDAMLTNFHLSESTLIMLVSAFAGKENVMNAYQEAIAQQYRFFSYGDAMFIEKNQD

SEQ ID NO: 70733 - protein, 343 aa, Pseudoalteromonas atlantica
  misc_feature (1)..(343): tr|A0A510ZJK9|A0A510ZJK9_PSEAF S-adenosylmethionine:tRN A ribosyltransferase-isomerase OS=Pseudoalteromonas atl antica OX=288 GN=queA PE=3 SV=1
MRVADFSFDLPDELIARFPKQERTSSRLLTLDGPTGNVEHKVFSDLLDLVNEGDLLVFNNTRVIPARMFGQKASGGKVEVLVERVVDEHRVLAHVRASKSLKPGNEVILEGKAKATMIARHDTLFELEFDRSQNVLDILNDIGHMPLPPYIDRPDTEADRERYQTVYGEKPGAVAAPTAGLHFDDKLMAALKQKGVNMAFVTLHVGAGTFQPVRVESVDEHVMHSEYIEVPDEVVHAVANTKANGGRVIAVGTTSVRSLESAAKVHGGKLESYFGDTDIFIFPGYQFNVVDAMVTNFHLPESTLIMLVSAFSGQDNIMGAYNTAIEQKYRFFSYGDAMFLTRK

SEQ ID NO: 70734 - protein, 346 aa, Pseudoalteromonas byunsanensis
  misc_feature (1)..(346): tr|A0A1S1NBP0|A0A1S1NBP0_9GAMM S-adenosylmethionine:tRN A ribosyltransferase-isomerase OS=Pseudoalteromonas byu nsanensis OX=327939 GN=queA PE=3 SV=1
MRVADFSFELPDELIARHPKKERSSSRLLALDGNSGEISHKVFTDILEMLQPNDIMIFNNTKVIPARMFGQKSTGGKIEVLVERVLDEHRVLAHIRSSKSPKTGATLILEGKAEAIMLGRQGELFELEFQSEQGVLAILEEIGHMPLPPYIDRPDEEEDKQRYQTVYNEKPGAVAAPTAGLHFDEKLLQQIKDKGVETAFITLHVGAGTFQPVRVDSVDEHVMHSEYIEVPEAVVEAITAAKAKGGRVVAVGTTSVRSLESAAKVHGGELKAFTGDTDIFIYPGYQFKVVDAMVTNFHLPESTLIMLVSAFAGQTHIMDAYHSAIEQRYRFFSYGDAMFLTKQTRS

SEQ ID NO: 70735 - protein, 343 aa, Pseudoalteromonas carrageenovora
  misc_feature (1)..(343): tr|A0A2K4XCW0|A0A2K4XCW0_PSEVC S-adenosylmethionine:tRN A ribosyltransferase-isomerase OS=Pseudoalteromonas car rageenovora IAM 12662 OX=1314868 GN=queA PE=3 SV=1
MRVADFSFELPDELIARFPKADRTSSRLLTLDGPTGQVEHKVFSDVLDLVNEGDLLVFNNTRVIPARMFGQKASGGKVEVLVERVVDEHRVLAHVRASKSLKPGNEVILEGKAKVTMIARHDTLFELEFDRNQNVLDILNDIGHMPLPPYIDRPDTEADRERYQTVYGEKPGAVAAPTAGLHFDDKLMAALKNKGVNMAFVTLHVGAGTFQPVRVDSVDEHVMHSEYIEVPDDVVQAVAQTKVNGGRVIAVGTTSVRSLESAAKIHGGKLDSYFGDTDIFIFPGYQFNVVDAMVTNFHLPESTLIMLVSAFSGQDNIMGAYNTAIEQQYRFFSYGDAMFLTRK

SEQ ID NO: 70736 - protein, 346 aa, Pseudoalteromonas citrea
  misc_feature (1)..(346): tr|U1JP54|U1JP54_9GAMM S-adenosylmethionine:tRNA ribosy ltransferase-isomerase OS=Pseudoalteromonas citrea DSM 8771 OX=1117314 GN=queA PE=3 SV=1
MRVADFSFELPDELIARHPKKERTSSRLLTLDGDSGQLGHKTFTDIIDMLEPNDLMVFNNTKVIPARMFGQKASGGKVEVLVERVLDEHSVLAHVRASKSPKPGAELILEGKASATMVARHGELFELKFAGEQTVLSILDDIGHMPLPPYINRPDEEEDKERYQTVYNEKPGAVAAPTAGLHFDEALLAQIQSKGIETAFITLHVGAGTFQPVRVDEIDDHVMHSEYIEVPAEVVDAIARTKAKGGRIVAVGTTSVRSLESAAKASPEDLKAFYGDTDIFIYPGYEFQVVDAMVTNFHLPESTLIMLVSAFSGQDHIMNAYHTAVEEQYRFFSYGDAMFLTKQSQK

SEQ ID NO: 70737 - protein, 345 aa, Pseudoalteromonas denitrificans
  misc_feature (1)..(345): tr|A0A1I1E1A6|A0A1I1E1A6_9GAMM S-adenosylmethionine:tRN A ribosyltransferase-isomerase OS=Pseudoalteromonas den itrificans DSM 6059 OX=1123010 GN=queA PE=3 SV=1
MRVADFSFELPDELIARFPKENRSSSRLLKLNGNSGDISHHVFSDMLDFVNEDDLLVFNNTKVIPARMFGQKASGGKVEVLVERVLDEHRVLAHIRASKSPKPGNELILEGSVKAIMIQRQGSLFELEFSGEENVLEILNKIGHMPLPPYIDRPDTEKDRKRYQTVYGEKPGAVAAPTAGLHFDDDLMAKLKDKGVEMAFVTLHVGAGTFQPVKVETIAEHVMHSEYIEVPESVIEAVKATKARGGRVIAVGTTSVRSLESAAQKSDNELTSFYGDTDIFINPGYEFQVIDAMITNFHLSESTLIMLVSAFSGFDNIKHAYQVAIAEKYRFFSYGDAMFLEPKTQ

SEQ ID NO: 70738 - protein, 343 aa, Pseudoalteromonas distincta
  misc_feature (1)..(343): tr|F3BE14|F3BE14_9GAMM S-adenosylmethionine:tRNA ribosy ltransferase-isomerase OS=Pseudoalteromonas distincta O X=77608 GN=queA PE=3 SV=1
MRVADFSFDLPDELIARFPKADRTSSRLLTLDGPSGTLEHKVFSDILDLVNEGDLLVFNNTRVIPARMFGQKASGGKVEVLVERVLDEHRVLAHVRASKSLKVGNEVILEGKAKAIMVARHDTLFELEFDHSQNVLDILNDIGHMPLPPYIDRPDTDADRERYQTVYGEKPGAVAAPTAGLHFDDKLMTALKDKGVNMAFVTLHVGAGTFQPVRVDSVDEHVMHSEYIEVPDDVVAAVAQTKANGGRVIAVGTTSVRSLESAAKVHGGKLDTYFGDTDIFIFPGYQFNVVDAMVTNFHLPESTLIMLVSAFSGQDNIMGAYNTAIEQQYRFFSYGDAMFLTRK

SEQ ID NO: 70739 - protein, 343 aa, Pseudoalteromonas distincta
  misc_feature (1)..(343): tr|A0A5B0U6N0|A0A5B0U6N0_9GAMM S-adenosylmethionine:tRN A ribosyltransferase-isomerase OS=Pseudoalteromonas dis tincta OX=77608 GN=queA PE=3 SV=1
MRVADFSFDLPDELIARFPKADRTSSRLLTLDGPSGTLEHKVFSDILDLVNEGDLLVFNNTRVIPARMFGQKASGGKVEVLVERVLDEHRVLAHVRASKSLKVGNEVILEGKAKAIMVARHDTLFELEFDHSQNVLDILNDIGHMPLPPYIDRPDTDADRERYQTVYGEKPGAVAAPTAGLHFDDKLMTALKGKGVNMAFVTLHVGAGTFQPVRVDSVDEHVMHSEYIEVPDDVVAAVAQTKANGGRVIAVGTTSVRSLESAAKVHGGKLDTYFGDTDIFIFPGYQFNVVDAMVTNFHLPESTLIMLVSAFSGQDNIMGAYNTAIEQQYRFFSYGDAMFLTRK

SEQ ID NO: 70740 - protein, 343 aa, Pseudoalteromonas elyakovii
  misc_feature (1)..(343): tr|A0A558I1H1|A0A558I1H1_9GAMM S-adenosylmethionine:tRN A ribosyltransferase-isomerase OS=Pseudoalteromonas ely akovii OX=81037 GN=queA PE=3 SV=1
MRVADFSFDLPDELIARFPKADRTSSRLLTLDGPSGTLEHKVFSDILDLVNEGDLLVFNNTRVIPARMFGQKASGGKVEVLVERVLDEHRVLAHVRASKSLKVGNEVILEGKAKAIMVARHDTLFELEFDHSQNVLDILNDIGHMPLPPYIDRPDTDADRERYQTVYGEKPGAVAAPTAGLHFDDKLMMALKDKGVNMAFVTLHVGAGTFQPVRVDSVDEHIMHSEYIEVPDDVVAAVAQTKASGGRVIAVGTTSVRSLESAAKVHGGKLDTYFGDTDIFIFPGYQFNVVDAMVTNFHLPESTLIMLVSAFSGQDNIMGAYNTAIEQQYRFFSYGDAMFLTRK

SEQ ID NO: 70741 - protein, 343 aa, Pseudoalteromonas espejiana
  misc_feature (1)..(343): tr|A0A510XXG0|A0A510XXG0_9GAMM S-adenosylmethionine:tRN A ribosyltransferase-isomerase OS=Pseudoalteromonas esp ejiana OX=28107 GN=queA PE=3 SV=1
MRVADFSFDLPDELIARFPKQDRTSSRLLTLDGPSGNVEHKVFSDILDLVNEGDLLVFNNTRVIPARMFGQKASGGKVEVLVERVVDEHRVLAHVRASKSLKPGNEVILEGKAKATMVARHDTLFELEFDHRQNVLDILNDIGHMPLPPYIDRPDTEADRERYQTVYGEKPGAVAAPTAGLHFDDKLMAALKNKGVNMAFVTLHVGAGTFQPVRVESVDEHVMHSEYIEVPDDVVQAVAQTKASGGRVIAVGTTSVRSLESAAKVHGGELKSYFGDTDIFIFPGYQFNVVDAMVTNFHLPESTLIMLVSAFSGQDNIMGAYNTAIEQQYRFFSYGDAMFLTRK

SEQ ID NO: 70742 - protein, 343 aa, Pseudoalteromonas fuliginea
  misc_feature (1)..(343): tr|A0A063KM47|A0A063KM47_9GAMM S-adenosylmethionine:tRN A ribosyltransferase-isomerase OS=Pseudoalteromonas ful iginea OX=1872678 GN=queA PE=3 SV=1
MRVADFSFDLPDELIARFPKPDRTSSRLLSLDGPSGSVEHKVFSDILELVNENDLLVFNNTRVIPARMFGQKASGGKVEVLVERVLDEHRVLAHVRASKSLKPGNEVILEGKAKAIMVARHDTLFELEFDHSQNVLDILNDIGHMPLPPYIDRPDNEADRERYQTVYGEKPGAVAAPTAGLHFDKQLMAALKDKGVQMAFVTLHVGAGTFQPVRVDSVDDHIMHSEYIEVPEDVVAAVAKTKAKGGRVIAVGTTSVRSLESAAKVHGGKLDTYFGDTDIFIYPGYQFNVVDAMVTNFHLPESTLIMLVSAFSGQDNIMGAYNTAIEQQYRFFSYGDAMFLTRK

SEQ ID NO: 70743 - protein, 343 aa, Pseudoalteromonas fuliginea
  misc_feature (1)..(343): tr|A0A5B0USM5|A0A5B0USM5_9GAMM S-adenosylmethionine:tRN A ribosyltransferase-isomerase OS=Pseudoalteromonas ful iginea OX=1872678 GN=queA PE=3 SV=1
MRVADFSFDLPDELIARFPKPDRTSSRLLSLDGPSGSVEHKVFSDILELVNENDLLVFNNTRVIPARMFGQKASGGKVEVLVERVLDEHRVLAHVRASKSLKPGNEVILEGKAKAIMVARHDTLFELEFDHSQNVLDILNDIGHMPLPPYIDRPDNEADRERYQTVYGEKPGAVAAPTAGLHFDKQLMAALKDKGVQMAFVTLHVGAGTFQPVRVDSVDDHIMHSEYIEVPEDVVAAVAKTKAKGGRVIAVGTTSVRSLESAAKVHGGKLGTYFGDTDIFIYPGYQFNVVDAMVTNFHLPESTLIMLVSAFSGQDNIMGAYNTAIEQQYRFFSYGDAMFLTRK

SEQ ID NO: 70744 - protein, 343 aa, Pseudoalteromonas haloplanktis
  misc_feature (1)..(343): sp|Q3ILB9|QUEA_PSEHT S-adenosylmethionine:tRNA ribosylt ransferase-isomerase OS=Pseudoalteromonas haloplanktis (strain TAC 125) OX=326442 GN=queA PE=3 SV=1
MRVADFSFDLPDELIARFPKQDRTSSRLLSLDGPSGVVEHKVFSDLLELVNENDLLVFNNTRVIPARMFGQKASGGKVEVLVERVLDEHRVLAHVRASKSLKPGNEVILEGKAKATMVARHDTLFELEFEHSQNVLDILNDIGHMPLPPYIDRPDNEADRERYQTVYGEKPGAVAAPTAGLHFDDKLMTALKNKGVQMAFVTLHVGAGTFQPVRVATVDEHIMHSEYIEVPDDVVAAVANTKANGGRVIAIGTTSVRSLESAAKVHGGKLDTYFGDTDIFIYPGYQFNVVDAMITNFHLPESTLIMLVSAFAGQNNIMGAYNTAIEQQYRFFSYGDAMFLTRK

SEQ ID NO: 70745 - protein, 343 aa, Pseudoalteromonas issachenkonii
  misc_feature (1)..(343): tr|A0A290SJW7|A0A290SJW7_9GAMM S-adenosylmethionine:tRN A ribosyltransferase-isomerase OS=Pseudoalteromonas iss achenkonii OX=152297 GN=queA PE=3 SV=1
MRVADFSFDLPDELIARFPKADRTSSRLLSLNGPTGEIEHKIFSDILELVNENDLLVFNNTKVIPARMFGQKESGGKVEVLVERVLDEHRVLAHIRASKSPKPGNVLILEGKAKAIMVARHDTLFELEFDRNENVLDILNDVGHMPLPPYIDRPDNEADRERYQTVYGEKPGAVAAPTAGLHFDDKLMAALKDKGVQMAFVTLHVGAGTFQPVRVESVDEHIMHSEYIEVPQDVVDAVASTKAKGGRVIAIGTTSVRSLESAAKIHGGKLDTYFGDTDIFIFPGYQFNVVDAMVTNFHLPESTLIMLVSAFAGQDNIMGAYNTAIEQQYRFFSYGDAMFLTRK

SEQ ID NO: 70746 - protein, 343 aa, Pseudoalteromonas lipolytica
  misc_feature (1)..(343): tr|A0A0P7E2F7|A0A0P7E2F7_9GAMM S-adenosylmethionine:tRN A ribosyltransferase-isomerase OS=Pseudoalteromonas lip olytica OX=570156 GN=queA PE=3 SV=1
MRVADFSFDLPDELIARFPKADRTSSRLLTLDGPSGQVEHKVFSDILSLVNENDLLVFNNTKVIPARMFGQKESGGKLEVLVERVLDEHRVLAHVRASKSPKPGSKIILEGKAEATMVARHGELFELEFAKDENVLDILNDIGHMPLPPYIDRPDNESDRERYQTVYGEKPGAVAAPTAGLHFDDKLMAALKDKGINMAFVTLHVGAGTFQPVRVDSVDEHVMHSEYIEVPDEVVKAVAETKAKGGRVIAVGTTSVRSLESAAKVHGGKLDTYFGDTDIFIYPGYQFNVVDAMVTNFHLPESTLIMLVSAFAGQENIMGAYHTAIEQKYRFFSYGDAMFLTRK

SEQ ID NO: 70747 - protein, 343 aa, Pseudoalteromonas lipolytica
  misc_feature (1)..(343): tr|Z5XKL8|Z5XKL8_9GAMM S-adenosylmethionine:tRNA ribosy ltransferase-isomerase OS=Pseudoalteromonas lipolytica SCSIO 04301 OX=1452721 GN=queA PE=3 SV=1
MRVADFSFDLPDELIARFPKADRTSSRLLTLDGPTGQVEHKVFSDILSLVNENDLLVFNNTKVIPARMFGQKESGGKLEVLVERVLDEHRVLAHVRASKSPKPGSKIILEGKAEATMVARHGELFELEFAKDENVLDILNDIGHMPLPPYIDRPDNEADRERYQTVYGEKPGAVAAPTAGLHFDDKLMAALKDKGINMAFVTLHVGAGTFQPVRVDSVDEHVMHSEYIEVPDEVVKAVAETKAKGGRVVAVGTTSVRSLESAAKVHGGKLDTYFGDTDIFIYPGYQFNVVDAMVTNFHLPESTLIMLVSAFAGQENIMGAYHTAIEQQYRFFSYGDAMFLTRK

SEQ ID NO: 70748 - protein, 344 aa, Pseudoalteromonas luteoviolacea
  misc_feature (1)..(344): tr|A0A167F196|A0A167F196_9GAMM S-adenosylmethionine:tRN A ribosyltransferase-isomerase OS=Pseudoalteromonas lut eoviolacea H33 OX=1365251 GN=queA PE=3 SV=1
MRVADFNFELPDELIARHPKAERTSSRLLALNGNNGELEHKIFKDIIDLFEPEDLIIFNNTKVIPARMFGQKSTGGKVEVLVERIVDEHRVLAHVRSSKSPKPGAELILEGKAHATMVARHGELFELEFKGEHSVLTILDEIGHMPLPPYIDRPDEEGDKERYQTVYGEKPGAVAAPTAGLHFDDNLMAQLKDKGVEMAFVTLHVGAGTFQPVRVDDVNDHHMHSEYIEVPDEVVDAVAKCKSRGGRVIAVGTTSVRSLESAAKVHGGELKTFYGDTDIFIYPGYQFNVVDVMITNFHLPESTLIMLVSAFSGQEHIMNAYHEAIAQKYRFFSYGDAMFLTKKQ

SEQ ID NO: 70749 - protein, 344 aa, Pseudoalteromonas luteoviolacea
  misc_feature (1)..(344): tr|A0A0F6ACM4|A0A0F6ACM4_9GAMM S-adenosylmethionine:tRN A ribosyltransferase-isomerase OS=Pseudoalteromonas lut eoviolacea S4054 OX=1129367 GN=queA PE=3 SV=1
MRVADFNFELPDELIARHPKAERTSSRLLTLNGTSGDLEHKIFKDIIDLIEPEDLIIFNNTKVIPARMFGQKSTGGKVEVLVERILDEHRVLAHVRSSKSPKPGAELILEDKAQATMVARHGELFELEFKGEHSVLSILDEIGHMPLPPYIDRPDEEGDKERYQTVYGEKPGAVAAPTAGLHFDDALMAQLKDKGVEMAFVTLHVGAGTFQPVRVDDINDHHMHSEYIEVPDEVVDAVAKCKSRGGRVIAVGTTSVRSLESAAKVHGGELKTFYGDTDIFIYPGYQFNVVDVMITNFHLPESTLIMLVSAFSGQEHIMNAYHEAIAQKYRFFSYGDAMFLTKKQ

SEQ ID NO: 70750 - protein, 343 aa, Pseudoalteromonas marina
  misc_feature (1)..(343): tr|U1K2G3|U1K2G3_9GAMM S-adenosylmethionine:tRNA ribosy ltransferase-isomerase OS=Pseudoalteromonas marina DSM 17587 OX=1117316 GN=queA PE=3 SV=1
MRVADFSFDLPDELIARFPKKDRTSSRLLSLDGPTGEISHKVFSDILELVNENDLLIFNNTRVIPARMFGQKASGGKVEVLVERVLDEHRVLAHVRASKSLKPGNEVILEGKAKATMIARHDTLFELEFDHSKNVLDTLNDIGHMPLPPYIDRPDDEADRERYQTVYGEKPGAVAAPTAGLHFDEPLMAALKNKGVNMAFVTLHVGAGTFQPVRVETIDEHVMHSEYIEVPQDVVDAVAQTKASGGRVIAVGTTSMRSLESAAKIHGGKLDTYFGDTDIFIFPGYQFNVVDAMVTNFHLPESTLIMLVSAFSGQDNIMGAYNTAIEQKYRFFSYGDAMFLTRK

SEQ ID NO: 70751 - protein, 343 aa, Pseudoalteromonas neustonica
  misc_feature (1)..(343): tr|A0A558IPF6|A0A558IPF6_9GAMM S-adenosylmethionine:tRN A ribosyltransferase-isomerase OS=Pseudoalteromonas neu stonica OX=1840331 GN=queA PE=3 SV=1
MRVADFSFDLPDELIARFPKQDRTSSRLLTLDGPSGAVEHKIFSDIIDLVNENDLLVFNNTKVIPARMYGQKASGGKVEVLVERVLDEHRVLAHVRASKSPKPGTELILEGKAQATMVGRHGELFELEFSDSQNVLEILNDIGHMPLPPYIDRPDTDEDRKRYQTVYGEKPGAVAAPTAGLHFDDTLMAAIKAKGVNMAFVTLHVGAGTFQPVRVDSVDDHIMHSEYIEVPDDVVAAVAATKANGGRVIAVGTTSVRSLESAAKIHGGQLASYFGDTDIFIYPGYQFNVVDAMVTNFHLSESTLIMLVSAFAGQDNIMSAYQTAIAQKYRFFSYGDAMFLTRK

SEQ ID NO: 70752 - protein, 343 aa, Pseudoalteromonas nigrifaciens; identical to SEQ ID NO: 70744
  misc_feature (1)..(343): tr|A0A379HEB8|A0A379HEB8_9GAMM S-adenosylmethionine:tRN A ribosyltransferase-isomerase OS=Pseudoalteromonas nig rifaciens OX=28109 GN=queA PE=3 SV=1

SEQ ID NO: 70753 - protein, 345 aa, Pseudoalteromonas peptidolytica
  misc_feature (1)..(345): tr|A0A510U8F0|A0A510U8F0_9GAMM S-adenosylmethionine:tRN A ribosyltransferase-isomerase OS=Pseudoalteromonas pep tidolytica OX=61150 GN=queA PE=3 SV=1
MRVADFSFDLPDELIARHPMKERSSSRLLTLNGNSGEIEHKIFKDIVALINPEDLIIFNNTKVIPARMFGQKASGGKLEVLVERVVDERTVLAHVRASKSPKPGTKIELEGQATAEMVQRHGELFELRFEGEENVLAILDKIGHMPLPPYIDRPDDDEDKERYQTVYGEKPGAVAAPTAGLHFDDELMAKLKDKGVEMAFVTLHVGAGTFQPVRVDSVEEHVMHSEYIEVSEEVVQAIKAAKARGGRVIAVGTTSVRSLESAAKANGGEIAPLYGDTDIFIYPGYRFNVVDAMVTNFHLPESTLIMLVSAFAGQEHIMNAYQTAIAKQYRFFSYGDAMFLQKQDM

SEQ ID NO: 70754 - protein, 345 aa, Pseudoalteromonas phenolica
  misc_feature (1)..(345): tr|A0A0S2JYA4|A0A0S2JYA4_9GAMM S-adenosylmethionine:tRN A ribosyltransferase-isomerase OS=Pseudoalteromonas phe nolica OX=161398 GN=queA PE=3 SV=1
MRVADFSFELPDELIARHPMADRTSSRLLTLDGNTGELGHKIFKDLIEFLNPNDLMIFNNTKVIPARMYGQKSTGGKVEVLVERVVDEHRVLAHVRSSKSPKEGATLILEGKAEATMVARHGELFELEFKGEQTVLNILDDIGHMPLPPYIDRPDTEEDKARYQTVYNEKPGAVAAPTAGLHFDEALLEKIKEKGIETQFITLHVGAGTFQPVRVDSVDEHVMHSEYIEVSQEVVDAIKKAKANGGRVIAVGTTSVRSLESAAKASEGELQPFYGDTDIFIYPGYEFQVVDAMITNFHLPESTLIMLVSAFAGQDHIINAYKTAVTEEYRFFSYGDAMFITKQDK

SEQ ID NO: 70755 - protein, 345 aa, Pseudoalteromonas phenolica
  misc_feature (1)..(345): tr|A0A4Q7IPX8|A0A4Q7IPX8_9GAMM S-adenosylmethionine:tRN A ribosyltransferase-isomerase OS=Pseudoalteromonas phe nolica OX=161398 GN=queA PE=3 SV=1
MRVADFSFELPDELIARHPMADRTASRLLTLDGNTGELGHKIFKDLIDFLNPNDLMIFNNTKVIPARMYGQKSTGGKVEVLVERVVDEHRVLAHVRSSKSPKEGATLILEGKAEATMIARHGELFELEFKGEQTVLNILDDIGHMPLPPYIDRPDTEEDKARYQTVYNEKPGAVAAPTAGLHFDETLLEKIKEKGIETQFITLHVGAGTFQPVRVDSVDEHVMHSEYIEVSQEVVDAIKKTKANGGRVIAVGTTSVRSLESAAKASEVELQPLYGDTDIFIYPGYEFQVVDAMITNFHLPESTLIMLVSAFSGQDHIINAYKTAVNEEYRFFSYGDAMFITKQDK

SEQ ID NO: 70756 - protein, 345 aa, Pseudoalteromonas piratica
  misc_feature (1)..(345): tr|A0A0A7EAW4|A0A0A7EAW4_9GAMM S-adenosylmethionine:tRN A ribosyltransferase-isomerase OS=Pseudoalteromonas pir atica OX=1348114 GN=queA PE=3 SV=1
MRVADFNFELPDELIARFPMEERTASRLLKLEGNSGEITHHTFADVLDFVNPNDLIIFNNTKVIPARMFGQKTSGGKVEVLVERVVDKHTVLAHVRANKSPKVGNELILEGSATAVMQGRQGELFELKFEGEEGVLDILDRIGHMPLPPYIDRPDNEKDRNRYQTVYGEKPGAVAAPTAGLHFDDSLLEKLKAKGVDLGFVTLHVGAGTFQPVRVDKIEDHHMHSEYIEVPEQVVAQIKACRERGGRVVAVGTTSMRSLESAAMKSDGELAPFYGDTDIFIFPGYEFQVVDAMITNFHLPESTLIMLVSAFAGQDNIMNAYQTAIAEKYRFFSYGDAMFLTKKES

SEQ ID NO: 70757 - protein, 345 aa, Pseudoalteromonas piscicida
  misc_feature (1)..(345): tr|A0A2A5JQA5|A0A2A5JQA5_PSEO7 S-adenosylmethionine:tRN A ribosyltransferase-isomerase OS=Pseudoalteromonas pis cicida OX=43662 GN=queA PE=3 SV=1
MRVADFSFDLPDELIARHPMKERSSSRLLTLNGNSGEIEHKVFKDILALINPEDLIIFNNTKVIPARMFGQKASGGKLEVLVERVVDAHTVLAHIRASKSPKAGTKIELEGQATAEMVQRHGELFELKFDGDENVLAILDKIGHMPLPPYIDRPDDEEDKERYQTVYGEKPGAVAAPTAGLHFDDDLMAKLKDKGVEMAFVTLHVGAGTFQPVRVDSVEEHVMHSEYIEVSDEVVQAVNAAKARGGRVIAVGTTSVRSLESAAKANGGEIAPLYGDTDIFIYPGYQFNVVDAMVTNFHLPESTLIMLVSAFAGQEHIMNAYKTAIEQKYRFFSYGDAMFLQKQDK

SEQ ID NO: 70758 - protein, 345 aa, Pseudoalteromonas piscicida
  misc_feature (1)..(345): tr|A0A0F4P7H3|A0A0F4P7H3_PSEO7 S-adenosylmethionine:tRN A ribosyltransferase-isomerase OS=Pseudoalteromonas pis cicida OX=43662 GN=queA PE=3 SV=1
MRVADFSFDLPDELIARHPMKERSSSRLLTLNGNSGEIEHKVFRDILALINPEDLIIFNNTKVIPARMFGQKASGGKLEVLVERVVDERTVLAHVRASKSPKPGTKIELEGQATAEMVQRHGELFELRFEGEENVLAILDKIGHMPLPPYIDRPDDEEDKERYQTVYGEKPGAVAAPTAGLHFDDELMAKLKDKGVEMAFVTLHVGAGTFQPVRVDSVEEHVMHSEYIEVSAEVVEAIKAAKARGGRVIAVGTTSVRSLESAAKANGGEIAPLYGDTDIFIYPGYRFNVVDAMVTNFHLPESTLIMLVSAFAGQQHIMKAYQTAIEQKYRFFSYGDAMFLQKQDK

SEQ ID NO: 70759 - protein, 343 aa, Pseudoalteromonas porphyrae
  misc_feature (1)..(343): tr|A0A0N1MWI8|A0A0N1MWI8_9GAMM S-adenosylmethionine:tRN A ribosyltransferase-isomerase OS=Pseudoalteromonas por phyrae OX=187330 GN=queA PE=3 SV=1
MRVADFSFDLPDELIARFPKQDRTSSRLLTLDGPSGDLEHKIFSDVLDLVNENDLLVFNNTKVIPARMYGQKSSGGKVEVLVERVLDEHRVLAHVRASKSPKPGTTIILEGKAEATMVGRHGELFELQFTDSQNVLEILNDIGHMPLPPYIDRPDTDEDRKRYQTVYGEKPGAVAAPTAGLHFDDALMAALKAKGVSMAFVTLHVGAGTFQPVRVDSVDDHIMHSEYIEVPDDVVAAVAATKAKGGRVIAVGTTSVRSLESAAKIHGGQLATYFGDTDIFIYPGYEFNVVDAMVTNFHLSESTLIMLVSAFAGQDNIMGAYQTAIEQKYRFFSYGDAMFLTRK

SEQ ID NO: 70760 - protein, 343 aa, Pseudoalteromonas profundi
  misc_feature (1)..(343): tr|A0A3A3EUP3|A0A3A3EUP3_9GAMM S-adenosylmethionine:tRN A ribosyltransferase-isomerase OS=Pseudoalteromonas pro fundi OX=1774956 GN=queA PE=3 SV=1
MRVADFSFDLPDELIARFPKADRTSSRLLTLDGPSGHLEHKVFSDILSLVNENDLLVFNNTKVIPARMFGQKESGGKLEVLVERVLDEHRVLAHVRASKSPKPGSKIILEGKAEATMVARHGELFELEFAKDENVLDILNDIGHMPLPPYIDRPDNESDRERYQTVYGEKPGAVAAPTAGLHFDDKLMVALKDKGINMAFVTLHVGAGTFQPVRVDSVDEHVMHSEYIEVPDDVVKAVAETKAKGGRVIAVGTTSVRSLESAAKVHGGKLDTYFGDTDIFIYPGYQFNVVDAMVTNFHLPESTLIMLVSAFAGQDNIMGAYHTAIKEQYRFFSYGDAMFLTRK

SEQ ID NO: 70761 - protein, 346 aa, Pseudoalteromonas rubra
  misc_feature (1)..(346): tr|A0A0F4QS29|A0A0F4QS29_9GAMM S-adenosylmethionine:tRN A ribosyltransferase-isomerase OS=Pseudoalteromonas rub ra OX=43658 GN=queA PE=3 SV=1
MRVADFSFELPDELIARHPKKERSSSRLLTLDGNTGELQHKVFKDIVDLINPEDLIIFNNTKVIPARMFGQKATGGKLEVLVERVLDEHSVLAHVRASKSPKEGAEIILEGKAKATMVARHGELFELKFHGDSSVLSILDEIGHMPLPPYIDRPDEEEDKERYQTVYGEKPGAVAAPTAGLHFDDVLMAQLKDKGVEMAFVTLHVGAGTFQPVRVENVNDHHMHSEYIEVPQEVVDAIAAARQRGGRVIAIGTTSVRSLESAAKAHPDELKPFYGDTDIFIYPGYQFQLVDAMVTNFHLPESTLIMLVSAFAGQSHIMHAYETAIAEQYRFFSYGDAMFLTRQDKA

SEQ ID NO: 70762 - protein, 346 aa, Pseudoalteromonas rubra
  misc_feature (1)..(346): tr|U1KUK9|U1KUK9_9GAMM S-adenosylmethionine:tRNA ribosy ltransferase-isomerase OS=Pseudoalteromonas rubra DSM 6 842 OX=1117318 GN=queA PE=3 SV=1
MRVADFSFELPDELIARHPKKERSSSRLLTLDGNTGDLQHKVFKDIVDLINPEDLIIFNNTKVIPARMFGQKATGGKLEVLVERVLDERSVLAHVRASKSPKEGAEILLEGKAKATMVARHGELFELKFHGDASVLSILDEIGHMPLPPYIDRPDEEEDKERYQTVYGEKPGAVAAPTAGLHFDDALMTQLKDKGVEMAFVTLHVGAGTFQPVRVDDVNDHQMHSEYIEVPQEVVDAIAAARQRGGRVIAIGTTSVRSLESAAKAHPDELKPFYGDTDIFIYPGYQFQLVDAMVTNFHLPESTLIMLVSAFSGQSHIMHAYETAIAEQYRFFSYGDAMFLTRQNKA

SEQ ID NO: 70763 - protein, 346 aa, Pseudoalteromonas ruthenica
  misc_feature (1)..(346): tr|A0A0F4Q2F3|A0A0F4Q2F3_9GAMM S-adenosylmethionine:tRN A ribosyltransferase-isomerase OS=Pseudoalteromonas rut henica OX=151081 GN=queA PE=3 SV=1
MRVADFSFELPEELIARFPQKERSQSRLLKVEGNSGNTTHHIFKDIIDFIEPGDLLVFNNTKVIPARMHGQKRSGGKVEVLVERVLDDKRVLAHVRANKSPKPGTVMVLEEQAQMEMIGRQGELFELELKGDMSVLDTLEQIGHMPLPPYIDRPDTDEDKQRYQTVYGEKPGAVAAPTAGLHFDEPLMAALKDKGVAMAFVTLHVGAGTFQPVRVDSVQEHHMHSEYIDVPQDVVDAIAKTKAQGGRVIAVGTTSVRSLESAAKIGGGELISYVGDTDIFIYPGYQFNVVDAMITNFHLPESTLIMLVSAFSGQEHIMSAYQEAIKERYRFFSYGDAMFLTRQDKD

SEQ ID NO: 70764 - protein, 346 aa, Pseudoalteromonas sp.; identical to SEQ ID NO: 70763
  misc_feature (1)..(346): tr|A0A4Q6YEY4|A0A4Q6YEY4_9GAMM S-adenosylmethionine:tRN A ribosyltransferase-isomerase OS=Pseudoalteromonas sp. CO325X OX=1777262 GN=queA PE=3 SV=1

SEQ ID NO: 70765 - protein, 343 aa, Pseudoalteromonas sp.
  misc_feature (1)..(343): tr|A0A4S1F6I9|A0A4S1F6I9_9GAMM S-adenosylmethionine:tRN A ribosyltransferase-isomerase OS=Pseudoalteromonas sp. MEBiC 03607 OX=2563601 GN=queA PE=3 SV=1
MRVADFSFDLPDELIARFPKADRTSSRLLTLDGPSGKVEHKVFSDILSLVNENDLLVFNNTKVIPARMFGQKESGGKLEVLVERVLDEHRVLAHVRASKSPKPGSKIILEGKAEAIMVARHGELFELEFAKDENVLDILNDIGHMPLPPYIDRPDNESDRERYQTVYGEKPGAVAAPTAGLHFDDKLMTALKDKGINMAFVTLHVGAGTFQPVRVDSVDEHVMHSEYIEVPDDVVKAVAETKAKGGRVIAVGTTSVRSLESAAKVHGGKLDTYFGDTDIFIYPGYQFNVVDAMVTNFHLPESTLIMLVSAFAGQENIMGAYHTAIEQKYRFFSYGDAMFLTRK

SEQ ID NO: 70766 - protein, 345 aa, Pseudoalteromonas spongiae
  misc_feature (1)..(345): tr|A0A290T5B4|A0A290T5B4_9GAMM S-adenosylmethionine:tRN A ribosyltransferase-isomerase OS=Pseudoalteromonas spo ngiae UST010723-006 OX=1117319 GN=queA PE=3 SV=1
MRVADFNFELPDELIARFPMEDRTASRLLKLAGNSGEITHHTFADVLDFINPNDLIIFNNTKVIPARMFGQKASGGKVEVLVERVVDKHTVLAHVRANKSPKVGNELILEETATAVMQGRQGELFELKFEGEEGVLDILDRIGHMPLPPYIDRPDNEKDRNRYQTVYGEKPGAVAAPTAGLHFDDALLAKLKDKGVDLGFVTLHVGAGTFQPVRVDKIEDHHMHSEYIEVPEQVVAQIKACRERGGRVVAVGTTSMRSLESAAMKSEGELAPFYGDTDIFIFPGYEFQVVDAMITNFHLPESTLIMLVSAFAGQENIMNAYNTAIEEKYRFFSYGDAMFLTKKDI

SEQ ID NO: 70767 - protein, 343 aa, Pseudoalteromonas tetraodonis
  misc_feature (1)..(343): tr|A0A1E3WV75|A0A1E3WV75_9GAMM S-adenosylmethionine:tRN A ribosyltransferase-isomerase OS=Pseudoalteromonas tet raodonis OX=43659 GN=queA PE=3 SV=1
MRVADFSFDLPDELIARFPKADRTSSRLLSLDGPSGAVEHKIFSDILELVNENDLLVFNNTKVIPARMFGQKESGGKVEVLVERVLDEHRVLAHIRASKSPKPGNVLILEGKAKAIMVARHDTLFELEFDRSENVLDILNDVGHMPLPPYIDRPDNEADRERYQTVYGEKPGAVAAPTAGLHFDDKLMTALKDKGVQMAFVTLHVGAGTFQPVRVESVDEHIMHSEYIEVPQDVVDAVASTKAKGGRVIAVGTTSVRSLESAAKIHGGKLDTYFGDTDIFIFPGYQFNVVDAMVTNFHLPESTLIMLVSAFAGQDNIMGAYNTAIEQQYRFFSYGDAMFLTRK

SEQ ID NO: 70768 - protein, 343 aa, Pseudoalteromonas tetraodonis
  misc_feature (1)..(343): tr|A0A290TI40|A0A290TI40_9GAMM S-adenosylmethionine:tRN A ribosyltransferase-isomerase OS=Pseudoalteromonas tet raodonis OX=43659 GN=queA PE=3 SV=1
MRVADFSFDLPDELIARFPKADRTSSRLLSLNGPTGEIEHKIFSDILELVNENDLLVFNNTKVIPARMFGQKESGGKVEVLVERVLDEHRVLAHIRASKSPKPGNVLILEGKAKAIMVARHDTLFELEFDRSENVLDILNDVGHMPLPPYIDRPDNEADRERYQTVYGEKPGAVAAPTAGLHFDDKLMAALKDKGVQMAFVTLHVGAGTFQPVRVESVDEHIMHSEYIEVPQDVVDAVASTKAKGGRVIAIGTTSVRSLESAAKIHGGKLDTYFGDTDIFIFPGYQFNVVDAMVTNFHLPESTLIMLVSAFAGQDNIMGAYNTAIEQQYRFFSYGDAMFLTRK

SEQ ID NO: 70769 - protein, 343 aa, Pseudoalteromonas translucida
  misc_feature (1)..(343): tr|A0A0U2WII8|A0A0U2WII8_9GAMM S-adenosylmethionine:tRN A ribosyltransferase-isomerase OS=Pseudoalteromonas tra nslucida KMM 520 OX=1315283 GN=queA PE=3 SV=1
MRVADFSFDLPDELIARFPKQDRTSSRLLSLDGPSGVVEHKVFSDLLELVNENDLLVFNNTRVIPARMFGQKASGGKVEVLVERVLDEHRVLAHVRASKSLKPGNEVILEGKAKATMVARHDTLFELEFDHSQNVLDILNDIGHMPLPPYIDRPDNEADRERYQTVYGEKPGAVAAPTAGLHFDDKLMAALKNKGVQMAFVTLHVGAGTFQPVRVATVDEHIMHSEYIEVPDDVVAAVANTKANGGRVIAIGTTSVRSLESAAKVHGGKLDTYFGDTDIFIYPGYQFNVVDAMITNFHLPESTLIMLVSAFAGQNNIMGAYNTAIEQQYRFFSYGDAMFLTRK

SEQ ID NO: 70770 - protein, 345 aa, Pseudoalteromonas tunicata
  misc_feature (1)..(345): tr|A4C7I8|A4C7I8_9GAMM S-adenosylmethionine:tRNA ribosy ltransferase-isomerase OS=Pseudoalteromonas tunicata D2 OX=87626 GN=queA PE=3 SV=1
MRVADFNFDLPDELIARFPKEERTSSRLLKMNGNSGEIEHCVFSDIINFIGPKDLLVFNNTKVIPARMFGQKASGGKIEVLIERVLDEHRVLAHVRASKSPKAGALLILENSAEATMVQRHGELFELKFHGDNNVLDILENIGHMPLPPYIDRPDNESDRKRYQTVYGEKPGAVAAPTAGLHFDEKLMADLKAKGVEMAFVTLHVGAGTFQPVRAQTVDEHVMHSEYIEVPDDVVAAIVKTKARGGRVIAVGTTSVRSLESAAKQSQGELKSYFGDTDIFIYPGYQFQVIDAMITNFHLPESTLIMLVSAFAGQENIMNAYNVAIAEQYRFFSYGDAMFLERKTN

SEQ ID NO: 70771 - protein, 346 aa, Pseudoalteromonas ulvae
  misc_feature (1)..(346): tr|A0A244CNR7|A0A244CNR7_9GAMM S-adenosylmethionine:tRN A ribosyltransferase-isomerase OS=Pseudoalteromonas ulv ae OX=107327 GN=queA PE=3 SV=1
MRVADFSFDLPDELIARFPKEERTSSRLLKMNGDTGEIVHHVFSDIIDFITPNDLLVFNNTKVIPARMFGQKESGGKVEVLVERVLNEHSVLAHVRASKSPKEGAVLTLENSAKATMVQRHGELFELKFHGDKNVLDVLESIGHMPLPPYIDRPDNDADRKRYQTVYGEKPGAVAAPTAGLHFDEKLMAALTEKGIEMAFITLHVGAGTFQPVRVDNIDEHIMHSEYIEVPDEVVAAIAKTKARGGRVIAVGTTSVRSLESAAKQSNGPLKSYFGDTDIFIYPGYEFQVIDMMITNFHLPESTLIMLVSAFSGQEHIMNAYKVAIEEQYRFFSYGDAMLLSPQNKK

SEQ ID NO: 70772 - protein, 340 aa, Pseudoarcobacter caeni
  misc_feature (1)..(340): tr|A0A363D1A9|A0A363D1A9_9PROT S-adenosylmethionine:tRN A ribosyltransferase-isomerase OS=Pseudoarcobacter caen i OX=1912877 GN=queA PE=3 SV=1
MLDPLKTSSYDYDLPKEFIATHPVSPADNARLLVYNRTTNSITHTTFKNLLDFLPQNLSIFLNDTKVIKARIFGTKETGGKIELLLNKPLFMDRYLVMIGGKVRIGTKLFFDENLNAEVLEVNEDGSRVVQFFQNDKKLDFLTLVDILNKIGHLPLPPYMNRDDEEKDEKDYQTLFAKNYGAVAAPTASLHFTPELLEKINAKYSVNYLTLHVGAGTFKPVDVDDILNHPMHSEYFEIGIDAKKALDKASKVLAVGTTVTRTVEYYQRTNKIQGECDLFLNPANKPIKVDYLLTNFHLPKSTLIMLVASFVGLEKTLEIYHEAIKENYRFYSYGDGMLII

SEQ ID NO: 70773 - protein, 486 aa, Pseudobacter ginsenosidimutans
  misc_feature (1)..(486): tr|A0A4Q7MQ34|A0A4Q7MQ34_9BACT S-adenosylmethionine:tRN A ribosyltransferase-isomerase OS=Pseudobacter ginsenos idimutans OX=661488 GN=EV199_2690 PE=3 SV=1
MWISCGFTGKTCAYPVHRRCYLFKIKGSELYRFPLWNRKNGNLNLMGLGGVFGKREKSGGKVGGIAGCRQRLRLTFARMHPKEIAIKDFTYDLPEELIAKYPLPNRDASRLLIWQEETISEDIYRNLDQYLPSNSLLVFNNTRVVAARLLFQKITGATIEIFCLEPHAKYPDITTAMSTRGSVTWMCLVGGVSKWKPGNILEKKIPHGSTELKLHAAYIEKIKDSFAIELSWNEPDLSFAEVLHLAGVMPLPPYIKRKAEQTDEDRYQTIYAKHEGSVAAPTAGLHFTDTIFQKLDARNIKRSFVTLHVGAGTFQPVKSGTLEGHPMHIEFIDVTVESIRNLIDHIDTHITAVGTTSLRTIESLYWLGSKVMAQPDIQPEELSVQQWDAYEMKGDIPAKAALEALLKYLEQKGLNRLLTRTQLLIAPGYSIRIPHALVTNFHQPQSTLLLLVAAFAGPKWKEIYHYALSNGFRFLSYGDGCLLFRH

SEQ ID NO: 70774 - protein, 349 aa, Pseudobacter ginsenosidimutans
  misc_feature (1)..(349): tr|A0A4Q7ML26|A0A4Q7ML26_9BACT S-adenosylmethionine:tRN A ribosyltransferase-isomerase OS=Pseudobacter ginsenos idimutans OX=661488 GN=queA PE=3 SV=1
MKLSQFRFDLPLNLIAQHPTKKREDARLMVVHRKTGQIENKYFRDVMDYFDDKDVFVVNNTKVFPARMYGRKEKTGAKIEVFLLRELNKPNRLWDVIVDPARKIRVGNKLYFGENDELVAEVIDNTTSRGRTIRFLWDGTDEEFRQMLEFLGETPLPKYIKRKPEAEDKERYQTVYAKHEGAVAAPTAGLHFSIELIKRLEIKGIRFAEVTLHTGLGTFRPIEVEDLSKHKMDAEYYRIEEGACKVVNKAIETGHRICSVGTTTMRALESSYTAEKHLKPSEGWTNIFIHPPYQFNIADSLITNLHLPKTSLLIMTCAFAGYELAMEAYRKAIKDKYRFFSYGDAMLVI

SEQ ID NO: 70775 - protein, 364 aa, Pseudobacteriovorax antillogorgiicola
  misc_feature (1)..(364): tr|A0A1Y6B4Q9|A0A1Y6B4Q9_9PROT S-adenosylmethionine:tRN A ribosyltransferase-isomerase OS=Pseudobacteriovorax a ntillogorgiicola OX=1513793 GN=queA PE=3 SV=1
MLKRSDFFYNLPDELIAQYPADHRTDSKLLVYRDQSINDSVTRNLAMHVPENAVFVRNNSRVIPSRLLGETQHGGKVELMLIEPIPGNGDATWKAFGKPLKKMKPDSKLFFNGGNAYIEDRVQDEDSPYLIVSFDKSWAEFYSWIDKVGYIPLPPYIKREKAETAPQSTDAIRYQTVYAEPKGSVAAPTAGLHFTDDLIRTMVNDKGIEFVDITLHVGAGTFLPVKSEDIDQHKMHFETYMLPSASFQAIQKARAENRKVIAVGTTSLRCLESFFRLGCDTHSWDNYLDLWHQTNLFIRPKTKNDRFRPGLIDGIMTNFHQPESTLLMLISAMFGYDEVRRIYQHAIEQRYRFFSYGDSSLLMF

SEQ ID NO: 70776 - protein, 341 aa, Pseudobacteroides cellulosolvens
  misc_feature (1)..(341): tr|A0A0L6JI94|A0A0L6JI94_9FIRM S-adenosylmethionine:tRN A ribosyltransferase-isomerase OS=Pseudobacteroides cel lulosolvens ATCC 35603 = DSM 2933 OX=398512 GN=queA PE= 3 SV=1
MKVTDFYYDLPEELIAQEPVLNRDMSRLMVLHKDSGNIEHKIFKDVKDYLKEGDCLVLNDTRVIPARLYGEKEGTGSKIEFVLLKRINGDVWEVILKPGRKAKVGSRFSFGEGILRAEVIEIVEEGNRLVRFEYDGIFEHILDKVGLMPLPPYITKRLTDKERYQTVYSKNKGSAAAPTAGLHFTRELIQQITEMGVNIVYVTLHVGLGTFRPVKVENITEHHMHSEFYTISEDTCSVINNTREKGKNVIAVGTTSVRVLETVGDSAGKVSPGSGNTNIFIYPGYKFKVVDKIITNFHLPESTLIMLISAFAGKEKVLNAYNEAIKEKYRFFSFGDAMIII

SEQ ID NO: 70777 - protein, 345 aa, Pseudobutyrivibrio ruminis
  misc_feature (1)..(345): tr|A0A285RTJ6|A0A285RTJ6_9FIRM S-adenosylmethionine:tRN A ribosyltransferase-isomerase OS=Pseudobutyrivibrio ru minis DSM 9787 OX=1123011 GN=queA PE=3 SV=1
MKVKDFDYDLPEELIAQDPLEKRSNSRLMVLDKNTGETFHRHFYDIKDYLKPGDCLVINNTKVIPARLYGARVGSGGKVEILLLKRISDNQWECLVKPGKKARPGMEISFGDGLLMGKIIDIVDEGNRIIEFSYEGIFEEILDKLGEMPLPPYITHKLQDRDRYQTVYAKYDGSAAAPTAGLHFTPELLDEVRAMGVKIAEVTLHVGLGTFRPVKEEEVLEHHMHSEYYELNQEACDIINETKANGGRIISVGTTSTRTLESAAEAGKPLTPKSGWTQIFIYPGYEFKVIDGLITNFHLPQSTLIMLVSALAGREHVLKAYEEAVQERYRFFSFGDAMLITDLSK

SEQ ID NO: 70778 - protein, 344 aa, Pseudobutyrivibrio ruminis
  misc_feature (1)..(344): tr|A0A2G3E9Q5|A0A2G3E9Q5_9FIRM S-adenosylmethionine:tRN A ribosyltransferase-isomerase OS=Pseudobutyrivibrio ru minis OX=46206 GN=queA PE=3 SV=1
MLVKDFDYELPEELIAQDPLEKRSNSRLMVLDKNTGEISHRHFYDIKEYLKPGDCLVINNTRVIPARLYGARVGSGGKVEILLLKRISDNRWECLVKPGKKARPGMEISFGDGLLIGKIVDIVDEGNRIIEFSYDGIFEEILDKLGEMPLPPYITHKLKDRDRYQTVYAKYDGSAAAPTAGLHFTPELLDEVRAMGVKIAEVTLHVGLGTFRPVKEEEVLDHHMHSEYYELTQEACDIINETKANGGRVISVGTTSTRTLESAAEAGKPLSPKSGWTQIFIYPGYEFKVIDGLITNFHLPQSTLIMLVSALAGREHVLAAYKEAVKERYRFFSFGDAMLIADLK

SEQ ID NO: 70779 - protein, 345 aa, Pseudobutyrivibrio sp.
  misc_feature (1)..(345): tr|A0A1I5FCG7|A0A1I5FCG7_9FIRM S-adenosylmethionine:tRN A ribosyltransferase-isomerase OS=Pseudobutyrivibrio sp . JW11 OX=1855302 GN=queA PE=3 SV=1
MKVKDFDYDLPEELIAQDPLEKRSNSRLMVLDKNTGETFHRHFYDIKDYLKPGDCLVINNTKVIPARLYGARVGSGGKVEILLLKRISDNQWECLVKPGKKARPGMEISFGDGLLMGKIIDIVDEGNRIIEFSYEGIFEEILDKLGEMPLPPYITHKLQDRDRYQTVYAKYDGSAAAPTAGLHFTPELLDEVRAMGVKIAEVTLHVGLGTFRPVKEEEVLEHHMHSEYYELNQEACDIINETKANGGRIISVGTTSTRTLESAAEAGKPLTPKSGWTQIFIYPGYEFKVIDGLITNFHLPQSTLIMLVSALAGREHVLKAYEEAVQEKYRFFSFGDAMLITDLSK

SEQ ID NO: 70780 - protein, 344 aa, Pseudobutyrivibrio sp.
  misc_feature (1)..(344): tr|A0A1H4CCF0|A0A1H4CCF0_9FIRM S-adenosylmethionine:tRN A ribosyltransferase-isomerase OS=Pseudobutyrivibrio sp . ACV-2 OX=1520801 GN=queA PE=3 SV=1
MLVKDFDYELPEELIAQDPLEKRSNSRLMVLDKNTGEIVHRHFYDIKEYLKPGDCLVINNTRVIPARLYGARVGSGGKVEILLLKRISDSQWECLVKPGKKARPGMEISFGDGLLIGKIVDIVDEGNRIIEFSYDGIFEEILDKLGEMPLPPYITHKLADRDRYQTVYAKYDGSAAAPTAGLHFTPELLEEVKAMGVRIAEVTLHVGLGTFRPVKEEEVLEHHMHSEYYELTQEACDIINETKANGGRVISVGTTSTRTLESAAEPGKPLAPKSGWTQIFIYPGYEFKVIDGLITNFHLPQSTLIMLVSALAGREHVLAAYEKAVEERYRFFSFGDAMMITDLQ

SEQ ID NO: 70781 - protein, 347 aa, Pseudobutyrivibrio xylanivorans
  misc_feature (1)..(347): tr|A0A1G5RVB2|A0A1G5RVB2_PSEXY S-adenosylmethionine:tRN A ribosyltransferase-isomerase OS=Pseudobutyrivibrio xy lanivorans OX=185007 GN=queA PE=3 SV=1
MLVKDFDYDLPEELIAQDPLEKRSNSRLMVLDKKTGEIAHRHFYDIKEYLRPGDCLVINNTRVIPARLYGARVGSGGKVEILLLKRLSDNQWECLVKPGKKARPGMEISFGDGLLVGKIIDIVDEGNRIIEFTYDGIFEEILDKLGEMPLPPYITHKLKDRDRYQTVYAKFDGSAAAPTAGLHFTPELLEEVKAMGVKIAEVTLHVGLGTFRPVKEDEVLDHHMHSEYYELTQEACDIINETKANGGRVISVGTTSTRTLESAAEPGKPLVPKSGWTQIFIYPGYEFKVIDCLITNFHLPQSTLIMLVSALAGREHVLAAYEQAVQERYRFFSFGDAMMITDLHQGE

SEQ ID NO: 70782 - protein, 345 aa, Pseudobutyrivibrio xylanivorans
  misc_feature (1)..(345): tr|A0A1M6CL20|A0A1M6CL20_PSEXY S-adenosylmethionine:tRN A ribosyltransferase-isomerase OS=Pseudobutyrivibrio xy lanivorans DSM 14809 OX=1123012 GN=queA PE=3 SV=1
MLVKDFDYELPEELIAQDPLEKRSNSRLMVLDKNTGETVHRHFYDIKEYLRPGDCLVINNTRVIPARLYGARVGSGGKVEILLLKRLSDTQWECLVKPGKKARPGMEISFGDGLLIGKIIDIVDEGNRIIEFSYEGIFEEILDKLGEMPLPPYITHKLQDRDRYQTVYAKFDGSAAAPTAGLHFTSELLEEVKAMGVKIAEVTLHVGLGTFRPVKEDEVLDHHMHSEYYELTQEACDIINETKANGGRVISVGTTSTRTLESAAEPGKPLVPKSGWTQIFIYPGYEFKVIDCLITNFHLPQSTLIMLVSALAGREHVLAAYEEAVKERYRFFSFGDAMMITDLQE

SEQ ID NO: 70783 - protein, 357 aa, Pseudochrobactrum asaccharolyticum
  misc_feature (1)..(357): tr|A0A366EC41|A0A366EC41_9RHIZ S-adenosylmethionine:tRN A ribosyltransferase-isomerase OS=Pseudochrobactrum asa ccharolyticum OX=354351 GN=queA PE=3 SV=1
MRVDLFDFDLPEERIALRPVTPRYHAKLLRVIPDQPLQDLHVGDLPDLLREGDALVFNDTKVIPAQLEGTRERDGTVATVSATLHMRTGADRWKAFLRPAKRVKQGERIRFGHSGSSCFLGTLDALVAEKHDSGEVLLVFDVSGAVLDEAIASVGHIPLPPYIASKRAEDAQDRQDYQTVYAREEGAVAAPTAGLHFTPELLERIRAKGVEEHFVTLHVGAGTFLPVKADDTADHKMHAEIGYVSEETAAALNRVHERGGRIISVGTTSLRLIESAAGEDGIIRPWSGATDIFITPGYKFRAIDMLMTNFHLPRSTLFMLVSAFSGFETMQAAYAHAISNEYRFYSYGDASLLTLRT

SEQ ID NO: 70784 - protein, 354 aa, Pseudocitrobacter faecalis
  misc_feature (1)..(354): tr|A0A366F2J5|A0A366F2J5_9ENTR S-adenosylmethionine:tRN A ribosyltransferase-isomerase OS=Pseudocitrobacter fae calis OX=1398493 GN=queA PE=3 SV=1
MRLADFSFELPESLIAHYPQPERSGCRLLSLDGPTGALTHGTFTDLLDKLNPGDLLVFNNTRVIPARLFGRKASGGKIEVLVERMLDDNRILAHIRASKAPKPGAELLLGDDESINATMVARHDALFEVQFNDERPVLDILNSIGHMPLPPYIDRPDEDADRELYQTVYSSRPGAVAAPTAGLHFDEPLLAKLREKGIDMAFVTLHVGAGTFQPVRVESIEEHTMHSEYAEVPQEVVDAVLAAKARGNRVIAVGTTSVRSLESAAQAAKNDLIEPFFGDTQIFIYPGYQYKVIDALVTNFHLPESTLIMLVSAFAGYKHTLHAYHEAVKAEYRFFSYGDAMFITYNPQAINERP

SEQ ID NO: 70785 - protein, 354 aa, Pseudocitrobacter sp.
  misc_feature (1)..(354): tr|A0A5B0KGG7|A0A5B0KGG7_9ENTR S-adenosylmethionine:tRN A ribosyltransferase-isomerase OS=Pseudocitrobacter sp. 73 OX=2605731 GN=queA PE=3 SV=1
MRLADFSFELPESLIAHYPQPERSGCRLLSLDGPTGALTHGTFTDLLDKLNPGDLLVFNNTRVIPARLFGRKASGGKIEVLVERMLDDNRILAHIRASKAPKPGAELLLGDDESINATMVARHDALFEVQFNDERPVLDILNSIGHMPLPPYIDRPDEDADRELYQTVYSSRPGAVAAPTAGLHFDDPLLAKLREKGIDMAFVTLHVGAGTFQPVRVESIEEHTMHSEYAEVPQDVVDAVLAAKARGNRVIAVGTTSVRSLESAAQAAKNDLIEPFFGDTQIFIYPGYQYKVIDALVTNFHLPESTLIMLVSAFAGYKNTMHAYHEAVKAEYRFFSYGDAMFITYNPQAINERP

SEQ ID NO: 70786 - protein, 341 aa, Pseudoclostridium thermosuccinogenes
  misc_feature (1)..(341): tr|A0A2K2F8J4|A0A2K2F8J4_9FIRM S-adenosylmethionine:tRN A ribosyltransferase-isomerase OS=Pseudoclostridium the rmosuccinogenes OX=84032 GN=queA PE=3 SV=1
MKLSDFYYDLPEELIAQEPIKERAMSRLLVLDRATGSIEHKIFKDIINYLDAGDCLVLNDTRVIPARLLGTREDTGGKIEFVLLKRIEERVWEVILKPGRRAKPGARFVFGGGLLKAEIIDIVEEGNRIVKFEYDGIFEEILDKVGIVPLPPYITRRLDDSERYQTVYSRYNGSAAAPTAGLHFTEELLDNIAKKGVSLAYVTLHVGLGTFRPVKTENIQDHKMHSEFYNINEEACKKINAAKESGKRVIAVGTTSCRVLETAGDETGLVTPHNGWTDIFIYPGYKFKVVDALITNFHLPESTLLMLVSALAGKDKIFEAYRVAIEERYSFFSFGDAMFIK

SEQ ID NO: 70787 - protein, 364 aa, Pseudodesulfovibrio aespoeensis
  misc_feature (1)..(364): tr|E6VSY4|E6VSY4_PSEA9 S-adenosylmethionine:tRNA ribosy ltransferase-isomerase OS=Pseudodesulfovibrio aespoeens is (strain ATCC 700646 / DSM 10631 / Aspo-2) OX=643562 GN=queA PE=3 SV=1
MEIPKDFRLSSYHYTLPEERIAQTPADRRDGSRLLVLDRAGESLRAASFASLMDHLPPDALLVANNSRVIPARVFGTKDTGGRVEFLMLTPLPLMEPQEGTGALTGWRTARAEGLLRASKSPKPGAMVTFADDFQLTALEGGPFGRWQVELAWRGDLKDRFEALGHLPLPPYIHRPDSEADRERYQTTYSDTAKAGSVAAPTAGLHFTSDLRSGLAARGFGWAEITLYVGYGTFSPVRCADIREHRMHSEYIEVPEATALAVQQAKAEGRPVVAVGTTSARSLEGMVRESGRIGEFRGETDIFITPGYRFQVVDAMITNFHLPESSLIIMIAALAGRKTVLSAYDFALENGFRFFSYGDAMLIK

SEQ ID NO: 70788 - protein, 360 aa, Pseudodesulfovibrio hydrargyri
  misc_feature (1)..(360): tr|A0A1J5MTF6|A0A1J5MTF6_9DELT S-adenosylmethionine:tRN A ribosyltransferase-isomerase OS=Pseudodesulfovibrio h ydrargyri OX=2125990 GN=queA PE=3 SV=1
MEIPEDYKLSSYDYELPEDHIAQEPAERRDGSRLLVLDRAADTLTPVRFTDLLDYLPDNCLLVANNSRVIPARIFGRKPTGGQVEFLLLTPLPLLVPGEEGGWMTARAEGLLRASKGPKTGTVVTFADDFSLTAEEPGEFGRWRVTLRWKGDLTGLFNTHGHLPLPPYIKRPDGEADRERYQTTYSNTAKTGSVAAPTAGLHFTPELRERIRAKGIQWAEVTLYVGYGTFSPVRCPDIRDHRMHAEYIEVGEETAEAIHRAKAEGRPVIAVGTTSARTLEGMVREAGSVRQFRGETDIFISPGYTFRVIDGILTNFHLPESSLIIMISALAGRKTILDAYAFALENNFRFFSYGDAMLIL

SEQ ID NO: 70789 - protein, 360 aa, Pseudodesulfovibrio indicus
  misc_feature (1)..(360): tr|A0A126QK44|A0A126QK44_9DELT S-adenosylmethionine:tRN A ribosyltransferase-isomerase OS=Pseudodesulfovibrio i ndicus OX=1716143 GN=queA PE=3 SV=1
MEIPEDYRLSSYDYDLPEDRIAQEPAEKRDGSRLLVLDRKAGTRTPVPFADLLDHLPDNCLLVANNSRVIPARVFGTKPTGGQVEFLLLTPLPLIEPAEKGGWFSARAEGLLRASKGPKPGTTVSFADDFSLIALEPGEFGRWKVELRWRGDLKTLFDTLGHLPLPPYIKRPDGAADRERYQTTYSDKSKTGSVAAPTAGLHFTPELRKRIADKGIEWAEVTLYVGYGTFSPVRCPDIRDHRMHAEYIEVPVHTAEAVLRAKAEGRPVIAVGTTSARTLEGMVREAGEIREFRGETDIFISPGYTFKVIDGILTNFHLPESSLIIMISALAGRNTILDAYALALEQGFRFFSYGDAMLIL

SEQ ID NO: 70790 - protein, 372 aa, Pseudodesulfovibrio piezophilus
  misc_feature (1)..(372): tr|M1WKE1|M1WKE1_PSEP2 S-adenosylmethionine:tRNA ribosy ltransferase-isomerase OS=Pseudodesulfovibrio piezophil us (strain DSM 21447 / JCM 15486 / C1TLV30) OX=1322246 GN=queA PE=3 SV=1
MTHNIPNKRYLFMEIPPDFQLQSYSYDLPEDRIAQEPSQQRDGSRLLVLDKKDGTLTPANFVDIAQYLPEGALLVANNSRVIPARIFGNKPTGGQVEFLLLTPLPLITPKEENGWQTATVEGLLRASKTPKPHTQVTFSENFHLITETPGPFGRWQAELRWKGDLTTLFKEMGHLPLPPYIKRPDTEADKERYQTTYSDQTKTGSVAAPTAGLHFTPKIRQTLMDKGFGWAEVTLYVGYGTFSPVRCEDIRDHTMHSEYIEVPKKTALAIRQAKKEGRPVISIGTTSARTLEGMFQECGEITEFRGETDIFIAPGYQFQVIDGILTNFHLPESSLIIMISALAGRKTIFSAYACALENNFRFFSYGDAMLIR

SEQ ID NO: 70791 - protein, 361 aa, Pseudodesulfovibrio profundus
  misc_feature (1)..(361): tr|A0A2C8F9L9|A0A2C8F9L9_9DELT S-adenosylmethionine:tRN A ribosyltransferase-isomerase OS=Pseudodesulfovibrio p rofundus OX=57320 GN=queA PE=3 SV=1
MMDIPADFLLESYNFDLPEDQIAQEPAQKRDGSRLLVVNRSQESMEPTDFKKLIDHLPKNALLVANNSRVIPARIFGMKPTGGKVEFLLLTPLPLIEPTVEDGWNIARAEGLLRASKTPKEGTVITFTDTFRLIAREAGHFGRWQVELQWKDDLTEHFKDNGHLPLPPYIKRPDSDSDKERYQTTYSDASKTGSVAAPTAGLHFTPQYREQLKERGFEWAEVTLYVGYGTFSPVRCKDIRQHQMHAEYIEVPDKTARAIQKAKSEGRPVIAIGTTSARTLEGMYRECGNISEFKGETDIFISPGYEFNVIDGILTNFHLPESSLIIMISALAGRETILSAYEFALAHKFRFFSYGDAMLII

SEQ ID NO: 70792 - protein, 360 aa, Pseudodesulfovibrio sp.
  misc_feature (1)..(360): tr|A0A443YI23|A0A443YI23_9DELT S-adenosylmethionine:tRN A ribosyltransferase-isomerase OS=Pseudodesulfovibrio s p. S3 OX=2283629 GN=queA PE=3 SV=1
MEIPQDYLLSNYNFELPEDRIAQQPADRRDGSKLLVLGRDDGNLTEAAFTDLLDFLPDNALLVANNSRVIPARIFGAKATGGQVEFLLLTPLPLINAEKKGEWNHARAEGLLRASKGPKPGATVSFGEDFRLTAEAAGEFGRWQVQLQWQGDLKSIFDRLGHLPLPPYIKRPDNDADRERYQTTYSDASKTGSVAAPTAGLHFTPELRQRLADRGIEWAEVTLYVGYGTFSPVRCADIREHRMHAEYIEVPEETASAVRRAKSEGRPVIAVGTTSARTLEGMFKESEEISKFQGETNIFISPGYEFKVIDGILTNFHLPESSLIIMISALAGRKTILNAYAYALNNSFRFFSYGDAMLIV

SEQ ID NO: 70793 - protein, 349 aa, Pseudoflavitalea sp.
  misc_feature (1)..(349): tr|A0A3B7MQ77|A0A3B7MQ77_9BACT S-adenosylmethionine:tRN A ribosyltransferase-isomerase OS=Pseudoflavitalea sp. 5GH32-13 OX=2315862 GN=queA PE=3 SV=1
MKLSQFRFDLPLNLIAQHPTKKREDARMMVVHRKTGQIENKHFRDIMDYFDDKDVFVVNNTKVFPARMYGRKEKTGAKIEVFLLRELNKPNRLWDVIVDPARKIRVGNKLYFGENDELVAEVIDNTTSRGRTIRFLWDGTDDEFRQMLEFLGETPLPKYIKRKPEAEDKERFQTVYAKHEGAVAAPTAGLHFSIELIKRLEIKGIRFAEVTLHTGLGTFRPIEVEDLSKHKMDAEYYRIEDTACKIVNKAIEGNHRICSVGTTTMRALESSYTAEKLLKPSEGWTNIFIHPPYQFNIADALVTNLHLPKTSLLIMTCAFAGYDLAMEAYKKAIKDKYRFFSYGDAMIVI

SEQ ID NO: 70794 - protein, 408 aa, Pseudoflavitalea sp.
  misc_feature (1)..(408): tr|A0A3B7MT04|A0A3B7MT04_9BACT S-adenosylmethionine:tRN A ribosyltransferase-isomerase OS=Pseudoflavitalea sp. 5GH32-13 OX=2315862 GN=D3H65_28510 PE=3 SV=1
MHPKSLAIKDFTYELPEERIAKYPLPERDSSKLLIYNQGKITEDTYRHIDQYLPSDSLLLFNNTRVVEARLLFQKPTGASIEVFCLEPHPRYPDITTAMTQKERVTWMCLIGGASKWKTGQLLEKKIPHGDKTIVLQAQYLEKIKDSFAIELSWTPSSLSFAEVLHIAGMIPLPPYIKRAAESGDATRYQTIYALTEGSVAAPTAGLHFTEALFERMQAKNIRRSYVTLHVGAGTFQPVKSENMEGHNMHAEFIDIPTTLIQQLIDYAGRFITVVGTTSLRTVESLYWLGVKTILTPAIAPAELTVHQWDAYELKADHISVQEALTSLLQYMKKQQWERLITRTQLLITPGYTIRIPKALVTNFHQPQSTLLLLVAAFVGTKWKNIYKHALEHEFRFLSYGDGCLLFR

SEQ ID NO: 70795 - protein, 343 aa, Pseudoflavonifractor capillosus
  misc_feature (1)..(343): tr|A6NV37|A6NV37_9FIRM S-adenosylmethionine:tRNA ribosy ltransferase-isomerase OS=Pseudoflavonifractor capillos us ATCC 29799 OX=411467 GN=queA PE=3 SV=1
MELKTSDFYYDLPQELIAQTPLDRRDGSRLMVLNKETGETSHHHFYELPNFLRPGDCLVLNDSRVLPARLLGHREPTGGAVEVLLLIDRGNKVWECLVRPGRKVKPGTKLSFGDGLLTADVLEEVEGGNRLIEFHYEGIFLEILERLGKMPLPPYIKEELNDPERYQTVYSREVGSAAAPTAGLHFTKELLAQIEAMGVRLAYVTLHVGLGTFRPVKEENITDHEMHAEYCMISQKTADIINETKANGGRVICVGTTSCRTIESWAAEDGTLKESAGWTSIYIYPGYRFKALDCLITNFHLPESTLVMLVSALAGRENILNAYAEAAREKYRFFSFGDAMFIC

SEQ ID NO: 70796 - protein, 340 aa, Pseudoflavonifractor sp.
  misc_feature (1)..(340): tr|A0A1Y4KUP5|A0A1Y4KUP5_9FIRM S-adenosylmethionine:tRN A ribosyltransferase-isomerase OS=Pseudoflavonifractor sp. An187 OX=1965578 GN=queA PE=3 SV=1
MKTSDFYFDLPEELIAQTPLERRDASRLLTLDKVTGQTQHMHFYDLPKLLRAGDCLVLNDSRVLPARLLGHRSTGGACEVLLLIDRGEKVWECLVRPGKKLHTGAKITFGNGELTAEVVGEVEGGNRLVRFDYEGIFLETLEKLGKMPLPPYIKEELEDSERYQTVYSKVVGSAAAPTAGLHFTPELLQQVQDMGVKVCYVTLHVGLGTFRPVKAEEVTDHEMHSEYCVISQETADVINATRAAGGRVICVGTTSCRTIESWANEDGSMEAKAGWTNIFIYPGYRFKVLDGLITNFHLPESTLIMLVSALAGREHVLAAYKEAVENRYRFFSFGDAMFIS

SEQ ID NO: 70797 - protein, 340 aa, Pseudoflavonifractor sp.
  misc_feature (1)..(340): tr|A0A1Y3YPZ2|A0A1Y3YPZ2_9FIRM S-adenosylmethionine:tRN A ribosyltransferase-isomerase OS=Pseudoflavonifractor sp. An44 OX=1965635 GN=queA PE=3 SV=1
MKTSDFYFDLPEELIAQTPLERRDASRLLTLDKVTGQTQHMHFYDLPRLLRPGDCLVLNDSRVLPARLLGHRSTGGACEVLLLIDRGEKVWECLVRPGKKLHTGAKITFGNGELTAEVVGEVEGGNRLVRFDYEGIFLETLEKLGKMPLPPYIKEELEDSERYQTVYSKVVGSAAAPTAGLHFTPELLQQVQDMGVKVCYVTLHVGLGTFRPVKAEEVTDHEMHSEYCVISQETADVINETRAAGGRVICVGTTSCRTIESWANQDGTMEAKAGWTNIFIYPGYRFKVLDGLITNFHLPESTLIMLVSALAGREHVLAAYKEAVENRYRFFSFGDAMFIS

SEQ ID NO: 70798 - protein, 362 aa, Pseudofulvimonas gallinarii
  misc_feature (1)..(362): tr|A0A4R3LPU8|A0A4R3LPU8_9GAMM S-adenosylmethionine:tRN A ribosyltransferase-isomerase OS=Pseudofulvimonas gall inarii OX=634155 GN=queA PE=3 SV=1
MADSEFARPSDVKRSDFHYELPPELIAQAPLPRRSDSRLLHLPASGNLEDRRIGDLPSLLRAGDLLVFNDTRVLPARLDARKRTGGRAEILIERVLGPFDVKAMLGVSKKPRSGDRLALADGSGVEVLGRDGAFFLLRFDADLPLAQRLERLGRMPLPPYIDRPVDEADAQRYQTVFAREPGAVAAPTAGLHFDQELLDTLAAQGVESGNVTLHVGAGTFQPVRADDIREHRMHSEWINVGAGLCAQIRQARARGGRVVAIGTTVMRALESARQGGDEVLPYTGETAIFIYPGYRFASADLLLTNFHLPESTLLMLVSAYAGRERVFAAYRHAVAERYRFFSYGDAMLVEKAEMPTQPQPQS

SEQ ID NO: 70799 - protein, 351 aa, Pseudofulvimonas gallinarii
  misc_feature (1)..(351): tr|A0A4S3KYF5|A0A4S3KYF5_9GAMM S-adenosylmethionine:tRN A ribosyltransferase-isomerase OS=Pseudofulvimonas gall inarii OX=634155 GN=queA PE=3 SV=1
MKRSDFHYELPPELIAQAPLPRRSDSRLLHLPASGNLEDRRIGDLPSLLRAGDLLVFNDTRVLPARLDARKRTGGRAEILIERVLGPFDVKAMLGVSKKPRSGDRLALADGSGVEVLGRDGAFFLLRFDADLPLAQRLERLGRMPLPPYIDRPVDEADAQRYQTVFAREPGAVAAPTAGLHFDQELLDTLAAQGVESGNVTLHVGAGTFQPVRADDIREHRMHSEWINVGAGLCAQIRQARARGGRVVAIGTTVMRALESARQGGDEVLPYTGETAIFIYPGYRFASADLLLTNFHLPESTLLMLVSAYAGRERVFAAYRHAVAERYRFFSYGDAMLVEKAEMPTQPQPQS

SEQ ID NO: 70800 - protein, 347 aa, Pseudogracilibacillus auburnensis
  misc_feature (1)..(347): tr|A0A2V3VXD8|A0A2V3VXD8_9BACI S-adenosylmethionine:tRN A ribosyltransferase-isomerase OS=Pseudogracilibacillus auburnensis OX=1494959 GN=queA PE=3 SV=1
MDMEQYNYHLPNELIAQTPLKDRTSSKLLLLQKGTNKISHDVFSNIGNYVKKGDCIVLNNSRVIPVRLFGSKTDTNAKIEMLLLHEIDNNVWEALVKPARKVKKGTEIMFGEGQLVATCIEEKDEGARLLQLSFDGILLEVLEELGEMPLPPYIKEQLTDQERYQTVYAKEEGSAAAPTAGLHFTTELLSHLEQLGVQIVYITLHVGLGTFRPVTAEHIEEHQMHAEYYSLSKEAAQTLNEVKANNGRIIAVGTTSTRVLETVAKANNGLFKASNGWTDIYIYPPYEFTAIDGLITNFHLPKSTLLLLISAFAGKDAIFNAYEEAIKREYRFFSFGDAMFILPDKKA

SEQ ID NO: 70801 - protein, 340 aa, Pseudogulbenkiania ferrooxidans
  misc_feature (1)..(340): tr|U1AAQ0|U1AAQ0_9NEIS S-adenosylmethionine:tRNA ribosy ltransferase-isomerase OS=Pseudogulbenkiania ferrooxida ns EGD-HP2 OX=1388764 GN=queA PE=3 SV=1
MQLSDFDYHLPEALIAQHPPAERGASRLLHVDGMTLSDLSFADLPSRLQAGDLLVFNDTRVIRARLFGEKASGGKVEALIERVLDDHTALAHVRASKSPKPGSRLIFAGRWEAEMVERHDALFKLRFLAEENVYDILEASGKLPLPPYIERSAEHDDDERYQTVYAREQGAVAAPTAGLHFTDEMLAGLKAQGVETAFVTLHVGAGTFQPVKVDNVAEHKMHSEIYDIPQATVDAVAAARARGGRVVAIGTTSVRALESAARSGELTAGRGETDIFITPGYRFRVVDRLLTNFHLPKSTLLMLVSAFAGYDEIFQAYRHAVEKEYRFFSYGDAMLLERKE

SEQ ID NO: 70802 - protein, 355 aa, Pseudogulbenkiania ferrooxidans
  misc_feature (1)..(355): tr|B9Z6E0|B9Z6E0_9NEIS S-adenosylmethionine:tRNA ribosy ltransferase-isomerase OS=Pseudogulbenkiania ferrooxida ns 2002 OX=279714 GN=queA PE=3 SV=1
MEGIIGRFTRANELMQLSDFDYHLPDELIAQHPPEHRGASRLLHVDGLALADLSFGAVLERIQPGDVMVFNDTRVIKARLFGEKASGGKVEALVERVLDEHTVWAHVRASKSPKPGSTITFAGRWQAEMVERDDALFKLRFLDAENVFDILEASGKLPLPPYIERDTDSDDDSRYQTVYARERGAVAAPTAGLHFTEAMLDALRAKGVILAYVTLHVGAGTFQPVRVENIAEHKMHSEIYEIPPATVDAIAAAHAAGRKVLAVGTTSMRALESAAQGGALVAGRGETDIFITPGYRFRVVDRLLTNFHLPKSTLLMLVSAFAGVEPIRNAYRHAVEHRYRFFSYGDAMLLEKQAD

SEQ ID NO: 70803 - protein, 341 aa, Pseudogulbenkiania sp.
  misc_feature (1)..(341): tr|G2IYM5|G2IYM5_PSEUL S-adenosylmethionine:tRNA ribosy ltransferase-isomerase OS=Pseudogulbenkiania sp. (strai n NH8B) OX=748280 GN=queA PE=3 SV=1
MQLSDFDYHLPDELIAQHPPEHRGASRLLHVDGMALADLSFGAVLEHIQPGDVMVFNDTRVIKARLFGEKASGGKVEALVERVLDEHTVWAHVRASKSPKPGSTITFAGRWQAEMVERDDALFKLRFLDAENVFDILEASGKLPLPPYIERDTDSDDDSRYQTVYARERGAVAAPTAGLHFTEAMLDALRAKGVILAYVTLHVGAGTFQPVRVENIAEHKMHSEIYEIPPATVDAIAAAHAAGRKVLAVGTTSMRALESAAQGGALVAGRGETDIFITPGYRFRVVDRLLTNFHLPKSTLLMLVSAFAGVEPIRNAYRHAVEHRYRFFSYGDAMLLEKQAD

SEQ ID NO: 70804 - protein, 341 aa, Pseudogulbenkiania subflava
  misc_feature (1)..(341): tr|A0A1Y6BSV3|A0A1Y6BSV3_9NEIS S-adenosylmethionine:tRN A ribosyltransferase-isomerase OS=Pseudogulbenkiania su bflava DSM 22618 OX=1123014 GN=queA PE=3 SV=1
MQLSDFDYHLPDELIAQHPPEHRGASRLLHVDGMALADLSFGAVLERLQPGDVMVFNDTRVIKARLFGEKASGGKVEALIERVLDEHTVWAHVRASKSPKPGSTITFAGRWQAEMVERDDALFKLRFLDAENVFDILEASGKLPLPPYIERDTDSDDDSRYQTVYARERGAVAAPTAGLHFTEAMLDALRAKGVILAYVTLHVGAGTFQPVRVENIAEHKMHSEIYEIPPATVDAIAAAHAAGRKVLAVGTTSMRALESAAQGGELVAGRGETDIFITPGYRFRVVDRLLTNFHLPKSTLLMLVSAFAGVEPIRNAYRHAVEHRYRFFSYGDAMLLEKQAD

SEQ ID NO: 70805 - protein, 354 aa, Pseudohaliea rubra
  misc_feature (1)..(354): tr|A0A095VRF8|A0A095VRF8_9GAMM S-adenosylmethionine:tRN A ribosyltransferase-isomerase OS=Pseudohaliea rubra DS M 19751 OX=1265313 GN=queA PE=3 SV=1
MQRSDFTYDLPEELIAQRPLADRAASRLLCLDGARGVIAHRQFRDLPSLLSPDDLLVFNNTRVLPARLWGRKGTGGRVEVLVERLRGDDEALVHLRASKPSAPGTVIYLAADPDAEPGDECLEVLGREDDLYRVAAPGKPVTRLLAELGHMPLPPYIERADDAADRERYQTVYASRDGSVAAPTAGLHFDDALFSALAGRGIARTEVTLHVGAGTFQPVRADAIEDHVMHAEYLEVGEAACAAIAAARARGGRVVAVGTTAVRSLETAAADGGLAPYRGDTRLFIYPGYRFRCVDAMVTNFHLPESTLLMLVSAFAGREAVLAAYEAAVAERYRFFSYGDAMFLTPCAGAREPA

SEQ ID NO: 70806 - protein, 357 aa, Pseudohoeflea suaedae
  misc_feature (1)..(357): tr|A0A4R5PQ85|A0A4R5PQ85_9RHIZ S-adenosylmethionine:tRN A ribosyltransferase-isomerase OS=Pseudohoeflea suaedae OX=877384 GN=queA PE=3 SV=1
MRVDLFDFDLPEDNIALRPANPRDSARLLSVKPDGTLGDLVVRDLPSLLRPGDALVFNDTRVIPAQLEGWRIRGENRSRISATLHMRAGPDTWLAFVRPAKRVSEGDRLSFGEDNPACDLGSLLATAGPRGDGGEFELRFDLSGPALDQAIMTAGHIPLPPYIASKRPEDERDRADYQTIYAREEGAVAAPTAGLHFTPELFAALDARGISRHFVTLHVGAGTFLPVKADDTDDHRMHSEIGHVSEEVARALNEVRARGGRIVSVGTTSLRLLESAASEDGVIHPWSGATDIFITPGYAFRAVDLLMTNFHLPRSTLFMLVSAFSGSETMKAAYAHAIENNYRFYSYGDSSLLERAP

SEQ ID NO: 70807 - protein, 352 aa, Pseudohongiella acticola
  misc_feature (1)..(352): tr|A0A1E8CIZ1|A0A1E8CIZ1_9GAMM S-adenosylmethionine:tRN A ribosyltransferase-isomerase OS=Pseudohongiella actic ola OX=1524254 GN=queA PE=3 SV=1
MKLSDFDYHLPDQLIAHYPLEQRSGSRLLCLGRESGAVEHRRFSDIVSMIDAQDLLVFNDTRVLSARLLGKRADTGGAVEVLIERLLPDNEAIAHVRASNARQPGVRLILTSPCGQYSLEAEVIGRQDRFYHLRFFCQGLLIDELDRVGHVPLPTYIKRDDEVLDQSRYQTVYARNPGAVAAPTAGLHFDEALLGALRSQSVEMAFVTLHVGSGTFQPVRVDNVQEHKMHSEWISVTPDVCARINACRERGGRVIAVGTTSVRSLESAALKAGSPGPAAGLQPYEGETDIFIYPGYQFQVVDAMITNFHLPRSTLMMLISAFAGREQVMAAYEQAIEQRYRFFSYGDAMFIR

SEQ ID NO: 70808 - protein, 352 aa, Pseudohongiella sp.
  misc_feature (1)..(352): tr|A0A2D9DVR0|A0A2D9DVR0_9GAMM S-adenosylmethionine:tRN A ribosyltransferase-isomerase OS=Pseudohongiella sp. O X=1979412 GN=queA PE=3 SV=1
  misc_feature (254)..(254): Xaa can be any naturally occurring amino acid
  misc_feature (281)..(281): Xaa can be any naturally occurring amino acid
  misc_feature (296)..(296): Xaa can be any naturally occurring amino acid
  misc_feature (308)..(308): Xaa can be any naturally occurring amino acid
  misc_feature (326)..(327): Xaa can be any naturally occurring amino acid
MKLSDFDYDLPEELIAHYPAANRSGSRMLCLDRSSGAVSHHVFSDIVSMLRAEDLLVFNDTRVLPARLHGQKATGGKVEVLIERLLSEHEALAQVRASKSPGPGMQLILEASDSDAGLTVEVLGRQGEFFHLRFPADAPAVDLLDRYGHMPLPPYIDRPDEQADQSRYQTVYGRNPGAVAAPTAGLHFDDPLLDAIKQRGVDMAFVTLHVGSGTFQPVRTENVLEHRMHSEWIDVPVSVCEQIAACRARGGRVXAVGTTSVRSLESAALKAGGDIDVERTXNPYQGDTDIFIYPGXQFQVVDAMITNXHLPKSTLMMLISAFASRXXVMAAYAEAISQRYRFFSYGDAMFIR

SEQ ID NO: 70809 - protein, 352 aa, Pseudohongiella sp.
  misc_feature (1)..(352): tr|A0A355V960|A0A355V960_9GAMM S-adenosylmethionine:tRN A ribosyltransferase-isomerase OS=Pseudohongiella sp. O X=1979412 GN=queA PE=3 SV=1
MKLSDFDYDLPEELIAHYPAANRSGSRMLCLDRSSGAVSHHVFSDIVSMLRAEDLLVFNDTRVLPARLHGQKATGGKVEVLIERLLSEHEALAQVRASKSPGPGMQLILEASDSDAGLTVEVLGRQGEFFHLRFPADAPAVDLLDRYGHMPLPPYIDRPDEQADQSRYQTVYGRNPGAVAAPTAGLHFDDPLLDAIKQRGVDMAFVTLHVGSGTFQPVRTENVLEHRMHSEWIDVPVSVCEQIAACRARGGRVIAVGTTSVRSLESAALKAGGDIDVERTINPYQGDTDIFIYPGYQFQVVDAMITNFHLPKSTLMMLISAFASRDKVMAAYAEAISQRYRFFSYGDAMFIR

SEQ ID NO: 70810 - protein, 364 aa, Pseudohongiella spirulinae
  misc_feature (1)..(364): tr|A0A0S2KCL1|A0A0S2KCL1_9GAMM S-adenosylmethionine:tRN A ribosyltransferase-isomerase OS=Pseudohongiella spiru linae OX=1249552 GN=queA PE=3 SV=1
MRGLVFVGHSGKLAALMQLSDFDYNLPDELIAHYPAENRSASRLLQLDRMTGEVSHHSFRDLLDMLTSDDLLVFNDTKVLPARLLGHKTSGGRIEILIERLLSDNEAIAQIRASKSPGAGTRINVKSASCDGVLEIEVTGRQDAFFKIRFDSSRSALELLQQFGHMPLPPYIDRQDEPEDQTRYQTVYGCNPGAVAAPTAGLHFDEPLLDALRDKGVDMAFITLHVGSGTFQPVRTDDIKSHQMHSEWIDVSASACQKIKACRARGGRVVAVGTTSVRSLESAAQMCPSNGDLLPYQGETDIFIYPGYEFRVVDAMITNFHLPRSTLMMLISAFACREQIMNAYAQAIKERYRFFSYGDAMFIR

SEQ ID NO: 70811 - protein, 363 aa, Pseudolabrys sp.
  misc_feature (1)..(363): tr|A0A0Q7TLJ8|A0A0Q7TLJ8_9RHIZ S-adenosylmethionine:tRN A ribosyltransferase-isomerase OS=Pseudolabrys sp. Root 1462 OX=1736466 GN=queA PE=3 SV=1
MKTDLFDFDLPSERIALRPAHPRESARLMVVRPGEGGETLEDRTIGDLPDLLAPGDCLVVNDSKVIAARLKGRRIGRGEAEPAIEATLHKRIDGSTWRAFILGAKKVQVGDILRFGTEGRVCFLGQLDAEVLHKDEGGDVTLSFSFTGPVLDQAIEERGEMPLPPYIASKRPTDDQDKTDYQTVFAHEDGSVAAPTAGLHFTPALLERLEARGVALHKVTLHVGAGTFLPVKADDTAEHRMHAEFGVVSAATAEALNAARAKGGRVVAVGSTALRLLESAASDDGRIREFAGDTAIFITPGYRFKTVDLMMTNFHLPRSTLFMLVSAFSGLDTMQRAYRHAIDTGYRFYSYGDACLLYPQPRR

SEQ ID NO: 70812 - protein, 365 aa, Pseudolabrys sp.
  misc_feature (1)..(365): tr|A0A371B0R9|A0A371B0R9_9RHIZ S-adenosylmethionine:tRN A ribosyltransferase-isomerase OS=Pseudolabrys sp. GY_H OX=2292256 GN=queA PE=3 SV=1
MRTDLFDFDLPPDRIALRPVSPRESARLLVVRPGQAAEFENRTVGDLPEFLQPGDCLVVNDSKVIAARLKGRRIGRGETEPAIEATLHKRLDGSTWRAFILGAKKVQAGDVLRFGSEGRVCFLDQLDAQVLHKDEGGDVTLSFSLHGPHLDQAIEERGDMPLPPYIASKRPTDAQDKTDYQTVFAHADGSVAAPTAGLHFTAELLTRLQARGVALHKVTLHVGAGTFLPVKAGDTADHKMHAEFGVVSAATAAALNAARAKGGRIVAVGSTALRLLESAAGADGVIHEFAGDTAIFITPGYRFKAVDLMMTNFHLPRSTLFMLVSAFSGLETMQRAYRHAIETGYRFYSYGDACLLHPAVAAAKA

SEQ ID NO: 70813 - protein, 394 aa, Pseudolabrys taiwanensis
  misc_feature (1)..(394): tr|A0A345ZT10|A0A345ZT10_9RHIZ S-adenosylmethionine:tRN A ribosyltransferase-isomerase OS=Pseudolabrys taiwanen sis OX=331696 GN=queA PE=3 SV=1
MRTDLFDFDLPADRIALRPVHPRDAARLLVVRPHAPVAPEQAGAQRSEVGAGGPWVPAFAGTNGEVLEDRHIRDLPDLLAPGDCLVVNDSKVIAARLKGRRIGRGDTEPGIEATLHKRLDGSTWKAFILGAKKVQVGDTLRFGDEGKVCFLGQLDAKVSHKDEGGEVTISFSFHGPILDQAIAERGDLPLPPYIASKRKPDDQDRADYQTVFAHEEGSVAAPTAGLHFTEDLLARLTARGVAVHKVTLHVGAGTFLPVKADDTAEHKMHSEFAILPAEVADALNAARAKGGRIVAVGSTAMRTLESAAGDDGRLRPFAADTDIFITPGYRFKAVDLMLTNFHLPRSTLFMLVSAFSGRETMQRAYRHAIETGYRFYSYGDACLLFPQPSFRDSA

SEQ ID NO: 70814 - protein, 200 aa, Pseudomonadaceae bacterium
  misc_feature (1)..(200): tr|A0A2D5CGQ8|A0A2D5CGQ8_9GAMM S-adenosylmethionine:tRN A ribosyltransferase-isomerase (Fragment) OS=Pseudomona daceae bacterium OX=1914538 GN=CMK71_12575 PE=3 SV=1
DRPDEAADRERYQTVYAERAGAVAAPTAGLHFDQPLMEAIAAKGVSTAFVTLHVGAGTFQPVRVERIEDHHMHTEWLEVSQKVVDAVAACRARGGRVIAVGTTSVRSLESAARDGVLKPFSGDTDIFIYPGRPFHVVDALVTNFHLPESTLLMLVSAFAGYPETMAAYKSAVAEAYRFFSYGDAMFITRNPAARGPEEQV

SEQ ID NO: 70815 - protein, 349 aa, Pseudomonadaceae bacterium
  misc_feature (1)..(349): tr|A0A4Q9RGB5|A0A4Q9RGB5_9GAMM S-adenosylmethionine:tRN A ribosyltransferase-isomerase OS=Pseudomonadaceae bact erium P17C OX=2211397 GN=queA PE=3 SV=1
MQVADFSFELPDELIARHPLAERRASRLLTLEGETGRLAHRSFADLLDLLEPADLLVFNNTRVIPARLFGRKDSGGKLEILVERLLDERHVLAHVRSSKAPRPGTTIILDDGSEVGMLARHDSLFELQFPEDVLPLLERIGHMPLPPYIDRADESSDRERYQTVYALHAGAVAAPTAGLHFDQALLDALREKGVETAFVTLHVGAGTFQPVRVERIEEHVMHREWLEVGQDVVDAVAACRARGGRVVAVGTTSVRSLETAARGGVLEPFRGDTDIFIYPGKAFNVVDALVTNFHLPESTLLMLVSAFAGYPETMAAYAEAVAQRYRFFSYGDAMFITRNPAARGPEESV

SEQ ID NO: 70816 - protein, 349 aa, Pseudomonadales bacterium
  misc_feature (1)..(349): tr|A0A1G3DCZ5|A0A1G3DCZ5_9GAMM S-adenosylmethionine:tRN A ribosyltransferase-isomerase OS=Pseudomonadales bacte rium RIFCSPHIGHO2_01_FULL_64_12 OX=1802004 GN=queA PE=3 SV=1
MQVADFYFELPDALIARHPLAERRASRLLVLDGQSGQMSHRNFADLLDYVRPGDLMVFNNTRVIPARLFGQKATGGKLEILVERVTGNRSVLAHVRSSKSPKPGSQILLDGGGAAEMVARHDALFELVFDEDVLPLLERIGHMPLPPYIDRPDDAADRERYQTVYAQRAGAVAAPTAGLHFDEALLDALRNAGVQTAYVTLHVGAGTFQPVRVERIEEHHMHREWLEVTQEVVDAVAACRARGGRVIAVGTTSVRSLETAARDGELKPFSGDTDIFIYPGKTFHVVDALVTNFHLPESTLLMLVSAFAGYPETMAAYAEAVAQRYRFFSYGDAMFITRNPAARGPEETR

SEQ ID NO: 70817 - protein, 349 aa, Pseudomonadales bacterium
  misc_feature (1)..(349): tr|A0A2E3KRW3|A0A2E3KRW3_9GAMM S-adenosylmethionine:tRN A ribosyltransferase-isomerase OS=Pseudomonadales bacte rium OX=1891229 GN=queA PE=3 SV=1
MRLSDFDFELPDDLIARHPLAERRGSRLLCLDGPSGSIAHRQFVDLLGYLRPGDLMVFNNTRVIPARLFGRKATGGALEVLVERVLDEYRVLAHIRSSKSPKPGSRILLDGDAEAEMVARHDALFELRFAEPVLPLLQRVGHMPLPPYIDRPDEDADRERYQTVYAKREGAVAAPTAGLHFDQPLLDAIAELGVETAEVTLHVGAGTFQPVRVEKIEDHVMHQEWLEVSPEVVAAVEACKARGGRVIAVGTTSVRSLESAARDGQLKPFSGDTDIFLYPGRPFHVVDALVTNFHLPESTLLMLVSAFAGYPETMAAYRAAVAEKYRFFSYGDAMFITRNPAPTGPEVSS

SEQ ID NO: 70818 - protein, 359 aa, Pseudomonas abietaniphila
  misc_feature (1)..(359): tr|A0A1G8B9H0|A0A1G8B9H0_9PSED S-adenosylmethionine:tRN A ribosyltransferase-isomerase OS=Pseudomonas abietanip hila OX=89065 GN=queA PE=3 SV=1
MRVADFTFELPDSLIARHPLAERRSSRLLTLDGPSGALAHRQFTDLLEHLRPGDLMVFNNTRVIPARLFGQKASGGKLEILVERVLDQHRVLAHVRSSKSPKAGSTILIDGGGEAEMVARHDALFELRFAEPVLPLLERVGHMPLPPYIDRPDDDADRERYQTVYAQRAGAVAAPTAGLHFDQTMMDAIAEKGVETAFVTLHVGAGTFQPVRVDRIEDHHMHSEWLEVTQDVVDAVAACRARGGRVIAVGTTSVRSLESAARDGVLKPFSGDTDIFIYPGRPFHVVDALVTNFHLPESTLLMLVSAFAGYPETMAAYAAAVEHGYRFFSYGDAMFITRNPAPTAPEDSDPVDAASEDQA

SEQ ID NO: 70819 - protein, 349 aa, Pseudomonas abyssi
  misc_feature (1)..(349): tr|A0A2A3MKE3|A0A2A3MKE3_9PSED S-adenosylmethionine:tRN A ribosyltransferase-isomerase OS=Pseudomonas abyssi OX =170540 GN=queA PE=3 SV=1
MRLSDFDFELPDDLIARHPLAERRGSRLLCLDGPSGTLEHRLFVDLLEYLRPGDLMVFNNTRVIPARLFGRKATGGALEVLVERVLDEYRVLAHIRSSKSPKPGSQIVIDGGAEAEMVARHDALFELRFAEPVLPLLQRVGHMPLPPYIDRPDEDADRERYQTVYAKREGAVAAPTAGLHFDQPLLDAIAGLGVETAEVTLHVGAGTFQPVRVEKIEDHVMHQEWLEVSPEVVAAVEACKARGGRVIAVGTTSVRSLESAARDGELKPFSGDTDIFLYPGRPFHVVDALVTNFHLPESTLLMLVSAFAGYPETMAAYRAAVAEKYRFFSYGDAMFITRNPAPTGPEVSS

SEQ ID NO: 70820 - protein, 353 aa, Pseudomonas acidophila
  misc_feature (1)..(353): tr|A0A2A4EZA7|A0A2A4EZA7_9PSED S-adenosylmethionine:tRN A ribosyltransferase-isomerase OS=Pseudomonas acidophil a OX=1912599 GN=queA PE=3 SV=1
MFTLSDFDFTLPPELIAQTALPERSASRLLEVDGTRTPAHFTDRGFAELPNCIAPGDLLVFNDTKVLKARFLGQKASGGKIEVLIERLTGERTALAQIRASKTPVAGTTLRLADAFDVTVGERVEPFYTLHFPADCLTLIEQYGRLPLPPYIEHDPDATDETRYQTVFAQNPGAVAAPTAGLHFDDALLARLDERGVQRATLTLHVGAGTFQPVRVENLSEHKMHSEWYALPQTLVEQIEATRQRGNRVIAVGTTSMRALEAAARDADAAGRPLAATSAETDIFITPGYRFRVVDRLVTNFHLPKSTLLMLVSAFAGIDTIRAAYRHAIDERYRFFSYGDAMLLTRTDDAAQN

SEQ ID NO: 70821 - protein, 367 aa, Pseudomonas acidophila
  misc_feature (1)..(367): tr|A0A2A4F4S1|A0A2A4F4S1_9PSED S-adenosylmethionine:tRN A ribosyltransferase-isomerase OS=Pseudomonas acidophil a OX=1912599 GN=BWP39_03510 PE=3 SV=1
MRAATVPMQRPRDARLLTVDRYGHIDERPRTAFADLLQPGDCVIANDAATLPASLHGIHERTGTGIEVRLAGRTSLASDAMNRFSAIVFGAGDFHTRTEERAAPPDLCQGDRLIFGASGATIMRLLDHPRFVELRFDGDAAQVWRMLASHGKPVQYAHLADPLALWDVWTPIAAQPVAFEPPSAGFVLDWSTLDALHARGVPFATLTHAAGLSSTGDAMLDQRLPLDEPYRIPVATAVLVETTRARGGRVVAIGTTVVRALEHAAAIDGVVHPGDGVATQRIGPQTRLRVVDVIVSGTHEPDSSHYALLRAFADAPTLARVTATLEAHRYRTHEFGDSMWIERRADAVREEHASSERLRSCTAVYCA

SEQ ID NO: 70822 - protein, 347 aa, Pseudomonas aeruginosa
  misc_feature (1)..(347): sp|Q9HXH8|QUEA_PSEAE S-adenosylmethionine:tRNA ribosylt ransferase-isomerase OS=Pseudomonas aeruginosa (strain ATCC 15692 / DSM 22644 / CIP 104116 / JCM 14847 / LMG 1 2228 / 1C / PRS 101 / PAO1) OX=208964 GN=queA PE
MRVADFHFDLPEALIARHPLPERRASRLLALDGPTGTLAHRQFADLLDYLRPGDLMVFNNTRVIPARLFGQKESGGKLEVLVERVLDQHRVLAHIRASKAPKPGTRILVEGGGSAEMLQRHDALFELAFAEPVLPLLERVGHMPLPPYIDRPDDAADRERYQTVYAQRAGAVAAPTAGLHFDEALLEAIRAKGVDTAFVTLHVGAGTFQPVRVERIEDHVMHREWLEVGQDVVDAVSVCRARGGRVVAVGTTSVRSLESAARDGELKPFSGDTDIFIYPGRPFHVVDALVTNFHLPESTLLMLVSAFAGYPETMAAYAAAVAQGYRFFSYGDAMFITRNPAPRGPED

SEQ ID NO: 70823 - protein, 347 aa, Pseudomonas aeruginosa
  misc_feature (1)..(347): sp|B7UVU3|QUEA_PSEA8 S-adenosylmethionine:tRNA ribosylt ransferase-isomerase OS=Pseudomonas aeruginosa (strain LESB58) OX=557722 GN=queA PE=3 SV=1
MRVADFHFDLPEALIARHPLPERRASRLLALDGPTGTLAHRQFADLLDYLRPGDLMVFNNTRVIPARLFGQKESGGKLEVLVERVLDQDRVLAHIRASKAPKPGTRILVEGGGSAEMLQRHDALFELAFAEPVLPLLERVGHMPLPPYIDRPDDAADRERYQTVYAQRAGAVAAPTAGLHFDEALLEAIRAKGVDTAFVTLHVGAGTFQPVRVERIEDHVMHREWLEVGQDVVDAVSVCRARGGRVVAVGTTSVRSLESAARDGELKPFSGDTDIFIYPGRPFHVVDALVTNFHLPESTLLMLVSAFAGYPETMAAYAAAVAQGYRFFSYGDAMFITRNPAPRGPED

SEQ ID NO: 70824 - protein, 349 aa, Pseudomonas aestusnigri
  misc_feature (1)..(349): tr|A0A1H5Y971|A0A1H5Y971_9PSED S-adenosylmethionine:tRN A ribosyltransferase-isomerase OS=Pseudomonas aestusnig ri OX=857252 GN=queA PE=3 SV=1
MRLSDFHFDLPDELIARHPLAERRASRLLCLDGPTGQLAHRQFVDLLEYLRPGDLMVFNNTRVIPARLFGRKETGGALEVLVERVVDEFRVLAHIRSSKSPKPGSRILIDGGAEAEMVARHDALFELRFAEPVLPLLQRVGHMPLPPYIDRPDDEADRERYQTVYAKREGAVAAPTAGLHFDRPLLDAIAELGVETAEVTLHVGAGTFQPVRVDKIEEHVMHQEWLEVTPEVVAAVEACKARGGRVIAVGTTSVRSLESAARDGVLKPFSGDTDIFLYPGKPFHVVDALVTNFHLPESTLLMLVSAFAGYPEAMAAYRAAVAEKYRFFSYGDAMFITRNPAPTGPEVSS

SEQ ID NO: 70825 - protein, 354 aa, Pseudomonas agarici
  misc_feature (1)..(354): tr|A0A0X1T4M8|A0A0X1T4M8_PSEAA S-adenosylmethionine:tRN A ribosyltransferase-isomerase OS=Pseudomonas agarici O X=46677 GN=queA PE=3 SV=1
MRVADFTFELPDSLIARHPLAERRNSRLLTLDGPSGALAHRQFTDLLEHLRPGDLMVFNNTRVIPARLFGQKASGGKLEILVERVLDSHRVLAHVRSSKSPKPGSKILIEGGGEAEMLARHDTLFELGFTEHVLPLLERVGHMPLPPYIDRPDEGADRERYQTVYAERLGAVAAPTAGLHFDQPLLDAIAAKGVETAFVTLHVGAGTFQPVRVERIEDHHMHHEWLEVSQAVVDAVAACRARGGRVVAVGTTSVRSLESAARDGVLKPFSGDTDIFIYPGRPFHVVDALVTNFHLPESTLLMLVSAFAGYPETMAAYQAAVANGYRFFSYGDAMFITRNPAPTGPQKSASEDQA

SEQ ID NO: 70826 - protein, 351 aa, Pseudomonas alcaligenes
  misc_feature (1)..(351): tr|A0A1N6QYR3|A0A1N6QYR3_PSEAC S-adenosylmethionine:tRN A ribosyltransferase-isomerase OS=Pseudomonas alcaligen es OX=43263 GN=queA PE=3 SV=1
MRVADFQFDLPDSLIARHPLAERRASRLLVLDGPTGALAHRQFADLLEYLRPGDLMVFNDTRVIPARLFGQKASGGKLEVLVERVLDEYRVLAHVRSSKSPKPGSLIHIEGGGEAEMLARHDALFELRFSEPVLPLLDRVGHMPLPPYIDRPDEAADRERYQTVYSDKSKAGAVAAPTAGLHFDEALLAAIREKGIDTVFVTLHVGAGTFQPVRVERIEDHHMHREWLQVSQDVVDAVAACRARGGRVIAVGTTSVRSLESAARDGELKAFSGDTDIFLYPGKRFHVVDALVTNFHLPESTLLMLVSAFAGYPQTMAAYRAAVEQQYRFFSYGDAMFITRNPDPRGPEETP

SEQ ID NO: 70827 - protein, 351 aa, Pseudomonas alcaligenes
  misc_feature (1)..(351): tr|A0A5C7WEQ3|A0A5C7WEQ3_PSEAC S-adenosylmethionine:tRN A ribosyltransferase-isomerase OS=Pseudomonas alcaligen es OX=43263 GN=queA PE=3 SV=1
MRVADFQFDLPDSLIARHPLAERRASRLLVLDGPTGALAHRQFADLLEYLCPGDLMVFNDTRVIPARLFGQKASGGKLEVLVERVLDEYRVLAHVRSSKSPKPGSLIHIEGGGEAEMLARHDALFELRFSEPVLPLLDRVGHMPLPPYIDRPDEAADRERYQTVYSDRSKAGAVAAPTAGLHFDEALLAAIRDKGIDTVFVTLHVGAGTFQPVRVERIEDHHMHREWLQVGQDVVDAVAACRARGGRVIAVGTTSVRSLESAAREGELKAFSGDTDIFLYPGKRFHVVDALVTNFHLPESTLLMLVSAFAGYPETMAAYAAAVEQQYRFFSYGDAMFITRNPDPRGPEETP

SEQ ID NO: 70828 - protein, 347 aa, Pseudomonas alcaliphila
  misc_feature (1)..(347): tr|A0A1G7PHG9|A0A1G7PHG9_9PSED S-adenosylmethionine:tRN A ribosyltransferase-isomerase OS=Pseudomonas alcaliphi la OX=101564 GN=queA PE=3 SV=1
MRVADFHFDLPESLIARHPLPERRASRLLQLDGPSGALRHGQFTDVLEQLRPGDLMVFNNTRVIPARLFGQKASGGKLEVLVERVLDQYRVLAHVRSSKSPKPGSQVLIDGGGEAEMVARHDALFELRFAEPVLPLLERVGHMPLPPYIDRPDDEADRERYQTVYAQKAGAVAAPTAGLHFDDELLAAIRAKAVETAFVTLHVGAGTFQPVRVERIEDHHMHSEWLEVGQDVVDAVVACRARGGRVVAVGTTSVRSLETAARDGELKPFSGDTDIFIYPGRPFHVVDALVTNFHLPESTLLMLVSAFAGYPETMAAYREAVAQGYRFFSYGDAMFITRNPAARGPEV

SEQ ID NO: 70829 - protein, 347 aa, Pseudomonas alcaliphila
  misc_feature (1)..(347): tr|A0A1L7G391|A0A1L7G391_9PSED S-adenosylmethionine:tRN A ribosyltransferase-isomerase OS=Pseudomonas alcaliphi la JAB1 OX=741155 GN=queA PE=3 SV=1
MRVADFHFDLPESLIARHPLAERRASRLLQLDGPSGELRHGQFTDVLEQLRPGDLMVFNNTRVIPARLFGQKASGGKLEVLVERVLDQYRVLAHVRSSKSPKPGSQILIEGGGEAEMVARHDALFELRFAEPVLPLLERVGHMPLPPYIDRPDDEADRERYQTVYAQKAGAVAAPTAGLHFDDELLAAIRAKGVDTAFVTLHVGAGTFQPVRVERIEDHHMHSEWLEVGQDVVDAVAACRARGGRVVAVGTTSVRSLETAARDGELKPFSGDTDIFIYPGRPFHVVDALVTNFHLPESTLLMLVSAFAGYPETMAAYREAVAQGYRFFSYGDAMFITRNPAARGPEV

SEQ ID NO: 70830 - protein, 349 aa, Pseudomonas alkylphenolica
  misc_feature (1)..(349): tr|A0A077FHH6|A0A077FHH6_9PSED S-adenosylmethionine:tRN A ribosyltransferase-isomerase OS=Pseudomonas alkylphen olica OX=237609 GN=queA PE=3 SV=1
MRVADFSFELPDSLIARHPLAQRHSSRLLTLDGPSGALAHRQFTDLLEHLRPGDLMVFNNTRVIPARLFGQKASGGKLEILVERVLDSHRVLAHVRSSKSPKPGTQILIDGGGEAEMVARHDTLFELRFAEEVLPLLDRVGHMPLPPYIDRPDEGADRERYQTVYAERAGAVAAPTAGLHFDEALMARIADKGVETAFVTLHVGAGTFQPVRVERIEDHHMHKEWLEVGQDVVDAVAACRARGGRVIAVGTTSVRSLESAARDGVLKAFSGDTDIFIYPGRPFHVVDALVTNFHLPESTLLMLVSAFAGYPETMAAYAAAVENGYRFFSYGDAMFITRNPAPRGPEDQA

SEQ ID NO: 70831 - protein, 349 aa, Pseudomonas alkylphenolica
  misc_feature (1)..(349): tr|A0A443ZXK4|A0A443ZXK4_9PSED S-adenosylmethionine:tRN A ribosyltransferase-isomerase OS=Pseudomonas alkylphen olica OX=237609 GN=queA PE=3 SV=1
MRVADFSFELPDSLIARHPLAQRHSSRLLTLDGPSGALAHRQFTDLLEHLRPGDLMVFNNTRVIPARLFGQKASGGKLEILVERVLDSHRVLAHVRSSKSPKPGTQILIDGGGEAEMVARHDALFELRFAEEVLPLLDRVGHMPLPPYIDRPDEGADRERYQTVYAERAGAVAAPTAGLHFDEELMGKIAAKGVETAFVTLHVGAGTFQPVRVERIEDHHMHKEWLEVSQDVVDAVAACRARGGRVIAVGTTSVRSLESAARDGVLKAFSGDTDIFIFPGRPFHVVDALVTNFHLPESTLLMLVSAFAGYPETMAAYAAAVENGYRFFSYGDAMFITRNPAPRGPEDQA

SEQ ID NO: 70832 - protein, 326 aa, Pseudomonas amygdali
  misc_feature (1)..(326): tr|A0A3M4YQL2|A0A3M4YQL2_PSEAJ S-adenosylmethionine:tRN A ribosyltransferase-isomerase OS=Pseudomonas amygdali pv. tabaci OX=322 GN=queA PE=3 SV=1
MTLDGPTGALAHRQFTDLLEHLRPGDLMVFNNTRVIPARLFGQKASGGKLEILVERVLDSHRVLAHVRSSKSPKPGSSILIDGGGEAEMVARHDALFELRFAEEVLPLLERVGHMPLPPYIDRPDEGADRERYQTVYAQRAGAVAAPTAGLHFDQPLLEAIAAKGVETAFVTLHVGAGTFQPVRVEQIEDHHMHSEWLEVGQDVVDAVAACRARGGRVIAVGTTSVRSLESAARDGELKPFSGDTDIFIYPGRPFHVVDALVTNFHLPESTLLMLVSAFAGYPETMAAYAAAIEHGYRFFSYGDAMFITRNPAPTAPQESAPEDHA

SEQ ID NO: 70833 - protein, 354 aa, Pseudomonas amygdali
  misc_feature (1)..(354): tr|A0A0P9RU63|A0A0P9RU63_PSEA0 S-adenosylmethionine:tRN A ribosyltransferase-isomerase OS=Pseudomonas amygdali pv. hibisci OX=251723 GN=queA PE=3 SV=1
MRVADFTFELPDSLIARHPLAERRSSRLLTLDGPTGALAHRQFTDLLEHLRPSDLMVFNNTRVIPARLFGQKASGGKLEILVERVLDSHRVLAHVRSSKSPKPGSSILIDGGGEAEMVARHDALFELRFAEEVLPLLERVGHMPLPPYIDRPDEGADRERYQTVYAQRAGAVAAPTAGLHFDQPLLEAIAAKGVETAFVTLHVGAGTFQPVRVEQIEDHHMHSEWLEVGQDVVDAVAACRARGGRVIAVGTTSVRSLESAARDGELKPFSGDTDIFIYPGRPFHVVDALVTNFHLPESTLLMLVSAFAGYPETMAAYAAAIEHGYRFFSYGDAMFITRNPAPTAPQESAPEDHA

SEQ ID NO: 70834 - protein, 349 aa, Pseudomonas anguilliseptica
  misc_feature (1)..(349): tr|A0A1H4P6N2|A0A1H4P6N2_PSEAG S-adenosylmethionine:tRN A ribosyltransferase-isomerase OS=Pseudomonas anguillis eptica OX=53406 GN=queA PE=3 SV=1
MRVADFNFELPDALIARHPLAERRASRLLVLDGPTGELAHKQFSDLLDYLRPGDLMVFNNTRVIPARLFGQKASGGKLEILVERVLDAHRVLAHVRSSKSPKPGSSILIDGGGEAEMVARHDALFELRFVEEVLPLLERVGHMPLPPYIDRPDEQADRERYQTVYADRAGAVAAPTAGLHFDQQLLAAIAEKGVEQAFVTLHVGAGTFQPVRVERIEDHHMHSEWLEVGQDVVDAVVACRARGGRVIAVGTTSVRSLESAARDGVLKAFSGDTDIFVYPGRPLHVVDALVTNFHLPESTLLMLVSAFAGYPETMAAYQAAIAGEYRFFSYGDAMFITRNPAPRGPEEQL

SEQ ID NO: 70835 - protein, 299 aa, Pseudomonas antarctica
  misc_feature (1)..(299): tr|A0A172Z7D9|A0A172Z7D9_9PSED S-adenosylmethionine:tRN A ribosyltransferase-isomerase OS=Pseudomonas antarctic a OX=219572 GN=A7J50_4846 PE=3 SV=1
MVFNNTRVIPARLFGQKASGGKLEILVERVLDSHRVLAHVRSSKSPKPRSSILIDGGGEAEMVARHDALFELKFAEEVLPLLERVGHMPLPPYIDRPDEDADRERYQTVYSQRPGAVAAPTAGLHFDQPLLDAIAAKGVESAYVTLHVGAGTFQPVRVDNIEDHHMHSEWLEVSQSVVDAVAACKARGGRVVAVGTTSVRSLESAARDGVLKPFSGDTDIFIFPGRPFHVVDCLVTNFHLPESTLLMLVSAFAGYPETMAAYQAAIANEYRFFSYGDAMFITRNPAPTAPKEAGPEEPL

SEQ ID NO: 70836 - protein, 354 aa, Pseudomonas antarctica
  misc_feature (1)..(354): tr|A0A1G9XIV6|A0A1G9XIV6_9PSED S-adenosylmethionine:tRN A ribosyltransferase-isomerase OS=Pseudomonas antarctic a OX=219572 GN=queA PE=3 SV=1
MRVADFTFELPDSLIARHPLAERRASRLLTLDGVSGALAHRQFTDLLEHLRPGDLMVFNNTRVIPARLFGQKASGGKLEILVERVLDSHRVLAHVRSSKSPKPGSSILIDGGGEAEMVARHDALFELKFAEEVLPLLERVGHMPLPPYIDRPDEDSDRERYQTVYSQRLGAVAAPTAGLHFDQQLLDAIAAKGVESAYVTLHVGAGTFQPVRVDNIEDHHMHSEWLEVSQEVVDAVAACRARGGRVVAVGTTSVRSLESAARDGVLKPFSGDTDIFIFPGRPFHVVDCLVTNFHLPESTLLMLVSAFAGYPQTMAAYQAAIANEYRFFSYGDAMFITRNPAPTAPKEAGPEEQL

SEQ ID NO: 70837 - protein, 349 aa, Pseudomonas argentinensis
  misc_feature (1)..(349): tr|A0A1I3HCE1|A0A1I3HCE1_9PSED S-adenosylmethionine:tRN A ribosyltransferase-isomerase OS=Pseudomonas argentine nsis OX=289370 GN=queA PE=3 SV=1
MRVADFHFDLPDGQIARHPLAERRASRLLILDGASGALAHRQFADLLEYLRPGDLMVFNNTRVIPARLFGQKTTGGKLEILVERVLDEHRVLAHVRSSKSPKPGSLIDIDGGARAQMLARHDALFELRFEEAVLPLLERVGHMPLPPYIDRPDEAADRERYQTVYAQKAGAVAAPTAGLHFDAELLAALREKGVESAFVTLHVGAGTFQPVRVERIEDHHMHSEWLEVGQDVVDAVQACRARGGRVVAVGTTSVRSLESAARDGELKPFSGDTDIFIYPGRPFHVVDALVTNFHLPESTLLMLVSAFAGYPETMAAYAQAVAEGYRFFSYGDAMFITRNPAPRGPEASV

SEQ ID NO: 70838 - protein, 349 aa, Pseudomonas arsenicoxydans
  misc_feature (1)..(349): tr|A0A1H0H8H8|A0A1H0H8H8_9PSED S-adenosylmethionine:tRN A ribosyltransferase-isomerase OS=Pseudomonas arsenicox ydans OX=702115 GN=queA PE=3 SV=1
MRVADFTFELPDSLIARHPLAERRNSRLLTLDGVSGALAHRQFTDLLEHLRPGDLMVFNNTRVIPARLFGQKASGGKLEILVERVLDSHRVLAHVRSSKSPKPGSKILIDGGGEAEMLARHDALFELGFAEEVLPLLDRVGHMPLPPYIDRPDEGSDRERYQTVYAERLGAVAAPTAGLHFDQPLMEAIAAKGVETAFVTLHVGAGTFQPVRVEKIEDHHMHTEWLEVGQDVVDAVAACRARGGRVVAVGTTSVRSLESAARDGVLKPFSGDTDIFIYPGRPFHVVDALVTNFHLPESTLLMLVSAFAGYPETMAAYKAAVDNEYRFFSYGDAMFITRNPAPRGPEDKE

SEQ ID NO: 70839 - protein, 349 aa, Pseudomonas arsenicoxydans
  misc_feature (1)..(349): tr|A0A502HPL0|A0A502HPL0_9PSED S-adenosylmethionine:tRN A ribosyltransferase-isomerase OS=Pseudomonas arsenicox ydans OX=702115 GN=queA PE=3 SV=1
MRVADFTFELPDSLIARHPLAERRNSRLLTLDGVSGALAHRQFTDLLEHLRPGDLMVFNNTRVIPARLFGQKASGGKLEILVERVLDSHRVLAHVRSSKSPKPGSKILIDGGGEAEMLARHDALFELGFAEEVLPLLDRVGHMPLPPYIDRPDEGSDRERYQTVYAERLGAVAAPTAGLHFDQPLMEAIAAKGVETAFVTLHVGAGTFQPVRVEKIEDHHMHSEWLEVGQDVVDAVAACRARGGRVVAVGTTSVRSLESAARDGVLKPFSGDTDIFIYPGRPFHVVDALVTNFHLPESTLLMLVSAFAGYPEAMAAYKAAVEHGYRFFSYGDAMFITRNPAPRGPEDKE

SEQ ID NO: 70840 - protein, 354 aa, Pseudomonas asplenii
  misc_feature (1)..(354): tr|A0A3S4A6L0|A0A3S4A6L0_9PSED S-adenosylmethionine:tRN A ribosyltransferase-isomerase OS=Pseudomonas asplenii OX=53407 GN=queA PE=3 SV=1
MRVADFTFELPDSLIARHPLAERRLSRLLTLDGPSGALAHRQFTDLLEHLRPGDLMVFNNTRVIPARLFGQKASGGKLEILVERVLDTHRVLAHVRSSKSPKPGSKILIDGGGEAEMLARHDTLFELGFAEEVLPLLERVGHMPLPPYIDRPDEGADRERYQTVYAERLGAVAAPTAGLHFDQPLLDAIAAKGVETAFVTLHVGAGTFQPVRVERLEDHHMHHEWLEVSQEVVDAVAACRARGGRVIAVGTTSVRSLESAARDGVLKPFSGDTDIFIFPGRPFHVVDALVTNFHLPESTLLMLVSAFAGYPETMAAYKAAVDNGYRFFSYGDAMFITRNPAPAAPKDRAPEDQA

SEQ ID NO: 70841 - protein, 354 aa, Pseudomonas asplenii
  misc_feature (1)..(354): tr|A0A1H1P359|A0A1H1P359_9PSED S-adenosylmethionine:tRN A ribosyltransferase-isomerase OS=Pseudomonas asplenii OX=53407 GN=queA PE=3 SV=1
MRVADFTFELPDSLIARHPLAERRNSRLLTLDGPSGALAHRQFTDLLEYLRPGDLMVFNNTRVIPARLFGQKASGGKLEILVERVLDSHRVLAHVRSSKSPKPGSKILIEGGGEAEMLARHDTLFELGFAEEVLPLLERVGHMPLPPYIDRPDEGADRERYQTVYAERLGAVAAPTAGLHFDQPLLEAIAAKGVETAFVTLHVGAGTFQPVRVERIEDHHMHNEWLEVTQDVVDAVAACRARGGRVVAVGTTSVRSLESAARDGVLKPFSGDTDIFIYPGRPFHVVDALVTNFHLPESTLLMLVSAFAGYPETMAAYQAAVDNGYRFFSYGDAMFITRNPAPTGPQESAPEEQA

SEQ ID NO: 70842 - protein, 354 aa, Pseudomonas asturiensis
  misc_feature (1)..(354): tr|A0A1M7LNI9|A0A1M7LNI9_9PSED S-adenosylmethionine:tRN A ribosyltransferase-isomerase OS=Pseudomonas asturiens is OX=1190415 GN=queA PE=3 SV=1
MRVADFTFELPDSLIARHPLAERRSSRLLTLDGVSGALAHRQFTDLLEHLRPGDLMVFNNTRVIPARLFGQKASGGKLEILVERVLDSHRVLAHVRSSKSPKPGSSILIDGGGEAEMVARHDALFELRFAEEVLPLLDRVGHMPLPPYIDRPDEGADRERYQTVYAQRAGAVAAPTAGLHFDQSLMEAIAAKGVETTFVTLHVGAGTFQPVRVEQIEDHHMHTEWLEVGQDVVDAVAACRARGGRVIAVGTTSVRSLESAARDGVLKPFSGDTDIFIYPGRPFHVVDALVTNFHLPESTLLMLVSAFAGYPETMAAYAAAIEHGYRFFSYGDAMFITRNPAPTAPQESVPEDHA

SEQ ID NO: 70843 - protein, 354 aa, Pseudomonas avellanae
  misc_feature (1)..(354): tr|A0A261WJU9|A0A261WJU9_9PSED S-adenosylmethionine:tRN A ribosyltransferase-isomerase OS=Pseudomonas avellanae OX=46257 GN=queA PE=3 SV=1
MRVADFTFELPDSLIARHPLAERRSSRLLTLDGPTGALAHRQFTDLLEHLRSGDLMVFNNTRVIPARLFGQKASGGKLEILVERVLDGHRVLAHVRASKSPKPGSSILIDGGGEAEMVARHDALFELRFAEEVLPLLDRVGHMPLPPYIDRPDEGADRERYQTVYAQRAGAVAAPTAGLHFDQPLMEAIAAKGVETAFVTLHVGAGTFQPVRVEQIEDHHMHSEWLEVSQDVVDAVAACRARGGRVIAVGTTSVRSLESAARDGHLKPFSGDTDIFIYPGRPFHVVDALVTNFHLPESTLLMLVSAFAGYPETMAAYAAAIEHGYRFFSYGDAMFITRNPAPTAPQESAPEDHA

SEQ ID NO: 70844 - protein, 354 aa, Pseudomonas avellanae
  misc_feature (1)..(354): tr|A0A2S3TJU2|A0A2S3TJU2_9PSED S-adenosylmethionine:tRN A ribosyltransferase-isomerase OS=Pseudomonas avellanae OX=46257 GN=queA PE=3 SV=1
MRVADFTFELPDSLIARHPLAERRSSRLLTLDGPTGALAHRQFTDLLEHLRSGDLMVFNNTRVIPARLFGQKASGGKLEILVERVLDSHRVLAHVRASKSPKPGSSILIDGGGEAEMVARHDALFELRFAEEVLPLLDRVGHMPLPPYIDRPDEGADRERYQTVYAQRAGAVAAPTAGLHFDQPLMEAIAAKGVETAFVTLHVGAGTFQPVRVEQIEDHHMHSEWLEVSQDVVDAVAACRARGGRVIAVGTTSVRSLESAARDGHLKPFSGDTDIFIYPGRPFHVVDALVTNFHLPESTLLMLVSAFAGYPETMAAYAAAIEHGYRFFSYGDAMFITRNPAPTAPQESAPEDHA

SEQ ID NO: 70845 - protein, 349 aa, Pseudomonas azotoformans
  misc_feature (1)..(349): tr|A0A3M5MHL1|A0A3M5MHL1_PSEAZ S-adenosylmethionine:tRN A ribosyltransferase-isomerase OS=Pseudomonas azotoform ans OX=47878 GN=queA PE=3 SV=1
MRVADFTFELPDSLIARHPLAERRASRLLTLDGPSGALAHRQFTDLLEHLRPGDLMVFNNTRVIPARLFGQKASGGKLEILVERVLDSHRVLAHVRSSKSPKPGSSILIEGGGEAEMVARHDALFELKFAEEVLPLLERVGHMPLPPYIDRPDEDADRERYQTVYSQRLGAVAAPTAGLHFDQPLLDAIAAKGVDTAYVTLHVGAGTFQPVRVDNIEDHHMHSEWLEVSQDVVDAVAACKARGGRVVAVGTTSVRSLESAARDGVLKPFSGDTDIFIFPGRPFHVVDCLVTNFHLPESTLLMLVSAFAGYPETMAAYQAAIANEYRFFSYGDAMFITRNPAPRGPEDNL

SEQ ID NO: 70846 - protein, 349 aa, Pseudomonas azotoformans
  misc_feature (1)..(349): tr|A0A127HRF5|A0A127HRF5_PSEAZ S-adenosylmethionine:tRN A ribosyltransferase-isomerase OS=Pseudomonas azotoform ans OX=47878 GN=queA PE=3 SV=1
MRVADFTFELPDSLIARHPLAERRASRLLTLDGVSGALAHRQFTDLLEHLRPGDLMVFNNTRVIPARLFGQKASGGKLEILVERVLDSHRVLAHVRSSKSPKPGSSILIDGGGEAEMVARHDALFELKFAEEVLPLLERVGHMPLPPYIDRPDEDSDRERYQTVYSQRLGAVAAPTAGLHFDQPLLDAIAAKGVETAYVTLHVGAGTFQPVRVDNIEDHHMHSEWLEVSQDVVDAVAACKARGGRVVAVGTTSVRSLESAARDGVLKPFSGDTDIFIFPGRPFHVVDCLVTNFHLPESTLLMLVSAFAGYPETMAAYQAAIANEYRFFSYGDAMFITRNPAPRGPEGTL

SEQ ID NO: 70847 - protein, 354 aa, Pseudomonas baetica
  misc_feature (1)..(354): tr|A0A2N0DHV3|A0A2N0DHV3_9PSED S-adenosylmethionine:tRN A ribosyltransferase-isomerase OS=Pseudomonas baetica O X=674054 GN=queA PE=3 SV=1
MRVADFTFELPDSLIARHPLAERRGSRLLTLDGVSGALAHRQFTDLLEHLRPGDLMVFNNTRVIPARLFGQKASGGKLEILIERVLDAHRVLAHVRSSKSPKPGSKILIDGGGEAEMLARHDALFELGFDEEVLPLLDRVGHMPLPPYIDRPDEGSDRERYQTVYAERLGAVAAPTAGLHFDQPLMEAIAAKGVETAFVTLHVGAGTFQPVRVDKIEDHHMHSEWLEVGQDVVDAVAACRARGGRVIAVGTTSVRSLESAARDGVLKPFSGDTDIFIYPGRPFHVVDALVTNFHLPESTLLMLVSAFAGYPETMAAYKAAVDNGYRFFSYGDAMFITRNPAPTAPKQTGPEETE

SEQ ID NO: 70848 - protein, 348 aa, Pseudomonas balearica
  misc_feature (1)..(348): tr|A0A1G9SY74|A0A1G9SY74_9PSED S-adenosylmethionine:tRN A ribosyltransferase-isomerase OS=Pseudomonas balearica DSM 6083 OX=1123016 GN=queA PE=3 SV=1
MQVADFFFELPESLIARFPLAERRASRLLVLEGPSGALSHRRFADLLDYVRPGDLMVFNDTRVIPARLFGRKATGGQLEILVERVLDTQRVLAHVRASKSPKAGSSILIDGGGEAQVLGRQESLFELGFSEPVLPLLERVGHMPLPPYIDRPDEGSDRERYQTVYAQRAGAVAAPTAGLHFDEAMLAALREQGVATAYVTLHVGAGTFQPVRVERIEDHHMHSEWLEVGQAVVDAVAECRARGGRVIAVGTTSVRSLETAARSGQLQPFAGETDIFIYPGKPFHVVDALVTNFHLPESTLLMLVSAFAGYRETMAAYAEAVREGYRFFSYGDAMFITRNPAARGPEDR

SEQ ID NO: 70849 - protein, 354 aa, Pseudomonas batumici
  misc_feature (1)..(354): tr|A0A0C2I484|A0A0C2I484_9PSED S-adenosylmethionine:tRN A ribosyltransferase-isomerase OS=Pseudomonas batumici OX=226910 GN=queA PE=3 SV=1
MRVADFTFELPDSLIARHPLAERRLSRLLTLDGPSGALAHRQFTDLLEYLRPGDLMVFNNTRVIPARLFGQKASGGKLEILVERVLDTHRVLAHVRSSKSPKPGSKILIEGGGEAEMLARHDTLFELGFDEEVLPLLERVGHMPLPPYIDRPDEGADRERYQTVYAERLGAVAAPTAGLHFDQPLLDAIAAKGVETAFVTLHVGAGTFQPVRVERLEDHHMHHEWLEVSQEVVDAVAACRARGGRVIAVGTTSVRSLESAARDGVLKPFSGDTDIFIYPGRPFHVVDALVTNFHLPESTLLMLVSAFAGYPETMAAYKAAVDNGYRFFSYGDAMFITRNPAPAAPKDRAPEDQA

SEQ ID NO: 70850 - protein, 349 aa, Pseudomonas bauzanensis
  misc_feature (1)..(349): tr|A0A031MI55|A0A031MI55_9PSED S-adenosylmethionine:tRN A ribosyltransferase-isomerase OS=Pseudomonas bauzanens is OX=653930 GN=queA PE=3 SV=1
MRVSDFQFDLPDRLIARHPLAERRASRLLCLDGPSDELAHRQFADLLEYLRPGDLMVFNNTRVIPARLFGRKETGGQLEILVERVLDNRRVLAHVRSSKSPKPGSRILLEGDSAATMLARHDALFELEFDEPVLPLLDRVGHMPLPPYIDRPDETADRERYQTVYAQKAGAVAAPTAGLHFDNELLQAIEARGVATAQVTLHVGAGTFQPVRVERIEDHHMHSEWLEVSQQVVDAVNACKARGGRVIAVGTTSVRSLESAARDGQLKAFSGDTDIFIYPGRPFHVVDALVTNFHLPESTLLMLVSAFAGYRQTMAAYRAAVDNDYRFFSYGDAMFITRNPAACGPEDMQ

SEQ ID NO: 70851 - protein, 349 aa, Pseudomonas bauzanensis
  misc_feature (1)..(349): tr|A0A4U0YPS8|A0A4U0YPS8_9PSED S-adenosylmethionine:tRN A ribosyltransferase-isomerase OS=Pseudomonas bauzanens is OX=653930 GN=queA PE=3 SV=1
MRVSDFQFDLPDRLIARHPLAERRASRLLCLDGPSGELAHRQFADLLEYLRPGDLMVFNNTRVIPARLFGRKETGGQLEILVERVLDNRRVLAHVRSSKSPKPGSRILLEGDSAATMLARHDALFELEFDEPVLPLLDRVGHMPLPPYIDRPDETADRERYQTVYAQKAGAVAAPTAGLHFDNELLQAIEARGVATAQVTLHVGAGTFQPVRVERIEDHHMHSEWLEVSQQVVDAVNACKARGGRVIAVGTTSVRSLESAARDGQLKAFSGDTDIFIYPGRPFHVVDALVTNFHLPESTLLMLVSAFAGYRQTMAAYRAAVDNDYRFFSYGDAMFITRNPAACGPEDMQ

SEQ ID NO: 70852 - protein, 349 aa, Pseudomonas benzenivorans
  misc_feature (1)..(349): tr|A0A1G7XTD9|A0A1G7XTD9_9PSED S-adenosylmethionine:tRN A ribosyltransferase-isomerase OS=Pseudomonas benzenivo rans OX=556533 GN=queA PE=3 SV=1
MRVADFHFELPESLIARHPLAERRASRLLVLDGVSGELAHRGFGDLLEYLRPGDLMVFNNTRVIPARLFGQKASGGKLEVLVERVLDSHRVLAHVRSSKSPKPGSTILLDGGGEAQMLARHDALFELRFAEEVLPLLERVGHMPLPPYIDRPDDAADRERYQTVYAERAGAVAAPTAGLHFDQDLLAAIAERGVETAFVTLHVGAGTFQPVRVERIEDHHMHSEWLEVGQDVVDAVAACRARGGRVIAVGTTSVRSLESAARDGVLRPFNGDTDIFIYPGRPFHVVDAMVTNFHLPESTLLMLVSAFAGYPETMAAYQSAVAEGYRFFSYGDAMFITRNPAPRGPEDQL

SEQ ID NO: 70853 - protein, 349 aa, Pseudomonas borbori
  misc_feature (1)..(349): tr|A0A1I5VJV4|A0A1I5VJV4_9PSED S-adenosylmethionine:tRN A ribosyltransferase-isomerase OS=Pseudomonas borbori O X=289003 GN=queA PE=3 SV=1
MRVADFDFELPDALIARHPLAERRASRLLVLNGPSGALAHRQFSDLLEYLRPGDLMVFNNTRVIPARLFGQKASGGKLEVLVERVLDSHRVLAHVRSSKSPKPGSMILLDGGGEAQMLARHGALFELRFAEAVLPLLERVGHMPLPPYIDRPDDAADRERYQTVYAERTGAVAAPTAGLHFDQALLASIAGMGVESAFVTLHVGAGTFQPVRVERIEDHHMHSEWLEVGQEVVDAVAACRARGGRVVAVGTTSVRSLESAARDGVLKAFSGDTDIFIYPGRPLHVVDALVTNFHLPESTLLMLVSAFAGYPETMAAYKSAVAEGYRFFSYGDAMFITRNPAPRGPEDHL

SEQ ID NO: 70854 - protein, 349 aa, Pseudomonas brassicacearum
  misc_feature (1)..(349): tr|A0A423HYQ4|A0A423HYQ4_9PSED S-adenosylmethionine:tRN A ribosyltransferase-isomerase OS=Pseudomonas brassicac earum OX=930166 GN=queA PE=3 SV=1
MRVADFTFELPDSLIARHPLAERRNSRLLTLDGVSGALAHRQFTDLLEHLRPGDLMVFNNTRVIPARLFGQKASGGKLEILVERVLDSHRVLAHVRSSKSPKPGSKILIDGGGEAEMLARHDALFELGFAEEVLPLLDRVGHMPLPPYIDRPDEGSDRERYQTVYAERLGAVAAPTAGLHFDQPLMEAIAAKGVETAFVTLHVGAGTFQPVRVEKIEDHHMHSEWLEVGQDVVDAVAACRARGGRVVAVGTTSVRSLESAARDGVLKPFSGDTDIFIYPGRPFHVVDALVTNFHLPESTLLMLVSAFAGYPEAMAAYKAAVEHGYRFFSYGDAMFITRNPAPRGPEETE

SEQ ID NO: 70855 - protein, 349 aa, Pseudomonas brassicacearum
  misc_feature (1)..(349): tr|A0A423FU17|A0A423FU17_9PSED S-adenosylmethionine:tRN A ribosyltransferase-isomerase OS=Pseudomonas brassicac earum OX=930166 GN=queA PE=3 SV=1
MRVADFTFELPDSLIARHPLAERRASRLLTLDGVSGAMAHRQFTDLLEHLRPGDLMVFNNTRVIPARLFGQKASGGKLEILVERVLDSHRVLAHVRSSKSPKPGSSILIDGGGEAVMVARHDALFELEFAEEVLPLLDRVGHMPLPPYIDRPDEGSDRERYQTVYAERLGAVAAPTAGLHFDQPLLEAIAAKGVETTFVTLHVGAGTFQPVRVERIEDHHMHSEWLEVSQDVVDAVAACRARGGRVVAVGTTSVRSLESAARDGVLKPFSGDTDIFIYPGRPFHVVDALVTNFHLPESTLLMLVSAFAGYPEAMAAYKAAVEQGYRFFSYGDAMFITRNPAPRGPEETV

SEQ ID NO: 70856 - protein, 294 aa, Pseudomonas brenneri
  misc_feature (1)..(294): tr|A0A4R6YMZ8|A0A4R6YMZ8_9PSED S-adenosylmethionine:tRN A ribosyltransferase-isomerase OS=Pseudomonas brenneri OX=129817 GN=queA PE=3 SV=1
MVFNNTRVIPARLFGQKASGGKLEILVERVLDSHRVLAHVRSSKSPKPGSSILIDGGGEAQMVARHDALFELKFAEEVLPLLERVGHMPLPPYIDRPDEDSDRERYQTVYSQRLGAVAAPTAGLHFDQPLLDAIAAKGVETAYVTLHVGAGTFQPVRVDNIEDHHMHSEWLEVSQDVVDAVNACKARGGRVVAVGTTSVRSLESAARDGVLKPFSGDTDIFIYPGRPFHVVDCLVTNFHLPESTLLMLVSAFAGYPETMAAYQAAIDNGYRFFSYGDAMFITRNPAPRGPEEQL

SEQ ID NO: 70857 - protein, 349 aa, Pseudomonas brenneri
  misc_feature (1)..(349): tr|A0A5B2UIV8|A0A5B2UIV8_9PSED S-adenosylmethionine:tRN A ribosyltransferase-isomerase OS=Pseudomonas brenneri OX=129817 GN=queA PE=3 SV=1
MRVADFTFELPDSLIARHPLAERRASRLLTLDGVSGALAHRQFTDLLEHLSPGDLMVFNNTRVIPARLFGQKASGGKLEILVERVLDSHRVLAHVRSSKSPKPGSSILIDGGGEAEMVARHDALFELKFAEEVLPLLERVGHMPLPPYIDRPDEDSDRERYQTVYSQRLGAVAAPTAGLHFDQPLLDAIAAKGVETAYVTLHVGAGTFQPVRVDNIEDHHMHSEWLEVSQDVVDAVNACKARGGRVVAVGTTSVRSLESAARDGVLKPFSGDTDIFIYPGRPFHVVDCLVTNFHLPESTLLMLVSAFAGYPETMAAYQAAIDNGYRFFSYGDAMFITRNPAPRGPEEQL

SEQ ID NO: 70858 - protein, 354 aa, Pseudomonas canadensis
  misc_feature (1)..(354): tr|A0A423EVP0|A0A423EVP0_9PSED S-adenosylmethionine:tRN A ribosyltransferase-isomerase OS=Pseudomonas canadensi s OX=915099 GN=queA PE=3 SV=1
MRVADFTFELPDSLIARHPLAERRASRLLTLDGVSGVLAHRQFTDLLEHLRPGDLMVFNNTRVIPARLFGQKASGGKLEILVERVLDSHRVLAHVRSSKSPKPGSSILIDGGGEAEMVARHDALFELKFAEEVLPLLERVGHMPLPPYIDRPDEDSDRERYQTVYSQRLGAVAAPTAGLHFDQPLLDAIAAKGVETAYVTLHVGAGTFQPVRVDNIEDHHMHSEWLEVSQEVVDAVAACKARGGRVVAVGTTSVRSLESAARDGVLKPFSGDTDIFIFPGRPFHVVDCLVTNFHLPESTLLMLVSAFAGYPETMAAYQAAIANEYRFFSYGDAMFITRNPAPTAPKEAGPEEQS

SEQ ID NO: 70859 - protein, 267 aa, Pseudomonas cannabina
  misc_feature (1)..(267): tr|A0A3M3L4J3|A0A3M3L4J3_PSECA S-adenosylmethionine:tRN A ribosyltransferase-isomerase (Fragment) OS=Pseudomona s cannabina OX=86840 GN=ALQ64_05638 PE=3 SV=1
MMRVADFIFELPDSLIARHPLAERRSSRLLTLDGPTGALAHRQFTDLLEHVRTGDLMVFNNTRVIPARLFGQKASGGKLEILVERVLDSHRVLAHVRASKSPKPGSSILIDGGGEAEMVARHDTLFELRFAEEVLPLLDRVGHMPLPSYIDRPDEGADRERYQTVYAERAGAVAAPTAGLHFDQPLLDAIAAKGVETAFVTLHVGAGTFQPVRVEQIEDHHMHSEWLEVSQSVVDAVAACRARGGRVIAVGTTSVRSLESAARDGVL

SEQ ID NO: 70860 - protein, 354 aa, Pseudomonas cannabina
  misc_feature (1)..(354): tr|A0A3M3PSA1|A0A3M3PSA1_PSECA S-adenosylmethionine:tRN A ribosyltransferase-isomerase OS=Pseudomonas cannabina OX=86840 GN=queA PE=3 SV=1
MRVADFTFELPDSLIARHPLAERRSSRLLTLDGPTGALAHRQFTDLLEHVRLGDLMVFNNTRVIPARLFGQKASGGKLEILVERVLDSHRVLAHVRASKSPKPGSSILIDGGGEAEMVARHDTLFELRFAEEVLPLLDRVGHMPLPPYIDRPDEGADRERYQTVYAERAGAVAAPTAGLHFDQPLLDAIAAKGVETAFVTLHVGAGTFQPVRVEQIEDHHMHSEWLEVSQSVVDAVAACRARGGRVIAVGTTSVRSLESAARDGVLKPFSGDTDIFIYPGRPFHVVDALVTNFHLPESTLLMLVSAFAGYPETMAAYAAAVEHGYRFFSYGDAMFITRNPAPTAPQESAPEDHA

SEQ ID NO: 70861 - protein, 349 aa, Pseudomonas capeferrum
  misc_feature (1)..(349): tr|A0A084CBZ2|A0A084CBZ2_9PSED S-adenosylmethionine:tRN A ribosyltransferase-isomerase OS=Pseudomonas capeferru m OX=1495066 GN=queA PE=3 SV=1
MRVADFSFELPDSLIARHPLAERHGSRLLVLDGPSGALVHQQFTDLLDYLRPGDLMVFNNTRVIPARLFGQKASGGKLEVLVERVLDSHRVLAHVRSSKAPKVGAQILIDGGGEAEMVARHETLFELRFTEEVLPLLERVGHMPLPPYIDRPDEGADRERYQTVYAERAGAVAAPTAGLHFDQALLEQIAAKGVERAFVTLHVGAGTFQPVRVDKIEDHHMHKEWLEVSQDVVDAVEACRARGGRVVAVGTTSVRSLESAARDGVLKAFSGDTDIFIYPGRPFHVVDALVTNFHLPESTLLMLVSAFAGYPETMAAYAAAVEQGYRFFSYGDAMFITRNPAPRGPEDQA

SEQ ID NO: 70862 - protein, 354 aa, Pseudomonas caricapapayae
  misc_feature (1)..(354): tr|A0A3M6F1W2|A0A3M6F1W2_9PSED S-adenosylmethionine:tRN A ribosyltransferase-isomerase OS=Pseudomonas caricapap ayae OX=46678 GN=queA PE=3 SV=1
MRVADFTFELPDSLIARHPLAERRSSRLLTLDGPTGALAHRQFADLLEHLRSGDLMVFNNTRVIPARLFGQKASGGKLEILVERVLDSHRVLAHVRSSKSPKPGSSILIDGGGEAEMVARHDALFELRFAEEVLPLLERVGHMPLPPYIDRPDESADRERYQTVYAQRAGAVAAPTAGLHFDQPLMEAIAAKGVETAFVTLHVGAGTFQPVRVEQIEDHHMHSEWLEVSQDVVDAVAACRARGGRVIAVGTTSVRSLESAARDGQLKPFSGDTDIFIYPGRPFHVVDALVTNFHLPESTLLMLVSAFAGYPETMAAYAAAIEHGYRFFSYGDAMFITRNPAPTAPQESAPEDHA

SEQ ID NO: 70863 - protein, 354 aa, Pseudomonas caricapapayae
  misc_feature (1)..(354): tr|A0A0P9KMI8|A0A0P9KMI8_9PSED S-adenosylmethionine:tRN A ribosyltransferase-isomerase OS=Pseudomonas caricapap ayae OX=46678 GN=queA PE=3 SV=1
MRVADFTFELPDSLIARHPLAERRSSRLLTLDGPTGALAHRQFADLLEHLRSGDLMVFNNTRVIPARLFGQKASGGKLEILVERVLDSHRVLAHVRSSKSPKPGSSILIDGGGEAEMVARRDALFELRFAEEVLPLLERVGHMPLPPYIDRPDESADRERYQTVYAQRAGAVAAPTAGLHFDQPLMEAIAAKGVETAFVTLHVGAGTFQPVRVEQIEDHHMHSEWLEVSQDVVDAVAACRARGGRVIAVGTTSVRSLESAARDGQLKPFSGDTDIFIYPGRPFHVVDALVTNFHLPESTLLMLVSAFAGYPETMAAYAAAIEHGYRFFSYGDAMFITRNPAPTAPQESAPEDHA

SEQ ID NO: 70864 - protein, 349 aa, Pseudomonas caspiana
  misc_feature (1)..(349): tr|A0A502JFV1|A0A502JFV1_9PSED S-adenosylmethionine:tRN A ribosyltransferase-isomerase OS=Pseudomonas caspiana OX=1451454 GN=queA PE=3 SV=1
MRVADFTFELPDSLIARHPLAERRNSRLLTLDGVSGALAHRQFTDLLEHLRPGDLMVFNNTRVIPARLFGQKASGGKLEILVERVLDSHRVLAHVRSSKSPKPGSKILIDGGGEAEMLARHDALFELGFAEEVLPLLDRVGHMPLPPYIDRPDEGSDRERYQTVYAERLGAVAAPTAGLHFDQPLMEAIAAKGVETAFVTLHVGAGTFQPVRVEKIEDHHMHSEWLEVGQDVVDAVEACRARGGRVVAVGTTSVRSLESAARDGVLKPFSGDTDIFIYPGRPFHVVDALVTNFHLPESTLLMLVSAFAGYPEAMAAYKAAVEHEYRFFSYGDAMFITRNPAPRGPEETE

SEQ ID NO: 70865 - protein, 354 aa, Pseudomonas caspiana
  misc_feature (1)..(354): tr|A0A1Y3P8W8|A0A1Y3P8W8_9PSED S-adenosylmethionine:tRN A ribosyltransferase-isomerase OS=Pseudomonas caspiana OX=1451454 GN=queA PE=3 SV=1
MRVADFTFELPDSLIARHPLAERRSSRLLTLDGVTGALGHEHFSDLLEHVRPGDLMVFNNTRVIPARLFGQKASGGKLEILVERVLDTHSVLAHVRSSKSPKPGSMIVIDGGGEAEMVVRHDTLFELRFTEPVLPLLERVGHMPLPPYIDRPDDSADRERYQTVYAQRAGAVAAPTAGLHFDQPLLDAMKAKGVEMAFVTLHVGAGTFQPVRVEKLEDHHMHSEWLEVGQDVVDAVAACRERGGRVIAVGTTSVRSLESAARDGVLKPFSGDTDIFIFPGRPFHVVDALVTNFHLPESTLLMLVSAFAGYPETMAAYKAAVENGYRFFSYGDAMFITRNPAPTAPKASGPEDHA

SEQ ID NO: 70866 - protein, 349 aa, Pseudomonas cedrina
  misc_feature (1)..(349): tr|A0A1V2KL60|A0A1V2KL60_PSECE S-adenosylmethionine:tRN A ribosyltransferase-isomerase OS=Pseudomonas cedrina s ubsp. cedrina OX=76762 GN=queA PE=3 SV=1
MRVADFTFELPDSLIARHPLAERRASRLLTLDGPSGALAHRQFTDLLEHLRPGDLMVFNNTRVIPARLFGQKASGGKLEILVERVLDSHRVLAHVRSSKSPKPGSSILIDGGGEAEMVARHDALFELRFAEEVLPLLERVGHMPLPPYIDRPDEDADRERYQTVYSQRLGAVAAPTAGLHFDQPLLDAIAAKGVESAYVTLHVGAGTFQPVRVENIEDHHMHSEWLEVSQDVVDAVNACKARGGRVVAVGTTSVRSLESAARDGVLKPFSGDTDIFIFPGRPFHVVDCLVTNFHLPESTLLMLVSAFAGYPETMAAYQAAIANEYRFFSYGDAMFITRNPAPRGLEEQL

SEQ ID NO: 70867 - protein, 349 aa, Pseudomonas cedrina
  misc_feature (1)..(349): tr|A0A2S9D764|A0A2S9D764_PSECE S-adenosylmethionine:tRN A ribosyltransferase-isomerase OS=Pseudomonas cedrina O X=651740 GN=queA PE=3 SV=1
MRVADFTFELPDSLIARHPLAERRASRLLTLDGPSGALAHRQFTDLLEHLRPGDLMVFNNTRVIPARLFGQKASGGKLEILVERVLDSHRVLAHVRSSKSPKPGSSILIEGGGETEMVARHDALFELKFAEEVLPLLERVGHMPLPPYIDRPDEDADRERYQTVYSQRLGAVAAPTAGLHFDQPLLDAIAAKGVDTAYVTLHVGAGTFQPVRVDNIEDHHMHSEWLEVSQDVVDAVAACKARGGRVVAVGTTSVRSLESAARDGVLKPFSGDTDIFIFPGRPFHVVDCLVTNFHLPESTLLMLVSAFAGYPETMAAYQAAIANEYRFFSYGDAMFITRNPAPRGPEDNL

SEQ ID NO: 70868 - protein, 354 aa, Pseudomonas cerasi
  misc_feature (1)..(354): tr|A0A193SN46|A0A193SN46_9PSED S-adenosylmethionine:tRN A ribosyltransferase-isomerase OS=Pseudomonas cerasi OX =1583341 GN=queA PE=3 SV=1
MRVADFTFELPDSLIARHPLAERRSSRLLTLDGPTGALAHRQFTDLLEHLRPGDLMVFNNTRVIPARLFGQKASGGKLEILVERVLDSHRVLAHVRSSKSPKPGSSILIDGGGEAEMVARHDALFELRFAEEVLPLLERVGHMPLPPYIDRPDEGADRERYQTVYAQRAGAVAAPTAGLHFDQPLLEAIAAKGVETAFVTLHVGAGTFQPVRVEQIEDHHMHSEWLEVGQDVVDAVAACRARGGRVVAVGTTSVRSLESAARDGELKPFSGDTDIFIYPGRPFHVVDALVTNFHLPESTLLMLVSAFAGYPETMAAYAAAIEHGYRFFSYGDAMFITRNPAPTAPQESAPEDHA

SEQ ID NO: 70869 - protein, 347 aa, Pseudomonas chengduensis
  misc_feature (1)..(347): tr|A0A1G6KGM6|A0A1G6KGM6_9PSED S-adenosylmethionine:tRN A ribosyltransferase-isomerase OS=Pseudomonas chengduen sis OX=489632 GN=queA PE=3 SV=1
MRVADFHFDLPESLIARHPLAERRASRLLQLDGPSGELRHGQFTDVLEQLRPGDLMVFNNTRVIPARLFGQKASGGKLEVLVERVLDQYRVLAHVRSSKSPKPGSRILIEGGGEAEMVARHDALFELRFAEPVLPLLERVGHMPLPPYIDRPDDEADRERYQTVYAQRAGAVAAPTAGLHFDDELLAAIRAKGVDTAFVTLHVGAGTFQPVRVERIEDHHMHSEWLEVGQDVVDAVAACRARGGRVVAVGTTSVRSLETAARDGELKPFSGDTDIFIYPGRPFHVVDALVTNFHLPESTLLMLVSAFAGYAETMAAYRAAVEQGYRFFSYGDAMFITRNPAARGPEV

SEQ ID NO: 70870 - protein, 349 aa, Pseudomonas chloritidismutans
  misc_feature (1)..(349): tr|V4S7D0|V4S7D0_PSECO S-adenosylmethionine:tRNA ribosy ltransferase-isomerase OS=Pseudomonas chloritidismutans AW-1 OX=1263865 GN=queA PE=3 SV=1
MQVADFFFQLPDALIARHPLAERRASRLLVLEGETGKLSHRNFADLLDHVRPGDLMVFNNTRVIPARLFGQKATGGKLEILVERVVGNRSVLAHVRSSKSPKAGSKILLDGGGEAEMIARHDALFELEFDEDVLPLLERIGHMPLPPYIDRPDDAADRERYQTVYAQRAGAVAAPTAGLHFDEALLQMLRESGVETAYVTLHVGAGTFQPVRVERIEEHHMHREWLEVGQDVVDAVAACRSRGGRVIAVGTTSVRSLETAARDGELKPFSGDTDIFIYPGKSFHVVDALVTNFHLPESTLLMLVSAFAGYPETMEAYAEAVAQRYRFFSYGDAMFITRNPAPRGPEETQ

SEQ ID NO: 70871 - protein, 349 aa, Pseudomonas chlororaphis
  misc_feature (1)..(349): tr|A0A3G7K6K2|A0A3G7K6K2_9PSED S-adenosylmethionine:tRN A ribosyltransferase-isomerase OS=Pseudomonas chlororap his subsp. aurantiaca OX=86192 GN=queA PE=3 SV=1
MRVADFTFELPDSLIARHPLAERRASRLLTLDGVTGALAHRQFTDLLEHLRPGDLMVFNNTRVIPARLFGQKASGGKLEILVERVLDSHRVLAHVRSSKSPKPGSKILIEGGGEAEMLARHDTLFELGFAEEVLPLLERVGHMPLPPYIDRPDEDSDRERYQTVYSERLGAVAAPTAGLHFDQPLLEAIAAKGVETAFVTLHVGAGTFQPVRVERIEDHHMHNEWLEVSQGVVDAVAACRARGGRVVAVGTTSVRSLESAARDGVLKPFSGDTDIFIYPGRPFHVVDALVTNFHLPESTLLMLVSAFAGYPEAMAAYKAAVEHGYRFFSYGDAMFITRNPAPRGPEETA

SEQ ID NO: 70872 - protein, 349 aa, Pseudomonas chlororaphis
  misc_feature (1)..(349): tr|A0A3G7C9A3|A0A3G7C9A3_9PSED S-adenosylmethionine:tRN A ribosyltransferase-isomerase OS=Pseudomonas chlororap his subsp. piscium OX=1513890 GN=queA PE=3 SV=1
MRVADFTFELPDSLIARHPLAERRASRLLTLDGVTGALAHRQFTDLLEHLRPGDLMVFNNTRVIPARLFGQKASGGKLEILVERVLDSHRVLAHVRSSKSPKPGSKILIEGGGEAEMLARHDTLFELGFAEEVLPLLERVGHMPLPPYIDRPDEDSDRERYQTVYSERLGAVAAPTAGLHFDQPLLEAIAVKGVETAFVTLHVGAGTFQPVRVERIEDHHMHNEWLEVSQDVVDAVAACRARGGRVVAVGTTSVRSLESAARDGVLKPFSGDTDIFIYPGRPFHVVDALVTNFHLPESTLLMLVSAFAGYPEAMAAYKAAVEHGYRFFSYGDAMFITRNPAPRGPEDQA

SEQ ID NO: 70873 - protein, 249 aa, Pseudomonas cichorii
  misc_feature (1)..(249): tr|A0A3M3TCM1|A0A3M3TCM1_PSECI S-adenosylmethionine:tRN A ribosyltransferase-isomerase (Fragment) OS=Pseudomona s cichorii OX=36746 GN=ALQ47_05179 PE=3 SV=1
MMRVADFTFDLPDSLIARHPLAERRSSRLLTLDGVSGALAHRQFTDLLEYLRSGDLMIFNNTRVIPARLFGQKASGGKLEILVERVLDSHRVLAHVRSSKSPKPGSSILINGGGEAEMVARHDTLFELRFAEEVLPLLDRVGHMPLPPYIDRPDEGADRERYQTVYAERAGAVAAPTAGLHFDEPLLEAIAAKGVETAFVTLHVGAGTFQPVRVDRIEDHHMHNEWLEVSQEVVDAVAACRARGGRVIA

SEQ ID NO: 70874 - protein, 354 aa, Pseudomonas cichorii
  misc_feature (1)..(354): tr|A0A3M4W4T6|A0A3M4W4T6_PSECI S-adenosylmethionine:tRN A ribosyltransferase-isomerase OS=Pseudomonas cichorii OX=36746 GN=queA PE=3 SV=1
MRVADFTFDLPDSLIARHPLAERRSSRLLTLDGVSGALAHRQFTDLLEHLRSGDLMIFNNTRVIPARLFGQKASGGKLEILVERVLDSHRVLAHVRSSKSPKPGSSIVIDGGGEAEMVARHDTLFELRFAEEVLPLLDRVGHMPLPPYIDRPDEGADRERYQTVYAQRAGAVAAPTAGLHFDEPLLEAIAAKGVETAFVTLHVGAGTFQPVRVDRIEDHHMHNEWLEVSLEVVDAVAACRARGGRVIAVGTTSVRSLESAARDGVLKPFSGDTDIFIYPGRPFHVVDALVTNFHLPESTLLMLVSAFAGYPETMAAYKAAIEHGYRFFSYGDAMFITRNPAPTAPQESASEDQA

SEQ ID NO: 70875 - protein, 347 aa, Pseudomonas citronellolis
  misc_feature (1)..(347): tr|A0A1A9KHU0|A0A1A9KHU0_9PSED S-adenosylmethionine:tRN A ribosyltransferase-isomerase OS=Pseudomonas citronell olis OX=53408 GN=queA PE=3 SV=1
MRVADFHFDLPEALIARHPLAERRASRLLVLDGPSGALSHRHFADLLEYLRPGDLMVFNNTRVIPARLFGQKESGGKLEILVERVLDSRRVLAHVRSSKSPKPGSKILIDGGAEAQMLQRHDALFELGFAEDVLPLLERVGHMPLPPYIDRPDEAADRERYQTVYAERAGAVAAPTAGLHFDEGLLQAIREKGVDTAFVTLHVGAGTFQPVRVEKIEDHHMHSEWLEVDQDVVDAVAACRARGGRVIAVGTTSVRSLESAARDGQLKPFSGDTDIFLYPGRPFHVVDALVTNFHLPESTLLMLVSAFAGYPQTMAAYAAAVEHEYRFFSYGDAMFITRNPAPRGPED

SEQ ID NO: 70876 - protein, 347 aa, Pseudomonas citronellolis
  misc_feature (1)..(347): tr|A0A4Z0IHP1|A0A4Z0IHP1_9PSED S-adenosylmethionine:tRN A ribosyltransferase-isomerase OS=Pseudomonas citronell olis OX=53408 GN=queA PE=3 SV=1
MRVADFHFDLPEALIARHPLAERRASRLLVLDGPSGALSHRHFADLLEYLRPGDLMVFNNTRVIPARLFGQKESGGKLEILVERVLDSRRVLAHVRSSKSPKPGSKILIDGGAEAQMLQRHDALFELGFAEDVLPLLERVGHMPLPPYIDRPDEAADRERYQTVYAERAGAVAAPTAGLHFDEGLLQAIREKGVDTAFVTLHVGAGTFQPVRVEKIEDHHMHSEWLEVGQDVVDAVAACRARGGRVIAVGTTSVRSLESAARDGQLKPFSGDTDIFLYPGRPFHVVDALVTNFHLPESTLLMLVSAFAGYPQTMAAYAAAVEHEYRFFSYGDAMFITRNPAPRGPED

SEQ ID NO: 70877 - protein, 354 aa, Pseudomonas coleopterorum
  misc_feature (1)..(354): tr|A0A1H5EBY1|A0A1H5EBY1_9PSED S-adenosylmethionine:tRN A ribosyltransferase-isomerase OS=Pseudomonas coleopter orum OX=1605838 GN=queA PE=3 SV=1
MRVADFSFELPDSLIARHPLAERHGSRLLVLDGPSGALDHRQFTDLPGFLRPGDLMVFNNTRVIPARVFGQKASGGKLEILVERVLDSHRVLAHVRSSKSPKPGSMILIDGGGEAEMVARHDALFELRFNEEVLPLLDKVGHMPLPPYIDRPDDTADRERYQTVYAEKAGAVAAPTAGLHFDEALLAQIEAMGVETAFVTLHVGAGTFQPVRVEKLEDHHMHKEWLEVSQDVVDAVQACKARGGRVVAVGTTSVRSLESAARDGVLKPFSGDTDIFIFPGRPFHVVDALVTNFHLPESTLLMLVSAFAGYPEAMAAYAAAVANEYRFFSYGDAMFITRNPAPRGPSEAAPGDQA

SEQ ID NO: 70878 - protein, 347 aa, Pseudomonas composti
  misc_feature (1)..(347): tr|A0A1I5LMS5|A0A1I5LMS5_9PSED S-adenosylmethionine:tRN A ribosyltransferase-isomerase OS=Pseudomonas composti OX=658457 GN=queA PE=3 SV=1
MRVADFHFDLPESLIARHPLAERRASRLLQVDGPSGELRHGQFTDVLEQLHPGDLMVFNNTRVIPARLFGQKASGGKLEVLVERVLDQYRVLAHVRSSKSPKPGSQILIEGGGEAEMVARHDTLFELRFAELVLPLLERVGHMPLPPYIDRPDDEADRERYQTVYAQKAGAVAAPTAGLHFDDELLAAIRAKGVETVFVTLHVGAGTFQPVRVERIEDHHMHSEWLEVGQDVVDAVAACRARGGRVIAVGTTSVRSLETAARDGELKPFSGDTDIFIYPGRPFHVVDALVTNFHLPESTLLMLVSAFAGYPETMAAYREAVAQGYRFFSYGDAMFITRNPAARGPEV

SEQ ID NO: 70879 - protein, 354 aa, Pseudomonas congelans
  misc_feature (1)..(354): tr|A0A0P9PNH1|A0A0P9PNH1_9PSED S-adenosylmethionine:tRN A ribosyltransferase-isomerase OS=Pseudomonas congelans OX=200452 GN=queA PE=3 SV=1
MRVADFTFELPDSLIARHPLAERRSSRLLTLDGPTGALAHRQFTDLLEHLRPGDLMVFNNTRVIPARLFGQKASGGKLEILVERVLDSHRVLAHVRSSKSPKPGSSILIDGGGEAEMVARHDALFELRFAEEVLPLLERVGHMPLPPYIDRPDEGADRERYQTVYAQRAGAVAAPTAGLHFDQPLLEAIAAKGVETAFVTLHVGAGTFQPVRVEQIEDHHMHSEWLEVGQDVVDAVAACRARGGRVIAVGTTSVRSLESAARDGVLKPFSGDTDIFIYPGRPFHVVDALVTNFHLPESTLLMLVSAFAGYPETMAAYAAAIEHGYRFFSYGDAMFITRNPAPTAPQESAPEDHA

SEQ ID NO: 70880 - protein, 326 aa, Pseudomonas coronafaciens
  misc_feature (1)..(326): tr|A0A3M5I8U6|A0A3M5I8U6_9PSED S-adenosylmethionine:tRN A ribosyltransferase-isomerase (Fragment) OS=Pseudomona s coronafaciens pv. oryzae OX=235277 GN=ALP55_04355 PE= 3 SV=1
MMRVADFTFELPDSLIARHPLAERRSSRLLTLDGPTGALAHRQFTDLLEHLRSGDLMVFNNTRVIPARLFGQKTSGGKLEILVERVLDSHRVLAHVRSSKSPKPGSSILIDGGGEAEMVARHDALFELRFAEEVLPLLDRVGHMPLPPYIDRPDEGSDRERYQTVYAQRAGAVAAPTAGLHFDQPLLDAIAAKGVETAFVTLHVGAGTFQPVRVEQIEDHHMHSEWLEVSQDVVDAVAACRARGGRVIAVGTTSVRSLESAARDGELKPFSGDTDIFIYPGRPFHVVDALVTNFHLPESTLLMLVSAFAGYPETMAAYAAAVEHGY

SEQ ID NO: 70881 - protein, 354 aa, Pseudomonas coronafaciens
  misc_feature (1)..(354): tr|A0A0Q0FCP0|A0A0Q0FCP0_9PSED S-adenosylmethionine:tRN A ribosyltransferase-isomerase OS=Pseudomonas coronafac iens pv. zizaniae OX=251700 GN=queA PE=3 SV=1
MRVADFTFELPDSLIARHPLAERRSSRLLTLDGPTGALAHRQFTDLLEHLRSGDLMVFNNTRVIPARLFGQKTSGGKLEILVERVLDSHRVLAHVRSSKSPKPGSSILIDGGGEAEMVARHDALFELRFAEEVLPLLDRVGHMPLPPYIDRPDEGSDRERYQTVYAQRAGAVAAPTAGLHFDQPLLDAIAAKGVETAFVTLHVGAGTFQPVRVEQIEDHHMHSEWLEVSQDVVDAVAACRARGGRVIAVGTTSVRSLESAARDGELKPFSGDTDIFIYPGRPFHVVDALVTNFHLPESTLLMLVSAFAGYPETMAAYAAAVEHGYRFFSYGDAMFITRNPAPTAPQESAPEDHA

SEQ ID NO: 70882 - protein, 349 aa, Pseudomonas corrugata
  misc_feature (1)..(349): tr|A0A3M3E6E0|A0A3M3E6E0_9PSED S-adenosylmethionine:tRN A ribosyltransferase-isomerase OS=Pseudomonas corrugata OX=47879 GN=queA PE=3 SV=1
MRVADFTFELPDSLIARHPLAERRASRLLTLDGVSGAMAHRQFTDLLEHLRPGDLMVFNNTRVIPARLFGQKASGGKLEILVERVLDSHRVLAHVRSSKSPKPGSSILIDGGGEAVMVARHDALFELAFAEEVLPLLDRVGHMPLPPYIDRPDEGSDRERYQTVYAERLGAVAAPTAGLHFDQPLLEAIAAKGVETTFVTLHVGAGTFQPVRVERIEDHHMHSEWLEVSQDVVDAVAACRARGGRVVAVGTTSVRSLESAARDGVLKPFSGDTDIFIYPGRPFHVVDALVTNFHLPESTLLMLVSAFAGYPEAMAAYKAAVEHGYRFFSYGDAMFITRNPAPRGPEETV

SEQ ID NO: 70883 - protein, 354 aa, Pseudomonas costantinii
  misc_feature (1)..(354): tr|A0A1S2UTQ2|A0A1S2UTQ2_9PSED S-adenosylmethionine:tRN A ribosyltransferase-isomerase OS=Pseudomonas costantin ii OX=168469 GN=queA PE=3 SV=1
MRVADFTFELPDSLIARHPLAERRASRLLTLDGVSGALAHRQFTDLLEHLRPGDLMVFNNTRVIPARLFGQKASGGKLEILVERVLDSHRVLAHVRSSKSPKPGSSILIDGGGEAEMVARHDALFELKFAEEVLPLLERVGHMPLPPYIDRPDEDSDRERYQTVYSQRLGAVAAPTAGLHFDQPLLDAIAAKGVESAYVTLHVGAGTFQPVRVENIEDHHMHSEWLEVSQEVVDAVAACKARGGRVVAVGTTSVRSLESAARDGVLKPFSGDTDIFIFPGRPFHVVDCLVTNFHLPESTLLMLVSAFAGYPETMAAYQAAIDNEYRFFSYGDAMFITRNPAPTAPKEAGPEEQL

SEQ ID NO: 70884 - protein, 349 aa, Pseudomonas cremoricolorata
  misc_feature (1)..(349): tr|A0A089WLT3|A0A089WLT3_9PSED S-adenosylmethionine:tRN A ribosyltransferase-isomerase OS=Pseudomonas cremorico lorata OX=157783 GN=queA PE=3 SV=1
MRVADFSFELPDSLIARHPLAERHGSRLLVLDGPSGALAHRQFTDLLEYLRPGDLMVFNNTRVIPARLFGQKASGGKLEVLVERVLDSHRVLAHVRASKAPKVGTQLLIDGGGEAEMVARHDTLFELRFSEEVLPLLERVGHMPLPPYIDRPDEGADRERYQTVYAERAGAVAAPTAGLHFDQHLLAQIAAKGVEQAFVTLHVGAGTFQPVRVDNIEDHHMHKEWLEVSQDVVDAVAACRARGGRVIAVGTTSVRSLESAARDGQLKAFSGDTDIFIYPGRPFHVVDALVTNFHLPESTLLMLVSAFAGYPQTMAAYAAAVAEGYRFFSYGDAMFITRNPAPRGPEDQA

SEQ ID NO: 70885 - protein, 349 aa, Pseudomonas cuatrocienegasensis
  misc_feature (1)..(349): tr|A0A1H9E714|A0A1H9E714_9PSED S-adenosylmethionine:tRN A ribosyltransferase-isomerase OS=Pseudomonas cuatrocie negasensis OX=543360 GN=queA PE=3 SV=1
MRVADFHFELPDALIARYPLAERRASRLLVLDGPTGTLAHRQFSDLLEYLRPGDLMVFNNTRVIPARLFGQKASGGKLEVLVERVLDSHRVLAHVRASKSPKPGSMILIDGGGEAEMVARHDALFELRFSEEVLPLLERVGHMPLPPYIDRADDSADRERYQTVYAERAGAVAAPTAGLHFDQALLASIAEMGVATAFVTLHVGAGTFQPVRVERIEDHHMHSEWLEVDQTVVDAVAACRARGGRVIAVGTTSVRSLESAARSGELQVFSGDTDIFIYPGRPLHVVDALVTNFHLPESTLLMLVSAFAGYPETMAAYQAAVAEGYRFFSYGDAMFITRNPAPRGPEDVL

SEQ ID NO: 70886 - protein, 349 aa, Pseudomonas daroniae
  misc_feature (1)..(349): tr|A0A4Q9QLS3|A0A4Q9QLS3_9PSED S-adenosylmethionine:tRN A ribosyltransferase-isomerase OS=Pseudomonas daroniae OX=2487519 GN=queA PE=3 SV=1
MRVADFHFDLPDEQIARHPLAERRASRLLILDGISGALAHRHFADLLEYLRPGDLMVFNNTRVIPARLFGQKASGGKLEVLVERVLDQHRVLAHVRASKSPKPGSMILIDGGAQAQMVTRHDALFELRFDEAVLPLLERVGHMPLPPYIDRADEASDRERYQTVYAQHAGAVAAPTAGLHFDRELLAAIAEKGVESAFVTLHVGAGTFQPVRVERIEDHVMHSEWLQVDAAVVDAVAACRARGGRVVAVGTTSVRALESAAQGGELRPFSGDTDIFIYPGRPLHVVDALVTNFHLPESTLLMLVSAFAGYAETMAAYAQAVAEGYRFFSYGDAMFITRNPAPRGPEEHL

SEQ ID NO: 70887 - protein, 353 aa, Pseudomonas deceptionensis
  misc_feature (1)..(353): tr|A0A0J6JD28|A0A0J6JD28_PSEDM S-adenosylmethionine:tRN A ribosyltransferase-isomerase OS=Pseudomonas deception ensis OX=882211 GN=queA PE=3 SV=1
MRVADFTFELPDSLIARHPLAERRNSRLLTLDGESGVLAHRQFTDLLEHLRPGDLMVFNNTRVIPARLFGQKASGGKLEILIERVLDSHRVLAHVRSSKSPKPGSKILIDGGGEAEMLARHDALFELAFAEEVLPLLDRVGHMPLPPYIDRPDEGSDRERYQTVYAERLGAVAAPTAGLHFDEPLMQAIAAKGVETAFVTLHVGAGTFQPVRVERLEDHHMHTEWLEVGQDVVDAVAACRARGGRVIAVGTTSVRSLESAARDGVLKPFSGDTDIFIFPGRPFHVVDALVTNFHLPESTLLMLVSAFAGYPETMAAYKAAVEHGYRFFSYGDAMFITRNPAPTAPAPAPEDQA

SEQ ID NO: 70888 - protein, 347 aa, Pseudomonas delhiensis
  misc_feature (1)..(347): tr|A0A239DQE7|A0A239DQE7_9PSED S-adenosylmethionine:tRN A ribosyltransferase-isomerase OS=Pseudomonas delhiensi s OX=366289 GN=queA PE=3 SV=1
MRVADFHFDLPEALIARHPLAERRASRLLVLDGPTGELSHRHFTDLLEYLRPGDLMVFNNTRVIPARLFGQKASGGKLEILVERVLDSRRVLAHVRSSKSPKPGSKILIDGGAEAQMLQRHDALFELGFAEDVLPLLERVGHMPLPPYIDRPDEDADRERYQTVYAERAGAVAAPTAGLHFDEGLLAAIREKGVDTAFVTLHVGAGTFQPVRVEKIEDHHMHSEWLEVGQDVVDAVAACRARGGRVIAVGTTSVRSLESAARDGQLKPFSGDTDIFLYPGRPFHVVDALVTNFHLPESTLLMLVSAFAGYPQTMAAYAAAVAHEYRFFSYGDAMFITRNPAPRGPED

SEQ ID NO: 70889 - protein, 347 aa, Pseudomonas denitrificans
  misc_feature (1)..(347): tr|A0A5J6R316|A0A5J6R316_PSEDE tRNA preQ1(34) S-adenosy lmethionine ribosyltransferase-isomerase QueA OS=Pseudo monas denitrificans OX=43306 GN=queA PE=4 SV=1
MRVADFHFDLPEALIARHPLPERRSSRLLVLDGPSGELSHRQFADILGFLKPGDLMVFNNTRVIPARLFGQKASGGKLEILVERVLDSHRVLAHVRSSKSPKPGSKILIDGGGEAEMLQRHDALFELGFSEDVLPLLERVGHMPLPPYIDRPDEDADRERYQTVYAERAGAVAAPTAGLHFDEALLESIRAKGVDTAFVTLHVGAGTFQPVRVERIEDHHMHNEWLEVSQDVVDAVAACKARGGRVVAVGTTSVRSLESAARDGVLKPFSGDTDIFIFPGRPFHVVDALVTNFHLPESTLLMLVSAFAGYPETMAAYAAAVEQGYRFFSYGDAMFITRNPAPRGPED

SEQ ID NO: 70890 - protein, 349 aa, Pseudomonas donghuensis
  misc_feature (1)..(349): tr|A0A2M9VPX1|A0A2M9VPX1_9PSED S-adenosylmethionine:tRN A ribosyltransferase-isomerase OS=Pseudomonas donghuens is OX=1163398 GN=queA PE=3 SV=1
MRVADFSFELPDSLIARHPLAQRHSSRLLTLDGPSGALAHRQFTDLLEHLRPGDLMVFNNTRVIPARLFGQKASGGKLEILVERVLDSHRVLAHVRSSKAPKPGTLIVIDGGGEAEMVARHDALFELRFAEEVLALLDRVGHMPLPPYIDRPDEGADRERYQTVYAERAGAVAAPTAGLHFDEELLAKIAAKGVETAFVTLHVGAGTFQPVRVERIEDHHMHKEWLEVGQDVVDAVAACRARGGRVIAVGTTSVRSLESAARDGVLKAFSGDTDIFIFPGRPFHVVDALVTNFHLPESTLLMLVSAFAGYPETMAAYAAAVENGYRFFSYGDAMFITRNPAPRGPEDQA

SEQ ID NO: 70891 - protein, 349 aa, Pseudomonas dryadis
  misc_feature (1)..(349): tr|A0A4Q9R4W3|A0A4Q9R4W3_9PSED S-adenosylmethionine:tRN A ribosyltransferase-isomerase OS=Pseudomonas dryadis O X=2487520 GN=queA PE=3 SV=1
MRVADFHFELPDALIARHPLAERRASRLLILDGPSGALAHRQFADLLDYLRPGDLMVFNNTRVIPARLFGRKASGGKLEVLVERVLDQHRVLAHVRSSKSPRPGSTILLEGGAEAQMLARHDALFELRFDEPVLPLLERVGHMPLPPYIDRADEAADRERYQTVYARHAGAVAAPTAGLHFDRALLDAIAAKGVESAFVTLHVGAGTFQPVRVERLEDHVMHSEWLEVDAAVVEAVAACRARGGRVVAVGTTSVRALESAARDGQLRPFSGDTDIFIFPGRPLHVVDALVTNFHLPESTLLMLVSAFAGYPETMAAYGQAVAEGYRFFSYGDAMFITRNPAPRGPEDHL

SEQ ID NO: 70892 - protein, 347 aa, Pseudomonas duriflava
  misc_feature (1)..(347): tr|A0A562QP33|A0A562QP33_9PSED S-adenosylmethionine:tRN A ribosyltransferase-isomerase OS=Pseudomonas duriflava OX=459528 GN=queA PE=3 SV=1
MQVSDFYFELPETLIARHPLPERRASRLLVLDGPSGAIQHQHFSDLLDYLRPEDVMIFNDTRVIPARLFGQKESGGKLEILVERVLDEHRVLAHVRSSKSPKPGSYIVVEGGGRAEMLARHDALFELRFDEAVLPLLDRAGHMPLPPYIDRPDEEADRERYQTVYARKAGAVAAPTAGLHFDEAMLAAIREKGIETEFVTLHVGAGTFQPVRVARIEDHHMHREWLQVSQSVVDAVTRCQARGGRVIAVGTTSVRALESAARDGQLKPFSGDTDIFLYPGRPFHVVEGLITNFHLPESTLLMLVSAFAGYTQTMAAYAAAVENQYRFFSYGDAMFVTRNPGAKGPES

SEQ ID NO: 70893 - protein, 353 aa, Pseudomonas endophytica
  misc_feature (1)..(353): tr|A0A0Q0SR40|A0A0Q0SR40_9PSED S-adenosylmethionine:tRN A ribosyltransferase-isomerase OS=Pseudomonas endophyti ca OX=1563157 GN=queA PE=3 SV=1
MRVADFTFELPDSLIARHPLAERRNSRLLTLDGESGALAHRQFTDLLEHLRPGDLMVFNNTRVIPARLFGQKASGGKLEILVERVLDSHRVLAHVRSSKSPKPGSTILIDGGGEAQMLARHDALFELGFTDEVLPLLDRVGHMPLPPYIDRPDEGSDRERYQTVYAQRLGAVAAPTAGLHFDEPLMQAIAAKGVETAFVTLHVGAGTFQPVRVERLEDHHMHTEWLEVGQEVVDAVAACRARGGRVIAVGTTSVRSLESAARDGVLKPFSGDTDIFIFPGRPFHVVDALVTNFHLPESTLLMLVSAFAGYPETMAAYKAAVEHGYRFFSYGDAMFITRNPAPTAPAPAPEDQA

SEQ ID NO: 70894 - protein, 349 aa, Pseudomonas entomophila
  misc_feature (1)..(349): sp|Q1IEK2|QUEA_PSEE4 S-adenosylmethionine:tRNA ribosylt ransferase-isomerase OS=Pseudomonas entomophila (strain L48) OX=384676 GN=queA PE=3 SV=1
MRVADFSFELPDSLIARHPLAERHGSRLLVLDGPSGELAHKQFTDLLEYLRPGDLMVFNNTRVIPARLFGQKASGGKLEVLVERVLDSHRVLAHVRASKAPKEGAQILIDGGGEAEMVARHDTLFELRFSEEVLPLLERVGHMPLPPYIDRPDEGADRERYQTVYAERAGAVAAPTAGLHFDEALLEKIAAKGVERAFVTLHVGAGTFQPVRVDKIEDHTMHKEWLEVSQDVVDAVAACRARGGRVIAVGTTSVRSLESAARDGVLKAFSGDTDIFIFPGRPFHVVDCLVTNFHLPESTLLMLVSAFAGYPETMAAYAAAVEQGYRFFSYGDAMFITRNPAPRGPEDQA

SEQ ID NO: 70895 - protein, 349 aa, Pseudomonas entomophila
  misc_feature (1)..(349): tr|A0A3Q8U5R6|A0A3Q8U5R6_9PSED S-adenosylmethionine:tRN A ribosyltransferase-isomerase OS=Pseudomonas entomophi la OX=312306 GN=queA PE=3 SV=1
MRVADFSFELPDSLIARHPLAERHGSRLLVLDGQSGALAHQQFTDLLDYLRPGDLMVFNNTRVIPARLFGQKASGGKLEVLVERVLDSHRVLAHVRASKAPKEGAVILIDGGGEAEMVARHDTLFELRFTEEVLPLLERVGHMPLPPYIDRPDEGADRERYQTVYAERAGAVAAPTAGLHFDEALLEKIAAKGVERAFVTLHVGAGTFQPVRVDKIEDHHMHKEWLEVSQDVVDAVEACRARGGRVIAVGTTSVRSLESAARDGVLKAFSGDTDIFIFPGRPFHVVDCLVTNFHLPESTLLMLVSAFAGYPETMAAYAAAVANGYRFFSYGDAMFITRNPAPRGPEDQA

SEQ ID NO: 70896 - protein, 349 aa, Pseudomonas extremaustralis
  misc_feature (1)..(349): tr|A0A5C5QGD8|A0A5C5QGD8_9PSED S-adenosylmethionine:tRN A ribosyltransferase-isomerase OS=Pseudomonas extremaus tralis OX=359110 GN=queA PE=3 SV=1
MRVADFTFELPDSLIARHPLAERRASRLLTLDGPSGALAHRQFTDLLEHLRPGDLMVFNNTRVIPARLFGQKASGGKLEILVERVLDSHRVLAHVRSSKSPKPGSTLLIDGGGEAEMVARHDALFELKFAEEVLPLLERVGHMPLPPYIDRPDEDADRERYQTVYSQRLGAVAAPTAGLHFDQPLLDAIAAKGVESAYVTLHVGAGTFQPVRVDNIEDHHMHSEWLEVSQDVVDAVNACKARGGRVIAVGTTSVRSLESAARDGVLKPFSGDTDIFIYPGRPFHVVDALVTNFHLPESTLLMLVSAFAGYPETMAAYQAAIDNGYRFFSYGDAMFITRNPAPRGPEEQL

SEQ ID NO: 70897 - protein, 349 aa, Pseudomonas extremorientalis
  misc_feature (1)..(349): tr|A0A1H0QGQ5|A0A1H0QGQ5_9PSED S-adenosylmethionine:tRN A ribosyltransferase-isomerase OS=Pseudomonas extremori entalis OX=169669 GN=queA PE=3 SV=1
MRVADFTFELPDSLIARHPLAERRASRLLTLDGVSGALAHRQFTDLLEHLRPGDLMVFNNTRVIPARLFGQKASGGKLEILVERVLDSHRVLAHVRSSKSPKPGSSILIDGGGEAEMVARHDALFELKFAEEVLPLLERVGHMPLPPYIDRPDEDSDRERYQTVYSQRLGAVAAPTAGLHFDQPLLDAIAAKGVETAYVTLHVGAGTFQPVRVDNIEDHHMHSEWLEVSQDVVDAVAACKARGGRVIAVGTTSVRSLESAARDGVLKPFSGDTDIFIYPGRPFHVVDCLVTNFHLPESTLLMLVSAFAGYPETMAAYQAAIDNGYRFFSYGDAMFITRNPAPRGPEEQL

SEQ ID NO: 70898 - protein, 264 aa, Pseudomonas ficuserectae
  misc_feature (1)..(264): tr|A0A0P9TX60|A0A0P9TX60_9PSED S-adenosylmethionine:tRN A ribosyltransferase-isomerase OS=Pseudomonas ficuserec tae OX=53410 GN=ALO69_00165 PE=3 SV=1
  misc_feature (189)..(190): Xaa can be any naturally occurring amino acid
MRVADFTFELPDSLIARHPLAERRSSRLLTLDGPTGALAHRQFTDLLEHLRPGDLMVFNNTRVIPARLFGQKASGGKLEILVERVLDSHRVLAHVRSSKSPKPGSSILIDGGGEAEMVARHDALFELRFAEEVLPLLERVGHMPLPPYIDRPDEGADRERYQTVYAQRAGAVAAPTAGLHFDQPLLEAXXWASRLRSSRCTSARVRSSRCASSRSKITTCTASGWKLARTWSMPWLHAVRGAEGWLPSGPPACARWRVPRVMAN

SEQ ID NO: 70899 - protein, 266 aa, Pseudomonas ficuserectae
  misc_feature (1)..(266): tr|A0A3M5CWY3|A0A3M5CWY3_9PSED S-adenosylmethionine:tRN A ribosyltransferase-isomerase OS=Pseudomonas ficuserec tae OX=53410 GN=ALP67_03330 PE=3 SV=1
  misc_feature (190)..(190): Xaa can be any naturally occurring amino acid
MRVADFTFELPDSLIARHPLAERRSSRLLTLDGPTGALAHRQFTDLLEHLRPGDLMVFNNTRVIPARLFGQKASGGKLEILVERVLDSHRVLAHVRSSKSPKPGSSILIDGGGEAEMVARHDALFELRFAEEVLPLLERVGHMPLPPYIDRPDEGADRERYQTVYAQRAGAVAAPTAGLHFDQPLLEAIXPPRASRLRSSRCTSARVRSSRCASSRSKITTCTASGWKLARTWSMPWLHAVRGAEGWLPSGPPACARWRVPRVMAN

SEQ ID NO: 70900 - protein, 349 aa, Pseudomonas flavescens
  misc_feature (1)..(349): tr|A0A1G8KW95|A0A1G8KW95_9PSED S-adenosylmethionine:tRN A ribosyltransferase-isomerase OS=Pseudomonas flavescen s OX=29435 GN=queA PE=3 SV=1
MRVTDFHFDLPDEQIARHPLAERRASRLLILDGASGALAHRHFADLLEYLRPGDLMVFNNTRVIPARLFGQKASGGKLEVLIERVLDEHRVLAHVRASKSPKPGTTILIEGGAQAQMLARHDALFELRFDEAVLPLLERVGHMPLPPYIDRADEASDRERYQTVYARHAGAVAAPTAGLHFDRELLAAIAEKGVESAFVTLHVGAGTFQPVRVERIEDHVMHSEWLQVEATVVDAVAACRARGGRVVAVGTTSVRALESAARDGELRPFSGDTDIFIYPGRPLHVVDALVTNFHLPESTLLMLVSAFAGYAETMAAYAQAVADGYRFFSYGDAMFITRNPAPRGPEEHL

SEQ ID NO: 70901 - protein, 349 aa, Pseudomonas flexibilis
  misc_feature (1)..(349): tr|A0A0B3BXE9|A0A0B3BXE9_9PSED S-adenosylmethionine:tRN A ribosyltransferase-isomerase OS=Pseudomonas flexibili s OX=706570 GN=queA PE=3 SV=1
MRVSDFHFDLPDALIARHPLAQRRASRLLVLDGPSGALAHRQFADLLGYLRPGDLMVFNNTRVIPARLFGRKATGGQLEILIERVLDEHRALAHVRASKSPKPGSRILLEGGGEAEMLARHDALFELRFDQPLLPLLERIGHMPLPPYIDRPDDTADRERYQTVYAERAGAVAAPTAGLHFDEPLLEAIREKGVETAFVTLHVGAGTFQPVRVERIEEHHMHREWLEVSQDVVDAVNACKARGGRVIAVGTTSVRSLESAAREGKIKPFSGDTDIFLYPGKPFHVVDALVTNFHLPESTLLMLVSAFAGYPETMAAYRAAVEEGYRFFSYGDAMFITRNPAPRGPEDHP

SEQ ID NO: 70902 - protein, 349 aa, Pseudomonas flexibilis
  misc_feature (1)..(349): tr|A0A1N6NP17|A0A1N6NP17_9PSED S-adenosylmethionine:tRN A ribosyltransferase-isomerase OS=Pseudomonas flexibili s OX=706570 GN=queA PE=3 SV=1
MRVSDFHFDLPDALIARHPLAQRRASRLLVLDGPSGALAHRQFADLLGYLRPGDLMVFNNTRVIPARLFGRKATGGQLEILIERVLDEHRALAHVRASKSPKPGSRILLEGGGEAEMLARHDALFELRFDQPLLPLLERIGHMPLPPYIDRPDDTADRERYQTVYAERAGAVAAPTAGLHFDEPLLDAIREKGVETAFVTLHVGAGTFQPVRVERIEEHHMHREWLEVSQDVVDAVNACKARGGRVIAVGTTSVRSLESAAREGKIKPFSGDTDIFLYPGKPFHVVDALVTNFHLPESTLLMLVSAFAGYPETMTAYRAAVEEGYRFFSYGDAMFITRNPAPRGPEDHP

SEQ ID NO: 70903 - protein, 354 aa, Pseudomonas floridensis
  misc_feature (1)..(354): tr|A0A1X0N6S2|A0A1X0N6S2_9PSED S-adenosylmethionine:tRN A ribosyltransferase-isomerase OS=Pseudomonas floridens is OX=1958950 GN=queA PE=3 SV=1
MRVADFTFDLPDSLIARHPLAERRSSRLLTLDGVSGELAHRQFTDLLEHLRAGDLMVFNNTRVIPARLFGQKASGGKLEILVERVLDSHRVLAHVRSSKSPKPGASILIDGGGEAEMVARHDALFELRFAEEVLPLLERVGHMPLPPYIDRPDDGADRERYQTVYAQRAGAVAAPTAGLHFDQPLMEAIAAKGVETAFVTLHVGAGTFQPVRVEQIEDHHMHSEWLEVSQEVVDAVAACRARGGRVIAVGTTSVRSLESAARDGKLKPFSGDTDIFIYPGRPFHVVDALVTNFHLPESTLLMLVSAFAGYPETMAAYAAAIEHGYRFFSYGDAMFITRNPAPTAPQESVPEDHA

SEQ ID NO: 70904 - protein, 354 aa, Pseudomonas fluorescens
  misc_feature (1)..(354): sp|Q4K6S8|QUEA_PSEF5 S-adenosylmethionine:tRNA ribosylt ransferase-isomerase OS=Pseudomonas fluorescens (strain ATCC BAA-477 / NRRL B-23932 / Pf-5) OX=220664 GN=queA PE=3 SV=1
MRVADFTFELPDSLIARHPLAERRGSRLLTLDGPTGALAHRQFTDLLEHLRPGDLMVFNNTRVIPARLFGQKASGGKLEILVERVLDSHRVLAHVRSSKSPKPGSKILIDGGGEAEMLARHDTLFELGFAEEVLPLLDRVGHMPLPPYIDRPDEGADRERYQTVYAQRLGAVAAPTAGLHFDQPLLEAIAAKGVETAFVTLHVGAGTFQPVRVERIEDHHMHHEWLEVGQDVVDAVAACRARGGRVVAVGTTSVRSLESAARDGVLKPFSGDTDIFIYPGRPFHVVDALVTNFHLPESTLLMLVSAFAGYPETMAAYRAAVENGYRFFSYGDAMFITRNPAPTAPKDLAPEETV

SEQ ID NO: 70905 - protein, 349 aa, Pseudomonas fluorescens
  misc_feature (1)..(349): tr|A0A165ZE02|A0A165ZE02_PSEFL S-adenosylmethionine:tRN A ribosyltransferase-isomerase OS=Pseudomonas fluoresce ns OX=294 GN=queA PE=3 SV=1
MRVADFTFELPDSLIARHPLAERRASRLLTLDGVSGAMAHRQFTDLLEHLRPGDLMVFNNTRVIPARLFGQKASGGKLEILVERVLDSHRVLAHVRSSKSPKPGSSILIDGGGEAVMVARHDALFELEFAEEVLPLLDRVGHMPLPPYIDRPDEGSDRERYQTVYAERLGAVAAPTAGLHFDQPLLEAIAAKGVETAFVTLHVGAGTFQPVRVERIEDHHMHNEWLEVSQEVVDAVAACRARGGRVVAVGTTSVRSLESAARDGVLKPFSGDTDIFIYPGRPFHVVDALVTNFHLPESTLLMLVSAFAGYPEAMAAYKAAVEHGYRFFSYGDAMFITRNPAPRGPEETV

SEQ ID NO: 70906 - protein, 349 aa, Pseudomonas formosensis
  misc_feature (1)..(349): tr|A0A1I6C7X6|A0A1I6C7X6_9PSED S-adenosylmethionine:tRN A ribosyltransferase-isomerase OS=Pseudomonas formosens is OX=1002526 GN=queA PE=3 SV=1
MRVSDFHFDLPDSLIARHPLAQRRASRLLCLDGPSGTLEHRRFAELLEYLRPGDLMVFNNTRVIPARLFGRKETGGQLEILVERVLDEHRVLAHVRASKSPKPGSRILLADDSQVSMLARHDALFELGFAEPVLPLLDRIGHMPLPPYIDRPDESADRERYQTVYAQRAGAVAAPTAGLHFDSELLAAIRDLGVETAEVTLHVGAGTFQPVRVERIEDHHMHSEWLEVGPDVVAAVQACKARGGRVIAVGTTSVRSLETAAQSGEIAPYSGDTDIFLYPGRPFHVVDALVTNFHLPESTLLMLVSAFAGYRETMAAYRAAVENGYRFFSYGDAMFITRNPDARGPEDEQ

SEQ ID NO: 70907 - protein, 353 aa, Pseudomonas fragi
  misc_feature (1)..(353): tr|A0A266NNX2|A0A266NNX2_PSEFR S-adenosylmethionine:tRN A ribosyltransferase-isomerase OS=Pseudomonas fragi OX= 296 GN=queA PE=3 SV=1
MRVADFTFELPDSLIARHPLAERRNSRLLTLDGESGVLAHRQFTDLLEHLCPGDLMVFNNTRVIPARLFGQKASGGKLEILVERVLDSHRVLAHVRSSKSPKPGSKILIDGGGEAEMLARHDALFELGFAEEVLPLLDRVGHMPLPPYIDRPDEGSDRERYQTVYAQRLGAVAAPTAGLHFDEPLMQAIAAKGVETAFVTLHVGAGTFQPVRVERLEDHHMHTEWLEVGQDVVDAVAACRARGGRVIAVGTTSVRSLESAARDGVLKPFSGDTDIFIFPGRPFHVVDALVTNFHLPESTLLMLVSAFAGYPETMAAYKAAVEHGYRFFSYGDAMFITRNPAPTAPAPAPEDQA

SEQ ID NO: 70908 - protein, 353 aa, Pseudomonas fragi
  misc_feature (1)..(353): tr|A0A267ASF2|A0A267ASF2_PSEFR S-adenosylmethionine:tRN A ribosyltransferase-isomerase OS=Pseudomonas fragi OX= 296 GN=queA PE=3 SV=1
MRVADFTFELPDSLIARHPLAERRNSRLLTLDGESGALAHRQFTDLLEHLRPGDLMVFNNTRVIPARLFGQKASGGKLEILVERVLDSHRVLAHVRSSKSPKPGSKILIDGGGEAEMLARHDALFELGFAEEVLPLLDRVGHMPLPPYIDRPDEGSDRERYQTVYAQRLGAVAAPTAGLHFDEPLMQAIAAKGVETAFVTLHVGAGTFQPVRVERLEDHHMHTEWLEVGQDVVDAVAACRARGGRVIAVGTTSVRSLESAARDGVLKPFSGDTDIFIFPGRPFHVVDALVTNFHLPESTLLMLVSAFAGYPETMAAYKAAVEHGYRFFSYGDAMFITRNPAPTAPAPAPEDQA

SEQ ID NO: 70909 - protein, 354 aa, Pseudomonas frederiksbergensis
  misc_feature (1)..(354): tr|A0A423HIK0|A0A423HIK0_9PSED S-adenosylmethionine:tRN A ribosyltransferase-isomerase OS=Pseudomonas frederiks bergensis OX=104087 GN=queA PE=3 SV=1
MRVADFTFELPDSLIARHPLAERRNSRLLTLDGVSGALAHRQFTDLLEHLRPGDLMVFNNTRVIPARLFGQKASGGKLEILVERVLDSHRVLAHVRSSKSPKPGSKILIDGGGEAEMLARHDALFELGFAEEVLPLLDRVGHMPLPPYIDRPDEGSDRERYQTVYAERLGAVAAPTAGLHFDQPLMEAIAAKGIETAFVTLHVGAGTFQPVRVEKIEDHHMHSEWLEVGQDVVDAVEACRARGGRVVAVGTTSVRSLESAARDGVLKPFSGDTDIFIYPGRPFHVVDALVTNFHLPESTLLMLVSAFAGYPETMAAYKAAVDNEYRFFSYGDAMFITRNPAPTAPKETGPEETE

SEQ ID NO: 70910 - protein, 349 aa, Pseudomonas frederiksbergensis
  misc_feature (1)..(349): tr|A0A1J0EP22|A0A1J0EP22_9PSED S-adenosylmethionine:tRN A ribosyltransferase-isomerase OS=Pseudomonas frederiks bergensis OX=104087 GN=queA PE=3 SV=1
MRVADFTFELPDSLIARHPLAERRGSRLLTLDGLSGALAHRQFTDLLEHLRPGDLMVFNNTRVIPARLFGQKASGGKLEILVERVLDSHRVLAHVRSSKSPKPGSKILIDGGGEAEMLARHDALFELGFAEEVLPLLDRVGHMPLPPYIDRPDEGSDRERYQTVYAERLGAVAAPTAGLHFDQPLLEAIAAKGVETAFVTLHVGAGTFQPVRVEKIEDHHMHSEWLEVGQDVVDAVAACRARGGRVVAVGTTSVRSLESAARDGVLKPFSGDTDIFIYPGRPFHVVDALVTNFHLPESTLLMLVSAFVGYPETMAAYKAAVEHGYRFFSYGDAMFITRNPAPRGPEDQA

SEQ ID NO: 70911 - protein, 349 aa, Pseudomonas fulva
  misc_feature (1)..(349): tr|F6AB06|F6AB06_PSEF1 S-adenosylmethionine:tRNA ribosy ltransferase-isomerase OS=Pseudomonas fulva (strain 12- X) OX=743720 GN=queA PE=3 SV=1
MRVADFHFDLPDEQIARHPLAERRASRLLILDGASGALAHRQFADLLEYLRPGDLMVFNDTRVIPARLFGQKATGGKLEILVERVLDEHRVLAHIRSSKSPKPGSLIDIDGGAQAKMLARHDALFELRFEEPVLALLERVGHMPLPPYIDRPDEDADRERYQTVYAQKAGAVAAPTAGLHFDDALLAALSEKGVERAFVTLHVGAGTFQPVRVERIEDHHMHSEWLEVSQDVVDAVEACRARGGRVVAVGTTSVRSLESAARDGELKPFSGDTDIFIYPGRPFHVVDALVTNFHLPESTLLMLVSAFAGYPETMAAYAEAVAEGYRFFSYGDAMFITRNPAARGPEVSV

SEQ ID NO: 70912 - protein, 349 aa, Pseudomonas fulva
  misc_feature (1)..(349): tr|A0A0D0JRE1|A0A0D0JRE1_9PSED S-adenosylmethionine:tRN A ribosyltransferase-isomerase OS=Pseudomonas fulva OX= 47880 GN=queA PE=3 SV=1
MRVADFHFELPDEQIARHPLAERRASRLLILDGASGALAHRHFADLLEYLRPGDLMVFNNTRVIPARLFGQKASGGKLEVLIERVLDEHRVLAHVRSSKSPKPGSTIVIEGGAQAQMVARHDALFELRFDEAVLPLLERVGHMPLPPYIDRADEDADRERYQTVYAQKAGAVAAPTAGLHFDDELLAALRERGVESAFVTLHVGAGTFQPVRVERIEDHHMHSEWLEVGQDVVDAVQACRARGGRVVAVGTTSVRSLESAARDGELKPFSGDTDIFIYPGRPFHVVDALVTNFHLPESTLLMLVSAFAGYAETMAAYAQAVAEGYRFFSYGDAMFITRNPAPRGPEDHL

SEQ ID NO: 70913 - protein, 349 aa, Pseudomonas furukawaii
  misc_feature (1)..(349): tr|L8MCU7|L8MCU7_PSEFK S-adenosylmethionine:tRNA ribosy ltransferase-isomerase OS=Pseudomonas furukawaii OX=114 9133 GN=queA PE=3 SV=1
MRVADFHFELPEALIARHPLAERRASRLLVLDGARGELSHRQFPDLLDYLRPGDLMVFNNTRVIPARLFGQKASGGRLEILVERVLDSHRVLAHVRSSKSPKPGTRLLIDGGGEAEMVVRHDALFELRFAEEVLPLLDRVGHMPLPPYIDRPDEEADRERYQTVYARHAGAVAAPTAGLHFDEALLEALAAKGVERAFVTLHVGAGTFQPVRVERIEDHHMHREWLEVGQDVVDAVTACRARGGRVVAVGTTSVRSLESAARDGELKAFSGDTDIFLYPGRPFHVVDALVTNFHLPESTLLMLVSAFAGYPETMAAYAAAVEQGYRFFSYGDAMFITRNPAPRGPEDNA

SEQ ID NO: 70914 - protein, 354 aa, Pseudomonas fuscovaginae
  misc_feature (1)..(354): tr|A0A0M9GJP8|A0A0M9GJP8_9PSED S-adenosylmethionine:tRN A ribosyltransferase-isomerase OS=Pseudomonas fuscovagi nae OX=50340 GN=queA PE=3 SV=1
MRVADFTFELPDSLIARHPLAERRHSRLLTLDGPSGALAHRQFTDLLEYLHPGDLMVFNNTRVIPARLFGQKASGGKLEILVERVLDSHRVLAHVRSSKSPKPGSKILIEGGGEAEMLARHDALFELGFAEEVLPLLERVGHMPLPPYIDRPDEGADRERYQTVYAERLGAVAAPTAGLHFDQPLLEAIAAKGVETAFVTLHVGAGTFQPVRVERIEDHHMHSEWLEVGQDVVDAVAACRARGGRVIAVGTTSVRSLESAARDGVLKPFSGDTDIFIYPGRPFHVVDALVTNFHLPESTLLMLVSAFAGYPETMAAYQAAVDNGYRFFSYGDAMFITRNPAPTGPQASAPEDQA

SEQ ID NO: 70915 - protein, 354 aa, Pseudomonas fuscovaginae; identical to SEQ ID NO: 70841
  misc_feature (1)..(354): tr|A0A1H6N7X6|A0A1H6N7X6_9PSED S-adenosylmethionine:tRN A ribosyltransferase-isomerase OS=Pseudomonas fuscovagi nae OX=50340 GN=queA PE=3 SV=1

SEQ ID NO: 70916 - protein, 349 aa, Pseudomonas gallaeciensis; identical to SEQ ID NO: 70819
  misc_feature (1)..(349): tr|A0A395R7M3|A0A395R7M3_9PSED S-adenosylmethionine:tRN A ribosyltransferase-isomerase OS=Pseudomonas gallaecie nsis OX=857227 GN=queA PE=3 SV=1

SEQ ID NO: 70917 - protein, 349 aa, Pseudomonas gessardii
  misc_feature (1)..(349): tr|A0A1V2IZW3|A0A1V2IZW3_9PSED S-adenosylmethionine:tRN A ribosyltransferase-isomerase OS=Pseudomonas gessardii OX=78544 GN=queA PE=3 SV=1
MRVADFTFELPDSLIARHPLAERRASRLLTLDGVSGALAHRQFTDLLEHLRPGDLMVFNNTRVIPARLFGQKASGGKLEILVERVLDTHRVLAHVRSSKSPKPGSQILIDGGGEAEMVARHDALFELKFAEDVLPLLERVGHMPLPPYIDRPDEDSDRERYQTVYSERLGAVAAPTAGLHFDQPLLDSIAAKGVETAYVTLHVGAGTFQPVRVENLEDHHMHSEWLEVSQAVVDAVNACKARGGRVVAVGTTSVRSLESAARDGVLKPFSGDTDIFIYPGRPFHVVDALVTNFHLPESTLLMLVSAFAGYPEAMAAYKAAIEQEYRFFSYGDAMFITRNPAPRGPEEQL

SEQ ID NO: 70918 - protein, 354 aa, Pseudomonas gingeri
  misc_feature (1)..(354): tr|A0A2K1FHI5|A0A2K1FHI5_9PSED S-adenosylmethionine:tRN A ribosyltransferase-isomerase OS=Pseudomonas gingeri N CPPB 3146 = LMG 5327 OX=707248 GN=queA PE=3 SV=1
MRVADFTFELPDSLIARHPLAERRNSRLLTLDGPSGALAHRQFTDLLEHLRPGDLMVFNNTRVIPARLFGQKASGGKLEILIERVLDSHRVLAHVRSSKSPKPGSKILIEGGGEAEMLARHDTLFELGFAEEVLPLLERVGHMPLPPYIDRPDEGSDRERYQTVYAERLGAVAAPTAGLHFDQPLLEAIAAKGVETAFVTLHVGAGTFQPVRVERIEDHHMHNEWLEVSQAVVDAVAACRARAGRVIAVGTTSVRSLESAARDGVLKPFSGDTDIFIYPGRPFHVVDALVTNFHLPESTLLMLVSAFAGYPEAMAAYKAAVDNGYRFFSYGDAMFITRNPAPTGPQESASEDQA

SEQ ID NO: 70919 - protein, 354 aa, Pseudomonas graminis
  misc_feature (1)..(354): tr|A0A1X0VNA9|A0A1X0VNA9_9PSED S-adenosylmethionine:tRN A ribosyltransferase-isomerase OS=Pseudomonas graminis OX=158627 GN=queA PE=3 SV=1
MRVADFTFELPDSLIARHPLAERRSSRLLTLDGPTGALAHRQFTDLLEHLRPGDLMVFNNTRVIPARLFGQKSSGGKLEILVERVLDSHRVLAHVRASKSPKPGASILIDGGGEAEMVARHDALFELRFAEEVLPLLDRVGHMPLPPYIDRPDEGADRERYQTVYAQRAGAVAAPTAGLHFDQPLLEAIAAKGVETAFVTLHVGAGTFQPVRVEQIEDHHMHSEWLEVGQDVVDAVAACRARGGRVIAVGTTSVRSLESAARNGELKPFSGDTDIFIYPGRPFHVVDALVTNFHLPESTLLMLVSAFAGYPETMAAYAAAVEHGYRFFSYGDAMFITRNPAPTAPQESAPEDHA

SEQ ID NO: 70920 - protein, 359 aa, Pseudomonas graminis
  misc_feature (1)..(359): tr|A0A1I0BLW9|A0A1I0BLW9_9PSED S-adenosylmethionine:tRN A ribosyltransferase-isomerase OS=Pseudomonas graminis OX=158627 GN=queA PE=3 SV=1
MRVADFTFELPDSLIARHPLAERRSSRLLTLDGPSGALAHRQFTDLLEHLRPGDLMVFNNTRVIPARLFGQKASGGKLEILVERVLDQHRVLAHVRSSKSPKPGSTILIDGGGEAEMVARHDALFELRFAELVLPLLERVGHMPLPPYIDRPDDDADRERYQTVYAQRAGAVAAPTAGLHFDQTMMDAIAEKGVETAFVTLHVGAGTFQPVRVERIEDHHMHNEWLEVTQEVVDAVTACRARGGRVIAVGTTSVRSLESAARDGVLKPFSGDTDIFIYPGRPFHVVDALVTNFHLPESTLLMLVSAFAGYPETMAAYAAAVEHGYRFFSYGDAMFITRNPAPTAPGEYTPTESAPEDQA

SEQ ID NO: 70921 - protein, 349 aa, Pseudomonas grimontii
  misc_feature (1)..(349): tr|A0A1H1BU91|A0A1H1BU91_9PSED S-adenosylmethionine:tRN A ribosyltransferase-isomerase OS=Pseudomonas grimontii OX=129847 GN=queA PE=3 SV=1
MRVADFTFELPDSLIARHPLAERRASRLLTLDGASGTLAHRQFTDLLEHLRPGDLMVFNNTRVIPARLFGQKASGGKLEILVERVLDNHRVLAHVRSSKSPKPGSSILIDGGGEAEMVARHDALFELRFAEEVLPLLERVGHMPLPPYIDRPDEDSDRERYQTVYSQRLGAVAAPTAGLHFDQLLLDAIAAKGVETAYVTLHVGAGTFQPVRVDNIEDHHMHSEWLEVSQDVVDAVNACKARGGRVVAVGTTSVRSLESAARDGVLKPFSGDTDIFIYPGRPFHVVDCLVTNFHLPESTLLMLVSAFAGYPETMAAYKAAIDNGYRFFSYGDAMFITRNPAPRGPEEQL

SEQ ID NO: 70922 - protein, 351 aa, Pseudomonas guangdongensis
  misc_feature (1)..(351): tr|A0A1H2GJN6|A0A1H2GJN6_9PSED S-adenosylmethionine:tRN A ribosyltransferase-isomerase OS=Pseudomonas guangdong ensis OX=1245526 GN=queA PE=3 SV=1
MRVADFDFELPDELIARHPLAERRASRLLVLDGPSGELRHRQFPDLLDYLRPGDLMVFNDTRVIPARLFGQKASGGRLEILVERLLDEHRVLAHVRASKSPKPGSLIHIDGGGAAEMLARHDALFELRFDEPVLALLERVGHMPLPPYIDRPDEDADRERYQTVYSDKAKAGAVAAPTAGLHFDDALLAAIRERGVDIAFVTLHVGAGTFQPVRVERIEDHHMHSEWLQVGQDVVDAVQACKARGGRVVAVGTTSVRSLESAAQGGVLKPFSGDTDIFLYPGRPFHVVDALVTNFHLPESTLLMLVSAFAGYPETMAAYRAAVAEGYRFFSYGDAMFITRNPAPRGPEETP

SEQ ID NO: 70923 - protein, 349 aa, Pseudomonas guariconensis
  misc_feature (1)..(349): tr|A0A2N5QFJ6|A0A2N5QFJ6_9PSED S-adenosylmethionine:tRN A ribosyltransferase-isomerase OS=Pseudomonas guaricone nsis OX=1288410 GN=queA PE=3 SV=1
MRVADFSFELPDSLIARHPLAERHGSRLLVLDGPSGELAHRQFTDLLEYLRPGDLMIFNNTRVIPARLFGQKASGGKLEVLVERVLDSYRVLAHVRASKAPKPGTQILIDGGGQAEMVARHETLFELRFTEEVLPLLDRVGHMPLPPYIDRPDEGADRERYQTVYAERAGAVAAPTAGLHFDEALLERIAAKGVERAFVTLHVGAGTFQPVRVDKIEDHHMHKEWLEVSQEVVDAVQACRARGGRVIAVGTTSVRSLESAARDGQLKAFSGDTDIFIYPGRPFHVVDALVTNFHLPESTLLMLVSAFAGYPETMAAYAAAVEQGYRFFSYGDAMFITRNPAPRGPEDQA

SEQ ID NO: 70924 - protein, 349 aa, Pseudomonas guariconensis
  misc_feature (1)..(349): tr|A0A1G6TRP1|A0A1G6TRP1_9PSED S-adenosylmethionine:tRN A ribosyltransferase-isomerase OS=Pseudomonas guaricone nsis OX=1288410 GN=queA PE=3 SV=1
MRVADFSFELPDSLIARHPLAERHGSRLLVLDGPSGELAHRQFTDLLEYLRPGDLMIFNNTRVIPARLFGQKASGGKLEVLVERVLDSYRVLAHVRASKAPKPGTQILIDGGGEAEMVARHETLFELRFTEEVLPLLDRVGHMPLPPYIDRPDEGADRERYQTVYAERAGAVAAPTAGLHFDEALLERIAAKGVERAFVTLHVGAGTFQPVRVDKIEDHHMHKEWLEVSQEVVDAVQACRARGGRVIAVGTTSVRSLESAARDGQLKAFSGDTDIFIYPGRPFHVVDALVTNFHLPESTLLMLVSAFAGYPETMAAYAAAVEQGYRFFSYGDAMFITRNPAPRGPEDQA

SEQ ID NO: 70925 - protein, 347 aa, Pseudomonas guguanensis
  misc_feature (1)..(347): tr|A0A1H0X3E7|A0A1H0X3E7_9PSED S-adenosylmethionine:tRN A ribosyltransferase-isomerase OS=Pseudomonas guguanens is OX=1198456 GN=queA PE=3 SV=1
MRVADFHFDLPESLIARHPLAERRASRLLQLDGPSGALRHGQFTDLLEQLRPGDLMVFNNTRVIPARLFGQKASGGKLEVLVERVLDQHRVLAHVRSSKSPKPGSQILIDGGGEAEMVARHDALFELRFAEPVLPLLERVGHMPLPPYIDRPDDEADRERYQTVYAEKAGAVAAPTAGLHFDDELLAAIRAKGVETAFVTLHVGAGTFQPVRVERIEDHHMHSEWLEVSQDVVDAVAACRARGGRVVAVGTTSVRSLETAAQSGELKPFSGDTDIFIYPGRPFHVVDALVTNFHLPESTLLMLVSAFAGYAETMAAYRAAVEQGYRFFSYGDAMFITRNPAARGPEV

SEQ ID NO: 70926 - protein, 349 aa, Pseudomonas guineae
  misc_feature (1)..(349): tr|A0A1I3DN70|A0A1I3DN70_9PSED S-adenosylmethionine:tRN A ribosyltransferase-isomerase OS=Pseudomonas guineae O X=425504 GN=queA PE=3 SV=1
MRVADFNFELPDALIARHPLAERRASRLLVLDGPTGELAHQQFSDLLDYLRPGDLMVFNNTRVIPARLFGQKASGGKLEVLVERVLDSHRVLAHVRSSKSPKPGSSILIDGGGEAEMVARHDGLFELRFSEEVLPLLERVGHMPLPPYIDRPDEQADRERYQTVYADRAGAVAAPTAGLHFDQQLLSAITEMGVESAFVTLHVGAGTFQPVRVERIEDHHMHTEWLEVGQDVVDAVAACRARGGRVIAVGTTSVRSLESAARDGVLKAFSGDTDIFIYPGRPLHVVDALVTNFHLPESTLLMLVSAFAGYPETMAAYQAAIAGKYRFFSYGDAMFITRNPAPRGPEEQL

SEQ ID NO: 70927 - protein, 353 aa, Pseudomonas helleri
  misc_feature (1)..(353): tr|A0A0J6I7Z1|A0A0J6I7Z1_9PSED S-adenosylmethionine:tRN A ribosyltransferase-isomerase OS=Pseudomonas helleri O X=1608996 GN=queA PE=3 SV=1
MRVADFTFELPDSLIARHPLAERRNSRLLTLDGESGALAHRQFTDLLEHLRPGDLMVFNNTRVIPARLFGQKASGGKLEILVERVLDSHRVLAHVRSSKSPKPGSKILIDGGGEAEMLARHDALFELGFTDEVLPLLDRVGHMPLPPYIDRPDEGADRERYQTVYAQRLGAVAAPTAGLHFDEPLMQAIAAKGVETAFVTLHVGAGTFQPVRVERLEDHHMHTEWLEVGQDVVDAVAACRARGGRVIAVGTTSVRSLESAARDGVLKPFSGDTDIFIFPGRPFHVVDALVTNFHLPESTLLMLVSAFAGYPETMAAYKAAVEHGYRFFSYGDAMFITRNPAPTAPAPAPEDQA

SEQ ID NO: 70928 - protein, 354 aa, Pseudomonas helmanticensis
  misc_feature (1)..(354): tr|A0A4R7UXM8|A0A4R7UXM8_9PSED S-adenosylmethionine:tRN A ribosyltransferase-isomerase OS=Pseudomonas helmantic ensis OX=1471381 GN=queA PE=3 SV=1
MRVADFTFELPDSLIARHPLAERRGSRLLTLDGPSGALAHRQFTDLLEHLRPGDLMVFNNTRVIPARLFGQKASGGKLEILVERVLDTHRVLAHVRSSKSPKPGSRILIDGGGEAEMLARHDALFELGFAEEVLPLLDRVGHMPLPPYIDRPDEGSDRERYQTVYAEKLGAVAAPTAGLHFDQSLMEAIAAKGVETTFVTLHVGAGTFQPVRVEKLEDHHMHTEWLEVGQDVVDAVAACRARGGRVIAVGTTSVRSLESAARDGVLKPFSGDTDIFIFPGRPFHVVDALVTNFHLPESTLLMLVSAFAGYPETMAAYKAAVDNGYRFFSYGDAMFITRNPAPTAPKETGPEETE

SEQ ID NO: 70929 - protein, 349 aa, Pseudomonas hunanensis
  misc_feature (1)..(349): tr|A0A2I0CCX7|A0A2I0CCX7_9PSED S-adenosylmethionine:tRN A ribosyltransferase-isomerase OS=Pseudomonas hunanensi s OX=1247546 GN=queA PE=3 SV=1
MRVADFSFELPDSLIARHPLAERHGSRLLVLDGPTGALAHRQFPDLLDYLRPGDLMVFNNTRVIPARLFGQKASGGKLEVLVERVLDSHRVLAHVRASKAPKVGAVILIDGGGEAEMVARHDTLFELRFTEEVLPLLDRVGHMPLPPYIDRPDEGADRERYQTVYAQRAGAVAAPTAGLHFDEALLEKIADKGVERAFVTLHVGAGTFQPVRVDKIEDHHMHKEWLEVGQDVVDAIEACRARGGRVIAVGTTSVRSLESAARDGVLKAFSGDTDIFIYPGRPFHVVDALVTNFHLPESTLLMLVSAFAGYPETMAAYAAAVEHGYRFFSYGDAMFITRNPAPRGPEDQA

SEQ ID NO: 70930 - protein, 353 aa, Pseudomonas hussainii
  misc_feature (1)..(353): tr|A0A1H7GID7|A0A1H7GID7_9PSED S-adenosylmethionine:tRN A ribosyltransferase-isomerase OS=Pseudomonas hussainii OX=1429083 GN=queA PE=3 SV=1
MRVADFQFDLPPAQIAHYPLAERRASRLLVLDGQSGALSHRHFADVLEYLKPGDLMVFNNTRVIPARVFGRKASGGKLEMLVERVVSDTRVLAHVRASKSPKPGTELLLGEEGEEISVTMLGRQGELFELEFPESVLPLLERIGHMPLPPYIERADEQDDRERYQTVYASRAGAVAAPTAGLHFDQALLDALAEKGIERAFVTLHVGAGTFQPVRVEKIEDHHMHSEWLEVSPEVVAQIEACRARGGRVVAVGTTSVRSLETAARSGTLAPYSGETDIFIYPGYRFNVVDALVTNFHLPESTLLMLVSAFAGYPEAMQAYRTAVAEGYRFFSYGDAMFITRNPAPTGPEDERS

SEQ ID NO: 70931 - protein, 347 aa, Pseudomonas indica
  misc_feature (1)..(347): tr|A0A1G9JI58|A0A1G9JI58_9PSED S-adenosylmethionine:tRN A ribosyltransferase-isomerase OS=Pseudomonas indica OX =137658 GN=queA PE=3 SV=1
MRVSDFHFDLPESLIARHPLAERRASRLLVLDGPTGSLAHRRFPDLLEYLRPGDLMVFNNTRVIPARLFGQKASGGKLEILIERVLDSHRVLAHVRSSKSPKPGSKILLEGGGEAEMLARHDALFELAFADEVLPLLERVGHMPLPPYIDRPDDAADRERYQTVYAERAGAVAAPTAGLHFDTALLEAIREKGVETAFVTLHVGAGTFQPVRVDRIEDHHMHREWLEVSQDVVDAVAACRALGGRVVAVGTTSVRSLESAARDGALEPFSGDTDIFIFPGYRFRVVDALVTNFHLPESTLLMLVSAFAGYPEAMAAYRAAVEQEYRFFSYGDAMFITRNPAPRGPED

SEQ ID NO: 70932 - protein, 347 aa, Pseudomonas indoloxydans
  misc_feature (1)..(347): tr|A0A2T5PCY0|A0A2T5PCY0_9PSED S-adenosylmethionine:tRN A ribosyltransferase-isomerase OS=Pseudomonas indoloxyd ans OX=404407 GN=queA PE=3 SV=1
MRVADFHFDLPESLIARHPLAERRASRLLQLDGPTGALRHGQFTDVLEQLRPGDLMVFNDTRVIPARLFGQKASGGKLEVLVERVLDQYRVLAHVRSSKSPKPGSQILIDGGAEAEMVARHDALFELRFAEPVLPLLERVGHMPLPPYIDRPDDEADRERYQTVYAQKAGAVAAPTAGLHFDDELLAAIRAKGVETAFVTLHVGAGTFQPVRVERIEDHHMHSEWLEVGQDVVDAVAACRARGGRVVAVGTTSVRSLETAARDGELKPFSGDTDIFIYPGRPFHVVDALVTNFHLPESTLLMLVSAFAGYAETMAAYREAVAQGYRFFSYGDAMFITRNPAARGPEV

SEQ ID NO: 70933 - protein, 349 aa, Pseudomonas japonica
  misc_feature (1)..(349): tr|A0A239D0W7|A0A239D0W7_9PSED S-adenosylmethionine:tRN A ribosyltransferase-isomerase OS=Pseudomonas japonica OX=256466 GN=queA PE=3 SV=1
MRVADFSFELPDSLIARHPLAERRASRLLVLDGPSGALAHRHFGDLLDYLRPGDLMVFNNTRVIPARLFGQKASGGKLEILVERVLDSHRVLAHVRSSKAPKPGTQILVDGGGEAEMVARHDTLFELRFTEEVLPLLDRVGHMPLPPYIDRPDEGADRERYQTVYAERAGAVAAPTAGLHFDEELLAKIAEKGVDTAFVTLHVGAGTFQPVRVERIEDHHMHKEWLEVGQDVVDAVAACRARGGRVVAVGTTSVRSLESAARDGVLKPFSGDTDIFIFPGRPFHVVDALVTNFHLPESTLLMLVSAFAGYPETMAAYAAAVANEYRFFSYGDAMFITRNPAPRGPEDQA

SEQ ID NO: 70934 - protein, 354 aa, Pseudomonas jessenii
  misc_feature (1)..(354): tr|A0A5C4KZG2|A0A5C4KZG2_9PSED S-adenosylmethionine:tRN A ribosyltransferase-isomerase OS=Pseudomonas jessenii OX=77298 GN=queA PE=3 SV=1
MRVADFTFELPDSLIARHPLAERRGSRLLTLDGPSGALAHRQFTDLLEHLRPGDLMVFNNTRVIPARLFGQKASGGKLEILIERVLDSHRVLAHVRSSKSPKPGSKILIDGGGEAEMLARHDALFELGFAEEVLPLLDRVGHMPLPPYIDRPDEGSDRERYQTVYAQRLGAVAAPTAGLHFDQPLMEAIAAKGVETAFVTLHVGAGTFQPVRVDKIEDHHMHSEWLEVGQDVVDAVAACRARGGRVIAVGTTSVRSLESAARDGVLKPFSGDTDIFIYPGRPFHVVDALVTNFHLPESTLLMLVSAFAGYPETMAAYKAAVDNGYRFFSYGDAMFITRNPAPTAPEHTGPEETE

SEQ ID NO: 70935 - protein, 354 aa, Pseudomonas jessenii
  misc_feature (1)..(354): tr|A0A370S7U0|A0A370S7U0_9PSED S-adenosylmethionine:tRN A ribosyltransferase-isomerase OS=Pseudomonas jessenii OX=77298 GN=queA PE=3 SV=1
MRVADFTFELPDSLIARHPLAERRGSRLLTLDGVSGALAHRQFTDLLEHLRSGDLMVFNNTRVIPARLFGQKASGGKLEILIERVLDTHRVLAHVRSSKSPKPGSKILIDGGGEAEMLARHDALFELGFDEEVLPLLDRVGHMPLPPYIDRPDEGSDRERYQTVYAERLGAVAAPTAGLHFDQALMEAIAAKGVETTFVTLHVGAGTFQPVRVEKLEDHHMHTEWLEVGQDVVDAVAACRARGGRVIAVGTTSVRSLESAARDGVLKPFSGDTDIFIFPGRPFHVVDALVTNFHLPESTLLMLVSAFAGYPETMAAYKAAVENGYRFFSYGDAMFITRNPAPTAPSESDPEETV

SEQ ID NO: 70936 - protein, 347 aa, Pseudomonas jinjuensis
  misc_feature (1)..(347): tr|A0A1H0QX04|A0A1H0QX04_9PSED S-adenosylmethionine:tRN A ribosyltransferase-isomerase OS=Pseudomonas jinjuensi s OX=198616 GN=queA PE=3 SV=1
MRVADFHFDLPDNLIARHPLAERRASRLLVLDGPSGELAHRQFADVLELLRPGDLIVFNNTRVIPARLFGQKASGGKLEILVERVLDSHRVLAHVRSSKSPKPGSTILIEGGGEAEMLQRHDALFELRFAEEVLPLLERVGHMPLPPYIDRPDEADDRERYQTVYAERAGAVAAPTAGLHFDEALLEAIRAKGVETAFVTLHVGAGTFQPVRVERIEEHRMHHEWLEVGQDVVDAVAACRARGGRVVAVGTTSVRSLESAARDGELKPFSGDTDIFIYPGRPFHVVDALVTNFHLPESTLLMLVSAFAGYPETMAAYATAVEQGYRFFSYGDAMFITRNPAPRGPEV

SEQ ID NO: 70937 - protein, 349 aa, Pseudomonas kairouanensis
  misc_feature (1)..(349): tr|A0A4Z0AIQ8|A0A4Z0AIQ8_9PSED S-adenosylmethionine:tRN A ribosyltransferase-isomerase OS=Pseudomonas kairouane nsis OX=2293832 GN=queA PE=3 SV=1
MRVADFTFELPDSLIARHPLAERRASRLLTLDGVSGALEHRQFTDLLEHLRPGDLMVFNNTRVIPARLFGQKASGGKLEILVERVLDSHRVLAHVRSSKSPKPGSKILIDGGGEAEMLARHDALFELKFAEEVLPLLERVGHMPLPPYIDRPDEDSDRERYQTVYSQRLGAVAAPTAGLHFDQPLLDAIAAKGVETAYVTLHVGAGTFQPVRVDNIEDHHMHSEWLEVTQEVVDAVAACKARGGRVVAVGTTSVRSLESAARDGVLKPFSGDTDIFIFPGRPFHVVDCLVTNFHLPESTLLMLVSAFAGYPETMAAYQAAIANEYRFFSYGDAMFITRNPAPRGPEEQL

SEQ ID NO: 70938 - protein, 349 aa, Pseudomonas kilonensis
  misc_feature (1)..(349): tr|A0A2U1BWL2|A0A2U1BWL2_9PSED S-adenosylmethionine:tRN A ribosyltransferase-isomerase OS=Pseudomonas kilonensi s OX=132476 GN=queA PE=3 SV=1
MRVADFTFELPDSLIARHPLAERRASRLLTLDGVSGAMAHRQFTDLLEHLRPGDLMVFNNTRVIPARLFGQKASGGKLEILVERVLDSHRVLAHVRSSKSPKPGSSILIDGGGEARMVARHDALFELEFAEEVLPLLDRVGHMPLPPYIDRPDEGSDRERYQTVYAERLGAVAAPTAGLHFDQPLLEAIAAKGVETAFVTLHVGAGTFQPVRVERIEDHHMHNEWLEVSQEVVDAVAACRARAGRVVAVGTTSVRSLESAARDGVLKPFSGDTDIFIYPGRPFHVVDALVTNFHLPESTLLMLVSAFAGYPEAMAAYKAAVEHGYRFFSYGDAMFITRNPAPRGPEETV

SEQ ID NO: 70939 - protein, 349 aa, Pseudomonas kilonensis
  misc_feature (1)..(349): tr|A0A1H5GZW1|A0A1H5GZW1_9PSED S-adenosylmethionine:tRN A ribosyltransferase-isomerase OS=Pseudomonas kilonensi s OX=132476 GN=queA PE=3 SV=1
MRVADFTFELPDSLIARHPLAERRASRLLTLDGVSGAMAHRQFTDLLEHLRPGDLMVFNNTRVIPARLFGQKASGGKLEILVERVLDSHRVLAHVRSSKSPKPGSSILIDGGGEARMVARHDALFELAFAEEVLPLLDRVGHMPLPPYIDRPDEGSDRERYQTVYAERLGAVAAPTAGLHFDQPLLEAIAAKGVETAFVTLHVGAGTFQPVRVERIEDHHMHNEWLEVSQEVVDAVAACRARGGRVVAVGTTSVRSLESAARDGVLKPFSGDTDIFIYPGRPFHVVDALVTNFHLPESTLLMLVSAFAGYPEAMAAYKAAVEHGYRFFSYGDAMFITRNPAPRGPEETV

SEQ ID NO: 70940 - protein, 347 aa, Pseudomonas knackmussii
  misc_feature (1)..(347): tr|A0A024HD39|A0A024HD39_PSEKB S-adenosylmethionine:tRN A ribosyltransferase-isomerase OS=Pseudomonas knackmuss ii (strain DSM 6978 / LMG 23759 / B13) OX=1301098 GN=qu eA PE=3 SV=1
MRVADFHFDLPEALIARHPLAERRASRLLVLDGPSGTLSHRHFADLLEYLRPGDLMVFNNTRVIPARLFGQKASGGKLEILVERVLDQRRVLAHVRSSKSPKPGSKILIDGGGEAEMLQRHDALFELAFSEDVLPLLERVGHMPLPPYIDRPDEAADRERYQTVYAERAGAVAAPTAGLHFDQALLEAIRDKGVETAFVTLHVGAGTFQPVRVERIEDHHMHSEWLEVSQDVVDAVAACRARGGRVVAVGTTSVRSLESAARDGTLKPFSGDTDIFLFPGRPFHVVDALVTNFHLPESTLLMLVSAFAGYPETMAAYAAAVEQQYRFFSYGDAMFITRNPAPRGPED

SEQ ID NO: 70941 - protein, 354 aa, Pseudomonas koreensis
  misc_feature (1)..(354): tr|A0A2R4Q1B6|A0A2R4Q1B6_9PSED S-adenosylmethionine:tRN A ribosyltransferase-isomerase OS=Pseudomonas koreensis OX=198620 GN=queA PE=3 SV=1
MRVADFTFELPDSLIARHPLAERRGSRLLTLDGPSGALAHRQFTDLLEHLRPGDLMVFNNTRVIPARLFGQKASGGKLEILIERVLDTHRVLAHVRSSKSPKPGSKILIDGGGEAEMLARHDALFELGFAEEVLPLLDRVGHMPLPPYIDRPDEGSDRERYQTVYAQRLGAVAAPTAGLHFDQPLMEAIAAKGVETAFVTLHVGAGTFQPVRVDKIEDHHMHSEWLEVGQDVVDAVAACRERGGRVIAVGTTSVRSLESAARDGVLKPFSGDTDIFIYPGRPFHVVDALVTNFHLPESTLLMLVSAFAGYPETMAAYKAAVDNGYRFFSYGDAMFITRNPAPTAPEHTGPEETE

SEQ ID NO: 70942 - protein, 354 aa, Pseudomonas koreensis
  misc_feature (1)..(354): tr|A0A1A9JKT4|A0A1A9JKT4_9PSED S-adenosylmethionine:tRN A ribosyltransferase-isomerase OS=Pseudomonas koreensis OX=198620 GN=queA PE=3 SV=1
MRVADFTFELPDSLIARHPLAERRASRLLTLDGVSGALAHRQFTDLLEHLRPGDLMVFNNTRVIPARLFGQKASGGKLEILIERVLDTHRVLAHVRSSKSPKPGTKILIDGGGEAEMLARHDALFELGFDEEVLPLLDRVGHMPLPPYIDRPDEGSDRERYQTVYAQRLGAVAAPTAGLHFDQPLMEAIAAKGVETAFVTLHVGAGTFQPVRVDKIEDHHMHSEWLEVGQDVVDAVAACRARGGRVIAVGTTSVRSLESAARDGVLKPFSGDTDIFIYPGRPFHVVDALVTNFHLPESTLLMLVSAFAGYPETMAAYKAAVDNGYRFFSYGDAMFITRNPAPTAPEQTGPEETE

SEQ ID NO: 70943 - protein, 354 aa, Pseudomonas kribbensis
  misc_feature (1)..(354): tr|A0A345RVJ8|A0A345RVJ8_9PSED S-adenosylmethionine:tRN A ribosyltransferase-isomerase OS=Pseudomonas kribbensi s OX=1628086 GN=queA PE=3 SV=1
MRVADFTFELPDSLIARHPLAERRGSRLLTLDGVSGALAHRQFTDLLEHLRPGDLMVFNNTRVIPARLFGQKASGGKLEILIERVLDTHRVLAHVRSSKSPKPGSKILIDGGGEAEMLARHDALFELGFSEEVLPLLDRVGHMPLPPYIDRPDEGSDRERYQTVYAEKLGAVAAPTAGLHFDQTLMEAIAAKGVETAFVTLHVGAGTFQPVRVEKIEDHHMHSEWLEVGQDVVDAVAACRARGGRVIAVGTTSVRSLESAARDGVLKPFSGDTDIFIYPGRPFHVVDALVTNFHLPESTLLMLVSAFAGYPETMAAYKAAVDNGYRFFSYGDAMFITRNPAPTAPEQTGPEETE

SEQ ID NO: 70944 - protein, 354 aa, Pseudomonas kribbensis
  misc_feature (1)..(354): tr|A0A4Y8VA20|A0A4Y8VA20_9PSED S-adenosylmethionine:tRN A ribosyltransferase-isomerase OS=Pseudomonas kribbensi s OX=1628086 GN=queA PE=3 SV=1
MRVADFTFELPDSLIARHPLAERRGSRLLTLDGVSGALAHRQFTDLLEHLRPGDLMVFNNTRVIPARLFGQKASGGKLEILIERVLDTHRVLAHVRSSKSPKPGSKILIDGGGEAEMLARHDALFELGFSEEVLPLLDRVGHMPLPPYIDRPDEGSDRERYQTVYAEKLGAVAAPTAGLHFDQTLMEAIAAKGVETAFVTLHVGAGTFQPVRVEKIEDHHMHTEWLEVGQDVVDAVAACRARGGRVIAVGTTSVRSLESAARDGVLKPFSGDTDIFIYPGRPFHVVDALVTNFHLPESTLLMLVSAFAGYPETMAAYKAAVDNGYRFFSYGDAMFITRNPAPTAPEQTGPEETE

SEQ ID NO: 70945 - protein, 349 aa, Pseudomonas kunmingensis
  misc_feature (1)..(349): tr|A0A2N8SCA6|A0A2N8SCA6_9PSED S-adenosylmethionine:tRN A ribosyltransferase-isomerase OS=Pseudomonas kunmingen sis OX=1211807 GN=queA PE=3 SV=1
MQVADFFFQLPDALIARHPLAERRASRLLVLEGETGKLSHRNFADLLDHVRPGDLMVFNNTRVIPARLFGQKATGGKLEILVERVVGNRSVLAHVRSSKSPKAGSKILLDGGGEAEMIARHDALFELEFDEDVLPLLERIGHMPLPPYIDRPDDVADRERYQTVYAQRAGAVAAPTAGLHFDEALLQTLRESGVETAYVTLHVGAGTFQPVRVGRIEEHHMHREWLEVGQDVVDAVAACRSRGGRVIAVGTTSVRSLETAARDGELKPFSGDTDIFIYPGKSFHVVDALVTNFHLPESTLLMLVSAFAGYPETMAAYAEAVAQRYRFFSYGDAMFITRNPAPRGPEETQ

SEQ ID NO: 70946 - protein, 349 aa, Pseudomonas kuykendallii
  misc_feature (1)..(349): tr|A0A2W5D5S4|A0A2W5D5S4_9PSED S-adenosylmethionine:tRN A ribosyltransferase-isomerase OS=Pseudomonas kuykendal lii OX=1007099 GN=queA PE=3 SV=1
MRVSDFHFDLPESLIARYPLAERRASRLLVLDGESGALAHRRFTDLLDHLRPGDLMVFNDTRVIPARLFGQKASGGKLEILVERVLDEYRVLAHVRSSKSPKPGTEILVEGGGRAEMLARHDALFELRFDEPVLALLDRVGHMPLPPYIVRADDAADRERYQTVYAQRSGAVAAPTAGLHFDEALLESIRAKGVETAFVTLHVGAGTFQPVRVERIEDHPMHREWLEVSQDVVDAVAACRARGGRVIAVGTTSVRSLESAARDGQLKAFSGDTDIFIYPGRPFHVVDALVTNFHLPESTLLMLVSAFAGYPETMAAYAAAVENGYRFFSYGDAMYITRNPAARGPEDFA

SEQ ID NO: 70947 - protein, 349 aa, Pseudomonas kuykendallii
  misc_feature (1)..(349): tr|A0A1H2XJA7|A0A1H2XJA7_9PSED S-adenosylmethionine:tRN A ribosyltransferase-isomerase OS=Pseudomonas kuykendal lii OX=1007099 GN=queA PE=3 SV=1
MRVSDFHFDLPESLIARYPLAERRASRLLVLDGESGALAHRRFTDLLDHLRPGDLMVFNDTRVIPARLFGQKASGGKLEILVERVLDEYRVLAHVRSSKSPKPGTEILVEGGGRAEMLARHDALFELRFDEPALALLDRVGHMPLPPYIVRADDAADRERYQTVYAQRSGAVAAPTAGLHFDEALLESIRAKGVETAFVTLHVGAGTFQPVRVERIEDHPMHREWLEVSQGVVDAVAACRARGGRVIAVGTTSVRSLESAARDGQLKAFSGDTDIFIYPGRPFHVIDALVTNFHLPESTLLMLVSAFAGYPETMAAYAAAVENGYRFFSYGDAMYITRNPAARGPEDFA

SEQ ID NO: 70948 - protein, 349 aa, Pseudomonas lactis
  misc_feature (1)..(349): tr|A0A0R3CS40|A0A0R3CS40_9PSED S-adenosylmethionine:tRN A ribosyltransferase-isomerase OS=Pseudomonas lactis OX =1615674 GN=queA PE=3 SV=1
MRVADFTFELPDSLIARHPLAERRASRLLTLDGVSGALAHRQFTDLLEHLRPGDLMVFNNTRVIPARLFGQKASGGKLEILVERVLDSHRVLAHVRSSKSPKPGSSILIEGGGEAEMVARHDALFELKFAEEVLPLLERVGHMPLPPYIDRPDEDADRERYQTVYSQRLGAVAAPTAGLHFDQPLLDAIAAKGVDTAYVTLHVGAGTFQPVRVDNIEDHHMHSEWLEVSQDVVDAVAACKARGGRVVAVGTTSVRSLESAARDGVLKPFSGDTDIFIFPGRPFHVVDCLVTNFHLPESTLLMLVSAFAGYPETMAAYQAAIANEYRFFSYGDAMFITRNPAPRGPEDNL

SEQ ID NO: 70949 - protein, 349 aa, Pseudomonas lactis; identical to SEQ ID NO: 70845
  misc_feature (1)..(349): tr|I4KBZ5|I4KBZ5_9PSED S-adenosylmethionine:tRNA ribosy ltransferase-isomerase OS=Pseudomonas lactis OX=1615674 GN=queA PE=3 SV=1

SEQ ID NO: 70950 - protein, 354 aa, Pseudomonas laurylsulfatiphila
  misc_feature (1)..(354): tr|A0A2S6FGX5|A0A2S6FGX5_9PSED S-adenosylmethionine:tRN A ribosyltransferase-isomerase OS=Pseudomonas laurylsul fatiphila OX=2011015 GN=queA PE=3 SV=1
MRVADFTFELPDSLIARHPLAERRNSRLLTLDGVSGALAHRQFTDLLEHLRPGDLMVFNNTRVIPARLFGQKASGGKLEILVERVLDSHRVLAHVRSSKSPKPGSKILIDGGGEAEMLARHDALFELGFTEEVLPLLDRVGHMPLPPYIDRPDEGADRERYQTVYAERLGAVAAPTAGLHFDQVLMEAIAAKGVETAFVTLHVGAGTFQPVRVEKIEDHHMHSEWLEVGQDVVDAVAACRARGGRVVAVGTTSVRSLESAARDGVLKPFSGDTDIFIYPGRPFHVVDALVTNFHLPESTLLMLVSAFAGYPETMAAYKAAVDNGYRFFSYGDAMFITRNPAPTAPKESGPEETV

SEQ ID NO: 70951 - protein, 354 aa, Pseudomonas laurylsulfativorans
  misc_feature (1)..(354): tr|A0A2S3VS48|A0A2S3VS48_9PSED S-adenosylmethionine:tRN A ribosyltransferase-isomerase OS=Pseudomonas laurylsul fativorans OX=1943631 GN=queA PE=3 SV=1
MRVADFTFELPDSLIARHPLAERRNSRLLTLDGVSGALAHRQFTDLLEHLRPGDLMVFNNTRVIPARLFGQKASGGKLEILVERVLDSHRVLAHVRSSKSPKPGSKILIDGGGEAEMLARHDALFELGFAEEVLPLLDRVGHMPLPPYIDRPDEGADRERYQTVYAERLGAVAAPTAGLHFDQVLMEAIAAKGVETAFVTLHVGAGTFQPVRVEKLEDHHMHSEWLEVGQDVVDAVAACRARGGRVVAVGTTSVRSLESAARDGVLKPFSGDTDIFIYPGRPFHVVDALVTNFHLPESTLLMLVSAFAGYPETMAAYKAAVDNGYRFFSYGDAMFITRNPAPTAPKESGPEETV

SEQ ID NO: 70952 - protein, 349 aa, Pseudomonas libanensis
  misc_feature (1)..(349): tr|A0A0R2YDI2|A0A0R2YDI2_9PSED S-adenosylmethionine:tRN A ribosyltransferase-isomerase OS=Pseudomonas libanensi s OX=75588 GN=queA PE=3 SV=1
MRVADFTFELPDSLIARHPLAERRASRLLTLDGVSGVLAHRQFTDLLEHLRPGDLMVFNNTRVIPARLFGQKASGGKLEILVERVLDSHRVLAHVRSSKSPKPGSLILIDGGGEAEMVARHDALFELRFAEEVLPLLERVGHMPLPPYIDRPDEDSDRERYQTVYSQRLGAVAAPTAGLHFDQPLLDAIAAKGVESAYVTLHVGAGTFQPVRVENIEDHHMHSEWLEVSQDVVDAVNACKARGGRVVAVGTTSVRSLESAARDGVLKPFSGDTDIFIYPGRPFHVVDCLVTNFHLPESTLLMLVSAFAGYPETMAAYQAAIANEYRFFSYGDAMFITRNPAPRGPEDNL

SEQ ID NO: 70953 - protein, 349 aa, Pseudomonas lini
  misc_feature (1)..(349): tr|A0A0J6KCJ4|A0A0J6KCJ4_9PSED S-adenosylmethionine:tRN A ribosyltransferase-isomerase OS=Pseudomonas lini OX=1 63011 GN=queA PE=3 SV=1
MRVADFTFELPDSLIARHPLAERRGSRLLTLDGVSGALAHRQFTDLLEHLRPGDLMVFNNTRVIPARLFGQKASGGKLEILVERVLDSHRVLAHVRSSKSPKPGSKILIDGGGEAEMLARHDALFELGFAEEVLPLLDRVGHMPLPPYIDRPDEGSDRERYQTVYAERLGAVAAPTAGLHFDQPLMEAIAAKGIETAFVTLHVGAGTFQPVRVEKIEDHHMHSEWLEVGQDVVDAVEACRARGGRVVAVGTTSVRSLESAARDGVLKPFSGDTDIFIYPGRPFHVVDALVTNFHLPESTLLMLVSAFAGYPETMAAYKAAVDNEYRFFSYGDAMFITRNPAPRGPEETE

SEQ ID NO: 70954 - protein, 354 aa, Pseudomonas lini
  misc_feature (1)..(354): tr|A0A423IUQ6|A0A423IUQ6_9PSED S-adenosylmethionine:tRN A ribosyltransferase-isomerase OS=Pseudomonas lini OX=1 63011 GN=queA PE=3 SV=1
MRVADFTFELPDSLIARHPLAERRNSRLLTLDGVSGALAHRQFTDLLEHLRPGDLMVFNNTRVIPARLFGQKASGGKLEILVERVLDSHRVLAHVRSSKSPKPGSKILIDGGGEAEMLARHDALFELGFAEEVLPLLDRVGHMPLPPYIDRPDEGSDRERYQTVYAERLGAVAAPTAGLHFDQPLMEAIAAKGVETAFVTLHVGAGTFQPVRVEKIEDHHMHSEWLEVGQDVVDAVEACRARGGRVVAVGTTSVRSLESAARDGVLKPFSGDTDIFIYPGRPFHVVDALVTNFHLPESTLLMLVSAFAGYPETMAAYKAAVDNEYRFFSYGDAMFITRNPAPTAPKETGPEETE

SEQ ID NO: 70955 - protein, 351 aa, Pseudomonas linyingensis
  misc_feature (1)..(351): tr|A0A1H6S954|A0A1H6S954_9PSED S-adenosylmethionine:tRN A ribosyltransferase-isomerase OS=Pseudomonas linyingen sis OX=915471 GN=queA PE=3 SV=1
MRVADFHFELPDPLIARHPLAERRASRLLVLDGPSGQLSHRHFPDLLEYLRPGDLMVFNDTRVIPARLFGHKASGGKLEILVERVLDSHRVLAHVRASKAPKPGMQILIDGGGAAEMVVRHAALFELRFAEPVLPLLERVGHMPLPPYIDRPDEDADRERYQTVYSDQAKAGAVAAPTAGLHFDDALLAAIRAKGVDTAFVTLHVGAGTFQPVRVERIEDHHMHSEWLEVGQEVVDAVSACKARGGRVVAVGTTSVRSLESAARDGVLRPFSGDTDIFIYPGRPFHVVDALVTNFHLPESTLLMLVSAFAGYPETMAAYRAAVAEGYRFFSYGDAMFITRNPAPRGPEETP

SEQ ID NO: 70956 - protein, 349 aa, Pseudomonas litoralis
  misc_feature (1)..(349): tr|A0A1H1UKC4|A0A1H1UKC4_9PSED S-adenosylmethionine:tRN A ribosyltransferase-isomerase OS=Pseudomonas litoralis OX=797277 GN=queA PE=3 SV=1
MRVSDFQFDLPDRLIARHPLAERRSSRLLCLDGLSGELVHRQFADLLEYLRPGDLMVFNNTRVIPARLFGRKETGGQLEVLVERVLDERRVLAHVRSSKSPKPGSRIVFEEASGATMLARHDALFELEFDEPVLPLLDRIGHMPLPPYIDRPDESADRERYQTVYAHKAGAVAAPTAGLHFDNELLQAIEGKGVATAQVTLHVGAGTFQPVRVERIEDHHMHSEWLEVSQQVVDAVNACKARGGRVIAVGTTSVRSLESAARDGVLKPFSGDTDIFIYPGRPFHVVDALVTNFHLPESTLLMLVSAFAGYPQTMAAYQAAVDNDYRFFSYGDAMFITRNPAAQGPEEAQ

SEQ ID NO: 70957 - protein, 353 aa, Pseudomonas lundensis
  misc_feature (1)..(353): tr|A0A266NBU3|A0A266NBU3_9PSED S-adenosylmethionine:tRN A ribosyltransferase-isomerase OS=Pseudomonas lundensis OX=86185 GN=queA PE=3 SV=1
MRVADFTFELPDSLIARHPLAERRNSRLLTLDGESGALAHRQFADLLEHLQLGDLMVFNNTRVIPARLFGQKASGGKLEILVERVLDSHRVLAHVRSSKSPKPGSKILIDGGGEAEMLARHDALFELGFAEEVLPLLDRVGHMPLPPYIDRPDEGSDRERYQTVYAQRLGAVAAPTAGLHFDEPLMQAIAAKGVETAFVTLHVGAGTFQPVRVERLEDHHMHTEWLEVGQDVVDAVAACRARGGRVIAVGTTSVRSLESAARDGTLKPFSGDTDIFIFPGRPFHVVDALVTNFHLPESTLLMLVSAFAGYPETMAAYKAAVEHGYRFFSYGDAMFITRNPAPTAPAPAPEDQA

SEQ ID NO: 70958 - protein, 353 aa, Pseudomonas lundensis
  misc_feature (1)..(353): tr|A0A1D9IJ68|A0A1D9IJ68_9PSED S-adenosylmethionine:tRN A ribosyltransferase-isomerase OS=Pseudomonas lundensis OX=86185 GN=queA PE=3 SV=1
MRVADFTFELPDSLIARHPLAERRNSRLLTLDGESGALAHRQFTDLLEHLRSGDLMVFNNTRVIPARLFGQKASGGKLEILVERVLDSHRVLAHVRSSKSPKPGSKILIDGGGEAQMLARHDALFELGFAEEVLPLLDRVGHMPLPPYIDRPDEGSDRERYQTVYAQRLGAVAAPTAGLHFDEPLMQAIAAKGVETAFVTLHVGAGTFQPVRVERLEDHHMHTEWLEVGQEVVDAVAACRARGGRVIAVGTTSVRSLESAARDGTLKPFSGDTDIFIFPGRPFHVVDALVTNFHLPESTLLMLVSAFAGYPETMAAYKAAVEQGYRFFSYGDAMFITRNPAPTAPAPAPEDQA

SEQ ID NO: 70959 - protein, 349 aa, Pseudomonas lurida
  misc_feature (1)..(349): tr|A0A2R3I1X6|A0A2R3I1X6_9PSED S-adenosylmethionine:tRN A ribosyltransferase-isomerase OS=Pseudomonas lurida OX =244566 GN=queA PE=3 SV=1
MRVADFTFELPDSLIARHPLAERRASRLLTLDGVSGALAHRQFTDLLEHLRPGDLMVFNNTRVIPARLFGQKASGGKLEILVERVLDSHRVLAHVRSSKSPKPGSSILIDGGGEAEMVARHDALFELKFAEEVLPLLERVGHMPLPPYIDRPDEDSDRERYQTVYSQRPGAVAAPTAGLHFDQPLLDAIAAKGVETAYVTLHVGAGTFQPVRVDNIEDHHMHSEWLEVSQDVVGAVQACKARGGRVVAVGTTSVRSLESAARDGVLKPFSGDTDIFIYPGRPFHVVDCLVTNFHLPESTLLMLVSAFAGYPETMAAYQAAIDNGYRFFSYGDAMFITRNPAPRGPEEQL

SEQ ID NO: 70960 - protein, 349 aa, Pseudomonas lurida
  misc_feature (1)..(349): tr|A0A2A9DIX7|A0A2A9DIX7_9PSED S-adenosylmethionine:tRN A ribosyltransferase-isomerase OS=Pseudomonas lurida OX =244566 GN=queA PE=3 SV=1
MRVADFTFELPDSLIARHPLAERRASRLLTLDGVSGALAHRQFTDLLEHLRPGDLMVFNNTRVIPARLFGQKASGGKLEILVERVLDSHRVLAHVRSSKSPKPGSSILIDGGGEAEMVARHDALFELKFAEEVLPLLERVGHMPLPPYIDRPDEDSDRERYQTVYSQRPGAVAAPTAGLHFDQPLLDAIAAKGVETAYVTLHVGAGTFQPVRVDNIEDHHMHSEWLEVSQDVVDAVQACKARGGRVVAVGTTSVRSLESAARDGVLKPFSGDTDIFIYPGRPFHVVDCLVTNFHLPESTLLMLVSAFAGYPETMAAYQAAIDNGYRFFSYGDAMFITRNPAPRGPEEQL

SEQ ID NO: 70961 - protein, 359 aa, Pseudomonas lutea
  misc_feature (1)..(359): tr|A0A098T324|A0A098T324_9PSED S-adenosylmethionine:tRN A ribosyltransferase-isomerase OS=Pseudomonas lutea OX= 243924 GN=queA PE=3 SV=1
MRVADFTFELPDSLIARHPLAERRSSRLLTLDGPSGALAHRQFTDLLEHLRPGDLMVFNNTRVIPARLFGQKASGGKLEILVERVLDQHRVLAHVRSSKSPKPGSAILIDGGGEAEMVARHDALFELSFAEPVLPLLERVGHMPLPPYIDRPDDDADRERYQTVYAQRAGAVAAPTAGLHFDQTMMNAIADKGIETAFVTLHVGAGTFQPVRVERIEDHHMHNEWLEVTQEVVDAVAACRARGGRVIAVGTTSVRSLESAARDGVLKPFSGDTDIFIYPGRPFHVVDALVTNFHLPESTLLMLVSAFAGYPETMAAYAAAVEHGYRFFSYGDAMFITRNPAPTAPEESTSTESAPEDQA

SEQ ID NO: 70962 - protein, 347 aa, Pseudomonas luteola
  misc_feature (1)..(347): tr|A0A2X2EAV0|A0A2X2EAV0_PSELU S-adenosylmethionine:tRN A ribosyltransferase-isomerase OS=Pseudomonas luteola O X=47886 GN=queA PE=3 SV=1
MQVSDFYFELPESLIARHPLSERRASRLLVLDGPSGAINHQQFSDLLDYLRPEDLMIFNDTRVIPARLFGQKASGGKLEILVERVLDEFRVLAHVRSSKSPKPGAVIHIEGGGEAEMLARHDALFELRFAEPVLGLLERIGHMPLPPYIDRPDEEEDRERYQTVYARNAGAVAAPTAGLHFDEAMLQAIREKGIETEFVTLHVGAGTFQPVRVDRIEDHHMHREWLQVSQAVVDAVERCKGRGGRVIAVGTTSVRSLESAARDGQLKAFSGDTDIFLYPGKPFHVVDALVTNFHLPESTLLMLVSAFAGYPETMAAYAAAVEQNYRFFSYGDAMFITRNPNAKGPES

SEQ ID NO: 70963 - protein, 347 aa, Pseudomonas luteola
  misc_feature (1)..(347): tr|A0A3R8WBE4|A0A3R8WBE4_PSELU S-adenosylmethionine:tRN A ribosyltransferase-isomerase OS=Pseudomonas luteola O X=47886 GN=queA PE=3 SV=1
MQVSDFYFELPESLIARHPLSERRASRLLVLDGPSGAINHQQFSDLLDYLRPEDLMIFNDTRVIPARLFGQKASGGKLEILVERVLDEFRVLAHVRSSKSPKPGAVIHVEGGGEAEMLARHDALFELRFAEPVLGLLERVGHMPLPPYIDRPDDEEDRERYQTVYARNAGAVAAPTAGLHFDEAMLQAIREKGIETEFVTLHVGAGTFQPVRVDRIEDHHMHREWLQVSQAVVDAVERCKGRGGRVIAVGTTSVRSLESAARVGQLKAFSGDTDIFLYPGKPFHVVDALVTNFHLPESTLLMLVSAFAGYPETMAAYAAAVEQNYRFFSYGDAMFITRNPNAKGPES

SEQ ID NO: 70964 - protein, 349 aa, Pseudomonas mandelii
  misc_feature (1)..(349): tr|A0A255WVX8|A0A255WVX8_9PSED S-adenosylmethionine:tRN A ribosyltransferase-isomerase OS=Pseudomonas mandelii OX=75612 GN=queA PE=3 SV=1
  misc_feature (323)..(323): Xaa can be any naturally occurring amino acid
MRVADFTFELPDSLIARHPLAERRASRLLTLDGVSGALAHRQFTDLLEHLRPGDLMVFNNTRVIPARLFGQKASGGKLEILVERVLDSHRVLAHVRSSKSPKPGSKILIDGGGEAEMLARHDALFELGFAEEVLPLLERVGHMPLPPYIDRPDEDADRERYQTVYSQRPGAVAAPTAGLHFDQPLLDAIAAKGVESAYVTLHVGAGTFQPVRVEKIEDHHMHSEWLEVGQSVVDAVAACKARGGRVVAVGTTSVRSLESAARDGVLKPFSGDTDIFIFPGRPFHVVDCLVTNFHLPESTLLMLVSAFAGYPETMAAYQAAMEXEYRFFSYGDAMFITRNPAPRGPEDKE

SEQ ID NO: 70965 - protein, 349 aa, Pseudomonas mandelii
  misc_feature (1)..(349): tr|A0A059KVI8|A0A059KVI8_9PSED S-adenosylmethionine:tRN A ribosyltransferase-isomerase OS=Pseudomonas mandelii PD30 OX=1419583 GN=queA PE=3 SV=1
MRVADFTFELPDSLIARHPLAERRNSRLLTLDGVSGALAHRQFTDLLEHLRPGDLMVFNNTRVIPARLFGQKASGGKLEILVERVLDSHRVLAHVRSSKSPKPGSKILIDGGGEAEMLARHDALFELGFAEEVLPLLDRVGHMPLPPYIDRPDEGSDRERYQTVYAERLGAVAAPTAGLHFDQPLMEAIAAKGVETAFVTLHVGAGTFQPVRVEKIEDHHMHSEWLEVGQDVVDAVEACRARGGRVVAVGTTSVRSLESAARDGVLKPFSGDTDIFIYPGRPFHVVDALVTNFHLPESTLLMLVSAFAGYPETMAAYKAAVDNEYRFFSYGDAMFITRNPAPRGPEETE

SEQ ID NO: 70966 - protein, 349 aa, Pseudomonas marginalis
  misc_feature (1)..(349): tr|A0A3M5PNK5|A0A3M5PNK5_PSEMA S-adenosylmethionine:tRN A ribosyltransferase-isomerase OS=Pseudomonas marginali s pv. marginalis OX=97473 GN=queA PE=3 SV=1
MRVADFTFELPDSLIARHPLAERRASRLLTLDGVSGALAHRQFTDLLEHLRPGDLMVFNNTRVIPARLFGQKASGGKLEILVERVLDTHRVLAHVRSSKSPKPGSSILIDGGGEAEMVARHDALFELKFAEEVLPLLERVGHMPLPPYIDRPDEDSDRERYQTVYSQRLGAVAAPTAGLHFDQPLLDAIAAKGVETAYVTLHVGAGTFQPVRVDNIEDHHMHSEWLEVSQDVVDAVAACKARGGRVVAVGTTSVRSLESAARDGVLKPFSGDTDIFIFPGRPFHVVDCLVTNFHLPESTLLMLVSAFAGYPETMAAYQAAIDNGYRFFSYGDAMFITRNPAPRGPEETL

SEQ ID NO: 70967 - protein, 354 aa, Pseudomonas marginalis
  misc_feature (1)..(354): tr|A0A0W0LT67|A0A0W0LT67_PSEMA S-adenosylmethionine:tRN A ribosyltransferase-isomerase OS=Pseudomonas marginali s ICMP 11289 OX=1198318 GN=queA PE=3 SV=1
MRVADFTFDLPDSLIARHPLAERRSSRLLTLDGVSGALAHRQFTDLLEHLRPGDLMVFNNTRVIPARLFGQKASGGKLEILVERVLDSHRVLAHVRSSKSPKPGSSILIDGGGEAEMVARHDALFELRFAEEVLPLLDRVGHMPLPPYIDRPDEGADRERYQTVYAERAGAVAAPTAGLHFDQPLLEAIAAKGVETTFVTLHVGAGTFQPVRVEQIEDHHMHTEWLEVGQDVVDAVAACRARGGRVIAVGTTSVRSLESAARDGVLKPFSGDTDIFIYPGRPFHVVDALVTNFHLPESTLLMLVSAFAGYPETMAAYAAAIEHGYRFFSYGDAMFITRNPAPTAPQESVPEDHA

SEQ ID NO: 70968 - protein, 376 aa, Pseudomonas marincola
  misc_feature (1)..(376): tr|A0A1I7DCI6|A0A1I7DCI6_9PSED S-adenosylmethionine:tRN A ribosyltransferase-isomerase OS=Pseudomonas marincola OX=437900 GN=queA PE=3 SV=1
MPLVNALRGQFLHFPLNFCALLYDPPAMRVADFRFELPETLIARHPLAERRASRLLTLDGPTGEINHRQFADVLDHLQPGDLMVFNNTRVIPARLFGQKASGGKLEVLVERVLDAYRVLAHVRSSKSPKPGSMILIDGGGEAEMLARHDALFELRFNEPVLPLLERVGHMPLPPYIDRPDEAADRERYQTVYAERAGAVAAPTAGLHFDQPLMEAIAAKGVSTAFVTLHVGAGTFQPVRVERIEDHHMHTEWLEVSQEVVDAVAACRARGGRVVAVGTTSVRSLESAARDGVLKPFSGDTDIFIYPGRPFHVVDALVTNFHLSESTLLMLVSAFAGYPETMAAYKSAVAEAYRFFSYGDAMFITRNPAARGPEEQV

SEQ ID NO: 70969 - protein, 349 aa, Pseudomonas mediterranea
  misc_feature (1)..(349): tr|A0A0A4GJF5|A0A0A4GJF5_9PSED S-adenosylmethionine:tRN A ribosyltransferase-isomerase OS=Pseudomonas mediterra nea CFBP 5447 OX=1348058 GN=queA PE=3 SV=1
MRVADFTFELPDSLIARHPLAERRASRLLTLDGVSGAMAHRQFTDLLEHLRPGDLMVFNNTRVIPARLFGQKASGGKLEILVERVLDSHRVLAHVRSSKSPKPGSSILIDGGGEAVMVARHDALFELKFAEEVLPLLDRVGHMPLPPYIDRPDEGSDRERYQTVYAERLGAVAAPTAGLHFDQPLLEAIAAKGVETTFVTLHVGAGTFQPVRVERIEDHHMHSEWLEVSQDVVDAVAACRARGGRVVAVGTTSVRSLESAARDGVLKPFSGDTDIFIYPGRPFHVVDALVTNFHLPESTLLMLVSAFAGYPEAMAAYKAAVEHGYRFFSYGDAMFITRNPAPRGPEETV

SEQ ID NO: 70970 - protein, 354 aa, Pseudomonas meliae; identical to SEQ ID NO: 70868
  misc_feature (1)..(354): tr|A0A0P9U7F3|A0A0P9U7F3_9PSED S-adenosylmethionine:tRN A ribosyltransferase-isomerase OS=Pseudomonas meliae OX =86176 GN=queA PE=3 SV=1

SEQ ID NO: 70971 - protein, 347 aa, Pseudomonas mendocina
  misc_feature (1)..(347): sp|A4XY53|QUEA_PSEMY S-adenosylmethionine:tRNA ribosylt ransferase-isomerase OS=Pseudomonas mendocina (strain y mp) OX=399739 GN=queA PE=3 SV=1
MRVADFHFDLPESLIARHPLAERRASRLLQLDGPSGALRHGQFTDLLEQLRPGDLMVFNNTRVIPARLFGQKASGGRLEVLVERVLDQHRVLAHVRSSKSPKPGSQILIEGGGEAEMVARHDALFELRFAEPVLPLLERVGHMPLPPYIDRPDDEADRERYQTVYAEKAGAVAAPTAGLHFDDELLAAIRAKGVETAFVTLHVGAGTFQPVRVERIEDHHMHSEWLEVSQEVVDAVAACRARGGRVVAVGTTSVRSLETAAQSSELKPFSGDTDIFIYPGRPFHVVDALVTNFHLPESTLLMLVSAFAGYAETMAAYRAAVEQGYRFFSYGDAMFITRNPAARGPEV

SEQ ID NO: 70972 - protein, 347 aa, Pseudomonas mendocina
  misc_feature (1)..(347): tr|A0A379IRF1|A0A379IRF1_PSEME S-adenosylmethionine:tRN A ribosyltransferase-isomerase OS=Pseudomonas mendocina OX=300 GN=queA PE=3 SV=1
MRVADFHFDLPESLIARHPLAERRASRLLQLDGPSGALRHGQFTDVLEQLRPGDLMVFNNTRVIPARLFGQKASGGKLEILVERVLDQHRVLAHVRSSKSPKPGSQILIEGGGEAEMVARHNALFELRFAEPVLALLERVGHMPLPPYIDRPDEEADRERYQTVYAEKAGAVAAPTAGLHFDDELLAAIRAKGVETAFVTLHVGAGTFQPVRVKRIEDHHMHSEWLEVSQDVVDAVAACRARCGRVVAVGTTSVRSLETAARDGELKPFSGDTDIFIYPGRPFHVVDALVTNFHLPESTLLMLVSAFAGYSETMAAYREAVAQGYRFFSYGDAMFITRNPAARGPEV

SEQ ID NO: 70973 - protein, 349 aa, Pseudomonas migulae
  misc_feature (1)..(349): tr|A0A1H5G2V3|A0A1H5G2V3_9PSED S-adenosylmethionine:tRN A ribosyltransferase-isomerase OS=Pseudomonas migulae O X=78543 GN=queA PE=3 SV=1
MRVADFTFELPDSLIARHPLAERRNSRLLTLDGVSGALAHRQFTDLLEHLRPGDLMVFNNTRVIPARLFGQKASGGKLEILVERVLDSHRVLAHVRSSKSPKPGSKILIDGGGEAEMLARHDALFELGFSEEVLPLLDRVGHMPLPPYIDRPDEGSDRERYQTVYAERLGAVAAPTAGLHFDQPLMEAIAAKGVETAFVTLHVGAGTFQPVRVEKIEDHHMHSEWLEVGQDVVDAVAACRARGGRVVAVGTTSVRSLESAARDGVLKPFSGDTDIFIYPGRPFHVVDALVTNFHLPESTLLMLVSAFAGYPEAMAAYKAAVEHEYRFFSYGDAMFITRNPAPRGPEETE

SEQ ID NO: 70974 - protein, 354 aa, Pseudomonas mohnii
  misc_feature (1)..(354): tr|A0A1H4Y409|A0A1H4Y409_9PSED S-adenosylmethionine:tRN A ribosyltransferase-isomerase OS=Pseudomonas mohnii OX =395600 GN=queA PE=3 SV=1
MRVADFTFELPDSLIARHPLAERRNSRLLTLDGVSGALAHRQFTDLLEHLRPGDLMVFNNTRVIPARLFGQKASGGKLEILVERVLDSHRVLAHVRSSKSPKPGSKILIDGGGEAEMLARHDALFELGFAEEVLPLLDRVGHMPLPPYIDRPDEGSDRERYQTVYAQRLGAVAAPTAGLHFDQPLMEAIAAKGVETAFVTLHVGAGTFQPVRVDKIEDHHMHSEWLEVGQDVVDAVAACRARGGRVVAVGTTSVRSLESAARDGVLKPFSGDTDIFIYPGRPFHVVDALVTNFHLPESTLLMLVSAFAGYPETMAAYKAAVDNGYRFFSYGDAMFITRNPAPTAPKESGPEETV

SEQ ID NO: 70975 - protein, 349 aa, Pseudomonas monteilii
  misc_feature (1)..(349): tr|V9UV99|V9UV99_9PSED S-adenosylmethionine:tRNA ribosy ltransferase-isomerase OS=Pseudomonas monteilii SB3101 OX=1435058 GN=queA PE=3 SV=1
MRVADFSFELPDSLIARHPLAERHGSRLLVLDGPTGALAHRQFPDLLEYLRPGDLMVFNNTRVIPARLFGQKASGGKLEVLVERVLDSHRVLAHVRASKAPKVGAVILIDGGGEAEMVARHDTLFELRFTEEVLPLLDRVGHMPLPPYIDRPDEGADRERYQTVYAERAGAVAAPTAGLHFDEALLEKIAAKGVERAFVTLHVGAGTFQPVRVDKIEDHHMHKEWLEVSQEVVDAIEACRARGGRVIAVGTTSVRSLESAARDGVLKAFSGDTDIFIYPGRPFHVVDALVTNFHLPESTLLMLVSAFAGYPETMAAYAAAVEQGYRFFSYGDAMFITRNPAPRGPEDQA

SEQ ID NO: 70976 - protein, 349 aa, Pseudomonas monteilii; identical to SEQ ID NO: 70975
  misc_feature (1)..(349): tr|A0A136QKI5|A0A136QKI5_9PSED S-adenosylmethionine:tRN A ribosyltransferase-isomerase OS=Pseudomonas monteilii OX=76759 GN=queA PE=3 SV=1

SEQ ID NO: 70977 - protein, 354 aa, Pseudomonas moorei
  misc_feature (1)..(354): tr|A0A1H0Y3X1|A0A1H0Y3X1_9PSED S-adenosylmethionine:tRN A ribosyltransferase-isomerase OS=Pseudomonas moorei OX =395599 GN=queA PE=3 SV=1
MRVADFTFELPDSLIARHPLAERRNSRLLTLDGVSGALAHRQFTDLLEHLRPGDLMVFNNTRVIPARLFGQKASGGKLEILVERVLDSHRVLAHVRSSKSPKPGSKILIDGGGEAEMLARHDALFELGFAEEVLPLLDRVGHMPLPPYIDRPDEGADRERYQTVYAERLGAVAAPTAGLHFDQPLLEAIAAKGVETAFVTLHVGAGTFQPVRVDKIEDHHMHSEWLEVGQDVVDAVAACRARGGRVVAVGTTSVRSLESAARDGVLKPFSGDTDIFIYPGRPFHVVDALVTNFHLPESTLLMLVSAFAGYPETMAAYKAAVDNGYRFFSYGDAMFITRNPAPTAPKESGPEETV

SEQ ID NO: 70978 - protein, 354 aa, Pseudomonas moorei
  misc_feature (1)..(354): tr|A0A4Q7H4B0|A0A4Q7H4B0_9PSED S-adenosylmethionine:tRN A ribosyltransferase-isomerase OS=Pseudomonas moorei OX =395599 GN=queA PE=3 SV=1
MRVADFTFELPDSLIARHPLAERRNSRLLTLDGVSGALAHRQFTDLLEHLRPGDLMVFNNTRVIPARLFGQKASGGKLEILVERVLDSHRVLAHVRSSKSPKPGSKILIDGGGEAEMLARHDALFELGFAEEVLPLLDRVGHMPLPPYIDRPDEGSDRERYQTVYAERLGAVAAPTAGLHFDQPLMEAIAAKGVETAFVTLHVGAGTFQPVRVDKIEDHHMHSEWLEVGQDVVDAVAACRARGGRVVAVGTTSVRSLESAARDGVLKPFSGDTDIFIYPGRPFHVVDALVTNFHLPESTLLMLVSAFAGYPETMAAYKAAVDNGYRFFSYGDAMFITRNPAPTAPKESGPEETV

SEQ ID NO: 70979 - protein, 354 aa, Pseudomonas moraviensis
  misc_feature (1)..(354): tr|V8R365|V8R365_9PSED S-adenosylmethionine:tRNA ribosy ltransferase-isomerase OS=Pseudomonas moraviensis R28-S OX=1395516 GN=queA PE=3 SV=1
MRVADFTFELPDSLIARHPLAERRGSRLLTLDGPSGALAHRQFTDLLEHLRPGDLMVFNNTRVIPARLFGQKASGGKLEILIERVLDAHRVLAHVRSSKSPKPGSKILIDGGGEAEMLARHDALFELGFAEEVLPLLDRVGHMPLPPYIDRPDEGSDRERYQTVYAQRLGAVAAPTAGLHFDEPLMQAIAAKGVETAFVTLHVGAGTFQPVRVEKIEDHHMHSEWLEVGQDVVDAVAACRARGGRVIAVGTTSVRSLESAARDGVLKPFSGDTDIFIYPGRPFHVVDALVTNFHLPESTLLMLVSAFAGYPETMAAYKAAVENGYRFFSYGDAMFITRNPAPTAPEQTGPEETE

SEQ ID NO: 70980 - protein, 354 aa, Pseudomonas moraviensis; identical to SEQ ID NO: 70979
  misc_feature (1)..(354): tr|A0A1Q3I7B6|A0A1Q3I7B6_9PSED S-adenosylmethionine:tRN A ribosyltransferase-isomerase OS=Pseudomonas moraviens is OX=321662 GN=queA PE=3 SV=1

SEQ ID NO: 70981 - protein, 349 aa, Pseudomonas mosselii
  misc_feature (1)..(349): tr|A0A290GZF5|A0A290GZF5_9PSED S-adenosylmethionine:tRN A ribosyltransferase-isomerase OS=Pseudomonas mosselii OX=78327 GN=queA PE=3 SV=1
MRVADFSFELPDSLIARHPLAERHGSRLLVLDGPSGELAHKQFTDLLDYLRPGDLMVFNNTRVIPARLFGQKASGGKLEVLVERVLDSHRVLAHVRASKAPKEGTQILIDGGGEAEMVARHDTLFELRFSEEVLPLLERVGHMPLPPYIDRPDEGADRERYQTVYAERAGAVAAPTAGLHFDEELLAKIAAKGVERAFVTLHVGAGTFQPVRVDKIEDHTMHKEWLEVSQDVVDAVAACRARGGRVIAVGTTSVRSLESAARDGELKAFSGDTDIFIFPGRPFHVVDCLVTNFHLPESTLLMLVSAFAGYPETMAAYAAAVENGYRFFSYGDAMFITRNPAPRGPEDQA

SEQ ID NO: 70982 - protein, 349 aa, Pseudomonas mosselii
  misc_feature (1)..(349): tr|A0A2V4M456|A0A2V4M456_9PSED S-adenosylmethionine:tRN A ribosyltransferase-isomerase OS=Pseudomonas mosselii OX=78327 GN=queA PE=3 SV=1
MRVADFSFELPDSLIARHPLAERHGSRLLVLDGPSGTLAHKQFTDLLEYLRPGDLMVFNNTRVIPARLFGQKASGGKLEVLVERVLDSHRVLAHVRASKAPKEGTQILIDGGGEAEMVARHDTLFELRFSEEVLPLLERVGHMPLPPYIDRPDEGADRERYQTVYAERAGAVAAPTAGLHFDEALLAKIAAKGVERAFVTLHVGAGTFQPVRVDKIEDHTMHKEWLEVSQDVVDAVAACRARGGRVIAVGTTSVRSLESAARDGELKAFSGDTDIFIFPGRPFHVVDCLVTNFHLPESTLLMLVSAFAGYPETMAAYAAAVENGYRFFSYGDAMFITRNPAPRGPEDQA

SEQ ID NO: 70983 - protein, 354 aa, Pseudomonas mucidolens
  misc_feature (1)..(354): tr|A0A1H2NEL3|A0A1H2NEL3_9PSED S-adenosylmethionine:tRN A ribosyltransferase-isomerase OS=Pseudomonas mucidolen s OX=46679 GN=queA PE=3 SV=1
MRVADFTFELPDSLIARHPLAERRASRLLTLDGVSGALAHRQFTDLLEHLRPGDLMVFNNTRVIPARLFGQKASGGKLEILVERVLDSHRVLAHVRSSKSPKPGSSILIEGGGEAQMVARHDALFELKFAEEVLPLLERVGHMPLPPYIDRPDEDADRERYQTVYSERLGAVAAPTAGLHFDQPLLESIAAKGVETAYVTLHVGAGTFQPVRVDNIEDHHMHSEWLEVSQQVVDAVNACRARGGRVVAVGTTSVRSLESAARDGVLKPFSGDTDIFIYPGRPFHVVDALVTNFHLPESTLLMLVSAFAGYPQTMAAYQAAIDNGYRFFSYGDAMFITRNPAPTAPKEPGPEEQV

SEQ ID NO: 70984 - protein, 349 aa, Pseudomonas nabeulensis
  misc_feature (1)..(349): tr|A0A4Z0AWY6|A0A4Z0AWY6_9PSED S-adenosylmethionine:tRN A ribosyltransferase-isomerase OS=Pseudomonas nabeulens is OX=2293833 GN=queA PE=3 SV=1
MRVADFTFELPDSLIARHPLAERRASRLLTLDGVSGALAHRQFTDLLEHLRPGDLMVFNNTRVIPARLFGQKASGGKLEILVERVLDSHRVLAHVRSSKSPKPGASILIDGGGEAEMVARHDALFELKFAEEVLPLLERVGHMPLPPYIDRPDEDSDRERYQTVYSQRLGAVAAPTAGLHFDQPLLDAIAAKGVETAYVTLHVGAGTFQPVRVDNIEDHHMHSEWLEVTQEVVDAVTACKARGGRVVAVGTTSVRSLESAARDGVLKPFSGDTDIFIFPGRPFHVVDCLVTNFHLPESTLLMLVSAFAGYPETMAAYQAAIDNGYRFFSYGDAMFITRNPAPRGPEEQL

SEQ ID NO: 70985 - protein, 347 aa, Pseudomonas nitroreducens
  misc_feature (1)..(347): tr|A0A2D0AD84|A0A2D0AD84_9PSED S-adenosylmethionine:tRN A ribosyltransferase-isomerase OS=Pseudomonas nitroredu cens OX=46680 GN=queA PE=3 SV=1
MRVADFHFDLPEALIARHPLPERRSSRLLVLDGPSGELSHRQFADILGFLRPGDLMVFNNTRVIPARLFGQKASGGKLEILVERVLDSHRVLAHVRSSKSPKPGSKILIDGGGEAEMLQRHDALFELGFSEDVLPLLERVGHMPLPPYIDRPDEDADRERYQTVYAERAGAVAAPTAGLHFDEALLESIRAKGVETAFVTLHVGAGTFQPVRVERIEDHHMHNEWLEVSQDVVDAVAACRARGGRVVAVGTTSVRSLESAARDGVLKPFSGDTDIFIFPGRPFHVVDALVTNFHLPESTLLMLVSAFAGYPETMAAYAAAVEQGYRFFSYGDAMFITRNPAPRGPED

SEQ ID NO: 70986 - protein, 347 aa, Pseudomonas nitroreducens
  misc_feature (1)..(347): tr|A0A239C5D2|A0A239C5D2_9PSED S-adenosylmethionine:tRN A ribosyltransferase-isomerase OS=Pseudomonas nitroredu cens OX=46680 GN=queA PE=3 SV=1
MRVADFHFDLPEALIARHPLPERRSSRLLVLDGASGELSHRQFADILGFLQPGDLMVFNNTRVIPARLFGQKASGGKLEILVERVLDSHRVLAHVRSSKSPKPGSKILIDGGGEAEMLQRHDALFELGFSEDVLPLLERVGHMPLPPYIDRPDEDADRERYQTVYAERAGAVAAPTAGLHFDEALLESIRAKGVETAFVTLHVGAGTFQPVRVERIEDHHMHNEWLEVSQEVVDAVAACKARGGRVVAVGTTSVRSLESAARDGVLKPFSGDTDIFIFPGRPFHVVDALVTNFHLPESTLLMLVSAFAGYPETMAAYAAAVEQGYRFFSYGDAMFITRNPAPRGPED

SEQ ID NO: 70987 - protein, 349 aa, Pseudomonas oceani
  misc_feature (1)..(349): tr|A0A2P4ETF2|A0A2P4ETF2_9PSED S-adenosylmethionine:tRN A ribosyltransferase-isomerase OS=Pseudomonas oceani OX =1708783 GN=queA PE=3 SV=1
MRLSDFHFELPDELIARHPLAERRGSRLLCLDGPTGQLAHRQFVDLLEYLRPGDLMVFNNTRVIPARLFGRKQTGGVLEVLVERVLDEYRVLAHIRASKSPKAGSRILIDGGAEAEMVARHDALFELRFAEPVLPLLQRVGHMPLPPYIDRPDDEADRERYQTVYAKREGAVAAPTAGLHFDRALLDAIAKLGVDTAEVTLHVGAGTFQPVRVEKIEEHVMHQEWLEVTPEVVAAVEACKARGGRVIAVGTTSVRSLESAARDGVLKPFSGDTDIFLYPGKPFHVVDALITNFHLPESTLLMLVSAFAGYPETMAAYHTAVAEKYRFFSYGDAMFITRNPAPTGPEVSS

SEQ ID NO: 70988 - protein, 347 aa, Pseudomonas oleovorans
  misc_feature (1)..(347): tr|A0A061D0R6|A0A061D0R6_PSEOL S-adenosylmethionine:tRN A ribosyltransferase-isomerase OS=Pseudomonas oleovoran s OX=301 GN=queA PE=3 SV=1
MRVADFHFDLPESLIARHPLAERRASRLLQLDGPSGELRHGQFTDVLEQLRPGDLMVFNNTRVIPARLFGQKASGGKLEVLVERVLDQYRVLAHVRSSKSPKPGSQILIDGGGEAEMVARHDALFELRFAEPVLPLLERVGHMPLPPYIDRPDDEADRERYQTVYAQKAGAVAAPTAGLHFDDELLAAIRAKGVETAFVTLHVGAGTFQPVRVERIEDHHMHSEWLEVGQDVVDAVAACRARGGRVVAVGTTSVRSLETAARDGELKPFSGDTDIFIYPGRPFHVVDALVTNFHLPESTLLMLVSAFAGYAETMAAYREAVAQGYRFFSYGDAMFITRNPAARGPEV

SEQ ID NO: 70989 - protein, 347 aa, Pseudomonas oleovorans
  misc_feature (1)..(347): tr|A0A3R8WBL8|A0A3R8WBL8_PSEOL S-adenosylmethionine:tRN A ribosyltransferase-isomerase OS=Pseudomonas oleovoran s OX=301 GN=queA PE=3 SV=1
MRVADFHFDLPESLIARHPLAERRASRLLQLDGPSGELRHGQFTDVLEQLRPGDLMVFNNTRVIPARLFGQKASGGKLEVLVERVLDQYRVLAHVRSSKSPKPGSQILIDGGGEAEMVARHDALFELRFAEPVLPLLERVGHMPLPPYIDRPDDEADRERYQTVYAQKAGAVAAPTAGLHFDDELLAAIRAKGVDAAFVTLHVGAGTFQPVRVERIEDHHMHSEWLEVGQDVVDAVAACRARGGRVVAVGTTSVRSLETAARDGELKPFSGDTDIFIYPGRPFHVVDALVTNFHLPESTLLMLVSAFAGYPETMAAYREAVAQGYRFFSYGDAMFITRNPAARGPEV

SEQ ID NO: 70990 - protein, 349 aa, Pseudomonas orientalis
  misc_feature (1)..(349): tr|A0A3G7XM97|A0A3G7XM97_9PSED S-adenosylmethionine:tRN A ribosyltransferase-isomerase OS=Pseudomonas orientali s OX=76758 GN=queA PE=3 SV=1
MRVADFTFELPDSLIARHPLAERRASRLLTLDGPSGALAHRQFTDLLEHLRPGDLMVFNNTRVIPARLFGQKASGGKLEILVERVLDSHRVLAHVRSSKSPKPGSSILIDGGGEAEMVARHDALFELKFAEEVLPLLERVGHMPLPPYIDRPDEDADRERYQTVYSQRLGAVAAPTAGLHFDQPLLDAIAAKGVESAYVTLHVGAGTFQPVRVEYIEDHHMHSEWLEVSQDVVDAVNACKARGGRVVAVGTTSVRSLESAARDGVLKPFSGDTDIFIFPGRPFHVVDCLVTNFHLPESTLLMLVSAFAGYPETMAAYQAAIANEYRFFSYGDAMFITRNPAPRGPEDNL

SEQ ID NO: 70991 - protein, 349 aa, Pseudomonas orientalis
  misc_feature (1)..(349): tr|A0A0R2ZW66|A0A0R2ZW66_9PSED S-adenosylmethionine:tRN A ribosyltransferase-isomerase OS=Pseudomonas orientali s OX=76758 GN=queA PE=3 SV=1
MRVADFTFELPDSLIARHPLAERRASRLLTLDGPSGALAHRQFTDLLEHLRPGDLMVFNNTRVIPARLFGQKASGGKLEILVERVLDSHRVLAHVRSSKSPKPGSSILIDGGGEAQMVARHDALFELRFAEEVLPLLERVGHMPLPPYIDRPDEDADRERYQTVYSQRLGAVAAPTAGLHFDQPLLDAIAAKGVESAYVTLHVGAGTFQPVRVENIEDHHMHSEWLEVSQDVVDAVNACKARGGRVVAVGTTSVRSLESAARDGVLKPFSGDTDIFIFPGRPFHVVDCLVTNFHLPESTLLMLVSAFAGYPETMAAYQAAIANEYRFFSYGDAMFITRNPAPRGPEEQL

SEQ ID NO: 70992 - protein, 351 aa, Pseudomonas oryzae
  misc_feature (1)..(351): tr|A0A1H1L6R0|A0A1H1L6R0_9PSED S-adenosylmethionine:tRN A ribosyltransferase-isomerase OS=Pseudomonas oryzae OX =1392877 GN=queA PE=3 SV=1
MRVADFHFELPDQLIARHPLAERRASRLLVLDGPSGELSHRQFPDLLGYLRPGDLMVFNDTRVIPARLFGQKASGGRLEILVERLLDSHRVLAHVRASKSPKPGSLIHIDGGGAAEMLARHDALFELRFAEPALELLERVGHMPLPPYIDRPDEAADRERYQTVYSDKGKAGAVAAPTAGLHFDDALLAAIRAKGVDTAFVTLHVGAGTFQPVRVERIEDHHMHSEWLQVGQDVVDAVAACRARGGRVIAVGTTSVRSLESAARDGVLKPFSGDTDIFLYPGRPFHVVDALVTNFHLPESTLLMLVSAFAGYPETMAAYRAAVAEGYRFFSYGDAMFITRNPAPRGPEETP

SEQ ID NO: 70993 - protein, 347 aa, Pseudomonas oryzihabitans
  misc_feature (1)..(347): tr|A0A0U4XQW8|A0A0U4XQW8_9PSED S-adenosylmethionine:tRN A ribosyltransferase-isomerase OS=Pseudomonas oryzihabi tans OX=47885 GN=queA PE=3 SV=1
MHVADFHFDLPESLIARHPLAERRGSRLLVLDGPTGELNHRHFGDLLGYLQPGDLMVFNDTRVIPARLFGQKASGGKLEILVERVLDEERVLAHVRSSKSPKPGSRILIDGGAEAEMVARHEALFELKFAEPVLPLLERVGHMPLPPYIDRPDEAEDRERYQTVYARNAGAVAAPTAGLHFDEPLLDAIRAKGVATAFVTLHVGAGTFQPVRVERIEDHHMHREWLQVDQAVVDAVAACRARGGRVIAVGTTSVRSLESASRDGQLKAFSGETDIFLYPGRPFHVVDALVTNFHLPESTLLMLVSAFAGYRETMAAYATAVAEGYRFFSYGDAMFITRNPGAQGPES

SEQ ID NO: 70994 - protein, 347 aa, Pseudomonas oryzihabitans
  misc_feature (1)..(347): tr|A0A2Z5A968|A0A2Z5A968_9PSED S-adenosylmethionine:tRN A ribosyltransferase-isomerase OS=Pseudomonas oryzihabi tans OX=47885 GN=queA PE=3 SV=1
MHVADFHFDLPESLIARHPLAERRGSRLLVLDGPSGELSHRHFADLLGYLRPGDLMVFNDTRVIPARLFGQKASGGKLEILVERVLDEERVLAHVRSSKSPKPGSRILIDGGAEAEMVARHEALFELKFAEPVLPLLERVGHMPLPPYIDRPDEAEDRERYQTVYARNAGAVAAPTAGLHFDEPLLEAIRAKGVATAFVTLHVGAGTFQPVRVERIEDHHMHREWLQVDPAVVDAVAACRARGGRVIAVGTTSVRSLESAARDGELQAFAGETDIFLYPGRPFHVVDALVTNFHLPESTLLMLVSAFAGYRETMTAYATAVAEGYRFFSYGDAMFITRNPGAQGPES

SEQ ID NO: 70995 - protein, 349 aa, Pseudomonas otitidis
  misc_feature (1)..(349): tr|A0A1I0UDY7|A0A1I0UDY7_9PSED S-adenosylmethionine:tRN A ribosyltransferase-isomerase OS=Pseudomonas otitidis OX=319939 GN=queA PE=3 SV=1
MRVADFHFDLPEHLIARHPLSERRASRLLVLDGASGEMAHRGFADLLDYLRPGDLMVFNNTRVIPARLFGQKASGGKLEILVERVLDSHRVLAHVRSSKSPKPGSTILIDGGAEATMLARHDALFELGFAEEVLPLLERVGHMPLPPYIDRPDEDADRERYQTVYAQHAGAVAAPTAGLHFDQALLDAIAAKGVERAFVTLHVGAGTFQPVRVERIEDHHMHSEWLEVKQDVVDAVAACRARGGRVIAVGTTSVRSLESAARDGQLKPFSGDTDIFLYPGRPFHVVDALVTNFHLPESTLLMLVSAFAGYPETMAAYGAAVEQGYRFFSYGDAMFITRNPAPRGPEDLA

SEQ ID NO: 70996 - protein, 349 aa, Pseudomonas pachastrellae; identical to SEQ ID NO: 70817
  misc_feature (1)..(349): tr|A0A1S8DEE7|A0A1S8DEE7_9PSED S-adenosylmethionine:tRN A ribosyltransferase-isomerase OS=Pseudomonas pachastre llae OX=254161 GN=queA PE=3 SV=1

SEQ ID NO: 70997 - protein, 354 aa, Pseudomonas palleroniana
  misc_feature (1)..(354): tr|A0A2L1JAU9|A0A2L1JAU9_9PSED S-adenosylmethionine:tRN A ribosyltransferase-isomerase OS=Pseudomonas palleroni ana OX=191390 GN=queA PE=3 SV=1
MRVADFTFELPDSLIARHPLAERRASRLLTLDGVSGALAHRQFTDLLEHLRPGDLMVFNNTRVIPARLFGQKASGGKLEILVERVLDSHRVLAHVRSSKSPKPGSVILIDGGGEAEMVARHDALFELKFAEEVLPLLERVGHMPLPPYIDRPDEDADRERYQTVYSQRPGAVAAPTAGLHFDQPLLEAIAAKGVETAYVTLHVGAGTFQPVRVDNIEDHHMHSEWLEVSQDVVDAVNACKARGGRVVAVGTTSVRSLESAARDGVLKPFSGDTDIFIYPGRPFHVVDCLVTNFHLPESTLLMLVSAFAGYPETMAAYQAAIANEYRFFSYGDAMFITRNPAPTAPGEAGPEEQP

SEQ ID NO: 70998 - protein, 354 aa, Pseudomonas palleroniana
  misc_feature (1)..(354): tr|A0A1H5M2D6|A0A1H5M2D6_9PSED S-adenosylmethionine:tRN A ribosyltransferase-isomerase OS=Pseudomonas palleroni ana OX=191390 GN=queA PE=3 SV=1
MRVADFTFELPDSLIARHPLAERRASRLLTLDGVSGALAHRQFTDLLEHLRPGDLMVFNNTRVIPARLFGQKASGGKLEILVERVLDSHRVLAHVRSSKSPKPGSAILIDGGGEAEMVARHDALFELKFAEEVLPLLERVGHMPLPPYIDRPDEDADRERYQTVYSQRPGAVAAPTAGLHFDQPLLEAIAAKGVETAYVTLHVGAGTFQPVRVDNIEDHHMHSEWLEVGQDVVDAVNACKARGGRVVAVGTTSVRSLESAARDGVLKPFSGDTDIFIYPGRPFHVVDCLVTNFHLPESTLLMLVSAFAGYPETMAAYQAAIANEYRFFSYGDAMFITRNPAPTAPGEAGPEEQP

SEQ ID NO: 70999 - protein, 349 aa, Pseudomonas panacis
  misc_feature (1)..(349): tr|A0A1H4IKH0|A0A1H4IKH0_PSEPA S-adenosylmethionine:tRN A ribosyltransferase-isomerase OS=Pseudomonas panacis O X=307251 GN=queA PE=3 SV=1
MRVADFTFELPDSLIARHPLAERRASRLLTLDGLSGALAHRQFTDLLEHLRPGDLMVFNNTRVIPARLFGQKASGGKLEILVERVLDSHRVLAHVRSSKSPKPGSTLLIDGGGEAEMVARHDALFELKFAEEVLPLLERVGHMPLPPYIDRPDEDADRERYQTVYSQRLGAVAAPTAGLHFDQPLLDAIAAKGVESAYVTLHVGAGTFQPVRVDNIEDHHMHSEWLEVSQDVVDAVYACKARGGRVIAVGTTSVRSLESAARDGVLKPFSGDTDIFIYPGRPFHVVDALVTNFHLPESTLLMLVSAFAGYPETMAAYQAAIDNGYRFFSYGDAMFITRNPAPRGPEEQL

SEQ ID NO: 71000 - protein, 347 aa, Pseudomonas panipatensis
  misc_feature (1)..(347): tr|A0A1G8DW07|A0A1G8DW07_9PSED S-adenosylmethionine:tRN A ribosyltransferase-isomerase OS=Pseudomonas panipaten sis OX=428992 GN=queA PE=3 SV=1
MRVADFHFDLPEALIARHPLAERRASRLLVLDGPSGTLSHRQFTDLLEYLEPGDLMVFNNTRVIPARLFGQKASGGKLEILVERVLDNRRVLAHVRSSKSPKPGSTILIDGGGEAEMLQRHDALFELGFAEDVLPLLERVGHMPLPPYIDRPDEDADRERYQTVYAERAGAVAAPTAGLHFDQGLLDAIREKGVETAFVTLHVGAGTFQPVRVERIEDHHMHREWLEVSQQVVDAVAACRARGGRVIAVGTTSVRSLESAARDGQLKPFSGDTDIFLYPGRPFHVVDALVTNFHLPESTLLMLVSAFAGYPETMAAYAAAVEQQYRFFSYGDAMFITRNPAPRGPED

SEQ ID NO: 71001 - protein, 354 aa, Pseudomonas parafulva; identical to SEQ ID NO: 70934
  misc_feature (1)..(354): tr|A0A497UEH8|A0A497UEH8_9PSED S-adenosylmethionine:tRN A ribosyltransferase-isomerase OS=Pseudomonas parafulva OX=157782 GN=queA PE=3 SV=1

SEQ ID NO: 71002 - protein, 349 aa, Pseudomonas parafulva
  misc_feature (1)..(349): tr|A0A0A7JGH5|A0A0A7JGH5_9PSED S-adenosylmethionine:tRN A ribosyltransferase-isomerase OS=Pseudomonas parafulva OX=157782 GN=queA PE=3 SV=1
MRVADFSFELPDSLIARHPLAERHGSRLLVLDGPSGELAHRRFTDLLEYLRPGDLMVFNNTRVIPARLFGQKASGGKLEMLIERVLDSHRVLAHVRASKALKVGATVLIDGGGEAEMVARHETLFELRFSEEVLPLLDRVGHMPLPPYIDRPDEGADRERYQTVYAERAGAVAAPTAGLHFDEALLAQISAKGVARAFVTLHVGAGTFQPVRVDKIEDHHMHKEWLEVSQDVVDAIDACRARGGRVIAVGTTSVRSLESAARDGVLKAFSGDTDIFIYPGRPFHVVDALVTNFHLPESTLLMLVSAFAGYPETMAAYAAAVEQGYRFFSYGDAMFITRNPAPRGPEDQA

SEQ ID NO: 71003 - protein, 349 aa, Pseudomonas paralactis
  misc_feature (1)..(349): tr|A0A0R3AA87|A0A0R3AA87_9PSED S-adenosylmethionine:tRN A ribosyltransferase-isomerase OS=Pseudomonas paralacti s OX=1615673 GN=queA PE=3 SV=1
MRVADFTFELPDSLIARHPLAERRASRLLTLDGPSGALAHRQFTDLLEHLRPGDLMVFNNTRVIPARLFGQKASGGKLEILVERVLDSHRVLAHVRSSKSPKPGSNILIDGGGEARMVARHDALFELEFAEEVLPLLDRVGHMPLPPYIDRPDEDADRERYQTVYSQRLGAVAAPTAGLHFDQPLLDAIAAKGVETAYVTLHVGAGTFQPVRVENIEDHHMHSEWLEVSQDVVDAVNACKARGGRVVAVGTTSVRSLESAARDGVLKPFSGDTDIFIFPGRPFHVVDCLVTNFHLPESTLLMLVSAFAGYPQTMAAYQAAIANEYRFFSYGDAMFITRNPAPRGPEDNL

SEQ ID NO: 71004 - protein, 349 aa, Pseudomonas pelagia
  misc_feature (1)..(349): tr|A0A2A4AYL1|A0A2A4AYL1_9PSED S-adenosylmethionine:tRN A ribosyltransferase-isomerase OS=Pseudomonas pelagia O X=553151 GN=queA PE=3 SV=1
MRVSDFQFDLPDRLIARHPLAERRASRLLCLDGPSGALEHRHFADLLDYLRPGDLMVFNNTRVIPARLFGRKESGGQLEVLVERVLDGRRVLAHVRSSKSPKPGSRIVLDDGTLATMLARHDALFELEFAEDVLPLLERIGHMPLPPYIDRADEAADRERYQTVYAARAGAVAAPTAGLHFDQALLQAIADQGVETVQVTLHVGAGTFQPVRVERIEDHHMHSEWLEVSQNVVDAVRACKARGGRVIAVGTTSVRSLETAARSGEIEPFAGDTNIFIYPGRPFHVVDALVTNFHLPESTLLMLVSAFAGYAETMAAYRAAVDNEYRFFSYGDAMFITRNPAAAGPEDAA

SEQ ID NO: 71005 - protein, 349 aa, Pseudomonas peli
  misc_feature (1)..(349): tr|A0A1G4Q183|A0A1G4Q183_9PSED S-adenosylmethionine:tRN A ribosyltransferase-isomerase OS=Pseudomonas peli OX=5 92361 GN=queA PE=3 SV=1
MRVADFNFELPDALIARHPLAERRASRLLVLDGPTGELAHKQFSDLLDYLRPGDLMVFNNTRVIPARLFGQKASGGKLEILVERVLDSQRVLAHVRSSKSPKPGSIILIDGGGEAEMVARHDALFELRFAEDVLPLLERVGHMPLPPYIDRPDEQADRERYQTVYADRAGAVAAPTAGLHFDQQLLAAIAEKGVEQAFVTLHVGAGTFQPVRVERIEDHHMHSEWLEVSQDVVDAVAACRARGGRVIAVGTTSVRSLESAARDGVLKAFSGDTDIFIYPGRPLHVVDALVTNFHLPESTLLMLVSAFAGYPETMAAYQAAIAGEYRFFSYGDAMFITRNPAPRGPGEQL

SEQ ID NO: 71006 - protein, 349 aa, Pseudomonas plecoglossicida
  misc_feature (1)..(349): tr|S2JXW6|S2JXW6_9PSED S-adenosylmethionine:tRNA ribosy ltransferase-isomerase OS=Pseudomonas plecoglossicida N B2011 OX=1330531 GN=queA PE=3 SV=1
MRVADFSFELPDSLIARHPLAERHGSRLLVLDGPSGALAHKQFTDLLDFLRPGDLMVFNNTRVIPARLFGQKASGGKLEVLVERVLDSHRVLAHVRASKAPKEGAVILIDGGGEAEMVARHDTLFELRFTEEVLPLLERVGHMPLPPYIDRPDEGADRERYQTVYAERAGAVAAPTAGLHFDEALLEKIAAKGVERAFVTLHVGAGTFQPVRVDKIEDHHMHKEWLEVSQDVVDAIAACRARSGRVVAVGTTSVRSLESAARDGVLKAFSGDTDIFIYPGRPFHVVDALVTNFHLPESTLLMLVSAFAGYPETMAAYAAAVEQGYRFFSYGDAMFITRNPAPRGPEDQA

SEQ ID NO: 71007 - protein, 349 aa, Pseudomonas plecoglossicida; identical to SEQ ID NO: 70975
  misc_feature (1)..(349): tr|A0A099MVV1|A0A099MVV1_9PSED S-adenosylmethionine:tRN A ribosyltransferase-isomerase OS=Pseudomonas plecoglos sicida OX=70775 GN=queA PE=3 SV=1

SEQ ID NO: 71008 - protein, 349 aa, Pseudomonas poae
  misc_feature (1)..(349): tr|A0A2A9H3B7|A0A2A9H3B7_9PSED S-adenosylmethionine:tRN A ribosyltransferase-isomerase OS=Pseudomonas poae OX=2 00451 GN=queA PE=3 SV=1
MRVADFTFELPDSLIARHPLAERRASRLLTLDGVSGTLAHRQFTDLLEHLHPGDLMVFNNTRVIPARLFGQKASGGKLEILVERVLDSHRVLAHVRSSKSPKPGSSILIEGGGEAEMVARHDALFELRFAEEVLPLLERVGHMPLPPYIDRPDEDSDRERYQTVYSQRLGAVAAPTAGLHFDQLLLDAIAAKGVETAYVTLHVGAGTFQPVRVDNIEDHHMHSEWLEVSQDVVDAVSACKARGGRVVAVGTTSVRSLESAARDGVLKPFSGDTDIFIYPGRPFHVVDCLVTNFHLPESTLLMLVSAFAGYPETMAAYKAAIDNGYRFFSYGDAMFITRNPAPRGPEEQL

SEQ ID NO: 71009 - protein, 349 aa, Pseudomonas poae
  misc_feature (1)..(349): tr|A0A1H0KUH8|A0A1H0KUH8_9PSED S-adenosylmethionine:tRN A ribosyltransferase-isomerase OS=Pseudomonas poae OX=2 00451 GN=queA PE=3 SV=1
MRVADFTFDLPDSLIARHPLAERRASRLLTLDGVSGALAHRQFTDLLEHLRPGDLMVFNNTRVIPARLFGQKASGGKLEILVERVLDSHRVLAHVRSSKSPKPGSSILIDGGGEAEMVARHDALFELKFAEEVLPLLERVGHMPLPPYIDRPDDEADRERYQTVYSQRLGAVAAPTAGLHFDQPLLDAIAAKGVESAYVTLHVGAGTFQPVRVDNIEDHHMHSEWLEVSQDVVDAVAACKARGGRVVAVGTTSVRSLESAARDGVLKPFSGDTDIFIYPGRPFHVVDCLVTNFHLPESTLLMLVSAFAGYPETMAAYQAAIANEYRFFSYGDAMFITRNPAPRGPEEQS

SEQ ID NO: 71010 - protein, 347 aa, Pseudomonas pohangensis
  misc_feature (1)..(347): tr|A0A1H2GMX0|A0A1H2GMX0_9PSED S-adenosylmethionine:tRN A ribosyltransferase-isomerase OS=Pseudomonas pohangens is OX=364197 GN=queA PE=3 SV=1
MRVSDFHFDLPESLIASHPLAERRGSRLLVLDDPASAARHKAFADLPDYLNPGDLLVFNNTRVIPARLFGHKASGGKLEILVERVLDQHRVLAHVRSSKSPKPGTLIHIEGGGEAQMLARQDALFELRFAEEVLPLLERVGHMPLPPYIDRPDEAADRERYQTVYAEKSGAVAAPTAGLHFDQPMLDSLRAKGVETAFVTLHVGAGTFQPVRVERIEDHHMHSEWLEVSQAVVDAVAACKARGGRVVAVGTTSVRSLETAARSGELQAYCGDTDIFIFPGYRFRVVDALVTNFHLPESTLLMLVSAFSGYPQIMAAYAAAVEQQYRFFSYGDAMFLTRNPQATGPQD

SEQ ID NO: 71011 - protein, 354 aa, Pseudomonas prosekii
  misc_feature (1)..(354): tr|A0A2U2D2D7|A0A2U2D2D7_9PSED S-adenosylmethionine:tRN A ribosyltransferase-isomerase OS=Pseudomonas prosekii OX=1148509 GN=queA PE=3 SV=1
MRVADFTFELPDSLIARHPLAERRGSRLLTLDGVSGALAHRQFTDLLEHLRPGDLMVFNNTRVIPARLFGQKASGGKLEILVERVLDSHRVLAHVRSSKSPKPGSKILIDGGGEAEMLARHDALFELAFAEEVLPLLDRVGHMPLPPYIDRPDEGSDRERYQTVYAERLGAVAAPTAGLHFDQPLMEAIAAKGIETTFVTLHVGAGTFQPVRVEKLEDHHMHTEWLEVGQDVVDAVAACRARGGRVVAVGTTSVRSLESAARDGVLKPFSGDTDIFIFPGRPFHVVDALVTNFHLPESTLLMLVSAFAGYPETMAAYKAAVEHGYRFFSYGDAMFITRNPAPTAPKESGPEETE

SEQ ID NO: 71012 - protein, 354 aa, Pseudomonas prosekii
  misc_feature (1)..(354): tr|A0A3L8CRU2|A0A3L8CRU2_9PSED S-adenosylmethionine:tRN A ribosyltransferase-isomerase OS=Pseudomonas prosekii OX=1148509 GN=queA PE=3 SV=1
MRVADFTFELPDSLIARHPLAERRGSRLLTLDGVSGALAHRQFTDLLEHLRPGDLMVFNNTRVIPARLFGQKASGGKLEILVERVLDSHRVLAHVRSSKSPKRGSKILIDGGGEAEMLARHDALFELAFAEEVLPLLDRVGHMPLPPYIDRPDEGSDRERYQTVYAERLGAVAAPTAGLHFDQPLMEAIAAKGIETTFVTLHVGAGTFQPVRVEKLEDHHMHTEWLEVGQDVVDAVAACRARGGRVVAVGTTSVRSLESAARDGVLKPFSGDTDIFIFPGRPFHVVDALVTNFHLPESTLLMLVSAFAGYPETMAAYKAAVEHGYRFFSYGDAMFITRNPAPTAPKESGPEETE

SEQ ID NO: 71013 - protein, 354 aa, Pseudomonas protegens; identical to SEQ ID NO: 70904
  misc_feature (1)..(354): tr|A0A2C9ESY6|A0A2C9ESY6_PSEPH S-adenosylmethionine:tRN A ribosyltransferase-isomerase OS=Pseudomonas protegens (strain DSM 19095 / LMG 27888 / CHA0) OX=1124983 GN=qu eA PE=3 SV=1

SEQ ID NO: 71014 - protein, 354 aa, Pseudomonas protegens
  misc_feature (1)..(354): tr|A0A2J7U8F7|A0A2J7U8F7_9PSED S-adenosylmethionine:tRN A ribosyltransferase-isomerase OS=Pseudomonas protegens OX=380021 GN=queA PE=3 SV=1
MRVADFTFELPDSLIARHPLAERRGSRLLTLDGPTGALAHRQFTDLLEHLRPGDLMVFNNTRVIPARLFGQKASGGKLEILIERVLDSHRVLAHVRSSKSPKPGSKILIDGGGEAEMLARHDTLFELGFAEEVLPLLDRVGHMPLPPYIDRPDEGADRERYQTVYAQRLGAVAAPTAGLHFDQPLLEAIAAKGVETAFVTLHVGAGTFQPVRVERIEDHHMHHEWLEVGQDVVDAVAACRARGGRVVAVGTTSVRSLESAARDGVLKPFSGDTDIFIYPGRPFHVVDALVTNFHLPESTLLMLVSAFAGYPETMAAYRAAVENGYRFFSYGDAMFITRNPAPTAPKDLAPEETV

SEQ ID NO: 71015 - protein, 347 aa, Pseudomonas pseudoalcaligenes; identical to SEQ ID NO: 70988
  misc_feature (1)..(347): tr|W6RJ66|W6RJ66_PSEP5 S-adenosylmethionine:tRNA ribosy ltransferase-isomerase OS=Pseudomonas pseudoalcaligenes (strain CECT 5344) OX=1182590 GN=queA PE=3 SV=1

SEQ ID NO: 71016 - protein, 353 aa, Pseudomonas psychrophila
  misc_feature (1)..(353): tr|A0A3N1ZLN1|A0A3N1ZLN1_9PSED S-adenosylmethionine:tRN A ribosyltransferase-isomerase OS=Pseudomonas psychroph ila OX=122355 GN=queA PE=3 SV=1
MRVADFTFELPDSLIARHPLAERRNSRLLTLDGQSGALAHRQFTDLLEHLRPGDLMVFNNTRVIPARLFGQKASGGKLEILVERVLDSHRVLAHVRSSKSPKPGSKILIDGGGEAEMLARHDALFELGFTDEVLPLLDRVGHMPLPPYIDRPDEGADRERYQTVYAQRLGAVAAPTAGLHFDEPLMQAIAAKGVETAFVTLHVGAGTFQPVRVERLEDHHMHTEWLEVGQDVVDAVAACRARGGRVIAVGTTSVRSLESAARDGVLKPFSGDTDIFIFPGRPFHVVDALVTNFHLPESTLLMLVSAFAGYPETMAAYQAAVEHGYRFFSYGDAMFITRNPAPTAPAPAPEDQA

SEQ ID NO: 71017 - protein, 353 aa, Pseudomonas psychrophila
  misc_feature (1)..(353): tr|S6HWQ3|S6HWQ3_9PSED S-adenosylmethionine:tRNA ribosy ltransferase-isomerase OS=Pseudomonas psychrophila OX=1 22355 GN=queA PE=3 SV=1
MRVADFTFELPDSLIARHPLAERRNSRLLTLDGESGALAHRQFTDLLEHLRPGDLMVFNNTRVIPARLFGQKASGGKLEILVERVLDSHRVLAHVRSSKSPKPGSKILIDGGGEAEMLARHDALFELGFTEEVLPLLDRVGHMPLPPYIDRPDEGSDRERYQTVYAQRLGAVAAPTAGLHFDEPLMQAIAAKGVETAFVTLHVGAGTFQPVRVERLEDHHMHTEWLEVGQDVVDAVAACRARGGRVIAVGTTSVRSLESAARDGVLKPFSGDTDIFIFPGRPFHVVDALVTNFHLPESTLLMLVSAFAGYPETMAAYKAAVEHGYRFFSYGDAMFITRNPAPTAPAPAPEDQA

SEQ ID NO: 71018 - protein, 347 aa, Pseudomonas psychrotolerans
  misc_feature (1)..(347): tr|A0A1G5N6L0|A0A1G5N6L0_9PSED S-adenosylmethionine:tRN A ribosyltransferase-isomerase OS=Pseudomonas psychroto lerans OX=237610 GN=queA PE=3 SV=1
MHVADFHFDLPESLIARHPLAERRGSRLLVLDGPSGELSHCHFADLLGYLRPGDLMVFNDTRVIPARLFGQKASGGKLEILVERVLDEERVLAHVRSSKSPKPGGRILIDGGAEAEMVARHEALFELKFAEPVLPLLERVGHMPLPPYIDRPDEAEDRERYQTVYARNAGAVAAPTAGLHFDEPLLEAIRAKGVATAFVTLHVGAGTFQPVRVERIEDHHMHREWLQVDQAVVDAVAACRAQGGRVIAVGTTSVRSLESAARDGELKAFAGETDIFLYPGRPFHVVDALVTNFHLPESTLLMLVSAFAGYRETMAAYATAVAEGYRFFSYGDAMFITRNPGAQGPES

SEQ ID NO: 71019 - protein, 347 aa, Pseudomonas psychrotolerans
  misc_feature (1)..(347): tr|A0A4Y5WAV2|A0A4Y5WAV2_9PSED S-adenosylmethionine:tRN A ribosyltransferase-isomerase OS=Pseudomonas psychroto lerans OX=237610 GN=queA PE=3 SV=1
MHVADFHFDLPESLIARHPLAERRGSRLLVLDGPSGELSHRHFADLLGYLQPGDLMVFNDTRVIPARLFGQKASGGKLEILVERVLDEERVLAHVRSSKSPKPGSRILIDGGAEAEMVARHDALFELKFAEPVLPLLERVGHMPLPPYIDRPDEAEDRERYQTVYARNAGAVAAPTAGLHFDEPLLEAIRAKGVATAFVTLHVGAGTFQPVRVERIEDHHMHREWLQVDQGVVDAVAACRARGGRVIAVGTTSVRSLESAARDGELKAFAGETDIFLYPGRPFHVVDALVTNFHLPESTLLMLVSAFAGYRETMAAYATAVAEGYRFFSYGDAMFITRNPGAQGPES

SEQ ID NO: 71020 - protein, 373 aa, Pseudomonas punonensis
  misc_feature (1)..(373): tr|A0A1M6WWV6|A0A1M6WWV6_9PSED S-adenosylmethionine:tRN A ribosyltransferase-isomerase OS=Pseudomonas punonensi s OX=1220495 GN=queA PE=3 SV=1
MHLRGQITGIPVSCSALQYDTFSIMRVADFHFDLPDAQIARHPLSERRASRLLIVDGASGALAHRQFADLLEYLRPGDLMVFNNTRVIPARLFGQKATGGKLEILIERVLDEHRVLAHVRSSKSPKPGSMIEIDGGGQAQMLARHDALFELGFDEPVLPLLERVGHMPLPPYIDRPDEDADRERYQTVYAQKAGAVAAPTAGLHFDEELLAALREKGVESVFVTLHVGAGTFQPVRVERIEDHHMHSEWLEVSQDVVDAVQACRARGGRVVAVGTTSVRSLESAARDGELKPFSGDTDIFIYPGRPFHVVDALVTNFHLPESTLLMLVSAFAGYPETMAAYAEAVAEGYRFFSYGDAMFITRNPAPRGPEDSV

SEQ ID NO: 71021 - protein, 349 aa, Pseudomonas putida
  misc_feature (1)..(349): sp|Q88PL8|QUEA_PSEPK S-adenosylmethionine:tRNA ribosylt ransferase-isomerase OS=Pseudomonas putida (strain ATCC 47054 / DSM 6125 / NCIMB 11950 / KT2440) OX=160488 GN= queA PE=3 SV=1
MRVADFSFELPDSLIARHPLAERHGSRLLVLDGPTGALAHRQFPDLLDYLRPGDLMVFNNTRVIPARLFGQKASGGKLEVLVERVLDSHRVLAHVRASKAPKVGAVILIDGGGEAEMVARHDTLFELRFTEEVLPLLDRVGHMPLPPYIDRPDEGADRERYQTVYAQRAGAVAAPTAGLHFDEALLEKIADKGVERAFVTLHVGAGTFQPVRVDKIEDHHMHKEWLEVGQDVVDAIEACRARGGRVIAVGTTSVRSLESAARDGVLKAFSGDTDIFIYPGRPFHVVDCLVTNFHLPESTLLMLVSAFAGYPETMAAYAAAVEHGYRFFSYGDAMFITRNPAPRGPEDQA

SEQ ID NO: 71022 - protein, 349 aa, Pseudomonas putida
  misc_feature (1)..(349): tr|A0A1X1AAG7|A0A1X1AAG7_PSEPU S-adenosylmethionine:tRN A ribosyltransferase-isomerase OS=Pseudomonas putida OX =303 GN=queA PE=3 SV=1
MRVADFSFELPDSLIARHPLAERHGSRLLVLDGPTGALAHRQFPDLLDYLRPGDLMVFNNTRVIPARLFGQKASGGKLEVLVERVLDSHRVLAHVRASKAPKVGAVILIDGGGEAEMVARHDTLFELRFTEEVLPLLDRVGHMPLPPYIDRPDEGADRERYQTVYAQRAGAVAAPTAGLHFDEALLEKIAAKGVERAFVTLHVGAGTFQPVRVDKIEDHHMHKEWLEVGQDVVDAIEACRARGGRVIAVGTTSVRSLESAARDGVLKAFSGDTDIFIYPGRPFHVVDALVTNFHLPESTLLMLVSAFAGYPETMAAYAAAVEHGYRFFSYGDAMFITRNPAPRGPEDQA

SEQ ID NO: 71023 - protein, 349 aa, Pseudomonas reidholzensis
  misc_feature (1)..(349): tr|A0A383RZQ4|A0A383RZQ4_9PSED S-adenosylmethionine:tRN A ribosyltransferase-isomerase OS=Pseudomonas reidholze nsis OX=1785162 GN=queA PE=3 SV=1
MRVADFSFELPDSLIARHPLAERHGSRLLVLDGPSGALAHQQFTDLLAYLRPGDLMVFNNTRVIPARLFGQKASGGKLEVLVERVLDSHRVLAHVRASKAPKVGAQILIDGGGEAEMVARHDTLFELRFTEEVLPLLDRVGHMPLPPYIDRPDEGADRERYQTVYAERAGAVAAPTAGLHFDQALLDKIAAKGVERAFVTLHVGAGTFQPVRVDKIEDHHMHKEWLEVSQDVVDAVEACRARGGRVVAVGTTSVRSLESAARDGQLKAFSGDTDIFIFPGRPFHVVDALVTNFHLPESTLLMLVSAFAGYPETMAAYAAAVEQGYRFFSYGDAMFITRNPAPRGPEDQA

SEQ ID NO: 71024 - protein, 354 aa, Pseudomonas reinekei
  misc_feature (1)..(354): tr|A0A1H0LNE2|A0A1H0LNE2_9PSED S-adenosylmethionine:tRN A ribosyltransferase-isomerase OS=Pseudomonas reinekei OX=395598 GN=queA PE=3 SV=1
MRVADFTFELPDSLIARHPLAERRNSRLLTLDGVSGALAHRQFTDLLEHLRPGDLMVFNNTRVIPARLFGQKASGGKLEILVERVLDSHRVLAHVRSSKSPKPGSKILIDGGGEAEMLARHDALFELGFAEEVLPLLDRVGHMPLPPYIDRPDEGSDRERYQTVYAQRLGAVAAPTAGLHFDQPLLEAIAAKGIETAFVTLHVGAGTFQPVRVEKLEDHHMHTEWLEVGQDVVDAVAACRARGGRVVAVGTTSVRSLESAARDGVLKPFSGDTDIFIYPGRPFHVVDALVTNFHLPESTLLMLVSAFAGYPETMAAYKAAVGNGYRFFSYGDAMFITRNPAPTAPKESGPEETV

SEQ ID NO: 71025 - protein, 349 aa, Pseudomonas resinovorans
  misc_feature (1)..(349): tr|S6AS34|S6AS34_PSERE S-adenosylmethionine:tRNA ribosy ltransferase-isomerase OS=Pseudomonas resinovorans NBRC 106553 OX=1245471 GN=queA PE=3 SV=1
MRVADFHFELPEALIARHPLAERRASRLLVLNGETAELSHRHFADLLEYLREGDLMVFNNTRVIPARLFGQKASGGKLEILVERVLDSHRVLAHVRSSKSPKPGTTLLIDGGGEAEMIARHDALFELKFAEEVLPLLERVGHMPLPPYIDRPDDEADRERYQTVYARHAGAVAAPTAGLHFDQALLDAIAAKGVEKAFVTLHVGAGTFQPVRVERIEDHHMHQEWLEVGQDVVDAVAACRARGGRVIAVGTTSVRSLESAARDGQLKAFSGDTDIFLYPGRPFHVVDALVTNFHLPESTLLMLVSAFAGYPETMAAYAAAVEQGYRFFSYGDAMFITRNPAPRGPEDQA

SEQ ID NO: 71026 - protein, 354 aa, Pseudomonas rhizosphaerae
  misc_feature (1)..(354): tr|A0A089YJE8|A0A089YJE8_9PSED S-adenosylmethionine:tRN A ribosyltransferase-isomerase OS=Pseudomonas rhizospha erae OX=216142 GN=queA PE=3 SV=1
MRVADFSFELPDSLIARHPLAERHGSRLLVLDGLSGALDHRQFTDLPGFLRPGDLMVFNNTRVIPARVFGQKASGGKLEILVERVLDSHRVLAHVRSSKSPKPGSMILIDGGGEAEMVARHDALFELRFNEEVLPLLDKVGHMPLPPYIDRPDDTADRERYQTVYAEKAGAVAAPTAGLHFDKALLAQIEAMGVETAFVTLHVGAGTFQPVRVEKLEDHHMHKEWLEVSQDVVDAVQACKARGGRVVAVGTTSVRSLESAARDGVLKPFSGDTDIFIFPGRPFHVVDALVTNFHLPESTLLMLVSAFAGYPEAMAAYAAAVANEYRFFSYGDAMFITRNPAPRGPSEAAPGDQA

SEQ ID NO: 71027 - protein, 349 aa, Pseudomonas rhodesiae
  misc_feature (1)..(349): tr|A0A5C5NS00|A0A5C5NS00_9PSED S-adenosylmethionine:tRN A ribosyltransferase-isomerase OS=Pseudomonas rhodesiae OX=76760 GN=queA PE=3 SV=1
MRVADFTFELPDSLIARHPLAERHASRLLTLDGPSGALAHRQFTDLLEHLRPDDLMVFNNTRVIPARLFGQKASGGKLEILVERVLDSHRVLAHVRSSKSPKPGSSLLIDGGGEAEMVARHDALFELKFAEEVLPLLERVGHMPLPPYIDRPDEDADRERYQTVYSQRLGAVAAPTAGLHFDQPLLEAIAAKGVETAYVTLHVGAGTFQPVRVENIEDHHMHSEWLEVTQDVVDAVNACKSRGGRVIAVGTTSVRSLESAARDGVLKPFSGDTDIFIYPGRPFHVVDCLVTNFHLPESTLLMLVSAFAGYPETMAAYQAAIENGYRFFSYGDAMFITRNPAPRGPEEQL

SEQ ID NO: 71028 - protein, 349 aa, Pseudomonas sabulinigri
  misc_feature (1)..(349): tr|A0A1H1RCB1|A0A1H1RCB1_9PSED S-adenosylmethionine:tRN A ribosyltransferase-isomerase OS=Pseudomonas sabulinig ri OX=472181 GN=queA PE=3 SV=1
MRLSDFAFDLPDELIARHPLAERRGSRLLCLDGPSGELSHRRFVDLLEYLQPGDLMVFNNTRVIPARLFGRKETGGQLEVLVERVLDEHRVLAHIRSSKSPKPGSKILLEGDASAEMVARHAALFELRFAEPVLPLLDRVGHMPLPPYIDRADDSADRERYQTVYAKRQGAVAAPTAGLHFDAGMLQAIRDKGVETAEVTLHVGAGTFQPVRVERIEEHVMHQEWLEVGPEVVAAVEQCKARGGRVIAVGTTSVRSLESAARDGVLKPFSGDTDIFLYPGRPFHVVDALVTNFHLPESTLLMLVSAFAGYPETMAAYAAAVAERYRFFSYGDAMFITRNPAPRGPEVSQ

SEQ ID NO: 71029 - protein, 351 aa, Pseudomonas sagittaria
  misc_feature (1)..(351): tr|A0A1I5NZV5|A0A1I5NZV5_9PSED S-adenosylmethionine:tRN A ribosyltransferase-isomerase OS=Pseudomonas sagittari a OX=1135990 GN=queA PE=3 SV=1
MRVADFHFELPDLLIARHPLAERRASRLLVLDGPSGQLSHRHFPDLLEYLRPGDLMVFNDTRVIPARLFGHKASGGKLEILVERVLDSQRVLAHVRASKAPKPGMRILIDGGGEAEMLVRHDALFELRFAEPVLPLLERVGHMPLPPYIDRPDEDADRERYQTVYSDQSKAGAVAAPTAGLHFDDALLAAIRAKGVATAFVTLHVGAGTFQPVRVERIEDHHMHSEWLEVGQDVVDAVAACKARGGRVVAVGTTSVRSLESAARDGVLKPFSGDTDIFIYPGRPFHVVDALVTNFHLPESTLLMLVSAFAGYPETMAAYRAAVAAGYRFFSYGDAMFITRNPAARGPEETP

SEQ ID NO: 71030 - protein, 349 aa, Pseudomonas salegens
  misc_feature (1)..(349): tr|A0A1H2GVU9|A0A1H2GVU9_9PSED S-adenosylmethionine:tRN A ribosyltransferase-isomerase OS=Pseudomonas salegens OX=1434072 GN=queA PE=3 SV=1
MRVRDFHFELPERLIAHHPLAERRGSRLLCLDGPTGALAHRQFVDLLDQLQPGDLMVFNNTRVIPARLFGRKATGGQLEILVERVLDSHRVLAHVRASKSPKPGSEILLEDGSRVEMLGRKDALFELGFADEVLPLLERIGHMPLPPYIDRPDETADRERYQTVYAQKAGAVAAPTAGLHFDKALLAAIKTKGVEMAEVTLHVGAGTFQPVRVERIEEHHMHSEWLDVSPEVVAAVDACKARGGRVIAVGTTSVRSLETAAQSGTLQPFSGDTDIFLYPGRPFHVVDALVTNFHLPESTLLMLVSAFAGYPETMAAYAAAVDQGYRFFSYGDAMFITRNPAPSGPEDVS

SEQ ID NO: 71031 - protein, 299 aa, Pseudomonas salomonii
  misc_feature (1)..(299): tr|A0A1H3T9Y2|A0A1H3T9Y2_9PSED S-adenosylmethionine:tRN A ribosyltransferase-isomerase OS=Pseudomonas salomonii OX=191391 GN=queA PE=3 SV=1
MVFNNTRVIPARLFGQKASGGKLEILVERVLDSHRVLAHVRSSKSPKPGSSILIDGGGEAEMVARHDALFELKFAEEVLPLLERVGHMPLPPYIDRPDEDSDRERYQTVYSQRLGAVAAPTAGLHFDQPLLDAIAAKGVESAYVTLHVGAGTFQPVRVDNIEDHHMHSEWLEVSQDVVDAVAACKARGGRVVAVGTTSVRSLESAARDGVLKPFSGDTDIFIFPGRPFHVVDCLVTNFHLPESTLLMLVSAFAGYPETMAAYKAAIDNGYRFFSYGDAMFITRNPAPTAPKEAGHEEQL

SEQ ID NO: 71032 - protein, 354 aa, Pseudomonas salomonii
  misc_feature (1)..(354): tr|A0A3M4Q7Z1|A0A3M4Q7Z1_9PSED S-adenosylmethionine:tRN A ribosyltransferase-isomerase OS=Pseudomonas salomonii OX=191391 GN=queA PE=3 SV=1
MRVADFTFELPDSLIARHPLAERRASRLLTLDGVSGALAHRQFTDLLEHLRPGDLMVFNNTRVIPARLFGQKASGGKLEILVERVLDSHRVLAHVRSSKSPKPGSSILIDGGGEAEMVARHDALFELKFAEEVLPLLERVGHMPLPPYIDRPDEDSDRERYQTVYSQRLGAVAAPTAGLHFDQPLLDAIAAKGVESAYVTLHVGAGTFQPVRVDNIEDHHMHSEWLEVSQDVVDAVAACKARGGRVVAVGTTSVRSLESAARDGVLKPFSGDTDIFIFPGRPFHVVDCLVTNFHLPESTLLMLVSAFAGYPETMAAYKAAIDNGYRFFSYGDAMFITRNPAPTAPKEAGHEEQL

SEQ ID NO: 71033 - protein, 354 aa, Pseudomonas saponiphila
  misc_feature (1)..(354): tr|A0A1H4K7W3|A0A1H4K7W3_9PSED S-adenosylmethionine:tRN A ribosyltransferase-isomerase OS=Pseudomonas saponiphi la OX=556534 GN=queA PE=3 SV=1
MRVADFTFELPDSLIARHPLAERRGSRLLTLDGPTGALAHRQFTDLLEHLRPGDLMVFNNTRVIPARLFGQKASGGKLEILIERVLDSHRVLAHVRSSKSPKPGSKILIEGGGEAEMLARHDTLFELGFAEEVLPLLDRVGHMPLPPYIDRPDEGADRERYQTVYAQRLGAVAAPTAGLHFDQPLLEAIAAKGVETAFVTLHVGAGTFQPVRVERIEDHHMHHEWLEVGQDVVDAVAACRARGGRVVAVGTTSVRSLESAARDGVLKPFSGDTDIFIYPGRPFHVVDALVTNFHLPESTLLMLVSAFAGYPETMAAYRAAVENGYRFFSYGDAMFITRNPAPTAPKDLAPEETV

SEQ ID NO: 71034 - protein, 349 aa, Pseudomonas saudimassiliensis
  misc_feature (1)..(349): tr|A0A078MA36|A0A078MA36_9PSED S-adenosylmethionine:tRN A ribosyltransferase-isomerase OS=Pseudomonas saudimass iliensis OX=1461581 GN=queA PE=3 SV=1
MRVSDFQFELPDRLIARHPLAERRASRLLCLDGPSGELAHRQFADLLEYLRPGDLMVFNNTRVIPARLFGRKETGGQLEILVERVLDNRRVLAHVRSSKSPKPGSRILLEGDSTATMVARHDALFELEFDEPVLPLLDRVGHMPLPPYIDRPDESADRERYQTVYAQRAGAVAAPTAGLHFDQELLQAIAAKGVATAQVTLHVGAGTFQPVRVERIEDHHMHSEWLEVGQDVVDAVHACKARGGRVIAVGTTSVRSLETAARDGQLKAFSGDTDIFIYPGRPFHVVDALVTNFHLPESTLLMLVSAFAGYPETMAAYQAAVDHDYRFFSYGDAMFITRNPAACGPEDVQ

SEQ ID NO: 71035 - protein, 349 aa, Pseudomonas saudiphocaensis
  misc_feature (1)..(349): tr|A0A078LNF0|A0A078LNF0_9PSED S-adenosylmethionine:tRN A ribosyltransferase-isomerase OS=Pseudomonas saudiphoc aensis OX=1499686 GN=queA PE=3 SV=1
MQVSAFSFELPDSLIARHPLAERRASRLLVLDGPTGRMAHQGFADLLEHVRPGDLMVFNNTRVIPARLFGQKDTGGRLEVLVERVLDSNRVLAHIRSSKSPKPGSRIQIDGGGEALMLARHDALFELEFAEEVLPLLERVGHMPLPPYIDRPDDSADRERYQTVYARHTGAVAAPTAGLHFDAALLDALRDKGVETAFVTLHVGAGTFQPVRVERIEDHHMHSEWLQVGQDVVDAVLACRERGGRVIAVGTTSVRSLESAARDGTLKAFSGDTDIFIYPGRPFHVVDALVTNFHLPESTLLMLVSAFAGYPETMAAYAEAVAEGYRFFSYGDAMFITRNPAPRGPEETQ

SEQ ID NO: 71036 - protein, 349 aa, Pseudomonas saudiphocaensis
  misc_feature (1)..(349): tr|A0A427EEQ0|A0A427EEQ0_9PSED S-adenosylmethionine:tRN A ribosyltransferase-isomerase OS=Pseudomonas saudiphoc aensis OX=1499686 GN=queA PE=3 SV=1
MQVSAFSFELPDSLIARHPLAERRASRLLVLDGPTGRMAHQGFADLLEHVRPGDLMVFNNTRVIPARLFGQKDTGGRLEVLVERVLDSNRVLAHIRSSKSPKPGSRIQIDGGGEALMLARHDALFELEFAEEVLPLLERVGHMPLPPYIDRPDDSADRERYQTVYARHTGAVAAPTAGLHFDAALLDALRDKGVETAFVTLHVGAGTFQPVRVERIEDHHMHSEWLQVGQDVVDAVLACRERGGRVIAVGTTSVRSLESAARDGTLKAFSGDTDIFIYPGRPFHVVDALVTNFHLPESTLLMLVSAFAGYPETMEAYAEAVAEGYRFFSYGDAMFITRNPAPRGPEETQ

SEQ ID NO: 71037 - protein, 190 aa, Pseudomonas savastanoi
  misc_feature (1)..(190): tr|A0A3M5X4J4|A0A3M5X4J4_PSESG S-adenosylmethionine:tRN A ribosyltransferase-isomerase (Fragment) OS=Pseudomona s savastanoi pv. glycinea OX=318 GN=ALQ66_04635 PE=3 SV =1
MMRVADFTFELPDSLIARHPLVERRSSRLLTLDGPTGALAHRQFTDLLEHLRPGDLMVFNNTRVIPARLFGQKASGGKLEILVERVQDSHRVLAHVRSSKSPKPGSSILIDGGGEAEMVARHDALFELRFAEEVLPLLERVGHMPLPPYIDRPDEGADRERYQTVYAQRAGAVAAPTAGLHFDQPLLEAI

SEQ ID NO: 71038 - protein, 354 aa, Pseudomonas savastanoi
  misc_feature (1)..(354): sp|Q48M15|QUEA_PSE14 S-adenosylmethionine:tRNA ribosylt ransferase-isomerase OS=Pseudomonas savastanoi pv. phas eolicola (strain 1448A / Race 6) OX=264730 GN=queA PE=3 SV=1
MRVADFTFELPDSLIARHPLAERRSSRLLTLDGPTGALAHRQFTDLLEHLRPGDLMVFNNTRVIPARLFGQKASGGKLEILVERVLDSHRVLAHVRSSKSPKPGSSILIDGGGEAEMVARHHALFELRFAEEVLPLLERVGHMPLPPYIDRPDEGADRERYQTVYAQRAGAVAAPTAGLHFDQPLLEAIAAKGVETAFVTLHVGAGTFQPVRVEQIEDHHMHSEWLEVGQDVVDAVAACRARGGRVIAVGTTSVRSLESAARDGELKSFSGDTDIFIYPGRPFHVVDALVTNFHLPESTLLMLVSAFAGYPETMAAYAGAIEHGYRFFSYGDAMFITRNPAPTAPQESAPEDHA

SEQ ID NO: 71039 - protein, 349 aa, Pseudomonas segetis
  misc_feature (1)..(349): tr|A0A238ZH65|A0A238ZH65_9PSED S-adenosylmethionine:tRN A ribosyltransferase-isomerase OS=Pseudomonas segetis O X=298908 GN=queA PE=3 SV=1
MRVADFHFDLPEALIARHPLTERRASRLLTVDGPSGALGHRQFSDLLEFLRPGDLMVFNNTRVIPARLFGQKASGGKLEILVERVLDSHRVLAHVRSSKSPKPGSSILLEGGGEAEMVARHDALFELRFAEEVLPLLERVGHMPLPPYIDRPDDAADRERYQTVYAQRAGAVAAPTAGLHFDEALMAAIADKGIETAFVTLHVGAGTFQPVRVERIEDHHMHSEWLEVGQDVVDAVAACRARGGRVIAVGTTSVRSLETAARDGELKPFSGDTDIFIYPGRPFHVVDALVTNFHLPESTLLMLVSAFAGYPETMAAYQSAVAEGYRFFSYGDAMFITRNPAARGPEDHV

SEQ ID NO: 71040 - protein, 349 aa, Pseudomonas seleniipraecipitans
  misc_feature (1)..(349): tr|A0A1G7JA60|A0A1G7JA60_9PSED S-adenosylmethionine:tRN A ribosyltransferase-isomerase OS=Pseudomonas seleniipr aecipitans OX=640205 GN=queA PE=3 SV=1
MRVADFHFDLPDEQIARHPLAERRASRLLVLDGASGALADRHFADLLEYLRPGDLMVFNNTRVIPARLFGQKASGGKLEVLVERVLDEYRVLAHVRASKSPKAGTMIVLEGGAQAQMVARHDALFELRFDEAVLPLLERVGHMPLPPYIDRADQASDRERYQTVYAQKAGAVAAPTAGLHFDGELLASLRERGVESAFVTLHVGAGTFQPVRVERIEDHHMHSEWLEVSQDVVDAVQACRARGGRVVAVGTTSVRSLESAARDGELKPFTGDTDIFIYPGRPFHVVDALVTNFHLPESTLLMLVSAFAGYAETMAAYAQAVAEGYRFFSYGDAMFITRNPAPRGPEEFL

SEQ ID NO: 71041 - protein, 347 aa, Pseudomonas sihuiensis
  misc_feature (1)..(347): tr|A0A1H2M4Y3|A0A1H2M4Y3_9PSED S-adenosylmethionine:tRN A ribosyltransferase-isomerase OS=Pseudomonas sihuiensi s OX=1274359 GN=queA PE=3 SV=1
MRVADFHFDLPESLIARHPLAERRASRLLQLDGPTGALRHGQFTDVLEQLRPGDLMVFNDTRVIPARLFGQKASGGKLEVLVERVLDQYRVLAHVRSSKSPKPGSQILIDGGAEAEMVARHDALFELRFAEPVLPLLERVGHMPLPPYIDRPDDEADRERYQTVYAQKAGAVAAPTAGLHFDDELLAAIRAKGVETAFVTLHVGAGTFQPVRVERIEDHHMHSEWLEVGQGVVDAVAACRARGGRVVAVGTTSVRSLETAARDGELKPFSGDTDIFIYPGRPFHVVDALVTNFHLPESTLLMLVSAFAGYPETMAAYREAVAQGYRFFSYGDAMFITRNPAARGPEV

SEQ ID NO: 71042 - protein, 349 aa, Pseudomonas silesiensis
  misc_feature (1)..(349): tr|A0A191YZD6|A0A191YZD6_9PSED S-adenosylmethionine:tRN A ribosyltransferase-isomerase OS=Pseudomonas silesiens is OX=1853130 GN=queA PE=3 SV=1
MRVADFTFELPDSLIARHPLAERRNSRLLTLDGVSGALAHRQFTDLLEHLRPGDLMVFNNTRVIPARLFGQKASGGKLEILVERVLDSHRVLAHVRSSKSPKPGSKILIDGGGEAEMLARHDALFELGFAEEVLPLLDRVGHMPLPPYIDRPDEGSDRERYQTVYAERLGAVAAPTAGLHFDQPLMEAIAAKGVETAFVTLHVGAGTFQPVRVEKIEDHHMHSEWLEVGQDVVDAVAACRARGGRVVAVGTTSVRSLESAARDGVLKPFSGDTDIFIYPGRPFHVVDALVTNFHLPESTLLMLVSAFAGYPEAMAAYKAAVEHGYRFFSYGDAMFITRNPAPRGPEETV

SEQ ID NO: 71043 - protein, 347 aa, Pseudomonas simiae
  misc_feature (1)..(347): tr|A0A1N7URC0|A0A1N7URC0_9PSED S-adenosylmethionine:tRN A ribosyltransferase-isomerase OS=Pseudomonas simiae OX =321846 GN=queA PE=3 SV=1
MRVADFTFELPDSLIARHPLAERRASRLLTLDGVSGALAHRQFTDLLEHLRPGDLMVFNNTRVIPARLFGQKASGGKLEILVERVLDSHRVLAHVRSSKSPKPGSSILIDGGGEAEMVARHDALFELRFAEEVLPLLERVGHMPLPPYIDRPDEDSDRERYQTVYSQRLGAVAAPTAGLHFDQPLLDAIAAKGVETAYVTLHVGAGTFQPVRVDNIEDHHMHSEWLEVSQDVVDAVAACKARGGRVVAVGTTSVRSLESAARDGVLKPFSGDTDIFIYPGRPFHVVDCLVTNFHLPESTLLMLVSAFAGYPETMAAYQAAIANEYRFFSYGDAMFITRNPAPRGPEE

SEQ ID NO: 71044 - protein, 347 aa, Pseudomonas simiae
  misc_feature (1)..(347): tr|A0A2T0HVD9|A0A2T0HVD9_9PSED S-adenosylmethionine:tRN A ribosyltransferase-isomerase OS=Pseudomonas simiae OX =321846 GN=queA PE=3 SV=1
MRVADFTFELPDSLIARHPLAERRASRLLTLDGVSGALAHRQFTDLLEHLRPGDLMVFNNTRVIPARLFGQKASGGKLEILVERVLDSHRVLAHVRSSKSPKPGSSILIDGGGEAEMVARHDALFELRFAEEVLPLLERVGHMPLPPYIDRPDEDSDRERYQTVYSQRLGAVAAPTAGLHFDQPLLDAIAAKGVETAYVTLHVGAGTFQPVRVDNIEDHHMHSEWLEVSQDVVDAVVACKARGGRVVAVGTTSVRSLESAARDGVLKPFSGDTDIFIYPGRPFHVVDCLVTNFHLPESTLLMLVSAFAGYPETMAAYQAAIANEYRFFSYGDAMFITRNPAPRGPEE

SEQ ID NO: 71045 - protein, 349 aa, Pseudomonas soli
  misc_feature (1)..(349): tr|A0A2V4I8A5|A0A2V4I8A5_9PSED S-adenosylmethionine:tRN A ribosyltransferase-isomerase OS=Pseudomonas soli OX=1 306993 GN=queA PE=3 SV=1
MRVADFSFELPDSLIARHPLAERHGSRLLVLDGPSGELAHKQFTDLLDYLRPGDLMVFNNTRVIPARLFGQKASGGKLEVLVERVLDSHRVLAHVRASKAPKEGAQILIDGGGEAEMVARHDTLFELRFSEEVLPLLERVGHMPLPPYIDRPDEGADRERYQTVYAQRAGAVAAPTAGLHFDEALLEKIAAKGVERAFVTLHVGAGTFQPVRVDKIEDHTMHKEWLEVGQDVVDAVQACRARGGRVIAVGTTSVRSLESAARDGELKAFSGDTDIFIFPGRPFHVVDCLVTNFHLPESTLLMLVSAFAGYPETMAAYAAAVANGYRFFSYGDAMFITRNPAPRGPEDQA

SEQ ID NO: 71046 - protein, 349 aa, Pseudomonas soli
  misc_feature (1)..(349): tr|A0A1H9NIM3|A0A1H9NIM3_9PSED S-adenosylmethionine:tRN A ribosyltransferase-isomerase OS=Pseudomonas soli OX=1 306993 GN=queA PE=3 SV=1
MRVADFSFELPDSLIARHPLVERHGSRLLVLDGPSGELAHKQFTDLLDYLRPGDLMVFNNTRVIPARLFGQKASGGKLEVLVERVLDNHRVLAHVRASKAPKEGAQILIDGGGEAEMVARHDTLFELRFSEEVLPLLERVGHMPLPPYIDRPDEGADRERYQTVYAQRAGAVAAPTAGLHFDEALLEKIAAKGVERAFVTLHVGAGTFQPVRVDKIEDHTMHKEWLEVSQDVVDAVQACRARGGRVVAVGTTSVRSLESAARDGELKAFSGDTDIFIFPGRPFHVVDCLVTNFHLPESTLLMLVSAFAGYPETMAAYAAAVANGYRFFSYGDAMFITRNPAPRGPEDQA

SEQ ID NO: 71047 - protein, 349 aa, Pseudomonas songnenensis
  misc_feature (1)..(349): tr|A0A482UDC4|A0A482UDC4_9PSED S-adenosylmethionine:tRN A ribosyltransferase-isomerase OS=Pseudomonas songnenen sis OX=1176259 GN=queA PE=3 SV=1
MQVADFFFQLPDALIARHPLAERRASRLLVLDGETGKLSHRNFAELLEYVRPGDLMVFNNTRVIPARLFGQKATGGKLEILVERVLGSRRVLAHIRSSKSPKAGSRILLDGGGEAEMVARHDALFELEFDEDVLSLLERIGHMPLPPYIDRPDDAADRERYQTVYAQRAGAVAAPTAGLHFDEALLDSLREVGVETAYVTLHVGAGTFQPVRVERIEEHHMHREWLEVTQEVVDAVAACRARGGRVIAVGTTSVRSLETAAHDGELKPFSGDTDIFIYPGKTFHVVDALVTNFHLPESTLLMLVSAFAGYPETMAAYAEAVAQRYRFFSYGDAMFITRNPAPRGPEESQ

SEQ ID NO: 71048 - protein, 354 aa, Pseudomonas sp.
  misc_feature (1)..(354): tr|A0A399PVT8|A0A399PVT8_9PSED S-adenosylmethionine:tRN A ribosyltransferase-isomerase OS=Pseudomonas sp. 91RF OX=2292261 GN=queA PE=3 SV=1
MRVADFTFELPDSLIARHPLAERRGSRLLTLDGVSGALAHRQFTDLLEHLRPGDLMVFNNTRVIPARLFGQKESGGKLEILIERVLDTHRVLAHVRSSKSPKPGSKILIDGGGEAEMLARHDALFELGFSEEVLPLLDRVGHMPLPPYIDRPDEGSDRERYQTVYAEKLGAVAAPTAGLHFDQTLMEAIAAKGVETAFVTLHVGAGTFQPVRVEKIEDHHMHTEWLEVGQDVVDAVAACRTRGGRVIAVGTTSVRSLESAARDGVLKPFSGDTDIFIYPGRPFHVVDALVTNFHLPESTLLMLVSAFAGYPETMAAYKAAVDNGYRFFSYGDAMFITRNPAPTAPEQTGPEETE

SEQ ID NO: 71049 - protein, 349 aa, Pseudomonas sp.
  misc_feature (1)..(349): tr|A0A0T6V7Z4|A0A0T6V7Z4_9PSED S-adenosylmethionine:tRN A ribosyltransferase-isomerase OS=Pseudomonas sp. TTU20 14-105ASC OX=1729726 GN=queA PE=3 SV=1
MQVADFSFQLPDALIARHPLEERRASRLLVLDGETGRLAHRNFANLLEYVRPGDLMVFNNTRVIPARLFGQKATGGKLEILVERVLGSRSVLAHIRSSKSPRSGSKILLDGGGEAEMVARHDALFELEFDEDVLPLLERIGHMPLPPYIDRPDDAADRERYQTVYAQREGAVAAPTAGLHFDKAMLEALREARVETAYVTLHVGAGTFQPVRVERIEEHHMHREWLEVDQGVVDAVTACRARGGRVIAVGTTSVRSLETAARDGQLKPFSGDTDIFIYPGKTFHVVDALVTNFHLPESTLLMLVSAFAGYPETMAAYAEAVSQRYRFFSYGDAMFITRNPAPRGPEEKQ

SEQ ID NO: 71050 - protein, 373 aa, Pseudomonas straminea
  misc_feature (1)..(373): tr|A0A1I1V6M1|A0A1I1V6M1_PSEOC S-adenosylmethionine:tRN A ribosyltransferase-isomerase OS=Pseudomonas straminea OX=47882 GN=queA PE=3 SV=1
MRSRGHLQGIPVSCSALQYDTLPIMRVADFHFDLPDERIARHPLAERRASRLLILDGASGALAHRQFADLLEYLRPGDLMVFNNTRVIPARLFGQKATGGKLEILVERVLDEHRVLAHIRSSKSPKPGSLIDIDGGAQAQMLARHDALFELRFEEPVLPLLERVGHMPLPPYIDRPDDAADRERYQTVYAQKAGAVAAPTAGLHFDDELLAALREKGVESAFVTLHVGAGTFQPVRVERIEDHHMHSEWLEVSQDVVDAVEACRARGGRVVAVGTTSVRSLESAARDGELKPFSGDTDIFIYPGRPFHVVDALVTNFHLPESTLLMLVSAFAGYPETMAAYAEAVAEGYRFFSYGDAMFITRNPAARGPEVSV

SEQ ID NO: 71051 - protein, 349 aa, Pseudomonas stutzeri
  misc_feature (1)..(349): tr|A0A061JT12|A0A061JT12_PSEST S-adenosylmethionine:tRN A ribosyltransferase-isomerase OS=Pseudomonas stutzeri KOS6 OX=1218352 GN=queA PE=3 SV=1
MQVADFSFQLPDALIARHPLAERRASRLLVLEGETGQLSHRQFADLLEYVRPGDLMVFNDTRVIPARLFGRKATGGKLEVLVERVLGSRSVLAHIRSSKSPKVGARILLDGGGEVEMIARHDALFELAFDEDVLPLLERIGHMPLPPYIDRADDIADRERYQTVYAQRAGAVAAPTAGLHFDEALLQALRDGGVETAYVTLHVGAGTFQPVRVERIEEHHMHREWLEVTQAVVDAVAACRARGGRVIAVGTTSVRSLETAARDGELKPFSGDTDIFIYPGKAFHVVDALVTNFHLPESTLLMLVSAFAGYPETMAAYAEAVAQGYRFFSYGDAMFITRNPAARGPEENQ

SEQ ID NO: 71052 - protein, 349 aa, Pseudomonas stutzeri
  misc_feature (1)..(349): tr|I4JLV6|I4JLV6_PSEST S-adenosylmethionine:tRNA ribosy ltransferase-isomerase OS=Pseudomonas stutzeri TS44 OX= 477228 GN=queA PE=3 SV=1
MQVSDFSFQLPDSLIARHPLAERRASRLLVLDGETGRLAHRHFVDLLEYVRPGDLMVFNNTRVIAARLFGRKASGGKLEILVERVLDSHRVLAHVRASKSPKPGSVIVLDGGGEAVMLARHDALFELRFGDEVLPLLERIGHMPLPPYIDRADEQADRERYQTVYAQHAGAVAAPTAGLHFDAALLAALQDKGVQTAFVTLHVGAGTFQPVRVERIEDHHMHREWLEVGQGVVEAVAACRARGGRVIAVGTTSVRSLETAARSGELRPFSGDTDIFIYPGKTFHVVDALVTNFHLPESTLLMLVAAFAGYRETMAAYAEAVREGYRFFSYGDAMFITRNQAARGPEENQ

SEQ ID NO: 71053 - protein, 294 aa, Pseudomonas synxantha
  misc_feature (1)..(294): tr|A0A419UNP0|A0A419UNP0_9PSED S-adenosylmethionine:tRN A ribosyltransferase-isomerase OS=Pseudomonas synxantha OX=47883 GN=queA PE=3 SV=1
MVFNNTRVIPARLFGQKASGGKLEILVERVLDSHRVLAHVRSSKSPKPGSSILIEGGGEAEMVARHDALFELKFAEEVLPLLERVGHMPLPPYIDRPDEDADRERYQTVYSQRLGAVAAPTAGLHFDQPLLDAIAAKGVDTAYVTLHVGAGTFQPVRVDNIEDHHMHSEWLEVSQDVVDAVAACKARGGRVVAVGTTSVRSLESAARDGVLKPFSGDTDIFIFPGRPFHVVDCLVTNFHLPESTLLMLVSAFAGYPETMAAYQAAIANEYRFFSYGDAMFITRNPAPRGPEDNL

SEQ ID NO: 71054 - protein, 349 aa, Pseudomonas synxantha
  misc_feature (1)..(349): tr|A0A0R2ZBA2|A0A0R2ZBA2_9PSED S-adenosylmethionine:tRN A ribosyltransferase-isomerase OS=Pseudomonas synxantha OX=47883 GN=queA PE=3 SV=1
MRVADFTFELPDSLIARHPLAERRASRLLTLDGPSGALAHRQFTDLLEHLRPGDLMVFNNTRVIPARLFGQKASGGKLEILVERVLDSHRVLAHVRSSKSPKPGSSLLIDGGGEAEMVARHDALFELKFAEEVLPLLERVGHMPLPPYIDRPDEDSDRERYQTVYSQRLGAVAAPTAGLHFDQPLLDAIAAKGVETAYVTLHVGAGTFQPVRVENIEDHHMHSEWLEVSQDVVDAVNACKARGGRVVAVGTTSVRSLESAARDGVLKPFSGDTDIFIFPGRPFHVVDCLVTNFHLPESTLLMLVSAFAGYPETMAAYQAAIANEYRFFSYGDAMFITRNPAPRGPEDNL

SEQ ID NO: 71055 - protein, 354 aa, Pseudomonas syringae
  misc_feature (1)..(354): sp|Q9L6W9|QUEA_PSESM S-adenosylmethionine:tRNA ribosylt ransferase-isomerase OS=Pseudomonas syringae pv. tomato (strain ATCC BAA-871 / DC3000) OX=223283 GN=queA PE=3 SV=1
MRVADFTFELPDSLIARHPLAERRSSRLLTLDGPTGALAHRQFTDLLEHLRSGDLMVFNNTRVIPARLFGQKASGGKLEILVERVLDSHRVLAHVRASKSPKPGSSILIDGGGEAEMVARHDALFELRFAEEVLPLLDRVGHMPLPPYIDRPDEGADRERYQTVYAQRAGAVAAPTAGLHFDQPLMEAIAAKGVETAFVTLHVGAGTFQPVRVEQIEDHHMHSEWLEVSQDVVDAVAACRARGGRVIAVGTTSVRSLESAARDGQLKPFSGDTDIFIYPGRPFHVVDALVTNFHLPESTLLMLVSAFAGYPETMAAYAAAIEHGYRFFSYGDAMFITRNPAPTAPQESAPEDHA

SEQ ID NO: 71056 - protein, 354 aa, Pseudomonas syringae
  misc_feature (1)..(354): tr|A0A2S3TXW7|A0A2S3TXW7_9PSED S-adenosylmethionine:tRN A ribosyltransferase-isomerase OS=Pseudomonas syringae group genomosp. 3 OX=251701 GN=queA PE=3 SV=1
MRVADFTFELPDSLIARHPLAERRSSRLLTLDGPTGALAHRQFTDLLEHLRSGDLMVFNNTRVIPARLFGQKASGGKLEILVERVLDSHRVLAHVRASKSPKPGSSILIDGGGEAEMVARHDALFELRFAEEVLPLLDRVGHMPLPPYIDRPDEGADRERYQTVYAQRAGAVAAPTAGLHFDQPLMEAIAAKGVETAFVTLHVGAGTFQPVRVEQIEDHHMHSEWLEVSQDVVDAVAACRARGGQVIAVGTTSVRSLESAARDGQLKPFSGDTDIFIYPGRPFHVVDALVTNFHLPESTLLMLVSAFAGYPETMAAYAAAIEHGYRFFSYGDAMFITRNPAPTAPQESAPEDHA

SEQ ID NO: 71057 - protein, 349 aa, Pseudomonas taeanensis
  misc_feature (1)..(349): tr|A0A0A1YL52|A0A0A1YL52_9PSED S-adenosylmethionine:tRN A ribosyltransferase-isomerase OS=Pseudomonas taeanensi s MS-3 OX=1395571 GN=queA PE=3 SV=1
MRVADFHFELPDSLIARHPLAERHASRLLVLDGPSGALAHRQFPDLLEYLRPGDLMVFNNTRVIPARLFGQKASGGKLEVLVERVLDSHRVLAHVRASKSPKPGSTILIDGGGEARMLARHDALFELGFSEEVLPLLERVGHMPLPPYIDRADDAADRERYQTVYAERAGAVAAPTAGLHFDKDLLAAIAAKGVETAFVTLHVGAGTFQPVRVERIEDHLMHSEWLEVDQAVVDAVSACRARGGRVIAVGTTSVRSLESAARDGVLKSFSGDTDIFIYPGRPLHVVDALVTNFHLPESTLLMLVSAFAGYPETMAAYQSAIAERYRFFSYGDAMFITRNPAPRGPEDQV

SEQ ID NO: 71058 - protein, 353 aa, Pseudomonas taetrolens
  misc_feature (1)..(353): tr|A0A0J6GWS0|A0A0J6GWS0_PSETA S-adenosylmethionine:tRN A ribosyltransferase-isomerase OS=Pseudomonas taetrolen s OX=47884 GN=queA PE=3 SV=1
MRVADFTFELPDSLIARHPLAERRNSRLLTLDGQSGALAHRQFTDLLEHLRSGDLMVFNNTRVIPARLFGQKASGGKLEILVERVLDSHRVLAHVRSSKSPKPGSKILIDGGGEAEMLARHDALFELGFAEEVLPLLDRVGHMPLPPYIDRPDEGSDRERYQTVYAQRLGAVAAPTAGLHFDEPLMQAIAAKGVETAFVTLHVGAGTFQPVRVERLEDHHMHTEWLEVGQDVVDAVAACRARGGRVIAVGTTSVRSLESAARDGVLKPFSGDTDIFIFPGRPFHVVDALVTNFHLPESTLLMLVSAFAGYPETMAAYKAAVEHGYRFFSYGDAMFITRNPAPTAPAPAPEDQA

SEQ ID NO: 71059 - protein, 349 aa, Pseudomonas taiwanensis; identical to SEQ ID NO: 70975
  misc_feature (1)..(349): tr|V7D4V7|V7D4V7_9PSED S-adenosylmethionine:tRNA ribosy ltransferase-isomerase OS=Pseudomonas taiwanensis SJ9 O X=1388762 GN=queA PE=3 SV=1

SEQ ID NO: 71060 - protein, 349 aa, Pseudomonas thivervalensis; identical to SEQ ID NO: 70905
  misc_feature (1)..(349): tr|A0A176NJM2|A0A176NJM2_9PSED S-adenosylmethionine:tRN A ribosyltransferase-isomerase OS=Pseudomonas thiverval ensis OX=86265 GN=queA PE=3 SV=1

SEQ ID NO: 71061 - protein, 349 aa, Pseudomonas tolaasii
  misc_feature (1)..(349): tr|A0A2N0E0A7|A0A2N0E0A7_PSETO S-adenosylmethionine:tRN A ribosyltransferase-isomerase OS=Pseudomonas tolaasii NCPPB 2192 OX=564423 GN=queA PE=3 SV=1
MRVADFTFELPDSLIARHPLAERRASRLLTLDGVSGALAHRQFTDLLEHLRPGDLMVFNNTRVIPARLFGQKASGGKLEILVERVLDSHRVLAHVRSSKSPKPGSSILIDGGGEAEMVARHDALFELKFAEEVLPLLERVGHMPLPPYIDRPDEDADRERYQTVYSQRLGAVAAPTAGLHFDQPLLDAIAAKGVETAYVTLHVGAGTFQPVRVDKIEDHHMHSEWLEVSQEVVDAVAACKARGGRVVAVGTTSVRSLESAARDGVLKPFSGDTDIFIFPGRPFHVVDCLVTNFHLPESTLLMLVSAFAGYPETMAAYQAAIANEYRFFSYGDAMFITRNPAPRGPEETL

SEQ ID NO: 71062 - protein, 347 aa, Pseudomonas toyotomiensis
  misc_feature (1)..(347): tr|A0A1I5XAM9|A0A1I5XAM9_9PSED S-adenosylmethionine:tRN A ribosyltransferase-isomerase OS=Pseudomonas toyotomie nsis OX=554344 GN=queA PE=3 SV=1
MRVADFHFDLPESLIARHPLAERRASRLLQLDGPSGELRHGQFTDVLEQLRPGDLMVFNNTRVIPARLFGQKASGGKLEVLVERVLDQYRVLAHVRSSKSPKPGSQILIDGGGEAEMVARHDALFELRFAEPVLPLLERVGHMPLPPYIDRPDDEADRERYQTVYAQKAGAVAAPTAGLHFDDELLAAIRAKGVDTAFVTLHVGAGTFQPVRVERIEDHHMHSEWLAVGQDVVDAVAACRARGGRVVAVGTTSVRSLETAARDGELKPFSGDTDIFIYPGRPFHVVDALVTNFHLPESTLLMLVSAFAGYPETMAAYREAVAQGYRFFSYGDAMFITRNPAARGPEV

SEQ ID NO: 71063 - protein, 354 aa, Pseudomonas tremae; identical to SEQ ID NO: 70881
  misc_feature (1)..(354): tr|A0A0Q0CLA5|A0A0Q0CLA5_9PSED S-adenosylmethionine:tRN A ribosyltransferase-isomerase OS=Pseudomonas tremae OX =200454 GN=queA PE=3 SV=1

SEQ ID NO: 71064 - protein, 349 aa, Pseudomonas trivialis
  misc_feature (1)..(349): tr|A0A0H5AF07|A0A0H5AF07_9PSED S-adenosylmethionine:tRN A ribosyltransferase-isomerase OS=Pseudomonas trivialis OX=200450 GN=queA PE=3 SV=1
MRVADFTFELPDSLIARHPLAERRASRLLTLDGVSGALAHRQFTDLLEHLRPGDLMVFNNTRVIPARLFGQKASGGKLEILVERVLDSHRVLAHVRSSKSPKPGSVILIDGGGEAEMVARHDALFELRFAEEVLPLLERVGHMPLPPYIDRPDEDADRERYQTVYSQRPGAVAAPTAGLHFDQPLLDAIAAKGVETAYVTLHVGAGTFQPVRVDNIEDHHMHSEWLEVSQDVVDAVNACKARGGRVVAVGTTSVRSLESAARDGVLKPFSGDTDIFIYPGRPFHVVDCLVTNFHLPESTLLMLVSAFAGYPETMAAYQAAIANEYRFFSYGDAMFITRNPAPRGPEETL

SEQ ID NO: 71065 - protein, 349 aa, Pseudomonas trivialis
  misc_feature (1)..(349): tr|A0A0R2ZT80|A0A0R2ZT80_9PSED S-adenosylmethionine:tRN A ribosyltransferase-isomerase OS=Pseudomonas trivialis OX=200450 GN=queA PE=3 SV=1
MRVADFTFELPDSLIARHPLAERRASRLLTLDGVSGALAHRQFTDLLEHLRPGDLMVFNNTRVIPARLFGQKASGGKLEILVERVLDSHRVLAHVRSSKSPKPGSSILIDGGGEAEMVARHDALFELKFAEEVLPLLERVGHMPLPPYIDRPDEDADRERYQTVYSQRLGAVAAPTAGLHFDQPLLDAIAAKGVDSAYVTLHVGAGTFQPVRVDNIEDHHMHSEWLEVSQDVVDAVAACKARGGRVVAVGTTSVRSLESAARDGVLKPFSGDTDIFIYPGRPFHVVDCLVTNFHLPESTLLMLVSAFAGYPETMAAYQAAIANEYRFFSYGDAMFITRNPAPRGPEEQP

SEQ ID NO: 71066 - protein, 349 aa, Pseudomonas umsongensis
  misc_feature (1)..(349): tr|A0A1H1PW12|A0A1H1PW12_9PSED S-adenosylmethionine:tRN A ribosyltransferase-isomerase OS=Pseudomonas umsongens is OX=198618 GN=queA PE=3 SV=1
MRVADFTFELPDSLIARHPLAERRGSRLLTLDGVSGALAHRQFTDLLEHLRSGDLMVFNNTRVIPARLFGQKASGGKLEILVERVLDSHRVLAHVRSSKSPKPGSKILIDGGGEAEMLARHDALFELGFAEEVLPLLDRVGHMPLPPYIDRPDEGSDRERYQTVYAQRLGAVAAPTAGLHFDQVLMEAIAAKGVETAFVTLHVGAGTFQPVRVEKIEDHHMHTEWLEVGQDVVDAVAACRARGGRVVAVGTTSVRSLESAARDGVLKPFSGDTDIFIYPGRPFHVVDALVTNFHLPESTLLMLVSAFAGYPETMAAYKAAVDNEYRFFSYGDAMFITRNPAPRGPEDKE

SEQ ID NO: 71067 - protein, 349 aa, Pseudomonas vancouverensis
  misc_feature (1)..(349): tr|A0A1H2P942|A0A1H2P942_9PSED S-adenosylmethionine:tRN A ribosyltransferase-isomerase OS=Pseudomonas vancouver ensis OX=95300 GN=queA PE=3 SV=1
MRVADFTFELPDSLIARHPLAERRGSRLLTLDGVSGALAHRQFTDLLEHLRPGDLMVFNNTRVIPARLFGQKASGGKLEILVERVLDSHRVLAHVRSSKSPKPGSKILIDGGGEAEMLARHDALFELGFTEEVLPLLDRVGHMPLPPYIDRPDEGADRERYQTVYAQRLGAVAAPTAGLHFDQVLMEAIAAKGVETAFVTLHVGAGTFQPVRVEKIEDHHMHSEWLEVGQDVVDAVAACRARGGRVVAVGTTSVRSLESAARDGVLKPFSGDTDIFIYPGRPFHVVDALVTNFHLPESTLLMLVSAFAGYPETMAAYKAAVDNEYRFFSYGDAMFITRNPAPRGPEDKE

SEQ ID NO: 71068 - protein, 349 aa, Pseudomonas veronii
  misc_feature (1)..(349): tr|A0A1D3K3C2|A0A1D3K3C2_9PSED S-adenosylmethionine:tRN A ribosyltransferase-isomerase OS=Pseudomonas veronii 1 YdBTEX2 OX=1295141 GN=queA PE=3 SV=1
MRVADFTFELPDSLIARHPLAERRASRLLTLDGLSGALAHRQFTDLLEHLRPGDLMVFNNTRVIPARLFGQKASGGKLEILVERVLDSHRVLAHVRSSKSPKPGSTLLIDGGGEAEMVARHDALFELKFAEEVLPLLERVGHMPLPPYIDRPDEDADRERYQTVYSQRLGAVAAPTAGLHFDQPLLDAIAAKGVESAYVTLHVGAGTFQPVRVDNIEDHHMHSEWLEVSQDVVDAVNACKARGGRVIAVGTTSVRSLESAARDGVLKPFSGDTDIFIYPGRPFHVVDALVTNFHLPESTLLMLVSAFAGYPETMAAYQAAIDNGYRFFSYGDAMFITRNPAPRGPEEQL

SEQ ID NO: 71069 - protein, 349 aa, Pseudomonas veronii; identical to SEQ ID NO: 71068
  misc_feature (1)..(349): tr|A0A439EA80|A0A439EA80_9PSED S-adenosylmethionine:tRN A ribosyltransferase-isomerase OS=Pseudomonas veronii O X=76761 GN=queA PE=3 SV=1

SEQ ID NO: 71070 - protein, 353 aa, Pseudomonas versuta
  misc_feature (1)..(353): tr|A0A0M3UD76|A0A0M3UD76_9PSED S-adenosylmethionine:tRN A ribosyltransferase-isomerase OS=Pseudomonas versuta O X=1788301 GN=queA PE=3 SV=1
MRVADFTFELPDSLIARHPLAERRNSRLLTLDGESGALAHRQFTDLLEHLRPGDLMVFNNTRVIPARLFGQKASGGKLEILVERVLDSHRVLAHVRSSKSPKPGSKILIDGGGEAQMLARHDALFELGFAEEVLPLLDRVGHMPLPPYIDRPDEGSDRERYQTVYAERLGAVAAPTAGLHFDEPLMQAIAAKGVETTFVTLHVGAGTFQPVRVERLEDHHMHTEWLEVGQDVVDAVAACRARGGRVIAVGTTSVRSLESAARDGVLKPFSGDTDIFIFPGRPFHVVDALVTNFHLPESTLLMLVSAFAGYPETMAAYKAAVEHGYRFFSYGDAMFITRNPAPTAPAPAPEDQA

SEQ ID NO: 71071 - protein, 354 aa, Pseudomonas viridiflava
  misc_feature (1)..(354): tr|A0A3M4NT71|A0A3M4NT71_PSEVI S-adenosylmethionine:tRN A ribosyltransferase-isomerase OS=Pseudomonas viridifla va OX=33069 GN=queA PE=3 SV=1
MRVADFTFELPDSLIARHPLAERRSSRLLTLDGPTGALAHRQFTDLLEHLRPGDLMVFNNTRVIPARLFGQKASGGKLEILVERVLDSHRVLAHVRSSKSPKPGSSILIDGGGEAEMVTRHDALFELRFAEEVLPLLERVGHMPLPPYIERPDEGADRERYQTVYAQRAGAVAAPTAGLHFDQPLLEAIAAKGVETAFVTLHVGAGTFQPVRVEQIEDHHMHSEWLEVGQDVVDAVAACRARGGRVIAVGTTSVRSLESAARDGELKPFSGDTDIFIYPGRPFHVVDALVTNFHLPESTLLMLVSAFAGYPETMAAYAAAIEHGYRFFSYGDAMFITRNPAPTAPQESAPEDHA

SEQ ID NO: 71072 - protein, 354 aa, Pseudomonas viridiflava
  misc_feature (1)..(354): tr|A0A4U3DPC3|A0A4U3DPC3_PSEVI S-adenosylmethionine:tRN A ribosyltransferase-isomerase OS=Pseudomonas viridifla va OX=33069 GN=queA PE=3 SV=1
MRVADFTFDLPDSLIARHPLAERRSSRLLTLDGVSGALAHRQFTDLLEHLRPGDLMVFNNTRVIPARLFGQKASGGKLEILVERVLDSHRVLAHVRSSKSPKPGSSILIDGGGEAEMVARHDALFELRFAEEVLPLLDRVGHMPLPPYIDRPDEGADRERYQTVYAERAGAVAAPTAGLHFDQPLLEAIAAKGVETTFVTLHVGAGTFQPVRVKQIEDHHMHTEWLEVGQDVVDAVAACRARGGRVIAVGTTSVRSLESAARDGVLKPFSGDTDIFIYPGRPFHVVDALVTNFHLPESTLLMLVSAFAGYPETMAAYAAAIEHGYRFFSYGDAMFITRNPAPTAPQESVPEDHA

SEQ ID NO: 71073 - protein, 349 aa, Pseudomonas vranovensis
  misc_feature (1)..(349): tr|A0A423E0D1|A0A423E0D1_9PSED S-adenosylmethionine:tRN A ribosyltransferase-isomerase OS=Pseudomonas vranovens is OX=321661 GN=queA PE=3 SV=1
MRVADFSFELPDSLIARHPLAQRHSSRLLTLDGPSGALAHRQFTDLLEHLRPGDLMVFNNTRVIPARLFGQKASGGKLEILVERVLDSHRVLAHVRSSKAPKPGTQILIDGGGEAEMFARHDALFELRFAEEVLPLLDRVGHMPLPPYIDRPDEGADRERYQTVYAERAGAVAAPTAGLHFDEELLAKIAAKGVETAFVTLHVGAGTFQPVRVERIEDHHMHKEWLEVGQDVVDAVAACRARGGRVVAVGTTSVRSLESAARDGELKAFSGDTDIFIFPGRPFHVVDALVTNFHLPESTLLMLVSAFAGYPETMAAYAAAVEHGYRFFSYGDAMFITRNPAPRGPEDQA

SEQ ID NO: 71074 - protein, 349 aa, Pseudomonas wadenswilerensis
  misc_feature (1)..(349): tr|A0A380T4L8|A0A380T4L8_9PSED S-adenosylmethionine:tRN A ribosyltransferase-isomerase OS=Pseudomonas wadenswil erensis OX=1785161 GN=queA PE=3 SV=1
MRVADFSFELPDSLIARHPLAQRHSSRLLTLDGPSGALAHRQFTDLLEHLRPGDLMVFNNTRVIPARLFGQKASGGKLEILVERVLDSHRVLAHVRSSKAPKPGTPIVIDGGGEAEMVARHDALFELRFAEEVLPLLDRVGHMPLPPYIDRPDEGADRERYQTVYAERAGAVAAPTAGLHFDEELLAKIAAKGVETAFVTLHVGAGTFQPVRVERIEDHHMHKEWLEVGQDVVDAVAACRARGGRVVAVGTTSVRSLESAARDGELKAFSGDTDIFIFPGRPFHVVDALVTNFHLPESTLLMLVSAFAGYPETMAAYAAAVENGYRFFSYGDAMFITRNPAPRGPEDQA

SEQ ID NO: 71075 - protein, 353 aa, Pseudomonas weihenstephanensis
  misc_feature (1)..(353): tr|A0A0J6ITC2|A0A0J6ITC2_9PSED S-adenosylmethionine:tRN A ribosyltransferase-isomerase OS=Pseudomonas weihenste phanensis OX=1608994 GN=queA PE=3 SV=1
MRVADFTFELPDSLIARHPLAERRNSRLLTLDGESGALAHRQFTDLLEHLRSGDLMVFNNTRVIPARLFGQKASGGKLEILVERVLDSHRVLAHVRSSKSPKPGSKILIDGGGEAQMLARHDALFELGFAEEVLPLLDRVGHMPLPPYIDRPDEGSDRERYQTVYAQRLGAVAAPTAGLHFDEPLMQAIAAKGVETAFVTLHVGAGTFQPVRVERLEDHHMHTEWLEVGQDVVDAVAACRARGGRVIAVGTTSVRSLESAARDGVLKPFSGDTDIFIFPGRPFHVVDALVTNFHLPESTLLMLVSAFAGYPETMAAYQAAVEHGYRFFSYGDAMFITRNPAPTAPAPAPEDQA

SEQ ID NO: 71076 - protein, 349 aa, Pseudomonas xanthomarina
  misc_feature (1)..(349): tr|A0A098FKG5|A0A098FKG5_9PSED S-adenosylmethionine:tRN A ribosyltransferase-isomerase OS=Pseudomonas xanthomar ina OX=271420 GN=queA PE=3 SV=1
MQVADFFFQLPDALIARHPLAERRASRLLVLEGETGKLSHRNFADLLDHVRPGDLMVFNNTRVIPARLFGQKASGGKLEILVERVVGNRSVLAHVRSSKSPKAGSKILLDGGGEAEMIARHDALFELEFDEDVLPLLERIGHMPLPPYIDRPDAAADRERYQTVYAQRAGAVAAPTAGLHFDEALLQTLRESGVETAYVTLHVGAGTFQPVRVERIEEHHMHREWLEVGQDVVDAVAACRSRGGRVIAVGTTSVRSLETAARDGELKPFSGDTDIFIYPGKSFHVVDALVTNFHLPESTLLMLVSAFAGYPETMAAYAEAVAQRYRFFSYGDAMFITRNPAPRGPEETQ

SEQ ID NO: 71077 - protein, 349 aa, Pseudomonas xanthomarina
  misc_feature (1)..(349): tr|A0A1M5SGA5|A0A1M5SGA5_9PSED S-adenosylmethionine:tRN A ribosyltransferase-isomerase OS=Pseudomonas xanthomar ina DSM 18231 OX=1403346 GN=queA PE=3 SV=1
MQVSAFSFDLPDSLIARHPLAERRGSRLLTLDGPTGLLGHHSFAELLDCVRPGDLMVFNNTRVIPARLFGQKATGGKVEVLVERVLDDRRALAHIRSSKSPKPGGRIHIDGGGDALMLARHDALFELEFNEDVLPLLERVGHMPLPPYIDRPDEAADRERYQTVYAQRVGAVAAPTAGLHFDAQLLAALRDKGVESAFVTLHVGAGTFQPVRVERIEEHHMHREWLEVDQGVVDAVAACRARGGRVVAVGTTSVRSLESAARDGVLKPFSGDTDIFLYPGKPFHVVDALVTNFHLPESTLLMLVSAFAGYPETMAAYAEAIASGYRFFSYGDAMFITRNPAPRGPEDSQ

SEQ ID NO: 71078 - protein, 348 aa, Pseudomonas xinjiangensis
  misc_feature (1)..(348): tr|A0A1H1LJD9|A0A1H1LJD9_9PSED S-adenosylmethionine:tRN A ribosyltransferase-isomerase OS=Pseudomonas xinjiange nsis OX=487184 GN=queA PE=3 SV=1
MRVSDFRFELPDELIARHPLAERSASRLLCLDGPTGAFMHRQFVDLLDCLRAGDLMVFNNTRVIPARLFGRKETGGQVEILVERVLDGFRVLAHIRASKSPKPGSRILFDDGASAEMLARHDALFELRFEQPVLPLMERVGHMPLPPYIDRPDESSDRERYQTVYAERAGAVAAPTAGLHFDKALLEAIRAKGVSTAQVTLHVGAGTFQPVRVERIEDHHMHSEWLEVDESVVEAVKACKARGGRVIAVGTTSVRSLETAARDGNIQPFSGDTDIFIYPGRPFNVVDALVTNFHLPESTLLMLVSAFAGYSETLAAYREAVEQRYRFFSYGDAMFITRNPAAAGPEDL

SEQ ID NO: 71079 - protein, 349 aa, Pseudomonas yamanorum
  misc_feature (1)..(349): tr|A0A143GNH3|A0A143GNH3_9PSED S-adenosylmethionine:tRN A ribosyltransferase-isomerase OS=Pseudomonas yamanorum OX=515393 GN=queA PE=3 SV=1
MRVADFTFELPDSLIARHPLAERRASRLLTLDGVSGALAHRQFTDLLEHLRPGDLMVFNNTRVIPARLFGQKSSGGKLEILVERVLDSHRVLAHVRSSKSPKPGSKILIDGGGEAEMLARHDALFELGFAEEVLPLLERVGHMPLPPYIDRPDEDSDRERYQTVYSQRLGAVAAPTAGLHFDQPLLDAIAAKGVETAYVTLHVGAGTFQPVRVDNIEDHHMHSEWLEVSQEVVDAVDACKARGGRVVAVGTTSVRSLESAARDGVLKPFSGDTDIFIYPGRPFHVVDALVTNFHLPESTLLMLVSAFAGYPETMAAYQAAIDNGYRFFSYGDAMFITRNPAPRGPEEQS

SEQ ID NO: 71080 - protein, 349 aa, Pseudomonas yamanorum
  misc_feature (1)..(349): tr|A0A1H2FSE8|A0A1H2FSE8_9PSED S-adenosylmethionine:tRN A ribosyltransferase-isomerase OS=Pseudomonas yamanorum OX=515393 GN=queA PE=3 SV=1
MRVADFTFELPDSLIARHPLAERRASRLLTLDGVSGALAHRQFTDLLEHLRPGDLMVFNNTRVIPARLFGQKASGGKLEILVERVLDSHRVLAHVRSSKSPKPGSKILIDGGGEAEMLARHDALFELGFAEEVLPLLERVGHMPLPPYIDRPDEDSDRERYQTVYSQRLGAVAAPTAGLHFDQPLLDAIAAKGVETAYVTLHVGAGTFQPVRVDNIEDHHMHSEWLEVSQEVVDAVDACKARGGRVVAVGTTSVRSLESAARDGVLKPFSGDTDIFIYPGRPFHVVDALVTNFHLPESTLLMLVSAFAGYPETMAAYQAAIDNGYRFFSYGDAMFITRNPAPRGPEEQS

SEQ ID NO: 71081 - protein, 349 aa, Pseudomonas yangmingensis
  misc_feature (1)..(349): tr|A0A1I4R6K7|A0A1I4R6K7_9PSED S-adenosylmethionine:tRN A ribosyltransferase-isomerase OS=Pseudomonas yangminge nsis OX=1720063 GN=queA PE=3 SV=1
MHVSDFHFDLPDNLIARHPLAERRASRLLCLDGPSGALAHRQFVDLLDYLRPGDLMVFNDTRVIPARLFGRKESGGQLEILVERVLDGQRVLAHVRSSKSPKPGSLILLEDGTPVRMLARHGALFELGFDTDVLALLERVGHMPLPPYIDRPDETADRERYQTVYADKAGAVAAPTAGLHFDRELLAAIESMGVQTARVTLHVGAGTFQPVRVERIEEHHMHSEWLEVSAGVVEAVRACKARGGRVIAVGTTSVRSLETAAQSGEIAPYTGDTDIFLYPGKRFNVVDALVTNFHLPESTLLMLVAAFAGYPQAMAAYRAAVEQQYRFFSYGDAMFITRNPAPQGPEDRS

SEQ ID NO: 71082 - protein, 347 aa, Pseudomonas zeshuii; identical to SEQ ID NO: 70962
  misc_feature (1)..(347): tr|A0A1M6ASR0|A0A1M6ASR0_9PSED S-adenosylmethionine:tRN A ribosyltransferase-isomerase OS=Pseudomonas zeshuii O X=1076620 GN=queA PE=3 SV=1

SEQ ID NO: 71083 - protein, 349 aa, Pseudomonas zhaodongensis
  misc_feature (1)..(349): tr|A0A365Q0D7|A0A365Q0D7_9PSED S-adenosylmethionine:tRN A ribosyltransferase-isomerase OS=Pseudomonas zhaodonge nsis OX=1176257 GN=queA PE=3 SV=1
MQVSAFSFDLPDSLIARYPLAERRASRLLTLDGPTGSLGHHGFVQLLDYLRPGDLMVFNNTRVIPARLFGQKDTGGKVEVLIERVLDGRRVLAHIRSSKSPKAGARIHIDGGGEALMLARQDTLFELEFEEDVLPLLERVGHMPLPPYIDRPDDVADRERYQTVYAQRAGAVAAPTAGLHFDTELLAALRDKGVESAFVTLHVGAGTFQPVRVDRIEEHHMHREWLEVDQGVVDAVAACHARGGRVVAVGTTSVRSLESAARDGVLKPFSGDTDIFLYPGKPFHVVDALVTNFHLPESTLLMLVSAFAGYPETMAAYAEAIAKGYRFFSYGDAMFITRNPAPRGPEDSQ

SEQ ID NO: 71084 - protein, 349 aa, Pseudomonas zhaodongensis
  misc_feature (1)..(349): tr|A0A3M2I037|A0A3M2I037_9PSED S-adenosylmethionine:tRN A ribosyltransferase-isomerase OS=Pseudomonas zhaodonge nsis OX=1176257 GN=queA PE=3 SV=1
MQVSDFSFQLPDSQIARHPLAERRASRLLVLDGPSGRLEHRRFADLLDHLRPGDLMVFNNTRVIPARLFGQKDTGGKVEVLVERVLDGSRVMAHIRSSKSPKPGGIINIDGGGRALMMARHDALFELDFGEDVLALLERVGHMPLPPYIDRPDETADRERYQTVYAQRAGAVAAPTAGLHFDAELLAALKSKGVDSTFVTLHVGAGTFQPVRVERIEEHHMHREWLEVGQDVVEAVAACRDRGGRVVAVGTTSVRSLESAARDGVLRPFSGDTDIFLYPGKPFHVVDALVTNFHLPESTLLMLVSAFAGYPETMAAYAEAIAEGYRFFSYGDAMFITRNPAPRGPEDSQ

SEQ ID NO: 71085 - protein, 370 aa, Pseudonocardia asaccharolytica
  misc_feature (1)..(370): tr|A0A511D1H8|A0A511D1H8_9PSEU S-adenosylmethionine:tRN A ribosyltransferase-isomerase OS=Pseudonocardia asacch arolytica DSM 44247 = NBRC 16224 OX=1123024 GN=PA7_2477 0 PE=3 SV=1
MTAATRFELPPELSATEPPEARGAARDDVRLLVARPTGSIRHRRFRDLPTALVPGDLVVVNTSPTAPAAVDALRGDGRGVTVHISGPVPGGPEEFVVELRSPGGERVSDGRAGEQIELPGNGSVVLRGGHPDEAVRAGSRLWRARFDIGADLMGWLHRHGRPISYSYLRRHWPLSAFQTIFARPGTADGHPFPSAEMPSAARPFTHPVLAALAARGVGVAEIVLHTGVSSLEADEVPLPERYRVPPATADAVNATRAAGGRVVAVGTTVTRALETVAAADRTVRAGAGWTDLVLGPDRPARIVGGLITGWHEPQASHLLLLEAVAGGELVARAYAAALAERYRWHEFGDTCLLFGPDRLLPATTTTDRIR

SEQ ID NO: 71086 - protein, 358 aa, Pseudonocardia cypriaca
  misc_feature (1)..(358): tr|A0A543FXQ4|A0A543FXQ4_9PSEU S-adenosylmethionine:tRN A ribosyltransferase-isomerase OS=Pseudonocardia cypria ca OX=882449 GN=FB388_5802 PE=3 SV=1
MSSASTTFTMPPELSAAEPPEARGLDRDEVRLLVARERSPVRHTTFRALPSVLRRGDLVVVNTSDTEPAAVDGHRADGRPVTVHVSGPAPDQLHVVELRTPDGQRVADGVAGEGIALPCGVVATLLTGHPDPRVATGSRLWRARIPVAGGLRAWLAEAGRPIRYSYVDRRWPIDAYRTVFARSDGEFGSAEMPSAGRPFTSGILNALHARGVGVARIVLHTGVSSLEAGEVPLPERYRVPPETADAVNAVRAAGGRVVAVGTTTTRALETAAAPDGFVTASDGWTHLVLGPDRPARVVDGLVTGWHEPQASHLLLLEAVAGARLVSRAYAAALEHRYRWHEFGDSCLLLPAQSVRRSG

SEQ ID NO: 71087 - protein, 355 aa, Pseudonocardia dioxanivorans
  misc_feature (1)..(355): tr|F4CU12|F4CU12_PSEUX S-adenosylmethionine:tRNA ribosy ltransferase-isomerase OS=Pseudonocardia dioxanivorans (strain ATCC 55486 / DSM 44775 / JCM 13855 / CB1190) OX =675635 GN=Psed_1174 PE=3 SV=1
MTVSFVLPDGLSATAPPESRGVPRDGVRLLVARAGRPVRHRRFRDLAASLAPGDLVVVNTSTTVPAAVAGTRGDGRPVVLHVSGPVPGAPDRWVVELRTPGRERVHDGRPGEVVTLPAGAHAVLVAAHPDLGATTSRLWRAIVETGTPGRGLADWLELHGRPITYPYLGTVPPIEAFRTVLARPVRGFASAEMPSAGRPFTGAVLDRLAARGVGVAELVLHTGVSSPEVGEPPLPERFRVPARTADAVNRTRAVGGRVVAVGTTVTRALETVADEDGTVRAGSGWTDLVLGPHRPARVTTGLVTGWHEPQASHLLLLEAVAGRELVAAAYGAALAEGYLWHEFGDSCLLLPRHGR

SEQ ID NO: 71088 - protein, 426 aa, Pseudonocardia endophytica
  misc_feature (1)..(426): tr|A0A4R1HRS1|A0A4R1HRS1_9PSEU S-adenosylmethionine:tRN A ribosyltransferase-isomerase OS=Pseudonocardia endoph ytica OX=401976 GN=EV378_1101 PE=3 SV=1
MRRGDPGRGAGAGRAANRPTEGWAGAGPAGGEQPGRTAASAARAEPWRRAQAATRFTVPPQLSADRPPEARGLARDEVRLLVAAAHRPIRHTRFTGLPAALRPGDLIVVNTSDTEPAALDGVREDGRPVVVHVSGPDPDGGDAIGGDRSGIAGSDGPGRADRAGSIVVELRSPDGERVGDGRAGETVTLPAGAVLRLVAGYPDRSTTSGNRLWRATLPVEGGLPGYLAAVGRPIRYGYLRAPRPLQDYRTVVASRTPGELAGAEMPSAARPLSGRVLDGLRARGVGLATITLHAGVSSPEADEVPLPERYRVPAGTAAAVNATRAAGRRVVAVGTTVTRALETVASPDGTVRSGEGWTDLVLGPDRPVRTVTGLVTGWHEPEASHLLLLEAVAGPRLVGRAYRSALGRGYLWHEFGDSCLVLPALG

SEQ ID NO: 71089 - protein, 358 aa, Pseudonocardia hierapolitana
  misc_feature (1)..(358): tr|A0A561SMY8|A0A561SMY8_9PSEU S-adenosylmethionine:tRN A ribosyltransferase-isomerase OS=Pseudonocardia hierap olitana OX=1128676 GN=FHX44_112118 PE=3 SV=1
MTASATTFTVPPELSATEPPEARGLARDEVRLLVARGRSPVRHTTFRSLPAALRRGDLVVVNTSDTEPAAVDGHRADGTPVTVHVSGPAPDNLHVVELRTPDGQRVTDGNAGEGIALPCGVVATLLTGHPDPRIATGSRLWRARIPVAGGLRSWLAEFGRPIRYSYVHRQWPLDAYRTVFARAEAEFGSAEMPSAGRPFTVAVLTALHARGVRVARIVLHTGVSSPEVGEPPLPERYRVPPETADAVNATRAAGGRVVTVGTTTTRALETVAAPDGHVTAGAGWTHLVLGPDRPARVVDGLVTGWHEPEASHLLLLEAVAGARLVSRAYAAAVEHRYRWHEFGDSCLLLPAQSTRRSG

SEQ ID NO: 71090 - protein, 351 aa, Pseudonocardia hydrocarbonoxydans
  misc_feature (1)..(351): tr|A0A4Y3WUQ3|A0A4Y3WUQ3_9PSEU S-adenosylmethionine:tRN A ribosyltransferase-isomerase OS=Pseudonocardia hydroc arbonoxydans OX=76726 GN=PHY01_45610 PE=3 SV=1
MTRARPATRFAAGPSATRPPAVRDGVRLMVAGDQVTHHRFRDLPAALEPGDLVVVNTSDTEPAAVPGRRADGRPVVLHVSGPARTGGLVVELRTPGGDRVTDAVAGEPVALPAGVVAVLHAAVPGAAPGRLWRATMPVEGGPGRYLAAVGRPIRYSYVPREWPIAEYRTVFATPVPGEFGSAEMPSAGRPFTPAVLDALRGRGVRTAEVVLHTGVSSPEADEVPLPERFRVPAATADTVNATRAAGGRVVAVGTTVTRALETAADARGTVTAAAGWTELVLGPDRPARVVDGLVTGWHEPEASHLLLLEAVAGAELVGRAYAASGERPYRWHEFGDSCLLLPAREVGRRAR

SEQ ID NO: 71091 - protein, 354 aa, Pseudonocardia kunmingensis
  misc_feature (1)..(354): tr|A0A543CYM3|A0A543CYM3_9PSEU S-adenosylmethionine:tRN A ribosyltransferase-isomerase OS=Pseudonocardia kunmin gensis OX=630975 GN=FB558_8062 PE=3 SV=1
MTAPTRRTGRPAAEPPEERGIARDEVRLLVARERGPLRHTTFRALPTALRRGDLVVVNTSDTEPAAVDGLRADGSAVTLHVSGPAPDDLHVVELRTPDGRTVTDGVAGESVHLPCGVVAALVTGHPDPRAVSGSGPWRARIPVAGGLRPWLACTGRPISSCGSPRWPLESYRTMFSRPEPEFGSAEMPSAGRPFTPEVLYGLRARGVGVARLVLHAGLSSPAAGAAPLPERYRVPPATADAVNAAHAGGGRVVAVGATVARALETVADPSGRVTAGAGWTHLLLGARRGPRVVDGLLTGWHDPAAAHLMALLDAVAGARLVDRAYAAAVEHGYRWHEFGDSCLLLSTCPAHRVR

SEQ ID NO: 71092 - protein, 356 aa, Pseudonocardia sp.
  misc_feature (1)..(356): tr|A0A292YUI5|A0A292YUI5_9PSEU S-adenosylmethionine:tRN A ribosyltransferase-isomerase OS=Pseudonocardia sp. N2 3 OX=1987376 GN=TOK_1611 PE=3 SV=1
MMTAPLSFVLPDRLSATEPPEARGVPRDGVRLLVARPGVPVRHRRFRDLPSALAPGDVLVVNTSTTAPAAVDGTRADGRPVTVHVSGPVPDDPGRWVVELRTPDRERVHDGSPGEVLTLPCGAAAVLVAAYPDPRAATSRLWCATIGAGGSLPAWLERIGRPITYSHLRTAPSIADFRTVVSRPDRDFAGTGFPSAEMPSAGRPLTRDVLRRLAARGVGVAEVVLHTGVSSLEAGETPLPERYRVPARTADAVNAARAARRRVVAVGTTVTRALETVAAEDGSVRAGSGWTDLVLGPGRPARTVDGLVTGWHEPQASHLLLLEAVAGRDTVAAAYEAALAEGYLWHEFGDSCLLLA

SEQ ID NO: 71093 - protein, 361 aa, Pseudonocardia sp.
  misc_feature (1)..(361): tr|A0A1Q4DLJ5|A0A1Q4DLJ5_9PSEU S-adenosylmethionine:tRN A ribosyltransferase-isomerase OS=Pseudonocardia sp. 73 -21 OX=1895809 GN=BGP03_15590 PE=3 SV=1
MRATTTFVLPPELEADAPPPTRDGVRLLVARSRRPLRHVRFTDLPSALVPGDLLVVNTSDTEPAAVDGHRDDGRPVVLHVSGPTPAGRRFPARESADLRARVDTFLVELRTPDGRRVRDGRPGEVVHLPRGVDAELVTTGRIREARIAVEGDVRAWLAAVGRPVRYAHLREHPPLTEYRTVFAEPTGEFASAESPSAGRPFTPTVLEGLRTRGVGVARLVLHTGVSSLEEDEVPLPERYRVPAATADAVNRTRAAGGRIVAVGTTATRALETVAEPDGSVRAGAGWTDLVLGPDRPARVVDGLVTGWHEPQASHLLLLEAVAGPRLVGRAYAAAVERGYRWHEFGDSCLLLPGPGAVGRTP

SEQ ID NO: 71094 - protein, 352 aa, Pseudonocardia sulfidoxydans
  misc_feature (1)..(352): tr|A0A511DA84|A0A511DA84_9PSEU S-adenosylmethionine:tRN A ribosyltransferase-isomerase OS=Pseudonocardia sulfid oxydans NBRC 16205 OX=1223511 GN=PSU4_06790 PE=3 SV=1
MTVSFVLPDRLSATEPPEARGLPRDGVRLLVARPGAPVRHRRFRDLPSALAPGDLLVVNTSSTAPAAVDGTRSDGRPVTVHISGPVPEVPDRWVVELRTPGRERVHDGRSGEVVTLPGGAHAVLVAAHPDPAAVTSRLWRAMIVTDGPFLRWLERVGRPITYSYLRAAPGIADFRTVVAKPGREFPSAEMPSAGRPLTRDVLARLAARGVGVAGIVLHTGVSSLEAGETPLPERYRVPTRTADAVNAARAAGSRIVAVGTTVTRALETVAADDGSVRAGSGWTELVLGPDRPARTVDGLVTGWHEPQASHLLLLEAVAGPETVAAAYGAALAEGYLWHEFGDSCLLLARTRS

SEQ ID NO: 71095 - protein, 338 aa, Pseudonocardiaceae bacterium
  misc_feature (1)..(338): tr|A0A419HAE1|A0A419HAE1_9PSEU S-adenosylmethionine:tRN A ribosyltransferase-isomerase OS=Pseudonocardiaceae ba cterium YIM PH 21723 OX=2340915 GN=D5S17_35190 PE=3 SV= 1
MTVHFELPTELNASEPPEARGLTRDGVRLLVADGAGVVHARFHQLDEFLRPGDLLVVNTSGTLAAAVPVRRASEEIVLHFSTELDDGDWVVELRTGPDGAAPLLDGVRGERLALPGGGVATLVAPHGDQERLWRTRIDRDVFDLLAGHGRPIRYRYVPESWPIENYQTVFALEPGSAEMPSAARPFTTELVTRLVAKGVLIAPILLHTGVSSQETGEPPQAERYRVPAHTARLVGYVRRGGGRVIAVGTTAARALESAVDTDGTVHAGAGWTDLVLGPDRPARVVSGLITGLHAPEASHLLLLEAAAGPRVVQEAYRAAVTKRYLWHEFGDVSLLFQA

SEQ ID NO: 71096 - protein, 348 aa, Pseudonocardiaceae bacterium
  misc_feature (1)..(348): tr|A0A431NEF1|A0A431NEF1_9PSEU S-adenosylmethionine:tRN A ribosyltransferase-isomerase OS=Pseudonocardiaceae ba cterium OX=1873463 GN=EKK42_14205 PE=3 SV=1
MTLSFVLPDRLSAAEPPEARGVPRDGVRLLVARPGLPVRHRRFRDLPSALAPGDLLVVNTSSTAPAAVDGTRSDGRPVTVHVSGPVPDVPDRWVVELRTPGRERVHDGRSGEVVTLPGGAHAVLVAAHPDPSAATSRLWRAMIATDGPFLRWLERIGGPITYSYLRAAPGIGDFRTVVAKPGREFPSVEMPSAGRPLTRDVLARLAARGVGVAEIVLHTGVSSLEAGETPLPERYRVPARTADAVNTARAAGRRIVAVGTTVTRALETVAADDGSVRAGSGWTELVLGPDRPARTVDGLVTGWHEPQASHLLLLEAVAGGETVAAAYGSALAEGYLWHEFGDSCLLLA

SEQ ID NO: 71097 - protein, 359 aa, Pseudonocardiales bacterium
  misc_feature (1)..(359): tr|A0A2W6C500|A0A2W6C500_9PSEU S-adenosylmethionine:tRN A ribosyltransferase-isomerase OS=Pseudonocardiales bac terium OX=2201155 GN=DLM60_15710 PE=3 SV=1
MTSGLSTATGRASTPRPRTRFTLAQDSDATGPPERRGVARDGVRLLVVRPGRLDHLLFHDLPGQLDPGALVVVNTSATVPAALNARRQDGRRAVVHVSTRLPGGAWVVELRRPDGAGPELDTTTGERLRLPGGLTLRLGALYPDPTAETGRLRLAEPAPTVPLLDYLAQHGRPIGYRHLTGRYPLADHQTVYATQPGSAEMASAGRPFTPTLLVRLMAAGVTVAPIVLHAGVSSPELGEPPLPERFDVPSGTARLVNSARAAGRRVVAVGTTVVRALESAAGVDATVRAASGWTDLVIGPDRPVRVVNGLVTGLHAPEASHLLLLEAVAGPDTVAAAYDAAVQHHYLWHEFGDSTLFLP

SEQ ID NO: 71098 - protein, 255 aa, Pseudonocardiales bacterium
  misc_feature (1)..(255): tr|A0A2W6DR56|A0A2W6DR56_9PSEU S-adenosylmethionine:tRN A ribosyltransferase-isomerase (Fragment) OS=Pseudonoca rdiales bacterium OX=2201155 GN=DLM59_05130 PE=3 SV=1
WVVELRRPLATGSAPSYADRTGAVVTVPGGAVLRVLASHPAGAARSRLWVAEVSTPAPLGAWLAEYGEPIRYSHVDGRWPLAAYRTTYGDVPGSAEMPSAGRALTPELLDRLRSRDVEVQTLVLHCGVSSLEGGDPPYAEWYSVPAPTATAVAAARGEGRRVIAVGTTVVRALESAVDASGVVRAGAGWTDLVITPERGVTAVDGLLTGWHEPAASHLWMLAALAGHELLCDSYRSALDNGYRWHEFGDVHLLLP

SEQ ID NO: 71099 - protein, 350 aa, Pseudooceanicola antarcticus
  misc_feature (1)..(350): tr|A0A285J694|A0A285J694_9RHOB S-adenosylmethionine:tRN A ribosyltransferase-isomerase OS=Pseudooceanicola anta rcticus OX=1247613 GN=queA PE=3 SV=1
MQLSDFDFDLPEGLIATRPARPRSSARLLVAEGETIRDAVVRDLGDFLRPGDRLVLNDTKVIPARLSGLRRRSSEQGETEARIEVTLLEPRAEGTWAALLKPLKKVRDGEVIRFTERLSARVESREEGQALLRFEAEGDFDSALAEAGQMPLPPYIAALRAPDEQDKQDYQTVWAQNSGAVAAPTASLHFDEELLARLAARGIAFTHVTLHVGAGTFLPVKVEDVTTHKMHAEWGEVTETAAAEIAATKAAGGRVIPVGTTALRLIESAARESGAIAPWRGETDIFIYPGFTFAVADALMTNFHLPKSTLMMLVSALMGPEAIRQIYAHAIEEKYRFFSYGDASLLIPQP

SEQ ID NO: 71100 - protein, 348 aa, Pseudooceanicola atlanticus
  misc_feature (1)..(348): tr|A0A0A0EGL0|A0A0A0EGL0_9RHOB S-adenosylmethionine:tRN A ribosyltransferase-isomerase OS=Pseudooceanicola atla nticus OX=1461694 GN=queA PE=3 SV=1
MQLSDFDFDLPEGLIATRPARPRSSARLLVAEGDAIHDQVVTDLVTWLRPGDRLVLNDTRVIPARLGGVRGRSSAQGPVEARIEATLLEPTPEGHWMAMLKPLKKVREGEVIRFSPELSAELVAKKDGQGELKFNLTGDDFDRALAEAGAMPLPPYIAALRAPDEQDKDDYQTVWARNSGAVAAPTASLHFDAPLLEALAARGVEMTHVTLHVGAGTFLPVKVEDVTTHKMHAEWGEVTAEAAAEIAATREAGHRVIPVGTTALRLIESAARSGRIEPWRGETDIFIYPGFEFHVTDALMTNFHLPKSTLLMLVSALMGQDRVRRIYEHAVGTQYRFFSYGDASLLIP

SEQ ID NO: 71101 - protein, 348 aa, Pseudooceanicola batsensis
  misc_feature (1)..(348): tr|A3U2T0|A3U2T0_PSEBH S-adenosylmethionine:tRNA ribosy ltransferase-isomerase OS=Pseudooceanicola batsensis (s train ATCC BAA-863 / DSM 15984 / KCTC 12145 / HTCC2597) OX=252305 GN=queA PE=3 SV=1
MKLSDFDFDLPEGLIATRPARPRSSARLLVAEGDAIHDAVVRDLTDWLRPGDRLVLNDTRVIPARLAGKRARDSDQGPTEARIDVTLLEPRASGHWAALIKPLKKVREGEVIRFSDDLSARLTGRDEGQGLLEFNLKGEDFDRALAEAGAMPLPPYIAAMRPPDDRDKDDYQTVWARRSGAVAAPTASLHFDAPLLDRIAGMGVEMTHVTLHVGAGTFLPVKVEDVTTHRMHAEWGEVTAQAADEIAATRAGGGRIIPVGTTALRLIESAARSGQIGPWRGETDIFIYPGFEFRVTDALMTNFHLPRSTLMMLVSALMGQERIRSVYDHAVARKYRFFSYGDASLLIP

SEQ ID NO: 71102 - protein, 356 aa, Pseudooceanicola flagellatus
  misc_feature (1)..(356): tr|A0A1W2D258|A0A1W2D258_9RHOB S-adenosylmethionine:tRN A ribosyltransferase-isomerase OS=Pseudooceanicola flag ellatus OX=1387277 GN=queA PE=3 SV=1
MKLADFDFDLPDELIATRPANPRSSARLLVAQGDGIHDAVVTDLLAWLRPGDRLVLNDTRVIPARLSGLRERDGVEGLTQARIEVTLLDPAADGCWMALLKPLKKVRDGEEITFSPDLSATVEARKDGQARLRFNLTGSDFDTALAEAGAMPLPPYIAAKRPADEQDKTDYQTVWAKRPGAVAAPTASLHFDSELLALLREGGIQFTHVTLHVGAGTFLPVKVEDVTTHRMHAEWGEVTEEAAAEIAATRAAGGRVIPVGTTALRLIESAAADGEIRAWSGDTDIFIYPGYEFRITDALMTNFHLPKSTLLMLVSALMGQDTIRHIYAHAVEAEYRFFSYGDASLLLPPCKSDAEG

SEQ ID NO: 71103 - protein, 362 aa, Pseudooceanicola lipolyticus
  misc_feature (1)..(362): tr|A0A2M8J305|A0A2M8J305_9RHOB S-adenosylmethionine:tRN A ribosyltransferase-isomerase OS=Pseudooceanicola lipo lyticus OX=2029104 GN=queA PE=3 SV=1
MKLADFDFDLPEDLIADRPAVPRSASRLLVAEPEAITDARFTDLARWLRPGDRLVLNDTAVIPARLSGQRHRSGAQGETAARIEVTLLEPRTDGRWAALLKPLKKVKVGEEIRFGETLAARLEAVEDGQGLLRFNLAGDEFDAALAQAGEMPLPPYIAARRGADDRDRTDYQTVFARVPGAVAAPTASLHFDQALLNRLAGMGIGFTYVTLHVGAGTFLPVKVEDVTTHKMHAEWGEVTDTAAAEIAATQAAGGRVIPVGTTALRLIESAARGGTIAPWRGKTDIFIYPGFRFQVTDALITNFHLPKSTLLMLVAALIGHDRVRRIYDHAVAARYRFFSYGDASLLIPGDGPERNGQDQADL

SEQ ID NO: 71104 - protein, 350 aa, Pseudooceanicola marinus
  misc_feature (1)..(350): tr|A0A1X6YQ27|A0A1X6YQ27_9RHOB S-adenosylmethionine:tRN A ribosyltransferase-isomerase OS=Pseudooceanicola mari nus OX=396013 GN=queA PE=3 SV=1
MQLSDFDFDLPEELIATRPARPRSSARLLVAEGDRITDAIVRDLGDYLRPGDRLVLNDTKVIPARLSGTRRRSSDQGETEARIEVTLLEPRAEGTWAALLKPLKKIREGEIIRFTPRLSARLEAKEEGQGILSFEADGDFDAALAEAGQMPLPPYIAALRAPDAQDKQDYQTVWARNTGAVAAPTASLHFDDELLARLKEKGVELTYVTLHVGAGTFLPVKVEDVEKHRMHAEWGHVSEAAAAEIAATKAAGGRVIPVGTTALRLIESAARDSGAIAPWRGETDIFIYPGFTFAVADALMTNFHLPKSTLMMLVSALMGTDRVRAIYDHAIARNYRFFSYGDASLLIPAS

SEQ ID NO: 71105 - protein, 348 aa, Pseudooceanicola nitratireducens
  misc_feature (1)..(348): tr|A0A1I1MKC8|A0A1I1MKC8_9RHOB S-adenosylmethionine:tRN A ribosyltransferase-isomerase OS=Pseudooceanicola nitr atireducens OX=517719 GN=queA PE=3 SV=1
MQLSDFDFDLPEGLIATRPARPRSSARLLVSEGRAIHDCIVRDLTDWLRPGDRLVLNDTRVIPARLSGTRSRDGVEGTTQARIEVTLLEPRPNGHWAALLKPLKKIREGEVIRFSDALSATLIAKDGGQGVLEFNLTGDDFDTALAQAGAMPLPPYIAALRAPDDQDKDDYQTIWARQSGAVAAPTASLHFDDPLLQRIADMGVEITYVTLHVGAGTFLPVKVDDVTTHKMHAEWGEVTDEAAAQIRATKASGGRVIPVGTTALRLIESAARGGQIVPWQGETDIFIYPGFTFHVTDALMTNFHLPKSTLMMLVSALVGQERIRKIYAHAVRQEYRFFSYGDASLLIP

SEQ ID NO: 71106 - protein, 348 aa, Pseudooceanicola sp.
  misc_feature (1)..(348): tr|A0A2E3H142|A0A2E3H142_9RHOB S-adenosylmethionine:tRN A ribosyltransferase-isomerase OS=Pseudooceanicola sp. OX=1914328 GN=queA PE=3 SV=1
MQLSDFDFDLPEALIATRPARPRSSARLLVAEGDRISDAVVRDLTDWLRPGDRLVLTDARVTPARLSGIRARDGAEGRTEARIDVTLLEPKPDGRWSALLKPLRKVREGEEIRFSDDLSAHLVAKAEGQGILAFNLAGDDFDAALSAAGAMPLPPYIAALRAPDAQDREDYQTVWARHSGAVAAPTASLHFDDALLARIADMGVATTHVTLHVGAGTFLPVKVADVTTHRMHAEWGEVTPRAAAEIAATKAAGGRVIPIGTTALRLIESAARDGTIRPWRGETDIFIYPGFTFHVTDALMTNFHLPKSTLLMLVSALVGHDRIRAVYDHAVSAQYRFFSYGDASLLIP

SEQ ID NO: 71107 - protein, 350 aa, Pseudooceanicola sp.
  misc_feature (1)..(350): tr|A0A2E2P4Z1|A0A2E2P4Z1_9RHOB S-adenosylmethionine:tRN A ribosyltransferase-isomerase OS=Pseudooceanicola sp. OX=1914328 GN=queA PE=3 SV=1
MKLTDFDFDLPEDLIATRPAVPRTSARLLLAQGPALSDRRVSDLPDILRPGDRLVLNDTRVIPARLSGKRFRSGTVGDTSARIEVTLLEPRADGTWAALLKPLKKLRVGETVEFTGGLSATLTGVQDGQGLLRFNLVGEDFDAALAKAGQMPLPPYIAQRRPADERDRTDYQTVFARNPGAVAAPTASLHFDDELLAALAARGVAFSHVTLHVGAGTFLPVKVDDVTRHKMHAEWGEVGETAAQEIAQTRREGGRVIPVGTTALRLIETAARGGEIAPWTGETEIFIYPGFTFHATDALMTNFHLPKSTLLMLVSALIGHDRMNAIYAHAVAERYRFFSYGDSSLLIPGD

SEQ ID NO: 71108 - protein, 348 aa, Pseudooctadecabacter jejudonensis
  misc_feature (1)..(348): tr|A0A1Y5R9N0|A0A1Y5R9N0_9RHOB S-adenosylmethionine:tRN A ribosyltransferase-isomerase OS=Pseudooctadecabacter jejudonensis OX=1391910 GN=queA PE=3 SV=1
MKLSEFNFDLPERLIATRPARPRTSAKLLVAEGADTRDLTVADLGSVLRAGDRLVLNDTKVIPARLFGTRTRVSAHGDGVAKIEVTLLEPRAGGAWAALVKPLRKVREGEEIVFSPDLSAVFEGRVEDQALLRFNCAGSDFDAALNAAGAMPLPPYIAAKRAADAQDKEDYQTIWADKSGAVAAPTASLHFEQWLLDDLGAMGVGFTHVTLHVGAGTFLPVKVDDVSEHKMHAEWGQITQAAADEIMATKAAGGRVIPVGTTALRLIESAGRSGVLRAWEGETDIFITPGFAFQIADGLMTNFHLPKSTLMMLVSALMGIERIREIYAHAIENEYRFFSYGDSSILLP

SEQ ID NO: 71109 - protein, 349 aa, Pseudopedobacter saltans
  misc_feature (1)..(349): tr|F0SC98|F0SC98_PSESL S-adenosylmethionine:tRNA ribosy ltransferase-isomerase OS=Pseudopedobacter saltans (str ain ATCC 51119 / DSM 12145 / JCM 21818 / LMG 10337 / NB RC 100064 / NCIMB 13643) OX=762903 GN=queA PE=3
MKLSQFKFHLPDSLIAHYPAETRDESRLMVLHKDTGEIEHKLFKDVLGYFDDKDVMILNNTKVFPARLYGNKEKTGATIEVFLLRELNKELRLWDVLVDPARKIRVGNKLYFGDDDLLVAEVVDNTTSRGRTIRFLFDGTDEEFRQNIEILGETPLPKYIKRKPTAEDKERYQTIFAKNEGAVAAPTAGLHFSRELMKRLELKGVEFAEVTLHVGLGTFRQVEVEDLTKHKMDSEQFIIAEKDANIVNKAIEEKRRICAVGTTVMRAVESAVSASRTLKPMNDWTSKFIFPPYDFSIANSMITNFHTPESTLLMMVSAFGGYEHVMHAYEVAVKEKYRFYSYGDAMLII

SEQ ID NO: 71110 - protein, 411 aa, Pseudopedobacter saltans
  misc_feature (1)..(411): tr|A0A2W5GXV0|A0A2W5GXV0_9SPHI S-adenosylmethionine:tRN A ribosyltransferase-isomerase OS=Pseudopedobacter salt ans OX=151895 GN=DI598_10225 PE=3 SV=1
MHPKDISIQDYTYELPDSRIAKYPLPQRDASKLLVFNTDHSIQENTYAHISDYIPENSFLVFNNTKVVEARIFFQKSTGSSIEIFCLEPDDRYSDITSAMLETGEVYWKCLVGGAKKWKEGALTRNFEGKNGDVELAVEKVEKRNDYFLVHLYWSDKTLSFAEVLHYAGIIPLPPYLNRETEVSDNERYQTVYAKYDGSVAAPTAGLHFTENVLDSLKKKNCHYDFVTLHVGAGTFKPVKAEHMADHEMHYEAMDISLTFLKNLLSNIAKDHNIVTVGTTSMRTIESLYWIGVQAFQGKLEPLNIEVLQWAPYENPSNISAEESIGSLIDWMQMQHIERIFAKTQIIIAPGYQLKIVNGLVTNFHQPQSTLILLVSAIVGDYWKTIYQYAMEHEFRFLSYGDGSLLWKQKK

SEQ ID NO: 71111 - protein, 348 aa, Pseudopelagicola gijangensis
  misc_feature (1)..(348): tr|A0A1M6ELY7|A0A1M6ELY7_9RHOB S-adenosylmethionine:tRN A ribosyltransferase-isomerase OS=Pseudopelagicola gija ngensis OX=1470563 GN=queA PE=3 SV=1
MKLADFDFDLPEALIATRPANPRSSARLLVANGDQITDGAVSDLVDWLRPGDRLVLNDTKVIPARLTGFRTRSGPEGDTRSKIEVTLLEPNAEGTWSALVKPLRKIREGEKVVFSDTLAATLIAKTDGQAHLQFDLAGEDFDAALADAGAMPLPPYIAAKRAADEQDKTDYQTVWARHSGAVAAPTASLHFDPPLLERLKAKGVTFTYVTLHVGAGTFLPVKVDDVTTHKMHSEWGQVSRQAAAEIAATKVAGGRVIPVGTTALRLIESATRDGAMKAWEGGTDIFIYPGFEFRIADALMTNFHLPKSTLMMLVSALMGQDQIRHIYAHAIAEKYRFFSYGDASLLLP

SEQ ID NO: 71112 - protein, 351 aa, Pseudopuniceibacterium sediminis
  misc_feature (1)..(351): tr|A0A399J5X8|A0A399J5X8_9RHOB S-adenosylmethionine:tRN A ribosyltransferase-isomerase OS=Pseudopuniceibacteriu m sediminis OX=2211117 GN=queA PE=3 SV=1
MHLSDFDFDLPERLIATRPAKPRSSARLLVAQGDTITDAVVRDLGDWLRPGDRLVLNDTKVIPARLSGVRARTSDAGDTQAQIEVTLLEPRADGTWAALLKPLRKVREGEVIRFSARLSAVLEAKQDGQGLLRFDLTGEDFDAALAEAGNMPLPPYIAALRAPDAQDKDDYQTVWAKNTGAVAAPTASLHFDDDLLGRLRAMGVGFTHVTLHVGAGTFLPVKVEDVTTHKMHAEWGEVSDVAAAEIAATKAAGGRVIPVGTTALRLIESAAQASGAIAPWQGETDIFIYPGFRFAVSDALMTNFHLPKSTLMMLVSALMGPDVIRQIYAHAVTENYRFFSYGDASLLIPRA

SEQ ID NO: 71113 - protein, 349 aa, Pseudoramibacter alactolyticus
  misc_feature (1)..(349): tr|E6ME00|E6ME00_9FIRM S-adenosylmethionine:tRNA ribosy ltransferase-isomerase OS=Pseudoramibacter alactolyticu s ATCC 23263 OX=887929 GN=queA PE=3 SV=1
METLRTEDFYYDLPERLIAQTPAEKRDDSRLMAINRATDAIEDRHFHDIIDYLNPGDLLVMNDTKVLPARIFGRKADTGARVELLLLTRLDDYRWETMVKPGRKARPGTTLDFYDAAGARVLRGTIEKTVDGGLRVIRFEYDGVFEAILDVIGTMPLPPYIHETLEDQSRYQTVYAEHDGSAAAPTAGLHFTDALLGAIAAKGVGLAKVTLHVGIGTFRPVKAANIREHHMHSERYLVPKETAEAIAATKTAGGRIIAVGTTTVRTLESVARDHDGKIVAAGGSTDIFIYPGFHWQVVDALITNFHLPESTLLMLVSSFYDRKKILAAYQHAIDENYRFFSFGDAMFLY

SEQ ID NO: 71114 - protein, 361 aa, Pseudorhizobium pelagicum
  misc_feature (1)..(361): tr|A0A081MI86|A0A081MI86_9RHIZ S-adenosylmethionine:tRN A ribosyltransferase-isomerase OS=Pseudorhizobium pelag icum OX=1509405 GN=queA PE=3 SV=1
MRVDLFDFDLPDDNIALRPASPRDSARLLVVQPEPSAALEDHHVRDLPGMLRAGDALVFNDTRVIPAQLEGQRVREGGAELPVSATLHMRAGPERWKAFARPGKRIKVGDRILFGHGGDACLLGTLNATVESKGEGGEITLLFDLSGPALDEAIMAVGHIPLPPYIADKRPEDERDQIDYQTIYARERGAVAAPTAGLHFTPELFDALDAAGIERHFVTLHVGAGTFLPVKADDTDEHKMHAEIGHVSAETAERLNAVRARGGRIVSVGTTSLRLLESAAADDGRIEPWSGQTDIFITPGYRFKAVDVLMTNFHLPKSTLFMLVSAFSGFETMKNAYDYAIRSGYRFYSYGDSSLLFRKMT

SEQ ID NO: 71115 - protein, 352 aa, Pseudorhodobacter antarcticus
  misc_feature (1)..(352): tr|A0A1H8BQ43|A0A1H8BQ43_9RHOB S-adenosylmethionine:tRN A ribosyltransferase-isomerase OS=Pseudorhodobacter ant arcticus OX=1077947 GN=queA PE=3 SV=1
MKLDDFDFDLPEALIATRPARPRTSARLLVVQGDDLHDRHVFDLPSLLRAGDRLVLNNTRVIPARLIGARHRASAQGPVSAKIEITLMEPDARGGWRAMAKPLRKLMVGEDILFAGGLTATVAEKSDSDLRLTFNQTGDNFDAALQAAGTMPLPPYIAAKRAPDAQDNDDYQTVFATRAGAVAAPTASLHFDDALLAQLAAMGVTTTEVTLHVGAGTFLPVKVDDVTTHKMHAEWGEVTPRAVAEINATRAAGGRIIPVGTTALRLIESAARATGRVEPWVGETDIFIYPGFAFQTTDALMTNFHLPKSTLLMLVAALMGQGRMQTAYAHAVAKQYRFFSYGDASLLIAAPS

SEQ ID NO: 71116 - protein, 359 aa, Pseudorhodobacter sp.
  misc_feature (1)..(359): tr|A0A4P8EHZ3|A0A4P8EHZ3_9RHOB S-adenosylmethionine:tRN A ribosyltransferase-isomerase OS=Pseudorhodobacter sp. S12M18 OX=2500533 GN=queA PE=3 SV=1
MKLDDFDFDLPEELIATRPARPRTAARMLVVEGDGLADRHVFDLPKLLRKGDRLVLNNTRVIPARLIGARHRDSAQGPVSAKIEVTLMEPDAQGGWRAMAKPLRKLLVGEEIVFTGGLTATVAEKSETDLRLTFNHAGADFDAALQAAGTMPLPPYIAAKRAPDMQDNHDYQTVFARNSGAVAAPTASLHFDDALLAELAAMGVEMTEVTLHVGAGTFLPVKVEDVTSHKMHAEWGEVTPQAAAEINATRAAGGRVIPVGTTALRLIESAARETGKVAPWQGETDIFIYPGFQFHATDALMTNFHLPKSTLLMLVAALMGQSRMQTAYAHAVAQNYRFFSYGDASLLIADGVNPPVRSA

SEQ ID NO: 71117 - protein, 343 aa, Pseudorhodobacter sp.
  misc_feature (1)..(343): tr|A0A2M8N3C0|A0A2M8N3C0_9RHOB S-adenosylmethionine:tRN A ribosyltransferase-isomerase OS=Pseudorhodobacter sp. MZDSW-24AT OX=2052957 GN=queA PE=3 SV=1
MKLSDFDFDLPEALIATRPARPRPSARLLLAQGEGMRDLHVRDLIEVLQPGDRLVLNNTRVIPARLTGQRTRGEAVAKIEITLMEPSVTGWRAMAKPLRKVAVGEEIVFSPELSARVAEKSDTDLRLEFNLTGDDFDAALAQAGAMPLPPYIAAKRAPDAQDADDYQTVFARHKGAVAAPTASLHFDGPLLEALREKGVQFTEVTLHVGAGTFLPVKVEDVATHKMHAEWGQVTPAAAAQINATRAAGGRVIPVGTTALRLIETAARSGQVEPWEGPTDIFIYPGFTFHATDALMTNFHLPKSTLLMLVSALMGKARMDRIYAHAIAERYRFFSYGDASLLIP

SEQ ID NO: 71118 - protein, 368 aa, Pseudorhodoferax soli
  misc_feature (1)..(368): tr|A0A368XU45|A0A368XU45_9BURK S-adenosylmethionine:tRN A ribosyltransferase-isomerase OS=Pseudorhodoferax soli OX=545864 GN=queA PE=3 SV=1
MRSYTLSDFDFSLPPELVAQHPACERSASRLLDGRSSPATDRVFRELPGLLQAGDLLVFNDTQVIKARLFGEKPSGGKLELLVERVLVGNQVVAHMKVSKKPPVGTVLHMAGGFTAQLLGRWPEDDGPLFRLAFTGPAGETPHDLMAAHGHVPLPPYITHTDSAEDAQRYQTVFARAPGAVAAPTAALHFDEAVLAALDARGVGRASVTLHVGAGTFQPVKTEDLDDHRMHSEWYAIPPATLAALERTRTNGGRILAVGTTTVRTLESWAQSGQTEGETSIFIRPGHRFQVVDLLLTNFHLPKSTLMMLVSAFAGYEHIMGLYRHAIAQGYRFFSYGDAMLLEGAWSAEMRARAGASGGASRGAGEAV

SEQ ID NO: 71119 - protein, 355 aa, Pseudorhodoferax sp.
  misc_feature (1)..(355): tr|A0A0Q4XKD0|A0A0Q4XKD0_9BURK S-adenosylmethionine:tRN A ribosyltransferase-isomerase OS=Pseudorhodoferax sp. Leaf267 OX=1736316 GN=queA PE=3 SV=1
MRSFTLSDFDFDLPPALVAQHPALERSASRLLDGTAATPIDRIFRELPTLLRAGDLLVFNDTQVVKARLFGEKPTGGKLELLVERVLQGQEVVCHMKVSKKPAVGTTLQMVGGFRATLLGRWPADDGPLFRFAFESDQGEDPYALMARCGHVPLPPYITHADSSEDERRYQTVFARVPGAVAAPTAALHFDEALLAALDARGVQRANVTLHVGAGTFQPVKTENIAEHHMHAERYEVPPATQQAIADCKARGGRVVAVGTTTVRTLESWAKSGEPRGDTTIFITPGFAFRHVDVLVTNFHLPKSTLMMLVSAFAGYEHVMALYRHAVHEGYRFFSYGDAMLLERASTIDQTTVQR

SEQ ID NO: 71120 - protein, 391 aa, Pseudorhodoferax sp.
  misc_feature (1)..(391): tr|A0A0S9NY18|A0A0S9NY18_9BURK S-adenosylmethionine:tRN A ribosyltransferase-isomerase OS=Pseudorhodoferax sp. Leaf274 OX=1736318 GN=queA PE=3 SV=1
MGESRPFLERARPALKPMRSYTLSDFDFTLPPELVAQHPAAERSASRLLDGRGPSPTDRIFRTLPALLNPGDLLVFNDTQVVKARLFGEKPSGGKLELLVERVLTGQQSAGPPQALLPPSGGGPAAGRTWGHGEVVAHMKVSKKPPVGTLLRMAGGFTARLLGRWPDEDGALFRLAFTGPAGETPHALMAAHGHVPLPPYITHSDSAEDAQRYQTVFARAPGAVAAPTAALHFDEGVLAALEARGVGRASVTLHVGAGTFQPVKTEDLDAHRMHSEWYAIPPATLAALERTRAQGGRILAVGTTTVRTLESWAQTGRTEGETNIFIRPGHRFQVVDLLLTNFHLPKSTLMMLVSAFAGYEHIMGLYRHAIDQGYRFFSYGDAMLLERLPAA

SEQ ID NO: 71121 - protein, 361 aa, Pseudorhodoplanes sinuspersici
  misc_feature (1)..(361): tr|A0A1W6ZVW6|A0A1W6ZVW6_9RHIZ S-adenosylmethionine:tRN A ribosyltransferase-isomerase OS=Pseudorhodoplanes sin uspersici OX=1235591 GN=queA PE=3 SV=1
MQTSLFDFDLPAENIALRPASPRDAARLMVVWPGQSPETEDKIVRDLPDLLQAGDALVVNDTKVIPARLFGRRIGRGEEPKIEATLHKRIDGSRWRAFVKPAKRLQAGDIVRFGDEGKVCFLGQLDATVEDKGEGGEVTLSFAFHGAILDQAIAERGAMPLPPYIASKRPADERDLTDYQTMFADEEGSVAAPTAALHFTPSLIERLIANGIQLHRLTLHVGAGTFLPVKGEDTAEHKMHSEWGEIDETTANALNAVRAKGGRIVPVGTTALRLLESAADESGTVRPFCGETDIFITPGYRFRAADLMMTNFHLPRSTLFMLVSAFAGLDTMQRAYAHAIATGYRFYSYGDACLLHPAEQR

SEQ ID NO: 71122 - protein, 354 aa, Pseudoroseicyclus aestuarii
  misc_feature (1)..(354): tr|A0A318SWU8|A0A318SWU8_9RHOB S-adenosylmethionine:tRN A ribosyltransferase-isomerase OS=Pseudoroseicyclus aes tuarii OX=1795041 GN=queA PE=3 SV=1
MSGPGLTLEDFDFDLPEELIATRPARPRSSARLLVAEGGSGIKDRHVADLPDILRPGDRLVLNDTRVIPARLSGIRRRSGETGQTEARIEATLLGPRADGCWNAMIKPLKKLRIGETVDFGQGLTAELVARDAAQGVLRFSEAGEAFDAALDRAGSMPLPPYIAAKRAPDDEDRTDYQTVWADRPGAVAAPTASLHFDQPLLDALAARGIGFTRVTLHVGAGTFLPVKVDRIEDHRMHAEWGEVTEEAAVQIAATRAARGRIIAVGTTALRLIETAGQGGFIQPWRGETDIFIRPGYRFQVAHGLMTNFHLPKSTLMMLVSALMGMDRVRGIYDHALAERYRFFSYGDASLLLP

SEQ ID NO: 71123 - protein, 352 aa, Pseudoruegeria aquimaris
  misc_feature (1)..(352): tr|A0A1Y5R996|A0A1Y5R996_9RHOB S-adenosylmethionine:tRN A ribosyltransferase-isomerase OS=Pseudoruegeria aquima ris OX=393663 GN=queA PE=3 SV=1
MKLSDFDFDLPEELIATRPAVPRTSARLLHATAGRLTDRHVFDLPEILRPGDRLVLNDTKVIPARLEGLRHRESAQGPVSARISVTLLEPRPDGGWLALIRPLKKVAIGETIHFGEVLCARLTDKSEGEAVLAFDRTGADFDAALQAVGAMPLPPYIAAKRAADAQDKVDYQTVWARNSGAVAAPTASLHFDEALLAALAARGVAFTHVTLHVGAGTFLPVKVDDVSQHKMHSEWGAVSEQAAQEIAETKAAGGRIIPVGTTALRLIETAARESGTVRPWEGPTDIFITPGFTFRATDALMTNFHLPKSTLMMLVSALMGMERMRAVYAHAIAQRYRFFSYGDSSLLCPNEP

SEQ ID NO: 71124 - protein, 350 aa, Pseudoruegeria haliotis
  misc_feature (1)..(350): tr|A0A2T0RNI5|A0A2T0RNI5_9RHOB S-adenosylmethionine:tRN A ribosyltransferase-isomerase OS=Pseudoruegeria haliot is OX=1280846 GN=queA PE=3 SV=1
MLLSDFDFDLPEELIATRPANPRTHARFLVALGAATEDAQVLDLPRYLRPGDRLVLNNTKVIPARLSGLRRRQGEQGPTEARIEVTLLEPQGDGSWQALVKPAKKVRDGEGIHFAPGFSATVTGRSEGQLNLSFSLDGEDFDAALEAAGVMPLPPYIAARRAADAQDRTDYQTVFARHSGAVAAPTASLHFDEALLREIASMGVDFTEVTLHVGAGTFLPVKVDDVSRHRMHSEWGEVTEAAAEDINATRAAGGRIIPVGTTACRLIESAAAGDGIVPWQGETDIFIRPGYRFRIADGLMTNFHLPKSTLMMLVSALMGRERMMQIYDHAIAERYRFFSYGDASLLLPKV

SEQ ID NO: 71125 - protein, 350 aa, Pseudoruegeria lutimaris
  misc_feature (1)..(350): tr|A0A1G8J890|A0A1G8J890_9RHOB S-adenosylmethionine:tRN A ribosyltransferase-isomerase OS=Pseudoruegeria lutima ris OX=571298 GN=queA PE=3 SV=1
MKLSDFDFELPEELIATRPATPRSSARLLVAQGERTVDSHVHDLPDFLRPGDRLVLNNTRVIPARLSGVRRRDGEQGPTEARIEVTLLEPQGDGSWNVLAKPAKKVRDGEEIHFAPGFSARVTGRVEGQLNLAFSLEGDDFDAALDAAGFMPLPPYIAARRAADAQDRTDYQTVFARHSGAVAAPTASLHFDRPLLERIAAMGVDFTEVTLHVGAGTFLPVKVDDVREHKMHSEWGEVPDAAAAEINATRAAGGRIIPVGTTACRLIESAAGADGIHPWSGETDIFIRPGYEFRIADGLMTNFHLPKSTLMMLVSALMGRDRMMALYEHAIAERYRFFSYGDASLLLPKG

SEQ ID NO: 71126 - protein, 358 aa, Pseudoruegeria sp.
  misc_feature (1)..(358): tr|A0A1X4J0Q8|A0A1X4J0Q8_9RHOB S-adenosylmethionine:tRN A ribosyltransferase-isomerase OS=Pseudoruegeria sp. SK 021 OX=1933035 GN=queA PE=3 SV=1
MTLDDFDFDLPDALIATRPVKPRSSARLLVATDTGIEDRHVFDLPEVLRPGDRLVLNDTKVLPARLSGTRHRIGADGTGVARIEVTLLDPQGDGTWQALVKPLRKIRDGEDIVFNDQFSAKIVGRGDGGLVHLALSAEGDALTELLDATGSMPLPPYIASKRAADAQDKDDYQTVFARHIGAVAAPTASLHFDQDLLDALARRGVTFSHVTLHVGAGTFLPVKVEDPRNHKMHSEWGEVSAQAAAEIAATRAAGGRIIPVGTTALRLIETAARETGQVAPWSGPTDIFIYPGFSFRASDALMTNFHLPKSTLMMLVSALMGTDRVRQIYAHALERQYRFFSYGDASILFPKDPPTAAL

SEQ ID NO: 71127 - protein, 349 aa, Pseudosphingobacterium domesticum
  misc_feature (1)..(349): tr|A0A1H7LJ83|A0A1H7LJ83_9SPHI S-adenosylmethionine:tRN A ribosyltransferase-isomerase OS=Pseudosphingobacteriu m domesticum OX=407022 GN=queA PE=3 SV=1
MKLSQFKFNLPDSLIAHEPSETRDEARLMVLDRKTGAIEHKIFKDVLNYFDEHDVMILNNTKVFPARLYGNKEKTGATIEVFLLRELNKELRLWDVLVDPARKIRVGNKLYFGDNDLLVAEVVDNTTSRGRTIRFLFDGTDDEFRRNIEILGETPLPKYIKRRPTPEDKFRYQTIFAKNEGAVAAPTAGLHFSRELMKRLELKGIEFAEVTLHVGLGTFRQVEVEDLTKHKMDSEQFIIEQKDADVVNKAIADKRRVCAVGTTSMRSIESAVSANKTLKAANDWTSKFIFPPYDFSIANSMITNFHTPESTLLMMICAFGGYENVMNAYEIAVKEKYRFYSYGDAMLII

SEQ ID NO: 71128 - protein, 345 aa, Pseudospirillum japonicum
  misc_feature (1)..(345): tr|A0A1H6SLE7|A0A1H6SLE7_9GAMM S-adenosylmethionine:tRN A ribosyltransferase-isomerase OS=Pseudospirillum japon icum OX=64971 GN=queA PE=3 SV=1
MQLSDFSFDLPEHLIARYPCPERTGSRLLVLKGSELQDQQFPDLLQHVRAGDLMVFNDTRVIPARLFGHKDTGGKIEILIERLQGTQQALAHIRASKAPKAGTQLHLAQGVCLQCLGREGDLFQLEVVGDTPLLDILYAQGHMPLPPYIDREDERLDKERYQTVYGRHAGAVAAPTAGLHFDQALLDALTAKGVEVAFVTLHVGAGTFQPVRVHDIQTHQMHKEWICVSEAVVAQVKATKARGGRVIAVGTTSVRCLETASAGGTLQAYQGDTQIFIYPGYQWQLVDLLVTNFHLPESTLLMLVASFAGHQHTLAAYQHAVAHQYRFFSYGDAMLVYPASQSPQA

SEQ ID NO: 71129 - protein, 330 aa, Pseudothermotoga hypogea
  misc_feature (1)..(330): tr|A0A0X1KSE9|A0A0X1KSE9_9THEM S-adenosylmethionine:tRN A ribosyltransferase-isomerase OS=Pseudothermotoga hypo gea DSM 11164 = NBRC 106472 OX=1123384 GN=queA PE=3 SV= 1
MKVSDFDYELPEELIAQTPIEPRDSSRLMVVHRASGSIEHRIFREILEYLTCNDVLVLNNSKVIPARLFGQLENRQVEILLVQKVNERVWKCLVRPGKKIKPKVVVQLNEGILARCLDKCEEGMRLIEFSVNDEELLRMGEAPIPPYVRTKIPLERYQTVYAKVAGSVAAPTAGFHFTETLLERIRSLGVKIVEITLHVGIGTFRPVKTENVEEHRMHAERYSIPLDVVETIEKAKSEGGRIIAVGTTVARTLETFARTNLREGETDLFIYPPFEFKIVDALITNFHLPRSTLLMLVAAFAGYELTMKAYKEAVEKRYRFYSFGDAMFIL

SEQ ID NO: 71130 - protein, 329 aa, Pseudothermotoga lettingae
  misc_feature (1)..(329): tr|A8F4Z3|A8F4Z3_PSELT S-adenosylmethionine:tRNA ribosy ltransferase-isomerase OS=Pseudothermotoga lettingae (s train ATCC BAA-301 / DSM 14385 / NBRC 107922 / TMO) OX= 416591 GN=queA PE=3 SV=1
MKVSDFDYILPDELIAQNPVEPRDTSRLMILNRKSRNIEHRIFRDIVEYLNPEDLLVLNNTRVIPARLFAKKANSTIEVLLVEKIGTNLWNCMVKPGKKVKPGDILNFETFTAECLSKADQGMRTLKFETTDEDLFKLGEAPLPPYVHSKIPIERYQTIYAKINGAIASPTAGLHFTEELLRKIKSTGVTIAEITLHVGIGTFRPVKTQFVQDHKMHPERYQISQDTVKLVEKTKRSGGRVIATGTTVVRALEEYGINGKLEGETRLFIYPPFNFKIVDAMITNFHLPKSTLLMLVAAFAGYDFIMEAYREAIEKRYRFYSFGDAMFIT

SEQ ID NO: 71131 - protein, 330 aa, Pseudothermotoga sp.
  misc_feature (1)..(330): tr|A0A3D3UYF9|A0A3D3UYF9_9THEM S-adenosylmethionine:tRN A ribosyltransferase-isomerase OS=Pseudothermotoga sp. OX=2033661 GN=queA PE=3 SV=1
MKVSDFDYELPKELIAQTPIEPRDSSRLMVVHRASGSIEHRIFREILEYLTSNDVLVLNNSKVIPARLFGQLENRQVEILLVQKVNERIWKCLVRPGRKIKPEVVVHLSGGIVARCLDKCEEGMRLIEFNVNDEELLKVGEAPIPPYVRTKIPLERYQTVYAKVAGSVAAPTAGFHFTETLLAKIRSLGVKIVEITLHVGVGTFRPVKAESVEGHRMHAERYSIPLDVVETIERMKSKGGRIIAVGTTVVRTLETFARTNLREGETDLFIYPPFEFKIVDALITNFHLPRSTLLMLVAAFAGYELTMKAYREAVEKRYRFYSFGDAMLIL

SEQ ID NO: 71132 - protein, 329 aa, Pseudothermotoga thermarum
  misc_feature (1)..(329): tr|F7YYW1|F7YYW1_9THEM S-adenosylmethionine:tRNA ribosy ltransferase-isomerase OS=Pseudothermotoga thermarum DS M 5069 OX=688269 GN=queA PE=3 SV=1
MKLSNFDYHLPEELIAQHPVEPRDSSRLMVVNRKTKTFEHRIFRDIVEYLYPKDLLVLNNTRVIPARLFAFKNNAKIEVFLVEKVKTSLWKCMVKPGKKVKVGDILDFEGFQGKCIDRLPDGLRLIEFNANDDEILSHGHTPLPPYVKTNVEMERYQTVYAKYNGSVAAPTAGLHFTESLLENIKSKGVKVVELTLHVSVGTFRPVKTEDITKHTIYPEYYSIPDEVVQEINNTKLNGGRVIAVGTTVVRALETYALTKQTAGKTDLFIYPPFEFKIVDCLVTNFHLPKSTLLMLVVAFAGYDLIMNAYQEAIKLRYRFYSFGDAMLII

SEQ ID NO: 71133 - protein, 359 aa, Pseudovibrio axinellae
  misc_feature (1)..(359): tr|A0A165YPR3|A0A165YPR3_9RHOB S-adenosylmethionine:tRN A ribosyltransferase-isomerase OS=Pseudovibrio axinella e OX=989403 GN=queA_2 PE=3 SV=1
MLVDDFDFDLPAENIALRPASPRDSSRLLVVRPGLDSLLTDDHVVSLPDLLEPGDALVFNDTKVIPAQLLGFRTRDGVTAKVGVTLHQRASSCEWRAFVKPAKKLKVGDRVRFAFDEEGAGSAKLGAEVVEKSEAGDILFRFDRNAGDLDAAIAEVGHIPLPPYIAAKRAEDDQDRTDYQTVYAKYEGAVAAPTAGLHFTDELFAKLEARGIEKHFVTLHVGAGTFLPVKVDKTEDHKMHYEWGEVSAETAAALNEVRRRGNKVVSVGTTSLRILETAADEDGVIQPISKSTDIFITPGYKFRAIDALMTNFHLPKSTLFMLVSAFSGFEEMHKAYGHAIKNGYRFYSYGDSSLLFAKA

SEQ ID NO: 71134 - protein, 356 aa, Pseudovibrio axinellae
  misc_feature (1)..(356): tr|A0A166A8G0|A0A166A8G0_9RHOB S-adenosylmethionine:tRN A ribosyltransferase-isomerase OS=Pseudovibrio axinella e OX=989403 GN=queA_1 PE=3 SV=1
MNTVTSTLEIPLHQIASEQISPKDAAKLMVVKPEDREPLSDRKIIELPQILRPGDLIVFNDTKVIPTEIRGYRSSGGASQPISMFLSDQKTPDCWTVHLKDDISISKNEKLTFFKGPKTLEAAVKEKTGRVVELQFQQAGLELKEHMARIRNFPEPPFLNQLPHAKPSDKRSYQTVFAKNEGAALTPSASLHFTHRLLKALDTYGISSCNVTLHVGTESLFPSHAVKDDDKALHSEWGEITKAAANKINQVRAMGGRIIAVGTTVMRLLESSTDKSQLTKPFRGTTDIFIKPGFQFRATDALITNFHPLDSTLFLLVSAFSGQNMMLNAYKRAISHNYRFLSFGDSSLLFRASTSA

SEQ ID NO: 71135 - protein, 361 aa, Pseudovibrio denitrificans
  misc_feature (1)..(361): tr|A0A1I6XCK0|A0A1I6XCK0_9RHOB S-adenosylmethionine:tRN A ribosyltransferase-isomerase OS=Pseudovibrio denitrif icans OX=258256 GN=queA PE=3 SV=1
MLVDDFDFDLPPENIALRPAVPRDSSRLLVVRPDGEQLLTDDQVLSLPDLLEPGDALVFNDTKVIPAQLLGFRTRDGVTAKVGVTLHQRASAKEWRAFVRPAKKLKVGDTVRFAFDEESKDAAELSAVVTEKSEAGDILFEFDRSAGDLDTAIAQVGHIPLPPYIAAKRAEDDQDRKDYQTIYAKHEGAVAAPTAGLHFTDRLFAALEERGIEKHFVTLHVGAGTFLPVKADKTEDHKMHFEYGEISEETAAALNAVRARGNKIVSVGTTSLRILESAVTEEGIINPISQSTDIFITPGYQFKAIDALMTNFHLPRSTLFMLVSALSGMEEMRAAYEHAISSGYRFYSYGDSSLLFKKASK

SEQ ID NO: 71136 - protein, 754 aa, Pseudovibrio sp.; identical to SEQ ID NO: 59861
  misc_feature (1)..(754): tr|G8PH34|G8PH34_PSEUV Multifunctional fusion protein O S=Pseudovibrio sp. (strain FO-BEG1) OX=911045 GN=tgt PE =3 SV=1

SEQ ID NO: 71137 - protein, 361 aa, Pseudovibrio sp.
  misc_feature (1)..(361): tr|A0A161XDA3|A0A161XDA3_9RHOB S-adenosylmethionine:tRN A ribosyltransferase-isomerase OS=Pseudovibrio sp. Ad26 OX=989410 GN=queA PE=3 SV=1
MLVDDFDFDLPPENIALRPAVPRDSSRLLVVRPDGEQLLTDDQVLSLPDLLEPGDALVFNDTKVIPAQLLGFRSRDGVTAKVGVTLHQRASAKEWRAFVRPAKKLKVGDTVRFAFDEESKDTAEFSAVVTEKSEAGDILFEFDRSAGELDAAIAQVGHIPLPPYIAAKRAEDDQDRKDYQTIYAKYEGAVAAPTAGLHFTDQLFAALEKRGIEKHFVTLHVGAGTFLPVKADKTEDHKMHFEYGEISSETAAALNAVRARGNKIVSVGTTSLRILESSVSEDGVINPISQSTDIFITPGYQFKAIDALMTNFHLPRSTLFMLVSALSGMDEMRAAYEHAISTGYRFYSYGDSSLLFKKASK

SEQ ID NO: 71138 - protein, 368 aa, Pseudoxanthobacter soli
  misc_feature (1)..(368): tr|A0A1M7ZLC4|A0A1M7ZLC4_9RHIZ S-adenosylmethionine:tRN A ribosyltransferase-isomerase OS=Pseudoxanthobacter so li DSM 19599 OX=1123029 GN=queA PE=3 SV=1
MRTDDFDFDLPESAIALRPARPRDAARLLVVRPGGEPELDDRGIRDLVSLLRPGDLLVFNDTRVIPARLDGVRRRDDGAEARIEATLIERLDPSRWVALARPGKRLRVGDVIGFGGNGGEGVEPFAATVAEKNEGGEIVLAFDRGGPDLDRAIALAGRIPLPPYIGNKRADDAADREDYQTVFAREPGAVAAPTASLHLTEDLIERLQETGVEHVFLTLHVGAGTFLPVKAETTEGHRMHSERGVITPDAAARINAARAAGGRIVAVGTTALRLLESAADESGTLHPFDGATDIFITPGYRFRIVDVLMTNFHLPRSTLFMLVCAFAGTDAMRRAYAHAIASGYRFYSYGDGSLLFRDAGAGAPREPT

SEQ ID NO: 71139 - protein, 348 aa, Pseudoxanthomonas composti
  misc_feature (1)..(348): tr|A0A4Q1JYK9|A0A4Q1JYK9_9GAMM S-adenosylmethionine:tRN A ribosyltransferase-isomerase OS=Pseudoxanthomonas com posti OX=2137479 GN=queA PE=3 SV=1
MKKSDFHYDLPPELIAQAPLPERSASRLLVVPSGDAPLADLHVRDLPGQLRAGDLLVFNDTRVIPARLFGQKETGGRVEILIERLLPDNHAHAQIGASKSPKPGGRIDLDAGGSCQVLGREGEFYELRFDVDDALDSWLIKAGQMPLPPYITRAPGQDDQERYQTVFARELGAVAAPTAGLHFDQPLLDQLQAQGVQFGHITLHVGAGTFQAMRVDDVHQHRMHSEWLNVGAELIQKIRRTRAAGGRVIAVGTTVVRALESAMRDGELQPFAGETRIFIFPGYRIRSVDALVTNFHLPESTLLMLVSAFAGKQRILDAYAHAVRAGYRFFSYGDAMLLFPQANGEGAA

SEQ ID NO: 71140 - protein, 360 aa, Pseudoxanthomonas dokdonensis
  misc_feature (1)..(360): tr|A0A0R0CU14|A0A0R0CU14_9GAMM S-adenosylmethionine:tRN A ribosyltransferase-isomerase OS=Pseudoxanthomonas dok donensis OX=344882 GN=queA PE=3 SV=1
MKKSDFHFELPEALIAQAPLAERSASRMLVVPPADAALVDQHVRDLVDWLRPGDLLVFNDTRVIPARLFGQKDTGGRVEILIERLLPDNHARAQIGASKSPRPGGRIQLDAGGSAEVLGREGEFYQLRFDVPDSLESWLLKAGRLPLPPYIQREAGVDDDERYQTVFARNLGAVAAPTAGLHFDDALLAALRGKGVEFGHVTLHVGAGTFQPVRVDDVRQHHMHSEWLNVGASLVEQVRATRARGGRVVAVGTTVVRALESAWRSSDASPGGELQPFAGETRIFIFPGYRIRSVDALLTNFHLPESTLLMLVSAFAGKQRIFDAYDHAVRERYRFFSYGDAMLLFPAQHPEPTPAGSHTD

SEQ ID NO: 71141 - protein, 361 aa, Pseudoxanthomonas indica
  misc_feature (1)..(361): tr|A0A1T5JAK3|A0A1T5JAK3_9GAMM S-adenosylmethionine:tRN A ribosyltransferase-isomerase OS=Pseudoxanthomonas ind ica OX=428993 GN=queA PE=3 SV=1
MLTYNAPPCQASAQPRFPVKKSDFHFDLPDELIAQAPLAERSASRLLVVPAGEGEFVDRHVRDLDEWLRPGDLLVFNDTRVIPARLFGQKSTGGRVEILIERLLPDNVARAQIGASKSPKPGGRIQLDEGGEAEVLDREGEFYTLRFHVPGALESWLLQAGRLPLPPYIQREAGRDDDERYQTVFARELGAVAAPTAGLHFDEALLQALRERGIEFGHVTLHVGAGTFQPVRVDDVREHHMHSEWLNVGAALIEQIHATRARGGRVIAVGTTVVRALESAMRDGQLQPFAGETQIFIFPGYRIRSVDALITNFHLPESTLLMLVSAFAGKDRVFAAYRHAVEQRYRFFSYGDAMLLFPSLS

SEQ ID NO: 71142 - protein, 347 aa, Pseudoxanthomonas sp.
  misc_feature (1)..(347): tr|A0A4V2HCX6|A0A4V2HCX6_9GAMM S-adenosylmethionine:tRN A ribosyltransferase-isomerase OS=Pseudoxanthomonas sp. NML171200 OX=2480816 GN=queA PE=3 SV=1
MKKSDFHYDLPPELIAQAPLPERSASRLLVVPPGDAPLADLHVRDLPGQLRAGDLLVFNDTRVIPARLFGQKDTGGRVEILIERLLPDNRAHAQIGASKSPKPGGLIALDAGGHCEVLGREGEFYELRFEVGDALDSWLLRAGRMPLPPYITREPGQDDDERYQTVFARELGAVAAPTAGLHFDEALLERLKAQGVQFGHITLHVGAGTFQAMRVDDVREHRMHSEWLNVGAELVQQIRRTRAAGGRVIAVGTTVVRALESATREGQLQPFAGETRIFIFPGYRITSVDALITNFHLPESTLLMLVSAFAGKARILQAYRHAVEQGYRFFSYGDAMLLFPQAQEVSA

SEQ ID NO: 71143 - protein, 343 aa, Pseudoxanthomonas sp.
  misc_feature (1)..(343): tr|A0A3R8MS11|A0A3R8MS11_9GAMM S-adenosylmethionine:tRN A ribosyltransferase-isomerase OS=Pseudoxanthomonas sp. SGD-10 OX=2493089 GN=queA PE=3 SV=1
MKKSDFHYDLPEELIAQAPLAERSASRMLVVPPGEGDFADLHVRDLPDLLQPGDLLVFNDTRVIPARLFGQKESGGRVEILIERLLPDEQARVQMRASKSPKPGSRIVLDGGGQAEVLGREDAFFVVRFEVGEPLEQWLARVGRLPLPPYIQREPDAADAERYQTVFAREVGAVAAPTAGLHFDHALLQRLRERGVEFGHVTLHVGAGTFQPMRVEDVREHTMHSEWLNVGAELVAQVRRTRAAGGRVIAVGTTVVRALESAMRDGQLQPFAGETRIFIFPGYKVRSVDALVTNFHLPESTLLMLVSAFAGKERIFAAYRHAVERRYRFFSYGDAMLLWGLKD

SEQ ID NO: 71144 - protein, 348 aa, Pseudoxanthomonas spadix
  misc_feature (1)..(348): tr|G7URQ4|G7URQ4_PSEUP S-adenosylmethionine:tRNA ribosy ltransferase-isomerase OS=Pseudoxanthomonas spadix (str ain BD-a59) OX=1045855 GN=queA PE=3 SV=1
MKKSDFRYDLPPELIAQAPLPERSASRLLVVPPGQAALLDLYMRELPSQLRAGDLLVFNDTRVIPARLFGQKDTGGRVEILIERLLPDNRAQAQIGASKSPKPGGHIALDAGGSCEVLSREGEFYQLRFDVEDALDSWLLKAGRMPLPPYITREPGQDDDERYQTVFAREPGAVAAPTAGLHFDQPLLDTLKAQGVQFGHVTLHVGAGTFQAMRVEDVREHRMHSEWLNVGAKLVQQIRRIRAAGGRVIAVGTTVVRALESAMRDGELQPFAGETCIFIFPGYRIASVDALITNFHLPESTLLMLVSAFAGRQRILEAYAHAVAQRYRFFSYGDAMLLFPQADPRRCA

SEQ ID NO: 71145 - protein, 365 aa, Pseudoxanthomonas spadix
  misc_feature (1)..(365): tr|A0A3M6Q064|A0A3M6Q064_9GAMM S-adenosylmethionine:tRN A ribosyltransferase-isomerase OS=Pseudoxanthomonas spa dix OX=415229 GN=queA PE=3 SV=1
MSCRCAYNTRLPFTRAALKKSDFRYDLPPELIAQAPLPERSASRLLVVPPGQAALLDLYMRDLPSQLRAGDLLVFNDTRVIPARLFGQKDTGGRVEILIERLLPDNRAQAQIGASKSPKPGGHIALDAGGSCEVLSREGEFYQLRFDVEDALDSWLLKAGRMPLPPYITREPGQDDDERYQTVFAREPGAVAAPTAGLHFDQPLLDTLKAQGVQFGHVTLHVGAGTFQAMRVEDVREHRMHSEWLNVGAKLVQQIRRTRAAGGRVIAVGTTVVRALESAMRDGELQPFAGETCIFIFPGYRIASVDALITNFHLPESTLLMLVSAFAGRQRILEAYAHAVAQRYRFFSYGDAMLLFPQADPRRCA

SEQ ID NO: 71146 - protein, 343 aa, Pseudoxanthomonas suwonensis
  misc_feature (1)..(343): tr|E6WSA5|E6WSA5_PSEUU S-adenosylmethionine:tRNA ribosy ltransferase-isomerase OS=Pseudoxanthomonas suwonensis (strain 11-1) OX=743721 GN=queA PE=3 SV=1
MKKSDFHYDLPEELIAQAPLAERSASRMLVVPPGEGEFADMHVRDLPELLQPGDLLVFNDTRVIPARLFGQKESGGRVEILIERLLPDAQARVQMRASKSPRPGSRIVLDGGGQAEVVGRDDAFFVVRFELDEPLEQWLARVGRLPLPPYIQRQPDAADAERYQTVFAREVGAVAAPTAGLHFDHALLQRLRERGVEFGHVTLHVGAGTFQPVRVEDVREHTMHSEWLNVGAELVAQIRRTRAAGGRVIAVGTTVVRALESAMRDGQLQPFAGETRIFIFPGYRIRSVDALVTNFHLPESTLLMLVSAFAGQERIFAAYRHAVEQRYRFFSYGDAMLLWGLED

SEQ ID NO: 71147 - protein, 353 aa, Pseudoxanthomonas suwonensis
  misc_feature (1)..(353): tr|A0A0E3UPC3|A0A0E3UPC3_9GAMM S-adenosylmethionine:tRN A ribosyltransferase-isomerase OS=Pseudoxanthomonas suw onensis OX=314722 GN=queA PE=3 SV=1
MKKSDFHYDLPEELIAQAPLAERSASRLLVVPPSIGPFSDLHVRDLPGLLQPGDLLVFNDTRVIPARLFGQKDSGGRVEILIERLLPDEQARAQVRASKSPKAGSRIALDGGGEAEVLGRDGEFYRLCFEVEDGLEPWLLKVGRLPLPPYIRREPGQDDTERYQTVFAKQVGAVAAPTAGLHFDEPLLAALRERGVRFGHVTLHVGAGTFQPVRVEDVRQHTMHSEWLNVGAELVAQVRRTREAGGRVIAVGTTVVRALESAWHRSEARPEGELRPFAGETRIFIFPGYRIRSVDALLTNFHLPESTLLMLVSAFAGKQRVFDAYRHAVEQRYRFFSYGDAMLLYPPDDAPER

SEQ ID NO: 71148 - protein, 343 aa, Pseudoxanthomonas taiwanensis
  misc_feature (1)..(343): tr|A0A562D3H6|A0A562D3H6_9GAMM S-adenosylmethionine:tRN A ribosyltransferase-isomerase OS=Pseudoxanthomonas tai wanensis J19 OX=935569 GN=queA PE=3 SV=1
MKKSDFHYDLPEELIAQAPLAERSASRMLVVPPGEGDFADLHVRDLPDLLQPGDLLVFNDTRVIPARLFGQKESGGRVEILIERLLPDAQARVQMRASKSPKPGSRIVLDGGGQAEVLGREDAFFVVRFEVGELRLRGLARVGRLPLPPYIQREPDAADAERYQTVFAREVGAVAAPTAGLHFDHALLQRLRERGVEFGHVTLHVGAGTFQPMRVEDVREHTMHSEWLNVGAELVAQVRRTRAAGGRVIAVGTTVVRALESAMRDGQLQPFAGETRIFIFPGYKVRSVDALVTNFHLPESTLLMLVSAFAGKERIFAAYRHAVERRYRFFSYGDAMLLWGLKD

SEQ ID NO: 71149 - protein, 346 aa, Pseudoxanthomonas wuyuanensis
  misc_feature (1)..(346): tr|A0A286D768|A0A286D768_9GAMM S-adenosylmethionine:tRN A ribosyltransferase-isomerase OS=Pseudoxanthomonas wuy uanensis OX=1073196 GN=queA PE=3 SV=1
MKKSDFHFELPPSLIAQAPLAERSASRLLVVPPGDAALVDGHVRDLPEWLAPGDLLIFNDTRVIPARVFGHKESGGRVEILIERLLPGNVARAQIGASKSPKPGGRIRLDGGGEAEVLGRDGEFYQLRFEVPGSLESWLLKAGRLPLPPYIQREPGRDDDERYQTVFARELGAVAAPTAGLHFDDRLLARLRERGVEFGHVTLHVGAGTFQPVRVDDIHQHQMHSEWLNVGAQLIEQVRAARARGGRVVAVGTTVVRALESAMHDGELKPFAGETRIFIFPGYRIRSVDALVTNFHLPESTLLMLVSAFAGKERVLAAYAHAVRQKYRFFSYGDAMLLFPQAGTQG

SEQ ID NO: 71150 - protein, 349 aa, Pseudozobellia sp.
  misc_feature (1)..(349): tr|A0A2E5BAU3|A0A2E5BAU3_9FLAO S-adenosylmethionine:tRN A ribosyltransferase-isomerase OS=Pseudozobellia sp. OX =2024854 GN=queA PE=3 SV=1
MKLSNFNFELPNNLLAEYPAENRDESKLMVIHRETGKIEHKMFKDLINYFDEGDVMVLNNTKVFPARLYGNKEKTGARIEVFLLRELNEEQRLWDVLVDPARKIRIGNKLYFGDDETLVAEVIDNTTSRGRTLRFLYDGSYLDFRRKLRDLGQTPLPKYIKRDVEPEDEERYQTIYAKYEGAVAAPTAGLHFSKHLLKRLEIKGIDFAEVTLHVGLGTFNPVEVEDLSKHKMDSEELVIDEKAIETVNKAKSAKKKVCAVGTTVMRGLESAVSSEQTLNTFDGWTNKFIFPPYDFSIANCMITNFHLPKSTLLMMVSAFMGHDLMKKAYKEAILEQYKFYSYGDAMLII

SEQ ID NO: 71151 - protein, 349 aa, Pseudozobellia sp.
  misc_feature (1)..(349): tr|A0A3B0BZW6|A0A3B0BZW6_9FLAO S-adenosylmethionine:tRN A ribosyltransferase-isomerase OS=Pseudozobellia sp. CC MM003 OX=2419782 GN=queA PE=3 SV=1
MKLSHFNFELPKDLLAEYPTENRDESKLMVIHRDSGKIEHKMFKDLIDYFDEGDVMVLNNTKVFPARLYGNKEKTGARIEVFLLRELNEEQRLWDVLVDPARKIRIGNKLYFGDDESLVAEVIDNTTSRGRTLRFLYDGAYIDFRRKLRELGETPLPKYIKRGVEPEDEERYQTIYAKHEGAVAAPTAGLHFSKHLLKRLEIKGVNFAELTLHVGLGTFNPVEVEDLSKHKMDSEELIIDEKATEVVNRAKEKRKKVCAVGTTAMRGLESAVSSEQTLNTFDGWTNKFIFPPYDFSIANCMITNFHLPKSTLLMMVSAFIGHDLMKRAYKEAILEGYRFYSYGDAMLII

SEQ ID NO: 71152 - protein, 349 aa, Pseudozobellia thermophila
  misc_feature (1)..(349): tr|A0A1M6JK01|A0A1M6JK01_9FLAO S-adenosylmethionine:tRN A ribosyltransferase-isomerase OS=Pseudozobellia thermo phila OX=192903 GN=queA PE=3 SV=1
MKLSHFNFELPDNLLAEYPAENRDESKLMVIHRETGKIEHKMFKDLIDYFDEGDVMVLNNTKVFPARLYGNKEKTGARIEVFLLRELNEEQRLWDVLVDPARKIRIGNKLYFGEDETLVAEVIDNTTSRGRTLRFLYDGSYLDFRRKLRELGQTPLPKYIKREVEPEDEERYQTIYAKYEGAVAAPTAGLHFSKHLLKRLEIKGVDFAEVTLHVGLGTFNPVEVEDLSKHKMDSEELVIDEKATQIVNNAKKNKRKVCAVGTTVMRGLESAVSSEHTLNTFEGWTNKFIFPPYDFSIANCMITNFHLPKSTLLMMVSAFMGHDLMKKAYKEAILEQYKFYSYGDAMLII

SEQ ID NO: 71153 - protein, 340 aa, Psychrilyobacter sp.
  misc_feature (1)..(340): tr|A0A369XV84|A0A369XV84_9FUSO S-adenosylmethionine:tRN A ribosyltransferase-isomerase OS=Psychrilyobacter sp. S5 OX=2283384 GN=queA PE=3 SV=1
MLLSDYDYHLPEELIGQTPTMPRDHSRLLVVDKTKKEIEHKKFYDILDYLNEGDVLVRNSTKVIPARLIGKKESGAVMEVFLLKRLELNRWECLVRRAKKLKLDQTIIFGDGQLKATLKEVKDDGNRILEFTFDGVFEEIIHELGQMPLPPYITEKLEDGDRYQTVYAEKGQSVAAPTAGLHFTEELFEKIAQKGVEVVDVYLEVGLGTFRPVQTENVLEHKMHSETFEVPEKTAEVVNRAKAEGRRIVAVGTTSVRTLESAADSSGKLMATSGDTEIFIYPGYEFKIVDALITNFHLPKSTLLMLVSALSEKDFMFSVYEEAVKEKYEFFSFGDAMFIY

SEQ ID NO: 71154 - protein, 346 aa, Psychrobacillus insolitus
  misc_feature (1)..(346): tr|A0A2W7PFQ4|A0A2W7PFQ4_9BACI S-adenosylmethionine:tRN A ribosyltransferase-isomerase OS=Psychrobacillus insol itus OX=1461 GN=queA PE=3 SV=1
MRVEDFDFDLPLELIAQTPLLDRTSSRLLIADYPKNTYKHESFSSILEELQAGDCLVLNDTKVMPARLMGVKEETGAHIEVLLLTQIEGDHWETLVKPSKRVKIGTEITFGEGLLKAVCTEIKDHGGRIFRFVYSGVFFEVLDQLGEMPLPPYIHEKLQDKNRYQTVYAKEQGSAAAPTAGLHFTDALLDDIRAKGIKIAFVTLHVGLGTFRPVSVDSIDDHEMHAEFYRISQETADTINEVKAAGGKIVAVGTTSTRTLESVATKFDGKLQEDSGWTSIFIYPGYDFLCIDGMITNFHLPKSTLVMLVSALTSRDFILSAYNEAIEQRYRFFSFGDAMFIKGRNY

SEQ ID NO: 71155 - protein, 346 aa, Psychrobacillus lasiicapitis
  misc_feature (1)..(346): tr|A0A544T8K2|A0A544T8K2_9BACI S-adenosylmethionine:tRN A ribosyltransferase-isomerase OS=Psychrobacillus lasii capitis OX=1636719 GN=queA PE=3 SV=1
MRVEDFDFNLPEELIAQTPLLDRTSSKLLIADYPKNTFTHTHFSAILDELNEGDCLVLNDTKVMPARLMGVKEETGANVEVLLLTQIEGDHWETLVKPAKRVKIGTTIVFGDGLLRAVCTDIKEHGGRIFRFEYDGVFFEVLDQLGEMPLPPYIHEKLENKDRYQTVYAKEQGSAAAPTAGLHFTENLLEEIQAKGVKIAFVTLHVGLGTFRPVSVDSIDDHEMHSEFYRLSKETANTINEVRAAGGKIVAVGTTSTRTLETVATKFDGVLQEDSGWTSIFIYPGYEFKCIDGMITNFHLPKSTLVMLVSALTSREFILSAYKEAIDLRYRFFSFGDAMFIKGRNY

SEQ ID NO: 71156 - protein, 346 aa, Psychrobacillus psychrodurans
  misc_feature (1)..(346): tr|A0A1I4WWN6|A0A1I4WWN6_9BACI S-adenosylmethionine:tRN A ribosyltransferase-isomerase OS=Psychrobacillus psych rodurans OX=126157 GN=queA PE=3 SV=1
MRVEDFDFELPEELIAQTPLLDRTSSKLLIADFEKQSYTHTHFKEILNELNEGDCLVLNDTKVMPARLMGIKEETGANVEVLLLTQIEGDHWETLVKPAKRVKIGTEITFGEGLLKAVCTGIKDHGGRIFRFEYTGVFFEVLDQLGEMPLPPYIHEKLENKDRYQTVYAKEQGSAAAPTAGLHFTDALLDEIRLKGVKIAFVTLHVGLGTFRPVSVDSIDDHEMHSEFYRITQETADVINKVKAIGGKVVAVGTTSTRTLETVATKFDGQLQADSGWTSIFIYPGYEFKCIDGMITNFHLPKSTLVMLVSALTSRDFILSAYKEAVDLKYRFFSFGDAMFIKGRNY

SEQ ID NO: 71157 - protein, 346 aa, Psychrobacillus psychrotolerans
  misc_feature (1)..(346): tr|A0A1I5YWW3|A0A1I5YWW3_9BACI S-adenosylmethionine:tRN A ribosyltransferase-isomerase OS=Psychrobacillus psych rotolerans OX=126156 GN=queA PE=3 SV=1
MRVEDFDFELPEELIAQTPLLDRTSSKLLIADFVKQSYTHTHFKDILDELQEGDCLVLNDTKVMPARLMGMKKETGANIEVLLLTQIEGDHWETLVKPAKRVKVGTEITFGDGLLKAICTDIKDHGGRIFRFEYTGVFFEVLDQLGEMPLPPYIHEKLENKDRYQTVYAKEQGSAAAPTAGLHFTDALLDDIRSKGVKIAFVTLHVGLGTFRPVSVDSIDDHEMHSEFYRITGETADTINQVKAAGGKIVAVGTTSTRTLETVATKFEGQLQADSGWTSIFIYPGYDFKCIDGMITNFHLPKSTLVMLVSALTSREFMLSAYKEAVDLKYRFFSFGDAMFIKGRNY

SEQ ID NO: 71158 - protein, 346 aa, Psychrobacillus soli
  misc_feature (1)..(346): tr|A0A544TBM4|A0A544TBM4_9BACI S-adenosylmethionine:tRN A ribosyltransferase-isomerase OS=Psychrobacillus soli OX=1543965 GN=queA PE=3 SV=1
MRVEDFDFDLPEELIAQTPLLDRTSSKLLIADYPKKAYTHNHFSAILDELNEGDCLVLNDTKVMPARLMGVKEETGANVEVLLLTQIEGDHWETLVKPAKRVKIGTTIVFGDGLLRAVCTDIKEHGGRIFRFEYDGVFFEVLDQLGEMPLPPYIHEKLENKDRYQTVYAKEQGSAAAPTAGLHFTENLLSDIRAKGVKIAFVTLHVGLGTFRPVSVDSIDDHEMHSEFYRLSKETANTINEVKEAGGKIVAVGTTSTRTLETVASKFNGQLQEDSGWTSIFIYPGYEFKCIDGMITNFHLPKSTLVMLVSALTSRDFILSAYKEAIDLRYRFFSFGDAMFIKGRNY

SEQ ID NO: 71159 - protein, 346 aa, Psychrobacillus sp.
  misc_feature (1)..(346): tr|A0A1H9SJB7|A0A1H9SJB7_9BACI S-adenosylmethionine:tRN A ribosyltransferase-isomerase OS=Psychrobacillus sp. O K032 OX=1884358 GN=queA PE=3 SV=1
MRVEDFDFELPEELIAQTPLLDRTSSKLLVADFPKKTYTHTHFSAILDDLKAGDCLVLNDTKVMPARLMGVKEETGANVEVLLLTQIEGDHWETLVKPAKRVKIGTTIVFGDGLLRAVCTEIKEHGGRIFRFEYAGVFFEVLDQLGEMPLPPYIHEKLENKDRYQTVYAKEQGSAAAPTAGLHFTENLLDEIKAKGVKIAFVTLHVGLGTFRPVSVDSIDDHEMHSEFYRLSKETANTINEVKATGGKIVAVGTTSTRTLETVATKFDGVLQEDSGWTSIFIYPGYEFKCIDGMITNFHLPKSTLVMLVSALTSRDFILSAYKEAIDLRYRFFSFGDAMFIKGRNF

SEQ ID NO: 71160 - protein, 346 aa, Psychrobacillus sp.
  misc_feature (1)..(346): tr|A0A544TP31|A0A544TP31_9BACI S-adenosylmethionine:tRN A ribosyltransferase-isomerase OS=Psychrobacillus sp. Z 8 OX=2325572 GN=queA PE=3 SV=1
MKVEDFDFELPEELIAQTPLLDRTSSKLLVADYPNDAYKHETFSAILGELNKGDCLVLNDTKVMPARLMGVKEETGANVEVLLLTQIEGDNWETLVKPAKRVKVGTKITFGEGLLTAVCTELKDHGGRIFRFEYEGVFFEVLDKLGEMPLPPYIHEKLEEKDRYQTVYAKEQGSAAAPTAGLHFTEMLLDDIRAKGVKIAFVTLHVGLGTFRPVSVDSIDDHEMHSEFYRVSKETAQTINEVRAAGGKIVAVGTTSTRTLETVATKFDGQMEEDSGWTSIFIYPGYQFKCIDGMITNFHLPKSTLVMLVSALTSREFILTAYKEAIERSYRFFSFGDAMFIKGRNY

SEQ ID NO: 71161 - protein, 400 aa, Psychrobacter alimentarius
  misc_feature (1)..(400): tr|A0A144NUQ2|A0A144NUQ2_9GAMM S-adenosylmethionine:tRN A ribosyltransferase-isomerase OS=Psychrobacter aliment arius OX=261164 GN=queA PE=3 SV=1
MTDSHALDSTAPALIDNDTDNNVLDYLSVDDYDYELPDSLIARYPLAQRSASKLLYLATDNQKNTASVQDRLFAELPDLLNAGDLIVFNDTKVMKARLFGQKDTGGKIEVLIERLVNLSDLDVTTLHVETIDDTTINKEHIALCHVKASKAPKLGQRVSLANGHMNAVMIGRQDNLFILAFEAPILPHLELYGELPIPPYFERHADDTDNTRYQTVFHDPAKLASVAAPTASLHFDESVLNQLTEKGINTAFVTLHVGAGTFAPVKTDNLLNHTMHSEYAHLPQATADLINQTHANGNQVIAIGTTVTRVLETAYQKTAVEGQPLSSWSGDTDIFIYPGFKFGVIDRLLTNFHLPKSTLLMLVSAFSGKAAIEHAYQHAIGKQYRFFSYGDAMLLDKKAN

SEQ ID NO: 71162 - protein, 400 aa, Psychrobacter aquaticus
  misc_feature (1)..(400): tr|U4T3Z6|U4T3Z6_9GAMM S-adenosylmethionine:tRNA ribosy ltransferase-isomerase OS=Psychrobacter aquaticus CMS 5 6 OX=1354303 GN=queA PE=3 SV=1
MTDSHAVNSDNNIQINTNKDDAVLDYLSVNDYDYELPDSLIARYPLAQRSASKLLYLATDNQKNVAHVEDRLFAELPDLLNAGDLIVFNDTKVMKARLFGQKDTGGKLEALIERLINISDLDAATLHLETMDGKLVNQEHIALCHVKASKALKLGQRVALADGHMNAVMVGRQDNLFVLAFDAPILPHLELYGELPIPPYFERHADDTDNTRYQTVFHDPAKLASVAAPTASLHFDESVLSKLAEKGINTAFVTLHVGAGTFAPVKTDNLLNHTMHSEYAHLPQATAELINQTHANGNQVIAIGTTVTRVLETAYQKTAVNGQALSSWSGDTDIFIYPGFKFGVIDRLLTNFHLPKSTLLMLVSAFSGKAAIEHAYQHAITEQYRFFSYGDAMLLDKKVN

SEQ ID NO: 71163 - protein, 403 aa, Psychrobacter arcticus
  misc_feature (1)..(403): sp|Q4FRV6|QUEA_PSYA2 S-adenosylmethionine:tRNA ribosylt ransferase-isomerase OS=Psychrobacter arcticus (strain DSM 17307 / 273-4) OX=259536 GN=queA PE=3 SV=1
MTDSEPQTLNNNSEITANHNDDILEYLSVDDYDYELPDQLIARYPLAQRSASKLLYLPTNNANSQVEDKLFSELPDILNAGDLIVFNDTKVMKARLFGQKDTGGKIEVLIERLVSLSDVNSAYLDEIIANSKTIDTTIIAEKHIALCHIKASKALKLGQGLVLADGHMTGIMIGRQENLFILAFDTPILPDLEQYGELPIPPYFERHADATDNTRYQTVFHDPAKLASVAAPTASLHFDDIVLEKLAAKGIQTAFVTLHVGAGTFAPVKTDNLLNHTMHSEYAHLPQATAELINQTHANGKQVIAIGTTVTRVLETAYQQTAVDGQSLSGWSGDTDIFIYPGFKFGVVDKLLTNFHLPKSTLLMLVSAFATKKSIEQAYQHAIKSQYRFFSYGDAMLLDKQVD

SEQ ID NO: 71164 - protein, 405 aa, Psychrobacter cryohalolentis
  misc_feature (1)..(405): sp|Q1QAG2|QUEA_PSYCK S-adenosylmethionine:tRNA ribosylt ransferase-isomerase OS=Psychrobacter cryohalolentis (s train K5) OX=335284 GN=queA PE=3 SV=1
MTDSEPQTLNNNSEITASHNDDILEYLSVDDYDYELPDQLIARYPLAQRSASKLLYLRANNANSQVEVEDKLFSELPELLNAGDLIVFNDTKVMKARLFGQKDTGGKIEVLIERLVALSDLNSADLDTITSNSDIIDMTVIAEKHIALCHVKASKALKLGQGLVLADGHMTGVMIGRQENLFILAFDTPILPDLELYGELPIPPYFERHADATDNTRYQTVFHDPAKLASVAAPTASLHFDDIVLEKLAAKGIQTAFVTLHVGAGTFAPVKTENLLNHTMHSEYAHLPQATADLINQTHANGKQVIAIGTTVTRVLETAYQQTAVDRQPLSGWAGDTEIFIYPGFEFGVVDKLLTNFHLPKSTLLMLVSAFATKKSIEEAYQHAIESEYRFFSYGDAMLLDKKVD

SEQ ID NO: 71165 - protein, 397 aa, Psychrobacter fozii
  misc_feature (1)..(397): tr|A0A2V4UJM4|A0A2V4UJM4_9GAMM S-adenosylmethionine:tRN A ribosyltransferase-isomerase OS=Psychrobacter fozii O X=198480 GN=queA PE=3 SV=1
MTDIHAVDSETNALIDTNKDNDTLDYLSVDDYDYELPDSLIARYPLSQRSASKLLYLPADQQKTITVEDRLFAELPDLLSAGDLIVFNDTKVMKARLFGQKDTGGKLEVLIERLVGISDLDTATLHLEDMTDKPINQEHIALCHVKASKALKLGQRLQLADGHMSATMIGRQDNLFILAFDAPILPHLELYGELPIPPYFERHADDTDNARYQTVFHDPTKLASVAAPTASLHFDDLVLSKLTEKGIHTAFVTLHVGAGTFAPVKTDNLLNHTMHSEYAHLPQATADLINQTHANGKQVIAIGTTVTRVLETAYQKTTNDGQALSSWSGDTDIFIYPGFKFGVIDKLLTNFHLPKSTLLMLVSAFSGKDMIEHAYQHAIKEQYRFFSYGDAMLLEKK

SEQ ID NO: 71166 - protein, 394 aa, Psychrobacter frigidicola
  misc_feature (1)..(394): tr|A0A5C7A2K7|A0A5C7A2K7_9GAMM S-adenosylmethionine:tRN A ribosyltransferase-isomerase OS=Psychrobacter frigidi cola OX=45611 GN=queA PE=3 SV=1
MTTSNSTNSASQSRADDTTLEYLSVADYDYELPDSLIARYPLDQRSASKLLYLPASSQDQPLHSPQDHIFTELPELLNAGDLIVFNDTKVMKARLFGNKDTGGRVEVLIERLLNGDSLDINNTNPKEALSLHKNVALCHVKASKAPKLGQRLSLADGNMGCVMIGRRDNLFILAFDAPILPNLELHGELPIPPYFERHADATDNIRYQTVFHDPAKLASVAAPTASLHFDTSVLERLAAKGINTAFVTLHVGAGTFAPVKTENLLNHTMHSEYAHLPQATAEIINQTHANGGKVIAIGTTVTRVLETAYQKTAQNGQPLTSWSGDTDIFIYPGFKFGVIDRLLTNFHLPKSTLLMLVSAFAGKSAIEEAYQHAITNQYRFFSYGDAMLLDKINF

SEQ ID NO: 71167 - protein, 406 aa, Psychrobacter immobilis
  misc_feature (1)..(406): tr|A0A2V2A4J4|A0A2V2A4J4_PSYIM S-adenosylmethionine:tRN A ribosyltransferase-isomerase OS=Psychrobacter immobil is OX=498 GN=queA PE=3 SV=1
MTDFHTIDPTTAASIDAEKNNNDLSYLSVDDYDYELPDSLIARYPLSQRSASKLLYLPANNQKDPALVEDRLFTELPELLNEGDLIVFNDTKVMKARLFGQKDTGGKLEVLIERLVDISDLETATLYVEAEKSVEAANDKAVNQEHIALCHVKASKALKLGQHLQLADGHMKAVMIGRQDNLFILAFDAPILPHLELYGELPIPPYFERHADETDNTRYQTVFHDPTKLASVAAPTASLHFDESVLSKLAAKGIRTAFVTLHVGAGTFAPVKTDNLLNHTMHSEYAHLPQATAELINQTHANGKQVIAIGTTVTRVLETAYQKTAVNGQPLSSWSGDTDIFIYPGFKFGVIDRLLTNFHLPKSTLLMLVSAFSGKDAIEHAYQHAIKEHYRFFSYGDAMLLDRKRD

SEQ ID NO: 71168 - protein, 400 aa, Psychrobacter pacificensis
  misc_feature (1)..(400): tr|A0A1G6ZP45|A0A1G6ZP45_9GAMM S-adenosylmethionine:tRN A ribosyltransferase-isomerase OS=Psychrobacter pacific ensis OX=112002 GN=queA PE=3 SV=1
MTDSHIDSTDTDAPTDTDKKNDVLDYLSVEDYDYELPDSLIARYPLAQRSASKLLYLPARTQINDTRVEDRLFSELPHLLEAGDLIVFNDTKVMKARLFGQKDTGGKLEVLIERLVDISDLDEVPLHLKDTNDEAVNQEHIALCHVKASKALKLGQRLQLADGHMSATMIGRQDNLFILAFDAPILPHLELYGELPIPPYFERHADDTDNTRYQTVFHDPAKLASVAAPTASLHFDESVLSKLDEKGINTAFVTLHVGAGTFAPVKTDNLLNHTMHSEYAHLPQTTANLINQTHANGKKVIAIGTTVTRVLETAYQKTAIDGQALSSWSGDTDIFIYPGFKFGVIDRLLTNFHLPKSTLLMLVSAFAGKASIEHAYQHAIEKQYRFFSYGDAMLLDKKAQ

SEQ ID NO: 71169 - protein, 395 aa, Psychrobacter pasteurii
  misc_feature (1)..(395): tr|A0A1R4EDV6|A0A1R4EDV6_9GAMM S-adenosylmethionine:tRN A ribosyltransferase-isomerase OS=Psychrobacter pasteur ii OX=1945520 GN=queA PE=3 SV=1
MTQPTPQNQLDSSNNMTTNITETEGYLSVADYDYELPDEYIARYPLAERSASRLMYLPASNMAQTDGTADIQDKNFADLPDLLDAGDLIVFNDTKVMKARLFGQKDTGGKVEVLVERLTDDVEFTTDENGQSFDNVALCHVRASKAPKLGQTLLLGDGHIECVMIGRHENLFILSFKNPILPDLEQYGELPIPPYFERHADETDNVRYQTVFHDPTKLASVAAPTASLHFDDKVLQQLADKGVNTAYVTLHVGAGTFAPVKTDNLLNHTMHSEYANLPQDTADLINQTHQNGNKVIAIGTTVTRVLETAYQKTANDQGEVSAWSGDTDIFIYPGFKFGVIDKLLTNFHLPKSTLLMLVSAFAGKAPIEQAYEHAVAQKYRFFSYGDAMLLERNES

SEQ ID NO: 71170 - protein, 393 aa, Psychrobacter phenylpyruvicus
  misc_feature (1)..(393): tr|A0A379LHG6|A0A379LHG6_9GAMM S-adenosylmethionine:tRN A ribosyltransferase-isomerase OS=Psychrobacter phenylp yruvicus OX=29432 GN=queA PE=3 SV=1
MTQPITQNQNQNDNSKNMTSDNAHTEGYLSVADYDYELPDEYIARYPLAERSASRLMYLPAQQGDTTEVQDRQFAELPELLETGDLIVFNDTKVMKARLFGQKDTGGKVEVLVERLTDDIEFTTDEDGKVHDNVALCHVRASKAPKLGQTLLLANGNIECVMIGRHENLFILSFKNPILPDLEQYGELPIPPYFERHADETDNIRYQTVFHDPAKLASVAAPTASLHFDDKVLQQLADKGINTAYVTLHVGAGTFAPVKTDNLLNHTMHSEYANLPQATADLINQTHKNGNKVIAIGTTVTRVLETAYQKTADDQGQVAAWSGDTDIFIYPGFKFGVIDKLLTNFHLPKSTLLMLVSAFAGKRNIEQAYQHAVAEKYRFFSYGDAMLLERSDS

SEQ ID NO: 71171 - protein, 395 aa, Psychrobacter piechaudii
  misc_feature (1)..(395): tr|A0A1R4G9K7|A0A1R4G9K7_9GAMM S-adenosylmethionine:tRN A ribosyltransferase-isomerase OS=Psychrobacter piechau dii OX=1945521 GN=queA PE=3 SV=1
MTQPISQNQHDNSNNLTSDNTHTESPQSGYLSVADYDYELPDEYIARYPLAERSASRLMYLPAQKADTAAIQDRQFSDLPELLESGDLIVFNDTKVMKARLFGQKDTGGKVEVLVERLTDNTEFTTDEDGKNHDNVALCHVRASKAPKLGQTLLLANNNIECVMIGRHENLFILSFKNPILPDLEQYGELPIPPYFERHADETDNVRYQTVFHDPTKLASVAAPTASLHFDDKVLQQLADKGINTAYVTLHVGAGTFAPVKTDNLLNHTMHSEYANLPQATADLINQTHKNGNKVIAIGTTVTRVLETAYQKTADNQGQVSTWSGDTDIFIYPGFKFGVIDKLLTNFHLPKSTLLMLVSAFAGKTNIEQAYQHAVAKKYRFFSYGDAMLLERNES

SEQ ID NO: 71172 - protein, 400 aa, Psychrobacter piscatorii
  misc_feature (1)..(400): tr|A0A0T6DU35|A0A0T6DU35_9GAMM S-adenosylmethionine:tRN A ribosyltransferase-isomerase OS=Psychrobacter piscato rii OX=554343 GN=queA PE=3 SV=1
MTDSHIDSADTDAPTDTDKNNDVLDYLSVEDYGYELPDSLIARYPLAQRSASKLLYLPARTQINDTRVEDRLFSELPHLLEAGDLIVFNDTKVMKARLFGQKDTGGKLEVLIERLVGISDLDEVTLHLKDTNDEAVNQEHIALCHIKASKALKLGQRLQLADGHMSATMIGRQDNLFILAFDAPILPHLELYGELPIPPYFERHADDTDNTRYQTVFHDPTKLASVAAPTASLHFDESVLSKLDEKGINTAFVTLHVGAGTFAPVKTDNLLNHTMHSEYAHLPQTTADLINQTHANGKKVIAIGTTVTRVLETAYQKTAIDGQALSSWSGDTDIFIYPGFKFGVIDRLLTNFHLPKSTLLMLVSAFAGKASIEHAYQHAIEKQYRFFSYGDAMLLDKKAH

SEQ ID NO: 71173 - protein, 404 aa, Psychrobacter sp.
  misc_feature (1)..(404): tr|A0A2M9TVL6|A0A2M9TVL6_9GAMM S-adenosylmethionine:tRN A ribosyltransferase-isomerase OS=Psychrobacter sp. L7 OX=1982756 GN=queA PE=3 SV=1
MTHSHAVDLDRNTITDTHKNNNDLDYLSVNDYDYELPDELIARYPLAQRSASRLLYLPASNPANVADSRAEDRMFSELPDLLNAGDLIVFNDTKVMKARLFGQKDTGGKIEVLIERLVDIADLAPAALHLTTADDQPVCTDHIALGHIKASKAPKLGQRLQLGDGHIHAVMIGRQDNLFILAFDAPILPQLEQYGELPIPPYFERHADATDNTRYQTVFHDPAKLASVAAPTASLHFDEVVLDKLAAKGIHTAFVTLHVGAGTFAPVKTDNLLNHTMHSEYAHLPQATADLINQTHANGKQVIAIGTTVTRVLETAYQKTASTGKPLAGWSGDTDIFIYPGFKFAVIDKLLTNFHLPKSTLLMLVSAFSGKQAIEQAYKHAVEQQYRFFSYGDAMLLEKQMTTE

SEQ ID NO: 71174 - protein, 390 aa, Psychrobacter sp.
  misc_feature (1)..(390): sp|A5WGS3|QUEA_PSYWF S-adenosylmethionine:tRNA ribosylt ransferase-isomerase OS=Psychrobacter sp. (strain PRwf- 1) OX=349106 GN=queA PE=3 SV=1
MTQPLSQDQHDSSSNMPTDNAETQGYLSVADYDYDLPDEYIARYPLAERSASRLMYLPAQKENTAVIQDRQFSDLPELLQAGDLIVFNDTKVMKARLFGQKDTGGKVEVLVERLTDDTEFTTDESGQSFDNVALCHVRASKAPKLGQRLVLGDGNIECVMIGRHENLFILSFKNPILPDLEQYGELPIPPYFERHADETDNVRYQTVFHDPTKLASVAAPTASLHFDDKVLKQLADKGINTAYVTLHVGAGTFAPVKTDNLLNHTMHSEYANLPQATADLINQTHQNGNKVIAIGTTVTRVLETAYQKTADEHGHISTWSGDTDIFIYPGFKFGVIDKLLTNFHLPKSTLLMLVSAFAGKANIEQAYEHAVAQKYRFFSYGDAMLLERNL

SEQ ID NO: 71175 - protein, 383 aa, Psychrobacter urativorans
  misc_feature (1)..(383): tr|A0A0M4TDT2|A0A0M4TDT2_9GAMM S-adenosylmethionine:tRN A ribosyltransferase-isomerase OS=Psychrobacter urativo rans OX=45610 GN=queA PE=3 SV=1
MTHSQHSIANNNTDINNDGLDYLSVADYDYELPDSLIARYPLAERSASKLLYVPASAQPEDHIFTALPDLLNAGDLIVFNDTKVMKARLFGKKDTGGRVEVLIERLIDNNDGTNNESETTQKNVALCHVKASKAPKLGQRLILADGNMGCVMIGRQDNLFILDFDAPILPHLEAYGELPIPPYFERHADATDNIRYQTVFHDPAKLASVAAPTASLHFDDGILERLAAKGINTAFVTLHVGAGTFAPVKTENLLNHTMHSEYAHLPQTTADMINQTHANGGKVIAIGTTVTRVLETAYQKTALNGQPLSTWSGDTDIFIYPGFKFGVIDRLLTNFHLPKSTLLMLVSAFSGKSAIEQAYQHAINSEYRFFSYGDAMLLDKVDF

SEQ ID NO: 71176 - protein, 349 aa, Psychroflexus gondwanensis
  misc_feature (1)..(349): tr|N1WRR4|N1WRR4_9FLAO S-adenosylmethionine:tRNA ribosy ltransferase-isomerase OS=Psychroflexus gondwanensis AC AM 44 OX=1189619 GN=queA PE=3 SV=1
MKLSQFEYTLPENLLAEFPSEHRDEAKLMVINRKDGSIEHKMFKDVIDYFGEKDVMVFNNTKVFPARLYGNKEKTGAKIEVFLLRELNPETRLWDVLVDPARKIRIGNKLYFGEDESLVAEVIDNTTNRGRTLRFLYDGSYQDFRAKLTELGQTPLPKYIKRDVVPEDAERYQTIYAKEEGAVAAPTAGLHFSKHLLKRLEIKGVDFAEVTLHIGLGTFSPVEVEDLSKHKMDSEQIMVDEKATSIINNAKSEKRKICAVGTTVMRTLESTVSSNRRLNEFTGWTNKFIFPPYDFKIANCMITNFHMPKSTLLMMVSAFAGHELMEKAYKEAIKENYKFYSYGDAMLII

SEQ ID NO: 71177 - protein, 351 aa, Psychroflexus halocasei
  misc_feature (1)..(351): tr|A0A1H3ZNJ2|A0A1H3ZNJ2_9FLAO S-adenosylmethionine:tRN A ribosyltransferase-isomerase OS=Psychroflexus halocas ei OX=908615 GN=queA PE=3 SV=1
MGMKLSQFTFELADDLLAEHPAEHRDESKLMVIDRKTGTIEHKMFKDLINYFDEDDVMVFNDTKVFPARLYGNKEKTGARIEVFLLRELNPETRLWDVLVDPARKIRIGNKLYFGEDESLVAEVIDNTTSRGRTLRFLYDGSYEDFRSKMRELGETPLPKYIKRDVSPEDEERYQTIYAKNEGAVAAPTAGLHFSKHLMKRLEIKGVNFADVTLHIGLGTFNPVEVEDLSKHKMDSEEICIEKEATEIINRGLDEKRRICAVGTTVMRTLESAVSSNQRLNEYEGWTNKFIFPPYDFSIANCMVTNFHMPKSTLLMMISAFAGHELMEKAYKEAVKENYRFYSYGDAMLII

SEQ ID NO: 71178 - protein, 349 aa, Psychroflexus salarius
  misc_feature (1)..(349): tr|A0A1M4SJK7|A0A1M4SJK7_9FLAO S-adenosylmethionine:tRN A ribosyltransferase-isomerase OS=Psychroflexus salariu s OX=1155689 GN=queA PE=3 SV=1
MKLSQFEFELPEELLAEFPAENRDESRLMVVNRKTGEIEHKMFKDLIEYFDEDDVMIFNDTKVFPARLFGNKEKTGARIEVFLLRELNPETRLWDVLVDPARKIRIGNKLYFGEDESLVAEVIDNTTSRGRTLRFLYDGSYQDFRKKLNELGETPLPKYIKRDVQPEDEDRYQTIYAKKEGAVAAPTAGLHFSKHLMKRLEIKGINFAEVTLHIGLGTFNPVEVEDLSKHKMDSEEIMIDEEATKTINTALDNKKRVCAVGTTVMRTIESAVSSNQRLNEYNGWTNKFIFPPYDFSIANCMVTNFHMPKSTLLMMISAFAGHDLMEKAYKEAIKEKYRFYSYGDAMLII

SEQ ID NO: 71179 - protein, 351 aa, Psychroflexus sediminis
  misc_feature (1)..(351): tr|A0A1G7V4F1|A0A1G7V4F1_9FLAO S-adenosylmethionine:tRN A ribosyltransferase-isomerase OS=Psychroflexus sedimin is OX=470826 GN=queA PE=3 SV=1
MGMKLSQFEFTLPEDLLAEFPSEHRDEAKLMVVNRKDGSIEHKMFKDVINYFDEKDVMVFNNTKVFPARLYGNKEKTGAKIEVFLLRELNPETRLWDVLVDPARKIRIGNKLYFGEDESLVAEVIDNTTNRGRTLRFLYDGSYQDFRDKLTELGQTPLPKYIKRDVVPEDAERYQTIYAKNEGAVAAPTAGLHFSKHLLKRLEIKGIDFAEVTLHIGLGTFNPVEVEDLSKHKMDSEEIMIDSNATSIINNAKSEKRRICAVGTTVMRTLESAVSSNHRLNEYNGWTNKFIFPPHDFSIANCMITNFHMPKSTLLMMISAFAGHDLMEKAYKEAIKEKYKFYSYGDAMLIL

SEQ ID NO: 71180 - protein, 349 aa, Psychroflexus sp.
  misc_feature (1)..(349): tr|A0A2M9TIC5|A0A2M9TIC5_9FLAO S-adenosylmethionine:tRN A ribosyltransferase-isomerase OS=Psychroflexus sp. S27 OX=1982757 GN=queA PE=3 SV=1
MKLSQFTFELADDLLAEHPAEHRDESKLMVIDRKTGTIEHKMFKDLINYFDEDDVMVFNDTKVFPARLYGNKEKTGARIEVFLLRELNPETRLWDVLVDPARKIRIGNKLYFGEDESLVAEVIDNTTSRGRTLRFLYDGSYEDFRSKMRELGETPLPKYIKRDVSPEDEERYQTIYAKNEGAVAAPTAGLHFSKHLMKRLEIKGVNFADVTLHIGLGTFNPVEVEDLSKHKMDSEEICIEKEATEIINRGLDEKRRICAVGTTVMRTLESAVSSNQRLNEYEGWTNKFIFPPYDFSIANCMVTNFHMPKSTLLMMISAFAGHELMEKAYKEAVKENYRFYSYGDAMLII

SEQ ID NO: 71181 - protein, 349 aa, Psychroflexus sp.
  misc_feature (1)..(349): tr|A0A2I0D3Z9|A0A2I0D3Z9_9FLAO S-adenosylmethionine:tRN A ribosyltransferase-isomerase OS=Psychroflexus sp. MES 1-P1E OX=2058320 GN=queA PE=3 SV=1
MKLSQFEYTLPENLLAEFPSEHRDEAKLMVINRKDGSIEHKIFKDVINYFDEKDVMVFNNTKVFPARLYGNKEKTGAKIEVFLLRELNPETRLWDVLVDPARKIRIGNKLYFGEDESLVAEVIDNTTNRGRTLRFLYDGSYQDFRAKLTELGQTPLPKYITRDVVPEDAERYQTIYAKEEGAVAAPTAGLHFSKHLLKRLEIKGIDFAEVTLHIGLGTFSPVEVEDLSKHKMDSEQIKVDEKATSIINNAKSEKRKICAVGTTVMRTIESTVSSNRRLNEFTGWTNKFIFPPYDFKIANCMITNFHMPKSTLLMMVSAFAGHELMEKAYKEAIEENYKFYSYGDAMLII

SEQ ID NO: 71182 - protein, 351 aa, Psychroflexus torquis
  misc_feature (1)..(351): tr|K4IPK3|K4IPK3_PSYTT S-adenosylmethionine:tRNA ribosy ltransferase-isomerase OS=Psychroflexus torquis (strain ATCC 700755 / ACAM 623) OX=313595 GN=queA PE=3 SV=1
MGMKLSQFEYTLPENLLAQFPSEHRDEAKLMVINRKDGSIEHKIFKDVINYFDEKDVMVFNNTKVFPARLYGNKEKTGAKIEVFLLRELNPETRLWDVLVDPARKIRIGNKLYFGEDESLVAEVIDNTTNRGRTLRFLYDGSYQDFRAKLTELGQTPLPKYITRDVVPEDAERYQTIYAKEEGAVAAPTAGLHFSKHLLKRLEIKGIDFAEVTLHIGLGTFSPVEVEDLSKHKMDSEQIKVDEKATSIINNAKSEKRKICAVGTTVMRTIESTVSSNRRLNEFTGWTNKFIFPPYDFKIANCMITNFHMPKSTLLMMVSAFAGHELMEKAYKEAIEENYKFYSYGDAMLII

SEQ ID NO: 71183 - protein, 351 aa, Psychromonas ingrahamii
  misc_feature (1)..(351): tr|A1SWU1|A1SWU1_PSYIN S-adenosylmethionine:tRNA ribosy ltransferase-isomerase OS=Psychromonas ingrahamii (stra in 37) OX=357804 GN=queA PE=3 SV=1
MFCMKVSDFSFELPPALIARYPMKDRSASRLLSVEGNSGELKHLQFTDLVDLIDENDLLIFNDTRVIPARLFGEKETGGKIEVLVERVLDDKSFLAHLRSSKSPKPGCKLRLENSIDAVMLKRQGPLFEIHIDHGSTVLEVLESIGHMPLPPYIDRPDEDADKERYQTVYNKNPGAVAAPTAGLHFDQAVMTKLQDKGVDFAFVTLHVGAGTFQPVKVDNILDHQMHSEYAEVSQEVIDKINTTKAKGGRVIAVGTTSVRSVESAAQVSVKMGNDLAPFFSETSIFIYPGYQFQIIDALVTNFHLSESTLLMLVSAFSGKENIDNAYKVAIQEKYRFFSYGDAMFLTKKTK

SEQ ID NO: 71184 - protein, 352 aa, Psychromonas sp.
  misc_feature (1)..(352): tr|A0A2N0WXW2|A0A2N0WXW2_9GAMM S-adenosylmethionine:tRN A ribosyltransferase-isomerase OS=Psychromonas sp. psyc h-6C06 OX=2058089 GN=queA PE=3 SV=1
MKVSDFSFQLPESLIARYPKAERTGSRLLSLCGISGDIKHQQFPDIIDLINSDDLLIFNDTRVIPARLFGEKETGGKIEVLVERVIDDKSFLAHVRSSKSPKPGCKLRLENTVDAVMVQRQGPLFEICIDDTSSVLEVLENIGHMPLPPYIDRPDEDADKERYQTVYNKNPGAVAAPTAGLHFDQTILDKIQKKGAELAFVTLHVGAGTFQPVKVDNVLEHHMHSELAQVSQEVVDKIIATKQKGGRVIAVGTTSVRSIESAAQATLAQGLPLTPYFAETDIFIYPGYKFQLIDAMVTNFHLSESTLLMLVSAFAGKKHIEKAYQVAIEEQYRFFSYGDAMFLTNANSTAEL

SEQ ID NO: 71185 - protein, 348 aa, Psychromonas sp.
  misc_feature (1)..(348): tr|A0A366WCV0|A0A366WCV0_9GAMM S-adenosylmethionine:tRN A ribosyltransferase-isomerase OS=Psychromonas sp. B3M0 2 OX=2267226 GN=queA PE=3 SV=1
MKVADFSFHLPEELIARYPMPERTNSRLLSLEANSGQLQHLNFTDIIDLVDEKDLLIFNDTRVIPARLFGTKETGGKIEVLVERVIDETTFLAHVRSSKSPKPGCKLLLENAVNAEMVQRQGPLFEIKVDSDDSVLQILERIGHMPLPPYIDRPDEDADKERYQTVYNKNPGAVAAPTAGLHFDQAILDKIAAKGADSAFVTLHVGAGTFQPVKVDNILDHQMHSEYAEVSQQVVDKIIATKAAGGRVIAVGTTSVRSIESAASVTLAKGLPLAPFFSETSIFIYPGYEFQLVDAMVTNFHLSESTLLMLVSAFSGKENIDHAYQTAIQEKYRFFSYGDAMFLTKKST

SEQ ID NO: 71186 - protein, 349 aa, Psychroserpens burtonensis
  misc_feature (1)..(349): tr|A0A5C7BE92|A0A5C7BE92_9FLAO S-adenosylmethionine:tRN A ribosyltransferase-isomerase OS=Psychroserpens burton ensis OX=49278 GN=queA PE=3 SV=1
MKLSHFHFDLPDELLAERPSDIRDESRLMVLDRKNQTIEHKLFKDVIDYFDEGDVMILNNTKVFPARLYGNKEKTGARIEVFLLRELNEEQRLWDVLVDPARKIRIGNKLYFGEDETLVAEVIDNTTSRGRTLRFLYDGSYHEFRRKLTELGETPLPKYIQREVEPEDAERYQTIFAKNEGAVAAPTAGLHFSKHLLKRLEIKGVELPEVTLHVGLGTFNPVEVEDLSKHKMDSEEIYVTKPATDIINKGIAEKRRVCAVGTTAMRAVESCVSSSGTLNEFTGWTNKFIFPPYEFSIANSMITNFHTPKSTLLMMVSAFAGHDFMKRAYEEAVKEKYRFYTYGDAMLII

SEQ ID NO: 71187 - protein, 349 aa, Psychroserpens sp.
  misc_feature (1)..(349): tr|A0A4P7WTD9|A0A4P7WTD9_9FLAO S-adenosylmethionine:tRN A ribosyltransferase-isomerase OS=Psychroserpens sp. NJ DZ02 OX=2570561 GN=queA PE=3 SV=1
MKLSHFHFDLPDELLAEYPAENRDESRLMVLNRKEQTIEHKMFKDIIEYFDEKDVMILNNTKVFPARLFGNKEKTGARIEVFLLRELNKEQRLWDVLVDPARKIRIGNKLYFGDDETLVAEVIDNTTSRGRTLRFLYDGSYEEFRKKLQMLGETPLPKYIKREVEPEDEERYQTIYAKEEGAVAAPTAGMHFSKHLLKRLEIKGVDFAEVTLHVGLGTFNPVEVEDLSKHKMDSEELKIEAAAVEIINNAKKEKRRICAVGTTAMRAIESSVSSSGTLNEIEGWTNKFIFPPYDFSIANAMITNFHTPKSTLMMMVSAFAGHDFMKKAYEEAVKEKYKFYSYGDAMLII

SEQ ID NO: 71188 - protein, 352 aa, Psychrosphaera saromensis
  misc_feature (1)..(352): tr|A0A2S7UQK4|A0A2S7UQK4_9GAMM S-adenosylmethionine:tRN A ribosyltransferase-isomerase OS=Psychrosphaera sarome nsis OX=716813 GN=queA PE=3 SV=1
MQVADFHFDLPEKLIAKAPKKQRSSSKLMALNGQTGDIQDCQFEQIIELVNEGDLLIFNNTRVIPARLFGQKESGGKVEILVERLVDEHTVLAHVRANKAPKPGNILILEGAVKAEMIKRHDDLFELKFLSDETALTALEKYGHMPLPPYIDRPDTEDDRERYQTVYNEKPGAVAAPTAGLHFTEELIEKLKQKGVNTEFVTLHVGAGTFQSIRVEDVKEHVMHSEYAEVPLHVVEAIQRTKANGKRVIAVGTTSVRSIESAAWKCDMPSKQFDKLTTFTGETDIFIYPGYEFKVVDAMVTNFHLPESTLIMLVSAFAGKENILKGYNQAIANEYRFFSYGDAMFLTNQAVD

SEQ ID NO: 71189 - protein, 348 aa, Pueribacillus theae
  misc_feature (1)..(348): tr|A0A2U1K018|A0A2U1K018_9BACI S-adenosylmethionine:tRN A ribosyltransferase-isomerase OS=Pueribacillus theae O X=2171751 GN=queA PE=3 SV=1
MDVTDFDFNLPEELIAQTPLRERTASRLMVVDPLSEKIAHRQFTDLVDLLHPGDCLVLNDTRVLPARLIGLKSDTGAKVEVLLLKQIEGDKWSTLAKPAKRVKEGTVITFGDGRLKATCTAEGENGGREFEFHFEGIFYEVLEELGEMPLPPYIKEQLDDKERYQTVYARHKGSAAAPTAGLHFTKELLKTLEEKGIHIAYLTLHVGLGTFRPVSAEVVEEHKMHAEFYQLSEGTAALLTNVRENGGRIIAVGTTTTRTLETITAMNHGKFKADAGWTDIFIYPGFTFQAIDGMITNFHLPKSSLMMLVSALAGRELIMDAYQQAIEARYRFFSFGDAMLILEGSMKS

SEQ ID NO: 71190 - protein, 350 aa, Puniceibacterium antarcticum
  misc_feature (1)..(350): tr|A0A2G8RFN0|A0A2G8RFN0_9RHOB S-adenosylmethionine:tRN A ribosyltransferase-isomerase OS=Puniceibacterium anta rcticum OX=1206336 GN=queA PE=3 SV=1
MKLQDFDFDLPERLIATRPASPRSSARLLVAEGDVMSDAVVSDLTRWLRPGDRLVLNDTRVIPARLSGLRRRAGPEGETESRIEVTLLEPRANGCWAALLKPLKRIRDGEVITFSDALSATLVARADGQGLLRFNLMGEDFDAALAEAGAMPLPPYIAARRPADARDKEDYQTVWARNPGAVAAPTASLHFDAALLAALEQHGVTFTHVTLHVGAGTFLPVKVEDVTTHKMHAEWGEVSVQAAQEILATKAAGGRIIPVGTTALRLIETAARDGFGPWRGETDIFIYPGFEFRMADALMTNFHLPKSTLMMLVSALMGAERIRDIYAHAIAEEYRFFSYGDASLLLPARA

SEQ ID NO: 71191 - protein, 350 aa, Puniceibacterium sediminis
  misc_feature (1)..(350): tr|A0A238W4M2|A0A238W4M2_9RHOB S-adenosylmethionine:tRN A ribosyltransferase-isomerase OS=Puniceibacterium sedi minis OX=1608407 GN=queA PE=3 SV=1
MKLQDFDFDLPERLIATRPASPRSSARLLVASGDVITDAVVTDITRWLRPGDRLVLNDTRVIPARLSGVRRRAGPEGETESRIEVTLLEPRADGCWAALLKPLKRVRDGEVITFSDVLSATLVARDDGQGLLRFNLTGDDFDAALAQAGAMPLPPYIAARRPADERDKDDYQTVWARNPGAVAAPTASLHFDAALLAALEQHGVKFSHVTLHVGAGTFLPVKVEDVTTHRMHSEWGEVSEQAAQEIMETKATGGRIIPVGTTALRLIETAARDGFGPWQGDTDIFIYPGFEFRVADALMTNFHLPKSTLMMLVSALMGADRIRRIYAHAIAQEYRFFSYGDASLLFPERG

SEQ ID NO: 71192 - protein, 351 aa, Puniceibacterium sp.; identical to SEQ ID NO: 71112
  misc_feature (1)..(351): tr|A0A5B3BY30|A0A5B3BY30_9RHOB S-adenosylmethionine:tRN A ribosyltransferase-isomerase OS=Puniceibacterium sp. HSS470 OX=2541729 GN=queA PE=3 SV=1

SEQ ID NO: 71193 - protein, 350 aa, Puniceibacterium sp.
  misc_feature (1)..(350): tr|A0A0J5TC98|A0A0J5TC98_9RHOB S-adenosylmethionine:tRN A ribosyltransferase-isomerase OS=Puniceibacterium sp. IMCC21224 OX=1618204 GN=queA PE=3 SV=1
MKLDDFDFDLPERLIATRPARPRSSARLLVAQGDAITDAVVTDLPDWLRPGDRLVLNDTRVIPARLNGVRRRTGAAGDTQARIEVTLLEPKASGGWGALLKPLKRVRDGETIVFSDDLSAVLESREDGQGVLRFNLSGDDFDAALAQAGAMPLPPYIAAKRPADEQDKDDYQTVWARHAGAVAAPTASLHFDAALLDALAARGVTFSHVTLHVGAGTFLPVKVEDVTTHKMHAEWGEVSEAAAAEILATRAAGGRIIPVGTTALRLLETAAQRTPGGFGAWSGETDIFIYPGFRFTMVDALMTNFHLPKSTLMMLVSALMGRARVRQIYAHAVAQDYRFFSYGDASLLIP

SEQ ID NO: 71194 - protein, 362 aa, Puniceicoccaceae bacterium
  misc_feature (1)..(362): tr|A0A368BJC1|A0A368BJC1_9BACT S-adenosylmethionine:tRN A ribosyltransferase-isomerase OS=Puniceicoccaceae bact erium OX=2026784 GN=queA PE=3 SV=1
MNLSLFDYHLPAELIAQEPTAARDASRLMVVDRKTRSFTHAQFSEIGQYLPARPRFFRNNAAVLKARLFGQRPTGGKVECLLLQPTEDALTWWCLLKPGKKTFNAGTFGHPGEYQAEVLGVGSNGNYRVRFHPERNESITDLSERLGILPLPPYIERTDDDPRRDNDNKRYQTVYADFDKRIAVAAPTAGLHFTTELITELENGGAHFHDLTLQVGIGTFHPIQVENIEDHNIHREWYEIPASTFAELKKPEAGARIAVGTTSVRSIEDAMRRRQFSPEVCTTPSGSVQAEADIYIHPPNKFAAIDGMITNFHLPKSTLLCLVAAFLAPGSEEGIDWLKQLYAEAIDQKYRFYSYGDAMLIL

SEQ ID NO: 71195 - protein, 352 aa, Puniceicoccaceae bacterium
  misc_feature (1)..(352): tr|A0A2E6TJW5|A0A2E6TJW5_9BACT S-adenosylmethionine:tRN A ribosyltransferase-isomerase OS=Puniceicoccaceae bact erium OX=2026784 GN=CML14_01130 PE=3 SV=1
  misc_feature (24)..(24): Xaa can be any naturally occurring amino acid
  misc_feature (78)..(78): Xaa can be any naturally occurring amino acid
  misc_feature (131)..(131): Xaa can be any naturally occurring amino acid
  misc_feature (138)..(138): Xaa can be any naturally occurring amino acid
  misc_feature (263)..(263): Xaa can be any naturally occurring amino acid
MLSSELDYPLPAESIAQSPTERRXQSRLLLFDRKTQHVSHHFFHELPDLLPSKLSILRNDVSVLKARLTGQRQSGGKXECLLLRPSNFPDTTWRCLLKPGGKTAKSRKFGIEGEYSAEVIESLSSGEYLVXFDLPHDXDPSALAQRLGAMPLPPYVRRPAAPPDEERYQTVYAKQEKRSAVAAPTAGLHFTAEILDRLKREGHYIHDLTLSIGLGTFRPIETEKVEDHAMHGEEYFLEPSTKSVLRDPSFKKLAIGTTCVRAXEHYLAGKDSDLERMTQAEAKLFIRPPYQFKGVNHLLTNFHLPGSTLLCLVAAFLSPGESDGLSTLKEIYAEAIAKNYRFFSYGDAMMVV

SEQ ID NO: 71196 - protein, 386 aa, Puniceispirillum marinum
  misc_feature (1)..(386): tr|D5BNK4|D5BNK4_PUNMI S-adenosylmethionine:tRNA ribosy ltransferase-isomerase OS=Puniceispirillum marinum (str ain IMCC1322) OX=488538 GN=queA PE=3 SV=1
MIRRWLSVFCRFLNRLMKLSDFDFDLPPDRIATAPAQPRDSARLLDLSGAAIADRHVGDLPDLLRAGDLLIVNDTAVIPARLIGKRGDARISVTLHKYEGHKNGGNAIWRVFAKPAKKCRPDDIIMFAPDFGARVLGRGEGGDVELAFIDPRSGNALDTDSLNAGLDTYGTMPLPPYIARPDGVLDSDHEDYQTMFASQRGAVAAPTAGLHFTDGLTSALQAKGVAIAAVTLHVGAGTFLPVTVETIAEHKMHSEWGAIPADVAAKIIATKQAGGRVIAVGTTSLRILEASFAALGHIGHFAGETDIFITPGFSFNVVDMLMTNFHLPKSTLLMLVSAFAGHAPIMAAYDHAIASGYRFFSYGDACLLSHNLLSHNLSAQAETETT

SEQ ID NO: 71197 - protein, 375 aa, Pusillimonas ginsengisoli
  misc_feature (1)..(375): tr|A0A4V5ZWR6|A0A4V5ZWR6_9BURK S-adenosylmethionine:tRN A ribosyltransferase-isomerase OS=Pusillimonas ginsengi soli OX=453575 GN=queA PE=3 SV=1
MNPSLELSQFDYELPSELIAQSPAAHRVESRLLHLDPDSVLHDRQFIDLVELIRPGDLLVFNNTRVIKARLTGQKESGGKVEVLVERIVDPHNVLAHVRASKPPKPGTRLRLADAFMATVHGRQGELFEIEFPERVLDLLDRHGAIPLPPYITHAADQEDEERYQTIYASEPGAIAAPTAGLHFDEALLQRLADKGIQQAFVTLHVGAGTFQPVRVQKLTEHIMHAERYSVSAETISLVQATRKAGGRVIAVGTTSVRALEAAAAQQRAQALVTHSTMTAGPDVTVDKQSPSSTLTHAAPATIEGDTRLFITPGYTFAWVDALITNFHLPQSTLLMLVSALAGMEPIRRAYTHAVQSRYRFFSYGDAMFIESPQP

SEQ ID NO: 71198 - protein, 346 aa, Pusillimonas noertemannii
  misc_feature (1)..(346): tr|A0A2U1CRH4|A0A2U1CRH4_9BURK S-adenosylmethionine:tRN A ribosyltransferase-isomerase OS=Pusillimonas noertema nnii OX=305977 GN=queA PE=3 SV=1
MNPSLQLSQFDYHLPSELIAQTPAATRSGSRLLHLDARSALHDRLFTDLPSLLRPHDLLVLNNTQVIKARLRGHKDSGGKVEILVERITGPTTALAHVKASKSPKAGTRLRIDDAFTIEVAGRQDELFELEFPARVLDLLERHGATPLPPYITHEAQAQDEERYQTVYAQAPGAVAAPTAGLHFDQPMLDALVAQGIQHAFVTLHVGAGTFQPVRVEDLSQHQMHAERYVVPQAVVRQIEEARRQGGRVIAVGTTSVRALESAAAQAGCADDPLEGDTRLFITPGYRFSYVDALITNFHLPRSTLMMLVSALAGMEPIRRAYAHAVQSRYRFFSYGDAMFIESPKP

SEQ ID NO: 71199 - protein, 355 aa, Pusillimonas sp.
  misc_feature (1)..(355): tr|A0A368WYG1|A0A368WYG1_9BURK S-adenosylmethionine:tRN A ribosyltransferase-isomerase OS=Pusillimonas sp. EA3 OX=2183983 GN=queA PE=3 SV=1
MTEKPYPNNNELRLSQFDYDLPEALIAQTPADQRSASRLLHLDTLSQIHDRQFRDLPDLLKAGDLLVFNNTKVIKARLLGQKDTGGKVELLIERITDDKQALSHIKSSKSPKPGTVLHIAPNLSLTVTGREGELFSVQFPVNVLDALDEHGMTPLPPYIEHAADAQDEARYQTVYAQEPGAVAAPTAGLHFDDVVLEQLKNKGIRLAFVTLHVGAGTFQPVRVEKLTEHKMHFERYTVPAETLKLVDETRQQGRRIIAVGTTSVRALESAAKEREVGQAGGNISGDTNLFITPGYQFDLVNALITNFHLPRSTLLMLVSALAGMTPIKQAYEHAVAQQYRFFSYGDAMFIETPSK

SEQ ID NO: 71200 - protein, 348 aa, Pusillimonas sp.
  misc_feature (1)..(348): tr|A0A423S4J8|A0A423S4J8_9BURK S-adenosylmethionine:tRN A ribosyltransferase-isomerase OS=Pusillimonas sp. NJUB 218 OX=2023230 GN=queA PE=3 SV=1
MTHDLDLAAFDYELPPELIAQKPAAERTASRLLHLDKASQLHDRQFTDLPDLLRPNDLLVFNNTKVIKARLRGHKESGGKVELLIERITDINRGLAHIKASKSPKPGTRLRIADAFTMTVTGRQGELFEVEFPEDALTLLEHYGATPLPPYIEHAADNEDDERYQTVYAQQPGAVAAPTAGLHFDQPMLDQLASAGIGQCYVTLHVGAGTFQPVRVDKISEHVMHYERFSVDADVIARIRQARAKGGRVIAVGTTSVRALESAAALLASDRHNNSLTGDTNLFITPGYTFQLVDALITNFHLPRSTLMMLVSALAGIEPIRQAYAHAVTQRYRFFSYGDAMLIESPHS

SEQ ID NO: 71201 - protein, 349 aa, Pustulibacterium marinum
  misc_feature (1)..(349): tr|A0A1I7GMJ7|A0A1I7GMJ7_9FLAO S-adenosylmethionine:tRN A ribosyltransferase-isomerase OS=Pustulibacterium mari num OX=1224947 GN=queA PE=3 SV=1
MKLSHFNFELPKELLAEYPSENRDEARLMVINRKEGTIEHKLFKDLINYFDEDDVMVLNNTKVFPARLFGNKEKTGARIEVFLLRELNEEQRLWDVLVDPARKIRIGNKLYFGEDESLVAEVIDNTTSRGRTLRFLYDGSYEEFRYKLNELGETPLPKYIKREVEPEDEERYQTIYAKHEGAVAAPTAGLHFSKHLLKRLEIKGVNFAEVTLHVGLGTFNPVEVEDLSKHKMDSEEIIITDQACETVNNAKQKKRRVCAVGTTVMRAMESSVSSDRTLNPFQGWTNKFIFPPYEFSIADCMITNFHTPKSTLLMMISAFVGHDLMMEAYKQAIEEKYKFYSYGDAMLII

SEQ ID NO: 71202 - protein, 341 aa, Unknown
  misc_feature (1)..(341): tr|A0A1E4ZIZ0|A0A1E4ZIZ0_9BACT S-adenosylmethionine:tRN A ribosyltransferase-isomerase OS=PVC group bacterium ( ex Bugula neritina AB1) OX=1868283 GN=queA PE=3 SV=1
MTLSYNLQDYSFDLPEELIAQHPMKDRDQSRLLIYHSKTKEIEHDTFSGLYKYLDAEDLLVLNDTKVIPARLYAWKTTGGKIEIFLIRPIIAQTWLCMVSSSKKIKKGHSLKLSSDIQGEIIKELPHGYRHISFHGENLEENLRNLGNIPLPPYIKRELNEEDATRYQTIFASKEGAVAAPTAGLHFTDNLFSKLKQKGVNVAHITLHVGPGTFKKVTCDDIRSHHVDQEYFEISNETINLLKATKKKKKRVISVGTTTTRVLESLETPWASTKGWTNLYIRPPYTYKVIDSLITNFHLPQSSLLFLVSALTGHEEIKSIYKEAVFERYRFYSYGDAMICL

SEQ ID NO: 71203 - protein, 349 aa, Pyramidobacter piscolens
  misc_feature (1)..(349): tr|D1Y1N5|D1Y1N5_9BACT S-adenosylmethionine:tRNA ribosy ltransferase-isomerase OS=Pyramidobacter piscolens W545 5 OX=352165 GN=queA PE=3 SV=1
MTQWNFFDINTYDYELPPELIAQKPAEPRDRCRLLAVRRADGKLFHQHFHDILQWLRPGDVLVRNDTRVMAARVEGVKVNGSAQAEILLLRPEDDSEKCWEALVRPGRKLPEGARVRLDGDVVVTIGAVKSEDGVRRVIFPADCDVRALAEANGSMPLPPYIHERSSRPEDYQTVYAKDPRSAAAPTAGLHFTRELLREVAGRGVTIADITLEVGLGTFRPVKTEDIRRHHMHSEHCVVPQDAYDKIVMAKKNGGRVIALGTTVVRTLEGMAATSAGLRPGVLETGLFIYPGFKYKVVDALITNFHLPKSTLMMLVAAFAGYDLTMKAYAEAVKERYRFFSFGDAMMIM

SEQ ID NO: 71204 - protein, 349 aa, Pyramidobacter sp.
  misc_feature (1)..(349): tr|A0A3A9I142|A0A3A9I142_9BACT S-adenosylmethionine:tRN A ribosyltransferase-isomerase OS=Pyramidobacter sp. CG 50-2 OX=2382160 GN=queA PE=3 SV=1
MTQRDFFDINTYDYELPPELIAQKPADPRDRCRLLTVRRADGKLFHQHFHDVLQWLRPGDVLVRNDTRVMAARVGGVKVNGSAQVEVLLLRPEDDGEKCWEALVRPGRKLPEGSRVRLDGDVVVTIDAVKSEDGVRRVVFPADCDVRALAEANGSMPLPPYIHERSSRPEDYQTVYAKDPRSAAAPTAGLHFTRELLRKVAERGVTIADITLEVGLGTFRPVKTEDIRRHHMHVEHCVIPQDAYDKIVMAKKNGGRVVALGTTVVRTLEGMAAASGGLHPGVLETELFIYPGFEYKVVDALITNFHLPKSTLVMLVAAFAGYDLTMKAYAEAVKERYRFFSFGDAMMIV

SEQ ID NO: 71205 - protein, 349 aa, Pyramidobacter sp.
  misc_feature (1)..(349): tr|A0A1V4AIN2|A0A1V4AIN2_9BACT S-adenosylmethionine:tRN A ribosyltransferase-isomerase OS=Pyramidobacter sp. C1 2-8 OX=1943580 GN=queA PE=3 SV=1
MTQRDFFDINTYDYELPPELIAQKPADPRDRCRLLTVRRADGKLFHQHFHDVLQWLRPGDVLVRNDTRVMAARVGGVKVNGSAQVEVLLLRPEDDGEKCWEALVRPGRKLPEGSRVRLDGDVVVTIGAVKSEDGVRRVVFPADCDVRALAEANGSMPLPPYIHERSSRPEDYQTVYAKDPRSAAAPTAGLHFTRELLRKVAERGVTIADITLEVGLGTFRPVKTEDIRRHHMHVEHCVIPQDAYDKIVMAKKNGGRVVALGTTVVRTLEGMAAASGGLHPGVLETELFIYPGFEYKVVDALITNFHLPKSTLVMLVAAFAGYDLTMKAYAEAVKERYRFFSFGDAMMIV

SEQ ID NO: 71206 - protein, 360 aa, Pyrinomonas methylaliphatogenes
  misc_feature (1)..(360): tr|A0A0B6WTV2|A0A0B6WTV2_9BACT S-adenosylmethionine:tRN A ribosyltransferase-isomerase OS=Pyrinomonas methylali phatogenes OX=454194 GN=queA PE=3 SV=1
MRRLGSRFQTSFSAVLISDFDYDLPEELIAQQPAEPRDASRMLVVDRHRACWQDCAFRDLPELVHPGDVLVINNTRVFPARLIGRREPSGGKIELLLLTERGALEWEALARPARRLPVGARVSFGEGRLRGEIREEIEGGLRLVRFECEENFDQLLDEIGRTPLPPYIKRDPFKADAPDRERYQTIFARERGAVAAPTAGLHFTPRIIAELRERGAQIAEITLHVGYGTFEPVRVKDVQQHRVAAERFVIGQEAAEKIAQARRSGGRIIAVGTTSVRALESAADERGIVKPTAGSTQLTIVPGYRFRAVDALLTNFHLPRSSLLLLVSAFAGRELILAAYRHAVKERYRFYSYGDCMLII

SEQ ID NO: 71207 - protein, 345 aa, Quasibacillus thermotolerans
  misc_feature (1)..(345): tr|A0A0F5ICW8|A0A0F5ICW8_9BACI S-adenosylmethionine:tRN A ribosyltransferase-isomerase OS=Quasibacillus thermot olerans OX=1221996 GN=queA PE=3 SV=1
MKNVRVEDFDFNLPEELIAQTPLANRSDSRLMVLDKETGAVSHEVFKNIASYLQPGDCLVLNDTKVMPARLYGIKADTGAKVEVLLLKQEEGDKWETLVKPAKRIKAGTELAFGDGRLTAVCVEEREHGGRILEFSYEGIFYEVLDELGEMPLPPYIKEQLEERDRYQTVFAKERGSAAAPTAGLHFTEELLEELRNMGVHTAFLTLHVGLGTFRPVSVDSVEEHEMHAEFYRLSEGTARLIQQVKEEGGRIISVGTTSTRTLETIARDHQGRIEAASGWTDIFIYPGFKFQAIDGMITNFHLPKSTLIMLVSALAGKEHIMAAYKEAVEQKYRFFSFGDAMLIK

SEQ ID NO: 71208 - protein, 372 aa, Quisquiliibacterium sp.
  misc_feature (1)..(372): tr|A0A5C8P4U6|A0A5C8P4U6_9BURK S-adenosylmethionine:tRN A ribosyltransferase-isomerase OS=Quisquiliibacterium s p. CC-CFT501 OX=2498847 GN=queA PE=3 SV=1
MRLSDFDFELPPELIAQHPPAERGASRLLVVRAGGAGDGAAAAGGAEARPEERPEARLEDRLFADLPSLLAPGDLLVLNDTRVIRARLFGVKDTGGRVEALVERVSGPKEAIAMLRASKPPKPGSRIAWRSGGAEVLERADEFWRLRFDDPVMEVLEREGRLPLPPYITHAPGAEDERRYQTVYAREAGSVAAPTAGLHFDEAMLARLRNAGVGLAWVTLHVGAGTFQPVRVEDLSRHRMHAERYEVPEATARAIADTRAAGGRVVAVGTTSLRTLEGVAAAHDGAVVAGAGETRLFVRPGFRFRVVDRLITNFHLPKSTLLMLVSAFAGMETIRRAYAHAIAQRYRFFSYGDAMLLERSPGADGHDPNDPL

SEQ ID NO: 71209 - protein, 356 aa, Rahnella aquatilis
  misc_feature (1)..(356): tr|H2IZL9|H2IZL9_RAHAC S-adenosylmethionine:tRNA ribosy ltransferase-isomerase OS=Rahnella aquatilis (strain AT CC 33071 / DSM 4594 / JCM 1683 / NBRC 105701 / NCIMB 13 365 / CIP 78.65) OX=745277 GN=queA PE=3 SV=1
MRVADFSFELPESLIARYPQTQRSGCRLLSLDGPSGELTHGVFTDILDKIHPGDLLVFNNTRVIPARVFGRKVSGGKIEVLVERVLDSHRVLAHVRASKSPKPGAELLLGDKEDIKATMLARHDTLFELEFNEDRDVFTLLNEIGHMPLPPYIDRPDEEADRELYQTVYSERPGAVAAPTAGLHFDQPLLDALKAKGVELAFVTLHVGAGTFQPVRVDTIEDHIMHAEYAEVPQDVVDAVLACKARGNKVVAVGTTSVRSLESAAKASEDALIAPFFGDTKIFIYPGYHYQVIDSLITNFHLPESTLIMLVSAFAGYKNTMNAYHQAVAEQYRFFSYGDAMFINRNPLAPQEVVGQ

SEQ ID NO: 71210 - protein, 356 aa, Rahnella aquatilis
  misc_feature (1)..(356): tr|H8NYP0|H8NYP0_RAHAQ S-adenosylmethionine:tRNA ribosy ltransferase-isomerase OS=Rahnella aquatilis HX2 OX=115 1116 GN=queA PE=3 SV=1
MRVADFSFELSESLIARYPQTQRSGCRLLSLDGPSGELTHGVFTDILDKIHPGDLLVFNNTRVIPARVFGRKVSGGKIEVLVERVLDTHRVLAHVRASKSPKPGAELLLGDKEDIKATMVARHDTLFELEFNEDRDVFTLLNEIGHMPLPPYIDRPDEDADRELYQTVYSERPGAVAAPTAGLHFDEPLMDALKAKGVEFAFVTLHVGAGTFQPVRVDTIEDHIMHAEYAEVPQDVVDAVLACKARGNNVVAVGTTSVRSLESAAKASEDALIAPFFGDTKIFIYPGYHYQVIDSLITNFHLPESTLIMLVSAFAGYKNTMNAYHQAVAEQYHFFSYGDAMFINRNPLAPQEVVGQ

SEQ ID NO: 71211 - protein, 356 aa, Rahnella inusitata
  misc_feature (1)..(356): tr|A0A419MBX5|A0A419MBX5_9GAMM S-adenosylmethionine:tRN A ribosyltransferase-isomerase OS=Rahnella inusitata OX =58169 GN=queA PE=3 SV=1
MRVADFSFELPESLIARYPQTQRSGCRLLSLDGPSGELTHGVFTDILDKIVPGDLLVFNNTRVIPARVFGRKVSGGKIEVLVERVLDSHRVLAHVRASKSPKPGAELLLGDKDDIKATMVARHDTLFELEFNEDRDVFTLLNEIGHMPLPPYIDRPDEDADRELYQTVYSERLGAVAAPTAGLHFDQPLMDALKEKGVEFAFVTLHVGAGTFQPVRVDTIEDHIMHAEYAEVPQDVVDAVLACKARGNKVVAVGTTSVRSLESAAKASEDALIAPFFGDTKIFIYPGYHYQVIDSLITNFHLPESTLIMLVSAFAGYKNTMNAYHQAVAEQYRFFSYGDAMFINRNPLAPQEVVGE

SEQ ID NO: 71212 - protein, 356 aa, Rahnella sp.
  misc_feature (1)..(356): tr|A0A2N0W8C4|A0A2N0W8C4_9GAMM S-adenosylmethionine:tRN A ribosyltransferase-isomerase OS=Rahnella sp. AA OX=20 57180 GN=queA PE=3 SV=1
MRVADFSFELPESLIARYPQTQRSGCRLLSLDGPSGELTHGVFTDILDKILPGDLLVFNNTRVIPARVFGRKVSGGKIEVLVERVLDSHRVLAHVRASKSPKPGAELLLGDNEDIKATMVARHDTLFELQFNEDRDVFTLLNEIGHMPLPPYIDRPDEDADRELYQTVYSERPGAVAAPTAGLHFDQPLLDALKEKGVELAFVTLHVGAGTFQPVRVDTIEDHIMHAEYAEVPQEVVDAVLACKARGNKVVAVGTTSVRSLESAAKASEDALIAPFFGDTKIFIYPGYNYQVIDCLITNFHLPESTLIMLVSAFAGYKNTMNAYHQAVAEQYRFFSYGDAMFINRNPLAPQEVVGQ

SEQ ID NO: 71213 - protein, 356 aa, Rahnella sp.
  misc_feature (1)..(356): tr|A0A4R2Z4J3|A0A4R2Z4J3_9GAMM S-adenosylmethionine:tRN A ribosyltransferase-isomerase OS=Rahnella sp. JUb53 OX =2485128 GN=queA PE=3 SV=1
MRVADFSFELPESLIARYPQTQRSGCRLLSLDGPSGELTHGVFTDILDKIHPGDLLVFNNTRVIPARVFGRKVSGGKIEVLVERVLDSHRVLAHVRASKSPKPGAELLLGDKEDIKATMVARHDTLFELEFNEDRDVFTLLNEIGHMPLPPYIDRPDEDADRELYQTVYSERPGAVAAPTAGLHFDEPLMDALKAKGVEFAFVTLHVGAGTFQPVRVDTIEDHIMHAEYAEVPQEVVDAVLACKARGNKVVAVGTTSVRSLESAAKASEDALIAPFFGDTKIFIYPGYHYQVIDSLITNFHLPESTLIMLVSAFAGYKNTMNAYHQAVAEQYRFFSYGDAMFINRNPLAPQEVVGQ

SEQ ID NO: 71214 - protein, 356 aa, Rahnella woolbedingensis
  misc_feature (1)..(356): tr|A0A419N702|A0A419N702_9GAMM S-adenosylmethionine:tRN A ribosyltransferase-isomerase OS=Rahnella woolbedingen sis OX=1510574 GN=queA PE=3 SV=1
MRVADFSFELPESLISRYPQTQRSGCRLLSLDGPSGELTHGVFTDILDKIHPGDLLVFNNTRVIPARVFGRKVSGGKIEVLVERVLDSHRVLAHVRASKSPKPGAELLLGDKEEIKATMVARHDTLFELEFNEDRDVFTLLNEIGHMPLPPYIDRPDEESDRELYQTVYSERPGAVAAPTAGLHFDEPLMDALKAKGVEFAFVTLHVGAGTFQPVRVDTIEDHIMHAEYAEVPQEVVDAVLACKARGNKVVAVGTTSVRSLESAAKASEDALIAPFFGDTKIFIYPGYHYDVIDSLITNFHLPESTLIMLVSAFAGYKNTMNAYHQAVAEQYRFFSYGDAMFINRNPLAPQEVVGQ

SEQ ID NO: 71215 - protein, 352 aa, Raineya orbicola
  misc_feature (1)..(352): tr|A0A2N3IHB8|A0A2N3IHB8_9BACT S-adenosylmethionine:tRN A ribosyltransferase-isomerase OS=Raineya orbicola OX=2 016530 GN=queA PE=3 SV=1
MPMKLSDYAFDLPTKLIALHPTPNRDESRLMVVHRKTGKIEHRIFKDVLDYFDDGDVMVVNDTKVFPARLYGNKEKTGADIEVFLLRELNSQYHLWDVLVDPARKIRVGNKLYFGDGELVAEVIDNTTNRGRTIRFLWDGEDEEFYKTVHQLGQTPLPKEIIKRRKVEKEDEERFQSIFAKEVGAVAAPMACLHFTKQLVKRLAIKGVDIVTLTMHISLGTFKTVEVEDLTKHKPDSEQFRIPEKTAQRINEALDAKKKVCAVGSSVMRSLESSVSASGRVKPADAWTDKFIFIPYDFKIPNAYITNFHLPESTLFMTACTFGGYELIMKAYEIAIQEEYRFHTYGDAMLIL

SEQ ID NO: 71216 - protein, 398 aa, Raineya orbicola
  misc_feature (1)..(398): tr|A0A2N3IHA4|A0A2N3IHA4_9BACT S-adenosylmethionine:tRN A ribosyltransferase-isomerase OS=Raineya orbicola OX=2 016530 GN=queA PE=3 SV=1
MQLSDFDYHLPPELIAQEPLPLRDQAKLLFYNKGTIADHIFYELPQILPQNSFLVFNNTKVIPARLLLQKSSGAWIEIFLLEPVEPHSLVTIAMQARRRCLWECMIGNKKRFKDAIEVPITIRKEELSLKCSLVSENRVLFEWENEKVSFAEILECLGKIPLPPYIKREVSEKDKERYQTIFALKEGAVAAPTASLHFTENVFENLKNKNISYDFLTLHVGAGTFQPIKVANFQEHKIHSERLIVSLQNIENLINNVHKNIIPVGTTSMRTLESLYWFGTEIILGKSHSPILHIKQQVPYQIPVSQHPPLQEALQAIKELMQQHQINELQGSTEIYIYPSYDFKVCKGLITNFHMPQTTLILLIAAFVGNDWRKIYQHALQNNYRFLSYGDSSLLLPS

SEQ ID NO: 71217 - protein, 354 aa, Ralstonia insidiosa
  misc_feature (1)..(354): tr|A0A191ZZF4|A0A191ZZF4_9RALS S-adenosylmethionine:tRN A ribosyltransferase-isomerase OS=Ralstonia insidiosa O X=190721 GN=queA PE=3 SV=1
MLTLSDFDFDLPPELIAQTALPDRTASRLLAVRREADGVHSGVSFEDRQFADLGDYLRPGDLLVFNDTRVIKARFFGHKASGGKVEVLVERLLDEHTVLAQIRSSKSPVEGTTLRLADAFDVTVGPRAEPFFTLRFPQPALDLIEQYGRLPLPPYIEHDPDSFDETRYQTIYARNPGAVAAPTAGLHFDDALFAKLDAMGIQRGFLTLHVGAGTFQPVRVENIAEHRMHSEWYEITPELAEAIRATRAAGGRIIAVGTTSMRALESAAQPDGTLHAGSGDTDIFITPGYRFRLVDALVTNFHLPKSTLLMLVSAFAGMDAIRGAYQHAIAQRYRFFSYGDAMLLTRAEPETQSL

SEQ ID NO: 71218 - protein, 353 aa, Ralstonia mannitolilytica
  misc_feature (1)..(353): tr|A0A2N5LEN4|A0A2N5LEN4_9RALS S-adenosylmethionine:tRN A ribosyltransferase-isomerase OS=Ralstonia mannitolily tica OX=105219 GN=queA PE=3 SV=1
MLTLSDFDFDLPPELIAQTALPDRTASRLLALRREADGVHFDDRQFSDLVDYVRPGDLLVFNDTRVIKARFFGQKASGGKVEVLVERLLDEHTVLAQIRSSKSPVEGTTLRLADAFDVTVGPRAEPFFTLRFPQPALDLIEQHGRLPLPPYIEHDPDSFDETRYQTVYARNPGAVAAPTAGLHFDDALFARLDAMGVKRGFLTLHVGAGTFQPVRVENIAEHRMHSEWYAISPELADTIRATRAAGGRVIAVGTTSMRALESAALPDGTLQAGSGDTDIFITPGYRFRVVDALVTNFHLPKSTLLMLVSAFAGMQAIRDAYRHAIAQRYRFFSYGDAMLLTRAPSEPGDTGSP

SEQ ID NO: 71219 - protein, 353 aa, Ralstonia mannitolilytica
  misc_feature (1)..(353): tr|A0A160BXY0|A0A160BXY0_9RALS S-adenosylmethionine:tRN A ribosyltransferase-isomerase OS=Ralstonia mannitolily tica OX=105219 GN=queA PE=3 SV=1
MLTLSDFDFDLPPELIAQTALPDRTASRLLAVRREADGVHFDDRQFSDLVDYVRPGDLLVFNDTRVIKARFFGQKASGGKVEVLVERLLDEHTVLAQIRSSKSPVEGTTLRLADAFDVTVGPRAEPFFTLRFPQPALDLIEQYGRLPLPPYIEHDPDSFDETRYQTVYARNPGAVAAPTAGLHFDDALFARLDAMGVKRGFLTLHVGAGTFQPVRVENIAEHRMHSEWYAISPELADAIRATRAAGGRVIAVGTTSMRALESAALPDGTLQAGSGDTDIFITPGYRFRVVDALVTNFHLPKSTLLMLVSAFAGMQAIRDAYRHAIAQRYRFFSYGDAMLLTRAPSEPGDTESP

SEQ ID NO: 71220 - protein, 359 aa, Ralstonia pickettii
  misc_feature (1)..(359): sp|B2UC74|QUEA_RALPJ S-adenosylmethionine:tRNA ribosylt ransferase-isomerase OS=Ralstonia pickettii (strain 12J ) OX=402626 GN=queA PE=3 SV=1
MLTLSDFDFDLPPELIAQTALPDRTASRLLAVRRTEDAVHFEDRQFADLVDYLRPGDLLVFNDTRVIKARFFGHKASGGKVEVLVERLLDEHTVLAQIRSSKSPVEGTSLRLADAFDVTVGPRAEPFFTLRFPQPALDLIEQYGRLPLPPYIEHDPDSFDETRYQTVYARNPGAVAAPTAGLHFDDALFAKLDAMGIRRGFLTLHVGAGTFQPVRVENIAEHRMHSEWYEITPELAEAIRATRAAGGRVIAVGTTSMRALESAAQPDGTLNACSGETDIFITPGYRFRAVDLLVTNFHLPKSTLLMLVSAFAGMSAIREAYQHAIAQRYRFFSYGDAMLLTRAPTEPGEPGEPGETQSL

SEQ ID NO: 71221 - protein, 356 aa, Ralstonia pickettii
  misc_feature (1)..(356): tr|C6BDN2|C6BDN2_RALP1 S-adenosylmethionine:tRNA ribosy ltransferase-isomerase OS=Ralstonia pickettii (strain 1 2D) OX=428406 GN=queA PE=3 SV=1
MLTLSDFDFDLPPELIAQTALPDRTASRLLAVRRAGDAVHFEDRQFADLVDYLRPGDLLVFNDTRVIKARFFGQKASGGKVEVLVERLLDEHTVLAQIRSSKSPVEGTTLRLADAFDVTVGPRAEPFFTLRFPQPALDLIEQYGRLPLPPYIEHDPDSFDETRYQTVYARNPGAVAAPTAGLHFDDALFAKLDAMGIQRGFLTLHVGAGTFQPVRVENIAEHRMHSEWYEITAELAEAIRATRAAGGRIIAVGTTSMRALESAAQPDGTLNACSGETDIFITPGYRFRAVDLLVTNFHLPKSTLLMLVSAFAGMSAIREAYQHAIAQRYRFFSYGDAMLLTRAPTEPGDPGETQSL

SEQ ID NO: 71222 - protein, 362 aa, Ralstonia pseudosolanacearum
  misc_feature (1)..(362): tr|A0A454TMN4|A0A454TMN4_9RALS S-adenosylmethionine:tRN A ribosyltransferase-isomerase OS=Ralstonia pseudosolan acearum OX=1310165 GN=queA PE=3 SV=1
MSAPPFMLTLSDFDFDLPPELIAQTALPDRTASRLLAARHDAQGTHFDDRQFADLVDYLRPGDLLVFNDTRVIKARFFGHKASGGRIEVLVERLLDEHTVLAQIRSSKSPVAGSTLRLADAFDVTVGPRHEPFFTLRFPQPALELIEQYGRLPLPPYIEHTPDSFDETRYQTVYARTPGAVAAPTAGLHFDDALFARLDAMGVRRGFLTLHVGAGTFSPVRVENIAEHRMHSEWYAISPELAEAIRGTRAAGGRIVAVGTTSMRALESAAQPDGTLAAGSGETDIFITPGYRFRLVDALVTNFHLPKSTLLMLVSAFAGLETIRAAYRHAIAQRYRFFSYGDAMFLTRAEPDTQSASPDPSC

SEQ ID NO: 71223 - protein, 362 aa, Ralstonia pseudosolanacearum
  misc_feature (1)..(362): tr|A0A223GQ49|A0A223GQ49_9RALS S-adenosylmethionine:tRN A ribosyltransferase-isomerase OS=Ralstonia pseudosolan acearum OX=1310165 GN=queA PE=3 SV=1
MSAPPFMLTLSDFDFDLPPELIAQTALPDRTASRLLAARHDAQGTHFDDRQFADLVDYLRPGDLLVFNDTRVIKARFFGHKASGGKIEVLVERLLDEHTVLAQIRSSKSPVAGSTLRLADAFDVTVGPRHEPFFTLRFPQPALELIEQYGRLPLPPYIEHTPDSFDETRYQTVYARTPGAVAAPTAGLHFDDALFARLDAMGVRRGFLTLHVGAGTFSPVRVENIAEHRMHSEWYAISPDLAEAIRATRAVGGRIVAVGTTSMRALESAAQPDGTLAAGSGETDIFITPGYRFRLVDALVTNFHLPKSTLLMLVSAFAGLETIRAAYRHAIAQRYRFFSYGDAMFLTRAEPDTQSASPDPSC

SEQ ID NO: 71224 - protein, 356 aa, Ralstonia solanacearum
  misc_feature (1)..(356): sp|Q8XVW5|QUEA_RALSO S-adenosylmethionine:tRNA ribosylt ransferase-isomerase OS=Ralstonia solanacearum (strain GMI1000) OX=267608 GN=queA PE=3 SV=2
MLTLSDFDFDLPPELIAQTALPDRTASRLLAARHDAQGTHFDDRQFADLVDYLRPGDLLVFNDTRVIKARFFGHKASGGKIEVLVERLLDEHTVLAQIRSSKSPVAGSTLRLADAFDVTVGPRHEPFFTLRFPQPALELIEQYGRLPLPPYIEHTPDSFDETRYQTVYARTPGAVAAPTAGLHFDDALFARLDAMGVRRGFLTLHVGAGTFSPVRVENIAEHRMHSEWYAISPDLAEAIRATRAVGGRIVAVGTTSMRALESAAQPDGTLAAGSGETDIFITPGYRFRLVDALVTNFHLPKSTLLMLVSAFAGLETIRAAYRHAIAQRYRFFSYGDAMFLTRAEPDTQSASPDPSC

SEQ ID NO: 71225 - protein, 362 aa, Ralstonia solanacearum
  misc_feature (1)..(362): tr|A0A177RU50|A0A177RU50_RALSL S-adenosylmethionine:tRN A ribosyltransferase-isomerase OS=Ralstonia solanacearu m OX=305 GN=queA PE=3 SV=1
MSAPPLMLTLSDFDFDLPPELIAQTALPDRTASRLLAVHRDAPGTHFDDRQFADLVDYLRPGDLLVFNDTRVIKARFFGHKASGGRIEVLVERLLDEHTVLAQIRSSKSPVTGSRLRLADAFDVTVGPRQEPFFTLRFPQPALELIEQYGRLPLPPYIEHTPDSFDETRYQTVYARTPGAVAAPTAGLHFDDALFARLDAMGVRRGFLTLHVGAGTFSPVRVENIAEHRMHSEWYAISPELAEAIRATRAAGGRVIAVGTTSMRALESAAQPDGTLAAGSGETDIFITPGYRFRLVDALVTNFHLPKSTLLMLVSAFAGLETIRAAYRHAIAQRYRFFSYGDAMFLTRAEPDTPSASPDPSC

SEQ ID NO: 71226 - protein, 356 aa, Ralstonia sp.
  misc_feature (1)..(356): tr|A0A0B1Y1V1|A0A0B1Y1V1_9RALS S-adenosylmethionine:tRN A ribosyltransferase-isomerase OS=Ralstonia sp. A12 OX= 1217052 GN=queA PE=3 SV=1
MLTLSDFDFDLPPELIAQTALPDRTASRLLAVRREADGVHSGVSYEDRQFADLVDYLRPGDLLVFNDTRVIKARFFGHKASGGKVEVLVERLLDEHTVLAQIRSSKSPVEGTTLRLADAFDVTVGPRAEPFFTLRFPQPALDLIEQYGRLPLPPYIEHDPDSFDETRYQTVYARNPGAVAAPTAGLHFDDALFARLDAMGVQRGFLTLHVGAGTFQPVRVENIAEHRMHSEWYAITPELAEASRATRAAGGRVIAVGTTSMRALESAAQPDGTLHAGSGETDIFITPGYRFRAVDALVTNFHLPKSTLLMLVSAFAGLAAIRGAYQHAIAQRYRFFSYGDAMFLTRAEPDTESTSA

SEQ ID NO: 71227 - protein, 350 aa, Ralstonia sp.
  misc_feature (1)..(350): tr|A0A0J9GKX2|A0A0J9GKX2_9RALS S-adenosylmethionine:tRN A ribosyltransferase-isomerase OS=Ralstonia sp. MD27 OX =1676617 GN=queA PE=3 SV=1
MLTLSDFDFDLPPELIAQTALPDRTASRLLAVRRADDGVHFDDRQFADLVDYLRPGDLLVFNDTRVIKARFFGQKASGGKVEVLVERLLDEHTVLAQIRSSKSPVEGTTLRLADAFDVTVGPRAEPFFTLRFPQPALDLIEQYGRLPLPPYIEHDPDSFDETRYQTVYARNPGAVAAPTAGLHFDDALFAKLDAMGIQRGFLTLHVGAGTFQPVRVENIAEHRMHSEWYAISPELAEAIRATRAAGGRIIAVGTTSMRALESAAQPDGTLHAGSGDTDIFITPGYRFRLVDALVTNFHLPKSTLLMLVSAFAGTAAIRAAYQHAIAQRYRFFSYGDAMLLTRAEPDSISA

SEQ ID NO: 71228 - protein, 350 aa, Ralstonia syzygii
  misc_feature (1)..(350): tr|G3A1A5|G3A1A5_9RALS S-adenosylmethionine:tRNA ribosy ltransferase-isomerase OS=Ralstonia syzygii R24 OX=9072 61 GN=queA PE=3 SV=1
MLTLSDFDFDLPPELIAQTALPDRTASRLLAVRRDAQGPHFDDCQFADLVDYLRPGDLLIFNDTRVIKARFFGHKASGGKIEVLVERLLDEYTVLAQIRSSKSPVAGSTLRLADAFDVTVGPRHEPFFTLRFPQPALELIEQYGRLPLPPYIEHTPDSFDETRYQTVYARNPGAVAAPTAGLHFDDALFARLDAMGVRRGFLTLHVGAGTFSPVRVENIAEHRMHSEWYAISPALAEAIRATRAAGGRIIAVGTTSMRALESAARPNGTLAAGSGETDIFITPGYRFRLVDALVTNFHLPKSTLLMLVSAFAGLETIRAAYRHAIAQRYRFFSYGDAMFLTRAEPDTQSA

SEQ ID NO: 71229 - protein, 343 aa, Ramlibacter henchirensis
  misc_feature (1)..(343): tr|A0A4Z0C922|A0A4Z0C922_9BURK S-adenosylmethionine:tRN A ribosyltransferase-isomerase OS=Ramlibacter henchiren sis OX=204072 GN=queA PE=3 SV=1
MRAFTLGDFDFALPPELIAQHPAPERSASRLLDGRHLPPADRVFRELPALLTPGDLLVFNDTRVLKARLYGGKPSGGKLELLVERVLAGGEVVAHMKVSKKPPVGTVLAMEGGFTATLLGRWPDAEGPLFRLAFSDDPYALMERHGHVPLPPYIEHADTEQDVERYQTVFARTPGAVAAPTAALHFDPQVLASLDACGIRRASLTLHVGAGTFQPVKTENIAEHRMHSEWYDVPAATQEAVARTRAQGGRIVAVGTTTVRTLESWALTGQARGDTDIFITPGFRFRLVDLMVTNFHLPRSTLMMLVSAFAGHDRITALYRHAVAHRYRFFSYGDSMLLERAPT

SEQ ID NO: 71230 - protein, 343 aa, Ramlibacter rhizophilus
  misc_feature (1)..(343): tr|A0A4Z0BGG2|A0A4Z0BGG2_9BURK S-adenosylmethionine:tRN A ribosyltransferase-isomerase OS=Ramlibacter rhizophil us OX=1781167 GN=queA PE=3 SV=1
MRHFSTSDFDFELPPELIAQHPAPERSASRLLDGRGPDPIDRIFRELPTLLDPGDLLVFNDTQVLKARLFGEKPSGGKLELLVERVIGEREVVAHMKVSKKPPVGTRLSMQGGFTATLLGRWPDDDGPLFRLAFDDEPHALMARHGHVPLPPYIEHADSAEDETRYQTVFARRPGAVAAPTAALHFDDAVLGALAARGIERAAVTLHVGAGTFQPVKTEDLAAHRMHSEWYEVPEATQQAIDRARARGGRIVAVGTTTVRTLESWARSGAASGDTDIFITPGFEFRLVDLMLTNFHLPRSTLMMLISAFAGYEPVMALYRHAIAQRYRFFSYGDAMLLARASS

SEQ ID NO: 71231 - protein, 365 aa, Ramlibacter sp.
  misc_feature (1)..(365): tr|A0A4Y7B264|A0A4Y7B264_9BURK S-adenosylmethionine:tRN A ribosyltransferase-isomerase OS=Ramlibacter sp. WS9 O X=1882741 GN=EEB15_30430 PE=3 SV=1
MKAAHLPSQRAPGARLLVVDSAGGLRHTSRSRLADFLNPGDVLVANDAATLPASLSGVHSRTGRAIEVRLAGRRSLAVDDVRDFTAVVFGAGDYRTRTEDRPSPPALQAGDVLVLGPLRAIVLRLQGHPRLVSLRFEGDVDAIWAGIARHGRPIQYAHVQPPLALWDVWTRVAALPVAFEPPSAGFVLDWSLLSALKARGVVFETLTHAAGISSTGDDELDARLPLDEPYDVPQATVRAIESASERGGRVVALGTTVTRALEHAGSNGPLRAGSGVADQRLGPGTQLNVVDAIISGTHEPGTSHYELLRAFAGDGVLRHAAQEMERAGYLTHEFGDTVLIEAAFSRLPKAAGPVARRHDPEEQIA

SEQ ID NO: 71232 - protein, 342 aa, Ramlibacter sp.
  misc_feature (1)..(342): tr|A0A4Z0BVN6|A0A4Z0BVN6_9BURK S-adenosylmethionine:tRN A ribosyltransferase-isomerase OS=Ramlibacter sp. 18x22 -1 OX=2530451 GN=queA PE=3 SV=1
MRTFSLGDFDFALPPELIAQHPAPERSASRLLDGRHSRPADRVFRELPALLSPGDLMICNDTQVVKARLFGGKPTGGKLELLVERVLANGEVVAHMKVSKKPPVGTVLAMDGGFTATLLGRWPDPEGALFHLRFSEDPFGLMERHGHVPLPPYIEHEDTAQDVDRYQTVFARSPGAVAAPTAALHFDDSVLASLDACGVRRAAITLHVGAGTFQPVKTEDIARHRMHSEWYEIPAATQDAITRTRREGGRIIAVGTTTVRTLETWAATGRAQGDTDIFITPGFRFRVVDLMITNFHLPKSTLMMLVSAFAGYEHVMALYRHAVAQRYRFFSYGDAMLLERRT

SEQ ID NO: 71233 - protein, 348 aa, Ramlibacter tataouinensis
  misc_feature (1)..(348): tr|F5Y1F9|F5Y1F9_RAMTT S-adenosylmethionine:tRNA ribosy ltransferase-isomerase OS=Ramlibacter tataouinensis (st rain ATCC BAA-407 / DSM 14655 / LMG 21543 / TTB310) OX= 365046 GN=queA PE=3 SV=1
MRTFTLADFDFALPPELIAQHPAAERSASRLLDGTGAEPADRVFRDLPALLAPGDLLVFNDTRVVKARLFGEKPTGGRLELLVERVLQDHEVAAHMKTGKKPPVGTQLTMDGGFSATLLGRWPDEDGTLFRLRLSGEPHALMERHGHVPLPPYITHGDTAEDERRYQTVFAARPGAVAAPTAALHFDQALLAALEARGIERASLTLHVGAGTFQPVKTENLAEHRMHSEWYEVPASTQQAVQATRRRGGRIVAVGTTTVRTLESWALTGQASGDTRIFITPGFGFRLVDLLVTNFHLPKSTLMMLVSAFAGHAQVMDLYRHAIARRYRFFSYGDAMLLARRGSGAPPA

SEQ ID NO: 71234 - protein, 341 aa, Ramlibacter tataouinensis
  misc_feature (1)..(341): tr|A0A127JY79|A0A127JY79_9BURK S-adenosylmethionine:tRN A ribosyltransferase-isomerase OS=Ramlibacter tataouine nsis OX=94132 GN=queA PE=3 SV=1
MRTFSVGDFDFALPPELIAQHPAAERSASRLLDGLGATPMDRVFRELPAQLREGDLLVFNDTRVVKARLFGEKPTGGRLELLIERVTGAREVVAHMKVSKKPQPGTVLRMDGGFTATLLGRWPDEDGALFRFALDDDPYALMERHGHVPLPPYIEHADTADDERRYQTVFAKRPGAVAAPTAALHFDEPLLGELAQRGIACASVTLHVGAGTFQPVKAENLAEHRMHSEWYEVPQATQDAIARLRHRGGRLVAVGTTTVRTLESWSRTGQASGDTSIFITPGFAFREVDLLVTNFHLPRSTLMMLVSAFAGYEHVMALYRHAIAQRYRFFSYGDAMLLART

SEQ ID NO: 71235 - protein, 356 aa, Raoultella electrica
  misc_feature (1)..(356): tr|A0A514EVT6|A0A514EVT6_9ENTR S-adenosylmethionine:tRN A ribosyltransferase-isomerase OS=Raoultella electrica OX=1259973 GN=queA PE=3 SV=1
MRVTDFSFELPESLIAHYPQPERSRCRLLSLDGPTGALTHGTFTDLLDKLNPGDLLVFNNTRVIPARLFGRKASGGKIEVLVERMLDDKRILAHIRASKAPKPGAELLLGDDESINATMVARHDALFEVEFNDERPVLEILNSIGHMPLPPYIDRPDEDADRELYQTVYSTRPGAVAAPTAGLHFDDMMLEKLREKGIEMAFVTLHVGAGTFQPVRVETIEDHIMHSEYAEVPQEVVDAVLAAKARGNRVIAVGTTSVRSLESAAQAAKKDLIEPFFGDTQIFIYQGYQYKAVDALVTNFHLPESTLIMLVSAFAGYQHTMNAYKAAVEQKYRFFSYGDAMFITYNPQAIFERVGE

SEQ ID NO: 71236 - protein, 354 aa, Raoultella ornithinolytica
  misc_feature (1)..(354): tr|A0A4R2Y3U7|A0A4R2Y3U7_RAOOR S-adenosylmethionine:tRN A ribosyltransferase-isomerase OS=Raoultella ornithinol ytica OX=54291 GN=queA PE=3 SV=1
MRVTDFSFELPESLIAHYPQPERSSCRLLSLDGPTGALTHGTFTDLLDKLNPGDLLVFNNTRVIPARLFGRKASGGKIEVLVERMLDDKRILAHIRASKAPKPGAELLLGDDESIQATMVARHDALFEVEFNDERPVLDILNSIGHMPLPPYIDRPDEEADRELYQTVYSVRPGAVAAPTAGLHFDEPLLEKLREKGVEMAFVTLHVGAGTFQPVRVDSIEEHIMHSEYAEVPQDVVDAVLAAKARGSRVIAVGTTSVRSLESAAQAAKNDPIEPFFGDTKIFIYPGYQYKAVDALVTNFHLPESTLIMLVSAFAGYQHTMNAYKAAVEQKYRFFSYGDAMFITYNPRAIFERP

SEQ ID NO: 71237 - protein, 356 aa, Raoultella ornithinolytica
  misc_feature (1)..(356): tr|A0A1Y6GLT0|A0A1Y6GLT0_RAOOR S-adenosylmethionine:tRN A ribosyltransferase-isomerase OS=Raoultella ornithinol ytica OX=54291 GN=queA PE=3 SV=1
MRVTDFSFELPESLIAHYPQPERSRCRLLSLDGPTGALTHGTFTDLLDKLNPGDLLVFNNTRVIPARLFGRKASGGKIEVLVERMLDDKRILAHIRASKAPKPGAELLLGDDESINATMVARHDALFEVEFNDERPVLDILNSIGHMPLPPYIDRPDEDADRELYQTVYSTRPGAVAAPTAGLHFDDMMLEKLREKGIEMAFVTLHVGAGTFQPVRVETIEDHIMHSEYAEVPQEVVDAVLAAKARGNRVIAVGTTSVRSLESAAQAAKNDLIEPFFGDTQIFIYQGYQYKAVDALVTNFHLPESTLIMLVSAFAGYQHTMNAYKAAVEQKYRFFSYGDAMFITYNPQAIFERVGE

SEQ ID NO: 71238 - protein, 356 aa, Raoultella planticola; identical to SEQ ID NO: 71237
  misc_feature (1)..(356): tr|A0A2X2E670|A0A2X2E670_RAOPL S-adenosylmethionine:tRN A ribosyltransferase-isomerase OS=Raoultella planticola OX=575 GN=queA PE=3 SV=1

SEQ ID NO: 71239 - protein, 354 aa, Raoultella sp.
  misc_feature (1)..(354): tr|A0A509CQ88|A0A509CQ88_9ENTR S-adenosylmethionine:tRN A ribosyltransferase-isomerase OS=Raoultella sp. NCTC 9 189 OX=2583577 GN=queA PE=3 SV=1
MRVTDFSFELPESLIAHYPQPERSSCRLLSLDGPTGALTHGTFTDLLDKLNPGDLLVFNNTRVIPARLFGRKASGGKIEVLVERMLDDKRILAHIRASKAPKPGAELLLGDDESIQATMVARHDALFEVEFNDERPVLDILNNIGHMPLPPYIDRPDEEADRELYQTVYSVRPGAVAAPTAGLHFDEPLLEKLREKGVEMAFVTLHVGAGTFQPVRVDSIEEHIMHSEYAEVPQDVVDAVLAAKARGSRVIAVGTTSVRSLESAAQAAKNDLIEPFFGDTKIFIYPGYQYKAVDALVTNFHLPESTLIMLVSAFAGYQHTMNAYKAAVEQKYRFFSYGDAMFITYNPRAIFERP

SEQ ID NO: 71240 - protein, 363 aa, Raoultella sp.
  misc_feature (1)..(363): tr|A0A4R3ZLE5|A0A4R3ZLE5_9ENTR S-adenosylmethionine:tRN A ribosyltransferase-isomerase OS=Raoultella sp. BIGb01 38 OX=2485115 GN=queA PE=3 SV=1
MRVTDFSFELPESLIAHYPQPERSRCRLLSLDGPTGALTHGTFTDLLDKLNPGDLLVFNNTRVIPARLFGRKASGGKIEVLVERMLDDKRILAHIRASKAPKPGAELLLGDDESISATMVARHDALFEVEFNDRRPVLDILNSIGHMPLPPYIDRPDEDADRELYQTVYSARPGAVAAPTAGLHFDEPMLEKLREKGIEMAFVTLHVGAGTFQPVRVETIEDHIMHSEYAEVPQEVVDAVLAAKARGNRVVAVGTTSVRSLESAAQAAKNDLIEPFFGDTQIFIYQGYQYKVVDALVTNFHLPESTLIMLVSAFAGYQHTMNAYQAAVEQKYRFFSYGDAMFITYNPQAIFEHVGESVRGMSV

SEQ ID NO: 71241 - protein, 354 aa, Raoultella terrigena
  misc_feature (1)..(354): tr|A0A1V2BS04|A0A1V2BS04_RAOTE S-adenosylmethionine:tRN A ribosyltransferase-isomerase OS=Raoultella terrigena OX=577 GN=queA PE=3 SV=1
MRVTDFSFELPESLIAHYPQPERSSCRLLSLDGPTGALTHGTFTDLLDKLNPGDLLVFNNTRVIPARLFGRKASGGKIEVLVERMLDDKRILAHIRASKAPKPGAELLLGDDESIQATMVARHDALFEVEFNDERPVLDILNSIGHMPLPPYIDRPDEEADRELYQTVYSVRPGAVAAPTAGLHFDEPLLEKLREKGVEMAFVTLHVGAGTFQPVRVDSIEEHIMHSEYAEVPQDVVDAVLAAKARGSRVIAVGTTSVRSLESAAQAAKNDLIEPFFGDTKIFIYPGYQYKAVDALVTNFHLPESTLIMLVSAFAGYQHTMNAYKAAVEQKYRFFSYGDAMFITYNPRAIFERP

SEQ ID NO: 71242 - protein, 202 aa, Raoultella terrigena
  misc_feature (1)..(202): tr|A0A4U9DEE8|A0A4U9DEE8_RAOTE S-adenosylmethionine:tRN A ribosyltransferase-isomerase OS=Raoultella terrigena OX=577 GN=queA_1 PE=3 SV=1
MRVTDFSFELPESLIAHYPQPERSSCRLLSLDGPTGALTHGTFTDLLDKLNPGDLLVFNNTRVIPARLFGRKASGGKIEVLVERMLDDKRILAHIRASKAPKPGAELLLGDDESIQATMVARHDALFEVEFNDERPVLDILNNIGHMPLPPYIDRPDEEADRELYQTVYSVRPGAVAAPTAGLHFDEPLLESCVRKALRWRS

SEQ ID NO: 71243 - protein, 316 aa, Raphidiopsis brookii
  misc_feature (1)..(316): tr|D4TN10|D4TN10_9CYAN S-adenosylmethionine:tRNA ribosy ltransferase-isomerase OS=Raphidiopsis brookii D9 OX=53 3247 GN=queA PE=3 SV=1
MQNSDLDISLSGYDYELPPELIAQNPVVPRDNSRLMVINPPAGTLTPPLDHIFRDLPELLKPGDLLVMNNTRVIPARLYGRKSTGARVEVLLLEEKQHNCWLALVKPGKYFNIGTEIIFDDQGLSSVNKLIPQLTATVIERDENTGGRLLRFDLPINVSLLHFLHKLGKIPLPPYINNSHALEEQYQTVYAKHDGAVAAPTAGLHFTPELLVKLRESGIQQEFLTLHVGVGTFRPVEVEDVTTHQMHEEWIEVSGDLVEKIYATKNAGGRIIAVGTTVVRALEGAAQSGSLQPYTGKVNLFYLSRLSMACRGRSYY

SEQ ID NO: 71244 - protein, 367 aa, Raphidiopsis curvata
  misc_feature (1)..(367): tr|A0A1Z4VGF7|A0A1Z4VGF7_9CYAN S-adenosylmethionine:tRN A ribosyltransferase-isomerase OS=Raphidiopsis curvata NIES-932 OX=1973482 GN=queA PE=3 SV=1
MQNSDLDISLSGYDYELPPELIAQNPVVPRDSSRLMVINSLDAGTLTPPLDHIFRDLPELLKPGDLLVMNNTRVIPARLYGHKSTGARVEVLLLEEKQHNCWLALVKPGKYFNIGTEIVFGDQGAELTPQLTATVIERDENTGGRLLQFDLPINVSLLQFLHKLGEIPLPPYINNSHALEEQYQTVYAKYDGAIAAPTAGLHFTPELLVKLRERGIQQEFLTLHVGVGTFRPVEVEDVTTHQMHEEWIEVSGDLVEKIYATRNAGGRIIAVGTTVVRALEGAAQSGSLQPYTGKVNLFIYPGYQWRVVEGLITNFHLPRSSLLMLVSSLIGRERLLDIYNQAIASRYRFYSFGDAMLILPEARICCS

SEQ ID NO: 71245 - protein, 348 aa, Reichenbachiella agariperforans
  misc_feature (1)..(348): tr|A0A1M6L376|A0A1M6L376_9BACT S-adenosylmethionine:tRN A ribosyltransferase-isomerase OS=Reichenbachiella agar iperforans OX=156994 GN=queA PE=3 SV=1
MKLSEFKFDLPPGLLALYPTENRDEARMMVIHKDSGKIEHKVFTDFIDYFNEGDSIIINDTKVFPARLYGNKEKTGAKIEVFLLRELNKELHLWDVLVDPARKIRVGNKLYFGEGDLVAEVIDNTTSRGRTIRFLFDGTDEEFYKTIDELGETPLPKEIARKTEPEDRERFQTIYADKVGAVAAPTAGAHFTMQVLKRLELAGVDVNPITLHLGLGTFRPVDVEDLTKHKMDSENFIVPEATADIVNNVLDTKKNVCAIGTTVLRALESSVSASDRLKANEGWTDKFIFPPYEPKIVKSLLTNFHLPESTLLMNAAAFGGYDLIMDAYQVAIKEKYRFFSYGDAMLII

SEQ ID NO: 71246 - protein, 397 aa, Reichenbachiella agariperforans
  misc_feature (1)..(397): tr|A0A1M6R8S1|A0A1M6R8S1_9BACT S-adenosylmethionine:tRN A ribosyltransferase-isomerase OS=Reichenbachiella agar iperforans OX=156994 GN=queA PE=3 SV=1
MVNNNTDLAQYLFDLPDEKIAKHPLKDRDASKLLVYKNDTIHHDHFRNLLDHVPTDATLFLNNTKVIAARLYFQKNTGAKIEVFLTEPISPHTAFEPALKAKKTCIWKCMIGNLKKWKDNTSIYLTLGAINLEAKLLDRSHGLVEFCWDTADEFLMVIEAAGHVPLPPYLNRAQESEDKYRYQTVFSEKEGAVAAPTAGLHFTDSILDTIRSKGHVVDQLTLHVSAGTFRPIKTEDFTEHDMHNERIIIYRHNLINILESKGPIVAVGTTAMRTLESTYWYGALLSKELTKDFKVDQHTAYREELAGISLETATQAIIHQMDQLGIDELHGETEIFIYPGYDFKVVQGLFTNFHMPSSTLVLLVAAFLGSDWRKIYNEALSHDYRFLSYGDSSLLLR

SEQ ID NO: 71247 - protein, 348 aa, Reichenbachiella faecimaris
  misc_feature (1)..(348): tr|A0A1W2G9G4|A0A1W2G9G4_9BACT S-adenosylmethionine:tRN A ribosyltransferase-isomerase OS=Reichenbachiella faec imaris OX=692418 GN=queA PE=3 SV=1
MKLSEFKFDLPPGLLALYPTENRDESRLMVVHKDTGEIEHKVFTDLISYLDEGDSVILNDTKVFPARLYGNKEKTGAKIEVFLLRELNKELHLWDVLVDPARKIRVGNKLYFGEGDLVAEVIDNTTSRGRTIRFLFDGTDEEFYKSIDELGETPLPKEIARKTEPEDRERFQTIYAENVGAVAAPTAGIHFTRQMLKRLELKGVDTRAITLHLGLGTFRPVDVEDLTKHKMDSENYIVSEETATLVNKVLDEKKKVCAIGTTVLRALESSVSASDRLKANEGWTDKFIFPPYDFKIVKSLVTNFHLPESTLLMNAAAFGGFDLIMEAYQVAIKEKYRFFSYGDAMLII

SEQ ID NO: 71248 - protein, 400 aa, Reichenbachiella faecimaris
  misc_feature (1)..(400): tr|A0A1W2GJK7|A0A1W2GJK7_9BACT S-adenosylmethionine:tRN A ribosyltransferase-isomerase OS=Reichenbachiella faec imaris OX=692418 GN=queA PE=3 SV=1
MSSDSASLEKYLYELPDHRIAKHPLAHRDDSKLLLYRAGEIEHQTFKDVVDLVPDDSLLFLNNTKVIAARLFFHKSTGAQIEVFLTEPILPHTEFQNALKVKNKCTWKCMIGNLKKWKDENVLSLKLNDELTIEARLVDRKKNLVEFTWEGNHEFLSIVEAAGHVPLPPYLNREEEAEDKDRYQTVFSELEGAVAAPTAGLHFTDDILKKLAKKGIKQDRLTLHVSAGTFRPIKDADFKNHDMHNERIIVNRQNIANILAATGSIIPVGTTALRTLESLYWYGVKLAKDRKTKFFVEKNDPYEKHLQGISLEHAMTAILNKMDSENIDQLKGETEIFIYPGYEFKVANGLFTNFHMPASTLVLLVAAFVGDDWKKIYQEALDKDYRFLSYGDTSLLLPHG

SEQ ID NO: 71249 - protein, 348 aa, Reichenbachiella sp.
  misc_feature (1)..(348): tr|A0A2G5L0W2|A0A2G5L0W2_9BACT S-adenosylmethionine:tRN A ribosyltransferase-isomerase OS=Reichenbachiella sp. 5M10 OX=1889772 GN=queA PE=3 SV=1
MKLSEFKFDLPPGLLALYPTENRDESRMMVVHKDSGKIEHKVFKDFIEYFNEGDSVIINDTKVFPARLYGNKEKTGAKIEVFLLRELNKELHLWDVLVDPARKIRVGNKLYFGEGDLVAEVIDNTTSRGRTIRFLFDGTDEEFYKTIDELGETPLPKEIARKTEEEDRERFQTIYADKVGAVAAPTAGIHFTMSVLKRLELQGVDVSPITLHLGLGTFRPVDVEDLTKHKMDSENFMVGEKTTDIVNTALDTKHNVCAVGTTVLRALESSVSANDRLKPNEGWTDKFIFPPYESKIVKSLLTNFHLPESTLLMNAAAFGGYDLIMEAYQVAIKEKYRFFSYGDAMLII

SEQ ID NO: 71250 - protein, 397 aa, Reichenbachiella sp.
  misc_feature (1)..(397): tr|A0A2G5KX99|A0A2G5KX99_9BACT S-adenosylmethionine:tRN A ribosyltransferase-isomerase OS=Reichenbachiella sp. 5M10 OX=1889772 GN=queA PE=3 SV=1
MSKPSTELEEYLFELPDEKIAKHPLENRDASKMLVYKQGEITHDHFKNLLDHIPTDSTLFLNNTKVIAARLFFQKSTGAKIEVFLTEPISPYQEFEKALQVKKQCSWKCIIGNLRKWKDGTTITLQLGSIQLRAKLIDRSHGIVEFSWDTEDAFLQIIEAAGHVPLPPYLNRKETEDDKTRYQTVFSVNEGAVAAPTAGLHFTKEILNRLEANGTKIDQVTLHVSAGTFRPIKTTDFKDHDMHNERIIIYRHNLHNILLSKGPVLAVGTTAMRTLESTYWYGAILTKNPQAPFKVDKDTAYQAQYANISVRESIEALLQKMDEMQVDVLHGETEIFIYPGYDFKIIHGLFTNFHMPASTLVLLVAAFVGKDWQEIYRQALAQDYRFLSYGDTSFLLR

SEQ ID NO: 71251 - protein, 353 aa, Reinekea blandensis
  misc_feature (1)..(353): tr|A4BG46|A4BG46_9GAMM S-adenosylmethionine:tRNA ribosy ltransferase-isomerase OS=Reinekea blandensis MED297 OX =314283 GN=queA PE=3 SV=1
MHVNDFDFQLPDELIARHPAEQRTGSRLLHLHGDSGQVQHRHFPDIEQLIEPGDLLVFNNTRVIPARLFGQKRSGGKVELLIERMTSDHTALAHIKANKSPKAGTELIMEGDIQLEVTGRDQNLFCVRCTNPEPLVDLLDQHGHMPLPPYLEREDDDDDRERYQTVYAQRKGAVAAPTAGLHFDDALLARLKDKGVNTAFVTLHVGAGTFQPVKADNIKDHVMHAEWIDVPDSVVEQIRTTKAAGKRVIAVGTTSVRSLETASQSGQIEPFTGDTNIFIYPGYRFKTVDALLTNFHLPKSTLIMLISAFAGKDHVMAAYEAAIRERYRFFSYGDAMFVTRNDDVTTAESGDLS

SEQ ID NO: 71252 - protein, 352 aa, Reinekea forsetii
  misc_feature (1)..(352): tr|A0A2K8KT29|A0A2K8KT29_9GAMM S-adenosylmethionine:tRN A ribosyltransferase-isomerase OS=Reinekea forsetii OX= 1336806 GN=queA PE=3 SV=1
MHLNDFDFELPDNLIARHPASERTGSRLLHLAGDTGQCQHLRFPQFEDLVSPGDLLVFNDTRVIPARLFGQKTSGGKIEVLIERMTSSHTALAHIRANKSSKVGTELLMEGGIELVVTGRDDNLFKIECRNPEPLVDLLDQHGHMPLPPYLERADDSTDRERYQTVYADKKGAVAAPTAGLHFDDALMARLADKGVNTAFVTLHVGAGTFAPVKTEQLADHIMHAEWVDVSFAVVEQIRATQAAGKRVIAIGTTSVRSLESASSSGAIEPFTGDTRIFIYPGYRFKTVDAMLTNFHLPKSTLIMLVSAFAGQDAVMAAYAEAVHEQYRFFSYGDAMFVTPHNLPPLASEATA

SEQ ID NO: 71253 - protein, 362 aa, Reinekea marinisedimentorum
  misc_feature (1)..(362): tr|A0A4R3IA17|A0A4R3IA17_9GAMM S-adenosylmethionine:tRN A ribosyltransferase-isomerase OS=Reinekea marinisedime ntorum OX=230495 GN=queA PE=3 SV=1
MAGHFLAAISISMQVNDFDFQLPDSLIARQPAKERTGSRLLHLNGMSGEVQHLSFPGIETLIEPGDLLVFNNTRVIPARIFGQKASGGKVEVLVERITSPHTALAHVRANKSPKPGNELIMEGDIRLTVTGRSENLFCLECTNKEALVDLLEAHGHMPLPPYLERDDNEDDRERYQTVYAQKKGAVAAPTAGLHFDDALLARLKDKGVNTAFVTLHVGAGTFAPVKADSIKDHVMHAEWVEVTEQVVEQIRATKAAGKRVIAVGTTSVRSLESASQQGEIAPFSGDTQIFIYPGYEYKTVDALLTNFHLPKSTLIMLVSAFAGQQNVMNAYHQAIENKYRFFSYGDAMFVTPQAFTNIEETE

SEQ ID NO: 71254 - protein, 373 aa, Reinekea sp.
  misc_feature (1)..(373): tr|A0A5C8Z4K3|A0A5C8Z4K3_9GAMM S-adenosylmethionine:tRN A ribosyltransferase-isomerase OS=Reinekea sp. SSH23 OX =2593301 GN=queA PE=3 SV=1
MHVDDFDFQLPDALIARHPTKERTGSRLLHLNGQSGQTQHLNFADIESLIEPGDLMVFNDTRVIPARLFGQKTSGGKVEVLVERITSPNTALAHIRANKSAKPGTLLTMEGGIELEVTGRSENLFAIRCLNEQPLVELLEQHGHMPLPPYLEREDDDEDRERYQTVYAQKKGAVAAPTAGLHFDDALLQRLADKGVNTAFVTLHVGAGTFAPVKADSIEEHVMHAEWVEVSAEVVEKIKATKAAGKRVIAIGTTSVRSLESASANGEIEAFSGDTQIFIYPGYRFKTVDAMLTNFHLPKSTLIMLVSAFAGQGNVLNAYNEAITEQYRFFSYGDAMFVTPQPFTEAFAETLAEQSPSFNLNDDSAASAQSKEL

SEQ ID NO: 71255 - protein, 347 aa, Reyranella soli
  misc_feature (1)..(347): tr|A0A512ND23|A0A512ND23_9PROT S-adenosylmethionine:tRN A ribosyltransferase-isomerase OS=Reyranella soli OX=12 30389 GN=queA PE=3 SV=1
MRVDLFDFDLPDELIAQRPIQPRDAARLLDVAPDGLHDRTVRDLPSLLRQGDLLVFNDTKVIPARLRGVRGGTAGRQDVAVEALLIRDLGAGRWLSFARPTKRLRLGDRIGFTDFGATVETKNDDGSLVLAFDTTGPRFLAALEHSGAVPLPPYIRSGVADAQDRADYQTMFARFDGSVAAPTAGLHFTPELMASLADAGIATASVTLHVGAGTFQPVRVDDTDAHTMHAEWGEVPAITAQAIAETRARGGRVVSIGTTALRLLETVARDHDGAVAAWIGETDIFITPGFRFRAVDLLLTNFHLPRSTLFMLVSAFAGLERMKAAYAHAVRERYRFYSYGDCCLLRR

SEQ ID NO: 71256 - protein, 156 aa, Reyranella sp.
  misc_feature (1)..(156): tr|A0A522Z9J1|A0A522Z9J1_9PROT S-adenosylmethionine:tRN A ribosyltransferase-isomerase (Fragment) OS=Reyranella sp. OX=1929291 GN=EPO10_19320 PE=3 SV=1
MRVDLFDFALPDDLIAQRPVSPRDSARLLDVTGETLHDRTVRSLPGLLRRGDLLVFNDTKVIPARLKGTRPGNGQRQDVAVEALLIRDLGNGRWRAFARPGKRLRPGDVLDFPGLRARVEAKEEDGSLVLDFDQEGHAFLTALEQEGTVPLPPYIR

SEQ ID NO: 71257 - protein, 336 aa, Reyranella sp.
  misc_feature (1)..(336): tr|A0A521LMI3|A0A521LMI3_9PROT S-adenosylmethionine:tRN A ribosyltransferase-isomerase OS=Reyranella sp. OX=192 9291 GN=queA PE=3 SV=1
MRVDLFDFDLPEDLIAQRPVVPRDAARLLDVTGDGLHDRTVRDLPGLLRKGDLLVFNDTKVIPARLIGTRPEGGKVEALLIRDLGDGRWLTFARPAKRMKVGQKLAFEGLAATVAAKREDGSVVLAFDRSGHAFLTALEQGGAVPLPPYIRGGTADAQDRADYQTLFAKHDGSVAAPTAGLHFTPALMAALAEAGIATAGVTLHVGAGTFQPVRVDDTDAHTMHAEWGEVSQETADAIARAQRVVAIGTTSLRLLESVARTGPMRAWSGETDIFITPGFPFRAVDLLLTNFHLPRSTLFMLVAAFAGLERMKAVYAHAVGERYRFYSYGDCCLLRR

SEQ ID NO: 71258 - protein, 346 aa, Rheinheimera nanhaiensis
  misc_feature (1)..(346): tr|I1DSN0|I1DSN0_9GAMM S-adenosylmethionine:tRNA ribosy ltransferase-isomerase OS=Rheinheimera nanhaiensis E407 -8 OX=562729 GN=queA PE=3 SV=1
MSVTSMQVKDFSFELPEQLIARFPKAERSSSRLLAMDKHSGELSHHIFKDLADFLQPGDLLVFNNTKVIPARLFGQKASGGKVEVLVERMLDKQRFLAHVRASKAPKPGTELLLEGSAKVVMNQRHDELFELQVIGDEPVLDMLERLGHMPLPPYIDRPDTEEDKARYQTVYNEKPGAVAAPTAGLHFDQPLLDKLKAKGVEFAYITLHVGAGTFQPVRVDNVLEHKMHAEYIEVPQPVVDAIAACKARGNKVVAVGTTSVRSLESAAQQGGGQLVAYSGDTQIFIYPGYQFKVIDALITNFHLPESTLIMLVSAFSSRENIMHAYKTAIAEQYRFYSYGDAMFIR

SEQ ID NO: 71259 - protein, 351 aa, Rheinheimera pacifica
  misc_feature (1)..(351): tr|A0A1H6JFS4|A0A1H6JFS4_9GAMM S-adenosylmethionine:tRN A ribosyltransferase-isomerase OS=Rheinheimera pacifica OX=173990 GN=queA PE=3 SV=1
MSVTSVPAKSMQVSDFSFELPEQLIARFPKAERSSSRLLAMDKHSGALQHHIFKDLADFLQPGDLLVFNNTKVIPARLFGQKASGGKVEVLVERMLDDKRFLAHVRASKAPKPGTELILENSATVVMNQRHDELFELEVTGDEPVLDMLERLGHMPLPPYIDRPDNAEDKARYQTVYNEKPGAVAAPTAGLHFDQPLLDKLKAKGVEFAYVTLHVGAGTFQPVRVANVLEHKMHAEYIEVSQQVVDAVAACKARGNRVVAVGTTSVRSLESAAAQGGGNLVAYNGDTQIFIYPGYEFKVIDALITNFHLPESTLIMLVSAFSSRDYVMNAYNTAIAEQYRFYSYGDAMFIS

SEQ ID NO: 71260 - protein, 341 aa, Rheinheimera salexigens
  misc_feature (1)..(341): tr|A0A1E7Q9F9|A0A1E7Q9F9_9GAMM S-adenosylmethionine:tRN A ribosyltransferase-isomerase OS=Rheinheimera salexige ns OX=1628148 GN=queA PE=3 SV=1
MQVSDFSFQLPEQLIARHPKAERSSSRLLAMDKSSGALSHHIFKQVIDFIHPGDLLVFNNTKVIPARLFGQKASGGKVEVLVERVLDEKRFLAHIRASKAPKPGTKLILEQSAEVEMLQRHDELFELAVCSDEPVLDMLERLGHMPLPPYIDRPDTAEDKARYQTVYSEKPGAVAAPTAGLHFDTPLLQQLTDKGVEFAYVTLHVGAGTFQPVRVDNVLAHKMHAEYIDVPDSTVAAIAACKARGGKVVAVGTTSVRSLESAAQIGNGDLIAYKGDTQIFIYPGYEFKVIDALITNFHLPESTLIMLVSAFSQREYVMQAYATAIAEQYRFYSYGDAMYIG

SEQ ID NO: 71261 - protein, 341 aa, Rheinheimera sp.
  misc_feature (1)..(341): tr|A0A4P6VU11|A0A4P6VU11_9GAMM S-adenosylmethionine:tRN A ribosyltransferase-isomerase OS=Rheinheimera sp. D18 OX=2545632 GN=queA PE=3 SV=1
MHVKDFSFELPEQLIARFPKAERSSSRLLVMNKHNGELQHHIFKDLADQLQAGDLLVFNNTKVIPARLFGQKLSGGKVEVLVERMLDNKRFLAHVRASKAPKAGAILLLENSAEVRMNQRHEELFELEVLSDEPVLTMLERLGHMPLPPYIDRPDNDEDKARYQTVYNAKPGAVAAPTAGLHFDQPLLDKLSAKGVEFAYVTLHVGAGTFQPVRVDNVLEHKMHAEYIEVSQQVVDAVAACKARGNRVIAVGTTSVRSLESAVQQGNGTLVAYNGDTQIFIYPGYRFKVVDALVTNFHLPESTLIMLVSAFSRREYVMQAYKTAIAEQYRFYSYGDAMFIS

SEQ ID NO: 71262 - protein, 341 aa, Rheinheimera sp.
  misc_feature (1)..(341): tr|A0A486XPW9|A0A486XPW9_9GAMM S-adenosylmethionine:tRN A ribosyltransferase-isomerase OS=Rheinheimera sp. BAL3 41 OX=1708203 GN=queA PE=3 SV=1
MQVKDFSFELPEQLIARFPKAERSSSRLLAMDKHSGELQHHIFKDLADFLQPGDLLVFNNTKVIPARLFGQKASGGKVEVLVERMLDNKRFLAHVRASKAPKPGTELVLEGSAKVTMKQRHDELFELEVMGDEPVLEMLERLGHMPLPPYIDRPDTEEDKARYQTVYNEKPGAVAAPTAGLHFDQPLLDKLRTKGIEFAYITLHVGAGTFQPVRVDNVLEHKMHAEYIEVPQHVVDAIAACKARGNRVVAVGTTSVRSLESAAQQGGGQLIAYNGDTQIFIYPGYQFKVIDALITNFHLPESTLIMLVSAFSSREHVMNAYQTAIAEQYRFYSYGDAMFIR

SEQ ID NO: 71263 - protein, 346 aa, Rheinheimera tuosuensis
  misc_feature (1)..(346): tr|A0A285IXA2|A0A285IXA2_9GAMM S-adenosylmethionine:tRN A ribosyltransferase-isomerase OS=Rheinheimera tuosuens is OX=1323745 GN=queA PE=3 SV=1
MQPKSMQVKDFSFELPEQLIARFPKAERSSSRLLAMDKQSGALSHHIFKDLTDFLKPGDLLVFNNTKVIPARLFGQKASGGKVEVLVERMLDDKRFLAHVRASKAPKPGTVLMLENSAEVRMNQRHDELFELEVLSDEPVLTMLERLGHMPLPPYIDRPDTEDDKARYQTVYNEKPGAVAAPTAGLHFDQPLLDKLKAKEVEFAYVTLHVGAGTFQPVRVDNVLEHKMHAEYIEVPQQVVDAIAACKARGNKVVAVGTTSVRSLESAAQQGGGKLISYNGDTQIFIYPGYQFQVIDALITNFHLPESTLIMLVSAFSCREHVMNAYDTAINEQYRFYSYGDAMFIS

SEQ ID NO: 71264 - protein, 351 aa, Rhizobacter gummiphilus
  misc_feature (1)..(351): tr|A0A1W6LH97|A0A1W6LH97_9BURK S-adenosylmethionine:tRN A ribosyltransferase-isomerase OS=Rhizobacter gummiphil us OX=946333 GN=queA PE=3 SV=1
MSRSYTLADFDFELPPELIAQHPAAERSGSRLLDGTRWPPADHIFRELPSLLRAGDLLVFNDTRVIKARLLGAKASGGSVEALVERVLPGNEVWMHLRASKSPKAGGRVRFTSGDGSSSFEAEVLGRGGPEDSLFHLRFPSEPFALIERHGHVPLPPYITHADDADDERRYQTVFAANPGAAAAPTAALHFDEALLAELAARGIGRAAVTLHVGAGTFQPVRTDNIADHRMHSEWFDVPQSTVDAIAATKAAGGRVVSVGTTTLRALESAAAGGTLQAGSRDTAIFITPGFDFKVIDVLVTNFHLPKSTLLMLVSALAGHDRVMGLYRHSIEHGYRFFSYGDAMLLERAAA

SEQ ID NO: 71265 - protein, 355 aa, Rhizobacter sp.
  misc_feature (1)..(355): tr|A0A0Q6XMM2|A0A0Q6XMM2_9BURK S-adenosylmethionine:tRN A ribosyltransferase-isomerase OS=Rhizobacter sp. Root1 221 OX=1736433 GN=queA PE=3 SV=1
MSRSYTLGDFDFDLPPELIAQHPAAERSGSRLLDGTTEPPADRIFRDLPGLLRAGDLLVFNDTRVIKARLLGAKASGGSVEALVERVLPGHEVLMHLRASKSPKAGGRVRFVSGDGASHFDADVLGRAGPEDSLFHLRFPGEPFALLERHGHVPLPPYITHADSAEDERRYQTVFAARPGAAAAPTAALHFDEALLAALDARGVKRAAVTLHVGAGTFQPVRTDNLAEHRMHSEWFDVPQATVDAIAATKAAGGRVVSVGTTTLRALESAAASGTLEAGSRDTSIFITPGFRFHVVDVLVTNFHLPKSTLLMLVSALAGHSRVMALYRHAIDHRYRFFSYGDAMLLERHDNEESR

SEQ ID NO: 71266 - protein, 360 aa, Rhizobacter sp.
  misc_feature (1)..(360): tr|A0A0Q7AIY6|A0A0Q7AIY6_9BURK S-adenosylmethionine:tRN A ribosyltransferase-isomerase OS=Rhizobacter sp. Root4 04 OX=1736528 GN=queA PE=3 SV=1
MTPTYTLSDFDFALPPELIAQQPAAERSASRLLDGTGSAPVDRVFRELPALLRAGDLLVFNDTRVIKARLLGAKASGGAVEALVERVLPGHEVLMHLRASKSPKAGSTVRFFGVDRTDAFNAEVLGRAGPQESLFHLRFPADPLALLAAHGHVPLPPYITHADTAEDERRYQTVFAAKPGAVAAPTAALHFDDALLAELARRGIATAGVTLHVGAGTFQPVRTEILAEHTMHSEWFDVPRATVDAITRTRAAGGRIVAVGTTTLRALESAAREGALQAGSRDTDIFITPGFAFRVVDVLITNFHLPKSTLMMLVSAFAGFDRIRALYAHAIRERYRFFSYGDAMLLQRAPHDPGTDHADL

SEQ ID NO: 71267 - protein, 361 aa, Rhizobiaceae bacterium
  misc_feature (1)..(361): tr|A0A4U6ATY6|A0A4U6ATY6_9RHIZ S-adenosylmethionine:tRN A ribosyltransferase-isomerase OS=Rhizobiaceae bacteriu m LC148 OX=1120689 GN=queA PE=3 SV=1
MRVDLFDFDLPEESIALRPASPRDSARLLVVRPGDEPELADHRVSELPSFLKPGDALVFNDTKVIPAQLEGIRHREGAGGQQVSATLHMRTAPDAWKAFAKPGKRIKVGDRIEFGHGGNACMIGSLAATVEEKGEGGEVTLRFDLSGPMLDEAIMAVGHIPLPPYIAAKRAEDDKDRQDYQTIYAREEGAVAAPTAGLHFTPQLFAALDAAGIERHFVTLHVGAGTFLPVKADDTADHKMHQEIGYVSADTAARLNAVKARGGRIVCVGTTSLRLVESAATDDGVIAPWSGATGIFITPGYRFKAVDMLMTNFHLPRSTLFMLVSAFSGLETMRSAYAHAISTGYRFYSYGDASLLFRKDK

SEQ ID NO: 71268 - protein, 185 aa, Rhizobiaceae bacterium
  misc_feature (1)..(185): tr|A0A4Q3HJH8|A0A4Q3HJH8_9RHIZ S-adenosylmethionine:tRN A ribosyltransferase-isomerase (Fragment) OS=Rhizobiace ae bacterium OX=1913961 GN=EOP17_22345 PE=3 SV=1
AKDYQTIYAREQGAVAAPTAGLHFTPDLFARLDAAGVERHFVTLHVGAGTFLPMKVDDTEDHKMHQEIGYVSAETAQHLNAVRARGGRIVCVGTTSLRLIESAAADDGTILPWSGATGIFITPGYRFKAVDMLMTNFHLPKSTLFMLVSAFCGLETMRSAYDHAISSGYRFYSYGDSSLLFRNDR

SEQ ID NO: 71269 - protein, 356 aa, Rhizobiales bacterium
  misc_feature (1)..(356): tr|A0A1M3MHW2|A0A1M3MHW2_9RHIZ S-adenosylmethionine:tRN A ribosyltransferase-isomerase OS=Rhizobiales bacterium 63-22 OX=1895812 GN=queA PE=3 SV=1
MRVDLFDFDLPEERIALRPAEPRDHARLLRVRPGQDFEDAHVYDLPDILQPGDALVFNDTKVIPAQLEGLRERDGNVSQVDATLHMRAGPDRWKAFLRPAKRVKEGDRIRFGHSGSSCFLGTLDATVAEKGEAGEALLVFDLSGALLDEAIAAVGHIPLPPYIASKRAEDERDRSDYQTVYAREEGAVAAPTAGLHFTPELLAKIKARGVEEHFVTLHVGAGTFLPVKADDTRDHKMHAEIGHVSQATADALNAVHARGGRVICVGTTSLRLIESAAGEDGQVRPWSGATDIFITPGYRFRAVDLLMTNFHLPRSTLFMLVSAFSGLETMRAAYEHAIADGYRFYSYGDASLLERA

SEQ ID NO: 71270 - protein, 370 aa, Rhizobiales bacterium
  misc_feature (1)..(370): tr|A0A1H4VB56|A0A1H4VB56_9RHIZ S-adenosylmethionine:tRN A ribosyltransferase-isomerase OS=Rhizobiales bacterium GAS188 OX=1884351 GN=queA PE=3 SV=1
MRVDLFDFELPPALIALRPAVPRESANLLVVRPGADPELDDRHVGDLPGLLRPGDVLVLNDTRVIPARLTGLRTRGEAVARIEVLLHQRLAGERWRAFARPAKRLAIGDRIVFGETSESVACELGRLMATVEARGADGEVDLAFDLHGAVLDEAIERFGQMPLPPYIAGKRPEDAQDRSDYQTVYAREPGAVAAPTAGLHLTEGLMQAIRARGVALATVTLHVGAGTFLPVKADDTAEHRMHPEWGEIDAQAAQTINAARAAGGRVIALGTTSLRLIESAAAPDGSLAPFAGETAIFITPGYRFKLVDGLVSNFHLPRSTLFMLVCAFSGLERMRRAYAHAIEHGYRFYSYGDASLLFRQDMLHQDGLQE

SEQ ID NO: 71271 - protein, 379 aa, Rhizobium acidisoli
  misc_feature (1)..(379): tr|A0A0N1DPX9|A0A0N1DPX9_9RHIZ S-adenosylmethionine:tRN A ribosyltransferase-isomerase OS=Rhizobium acidisoli O X=1538158 GN=queA PE=3 SV=1
MRVDLFDFDLPDERIALRPAEPRDSARLLVVNPHAESRPHAESVPHAESRPHAESAFSDHRVGDLPSFLRAGDALVFNDTKVIPAQLEGIRHRDGAGGQQVSATLHMRVGPSRWKAFAKPGKRIKEGDRIAFGHSGESCLLGSLDATVEEKGEAGEVTLAFDLSGPALDEAIAAVGHIPLPPYIAAKRPEDERDRADYQTIYAREEGAVAAPTAGLHFTPALFEALDRAGIERHFVTLHVGAGTFLPVKADDTADHKMHLESGTVSAETAARLNAVKARGGRIVCVGTTSLRLIESAAEESGEIRGWSGATGIFITPGYRFKAVDMLMTNFHLPRSTLFMLVSAFSGFETMHAAYKHAISTGYRFYSYGDASLLFRKDK

SEQ ID NO: 71272 - protein, 360 aa, Rhizobium aethiopicum
  misc_feature (1)..(360): tr|A0A1C3XWT1|A0A1C3XWT1_9RHIZ S-adenosylmethionine:tRN A ribosyltransferase-isomerase OS=Rhizobium aethiopicum OX=1138170 GN=queA PE=3 SV=1
MRVDLFDFDLPEERIALRPAEPRDSARLLVVDAKAASALSDHRVSDLPSFLHAGDALVFNDTKVIPAQLEGIRHRDGAGGQQVSATLHMRVGPSRWKAFAKPGKRIKEGDRIAFGHSGESCMIGSLDATVEEKGEAGEVTLAFDLSGPMLDEAIAAVGHIPLPPYIAAKRPEDERDRADYQTIYAREEGAVAAPTAGLHFTPGLFQGLDRAGIERHFVTLHVGAGTFLPVKADDTDDHKMHLESGYVSAEVAARLNTVRERGGRIVCVGTTSLRLIESAAGESGEIKPWAGATGIFITPGYRFKAVDMLMTNFHLPRSTLFMLVSAFAGFETMHAAYEHAISTGYRFYSYGDASLLFRKD

SEQ ID NO: 71273 - protein, 360 aa, Rhizobium album
  misc_feature (1)..(360): tr|A0A2U2DT10|A0A2U2DT10_9RHIZ S-adenosylmethionine:tRN A ribosyltransferase-isomerase OS=Rhizobium album OX=21 82425 GN=queA PE=3 SV=1
MRVDLFDFDLPEDNIALRPAEPRESARLLVVRPDAEPMLADHHVGDLPSFLRPGDALVFNDTKVIPAQLEGIRRREGAGGQQVSATLHMRVAPDRWKAFAKPGKRIKVGDRISFGHNGDVCLLGTLDAAVEEKGEGGEVTLLFDLSGPALDEAIAIAGHIPLPPYIAAKRPDDDQDRRDYQTIYAREEGAVAAPTAGLHFTPSLFETLDKAGIERHFVTLHVGAGTFLPVKADDTADHKMHQEIGTVDAATAARLNAVKASGGRIVCVGTTSLRLIESAAADDGTIRPWSGATGIFITPGYRFKAVDVLMTNFHLPRSTLFMLVSAFSGLETMRAAYAHAIETGYRFYSYGDASLLFRKD

SEQ ID NO: 71274 - protein, 360 aa, Rhizobium altiplani
  misc_feature (1)..(360): tr|A0A109JLG9|A0A109JLG9_9RHIZ S-adenosylmethionine:tRN A ribosyltransferase-isomerase OS=Rhizobium altiplani O X=1864509 GN=queA PE=3 SV=1
MRVDLFDFDLPDERIALRPAEPRDSARLLVVDPADEVQLSDHRVSDLLSFLRAGDALVFNDTKVIPAQLEGIRYREGAGGQQVSATLHMRTGTSRWKAFAKPGKRIKIGDRISFGHDGTSCLLGKLECTVEEKGEGGEVTLAFDLSGPMLDEAIHSVGHIPLPPYIAAKRAEDERDRADYQTIYAREEGAVAAPTAGLHFTPALFDAIDKAGVERHFVTLHVGAGTFLPVKADDTDDHKMHLESGYVSAETAASLNAVKARGGRIICVGTTSLRLIESAAQDNGEIRAWAGATGIFITPGYRFKAVDMLMTNFHLPRSTLFMLVSAFAGFETMHAAYQHAISTGYRFYSYGDSSLLFRKD

SEQ ID NO: 71275 - protein, 359 aa, Rhizobium anhuiense
  misc_feature (1)..(359): tr|A0A432NAP1|A0A432NAP1_9RHIZ S-adenosylmethionine:tRN A ribosyltransferase-isomerase OS=Rhizobium anhuiense O X=1184720 GN=queA PE=3 SV=1
MRVDLFDFDLPDERIALRPAEPRDSARLLVVDPNAENIRDYRVGDLPSFLQAGDALVFNDTKVIPAQLEGIRHREGAGGQQVSATLHMRIGANKWKAFAKPGKRIKEGDRIAFGHSGESCMIGSLDATVEEKGEAGEVTLAFDLSGPALDEAIASVGHIPLPPYIAAKRPEDERDRADYQTIYAREEGAVAAPTAGLHFTPALFEALDKAGIERHFVTLHVGAGTFLPVKADDTADHKMHLESGYVGAETAARLNAVKQRGGRIICVGTTSLRLIESATQDSGEIRAWSGATGIFITPGYRFKAVDMLMTNFHLPRSTLFMLVSAFSGLDTMRAAYDHAIQTGYRFYSYGDASLLFRKD

SEQ ID NO: 71276 - protein, 339 aa, Rhizobium azibense
  misc_feature (1)..(339): tr|A0A4R8A740|A0A4R8A740_9RHIZ S-adenosylmethionine:tRN A ribosyltransferase-isomerase OS=Rhizobium azibense OX =1136135 GN=EV128_11756 PE=3 SV=1
MTADDRSDQRSARLFVVEADGIMRDLPRTRLATLFDAGDLVVANDAATLPASLHGTHVPSGKLIEIRLAGWRLLHDPRRFVALAFGSGDHRTRTEDRLPPPALSTGDHLRLGPLEAVVERVLYHPLLFELCFQGSRAAVLAGLAQHGRPIQYAHVPEPLALWDVWTKIAALPFAFEAPSAGFALDWRTLQTWRQRDVGFATLTHAAGVSSTGDPALDSRLPLDEPYRIPERTAAHVAQVKLRGSRIIAIGTSVVRALEAAADPDGSVRVGNGIATGRIARGTPLRVVDAIITGVHQPGESHFELLRAFADDGLLAKVSAALTACGYRAHEFGDSVLLNC

SEQ ID NO: 71277 - protein, 361 aa, Rhizobium azibense
  misc_feature (1)..(361): tr|A0A4V2VE26|A0A4V2VE26_9RHIZ S-adenosylmethionine:tRN A ribosyltransferase-isomerase OS=Rhizobium azibense OX =1136135 GN=queA PE=3 SV=1
MRVDLFDFDLPDERIALRPAEPRDSARLLVVDPHAQPALGDYVVSELPSFLRAGDALVFNDTKVIPAQLEGVRHRAGAGGQRVSATLHMRVGASRWKAFSKPGKRIKIGDRIAFGHDGESCLLGQLDCTVEEKGEGGEVTLAFDLSGPALDEAIASVGHIPLPPYIAAKRSDDERDRTDYQTIYAREEGAVAAPTAGLHFTPRLFEAIDKAGVERHFVTLHVGAGTFLPVKADDTDDHKMHLESGFVSAETAARLNAVKARGGRIICVGTTSLRLIESATADDGGIRAWAGATGIFITPGYRFKAVDILMTNFHLPRSTLFMLVSAFAGFETMQSAYKHAISTGYRFYSYGDASLLFRKDR

SEQ ID NO: 71278 - protein, 360 aa, Rhizobium esperanzae
  misc_feature (1)..(360): tr|A0A246DW45|A0A246DW45_9RHIZ S-adenosylmethionine:tRN A ribosyltransferase-isomerase OS=Rhizobium esperanzae OX=1967781 GN=queA PE=3 SV=1
MRVDLFDFDLPDERIALRPAEPRDSARLLVVDPNAESALSDHHVCDLPSFLRAGDALVFNDTKVIPAQLEGIRHRDGAGGQQVSATLHMRIGPSRWKAFAKPGKRIKEGDRIAFGHSGESCMIGSLDATVEEKGEAGEVTLAFDLSGPVLDEAIAAVGHIPLPPYIAAKRPEDERDRADYQTIYAREEGAVAAPTAGLHFTPALFEALDRAGIERHFVTLHVGAGTFLPVKADDTDDHKMHLESGYVSAETAARLNAVKQRGGRIVCVGTTSLRLIESAAEESGEIKPWAGATGIFITPGYRFKVVDMLMTNFHLPRSTLFMLVSAFAGFETMHAAYEHAISTGYRFYSYGDASLLFRKD

SEQ ID NO: 71279 - protein, 348 aa, Rhizobium etli
  misc_feature (1)..(348): tr|S5SYX3|S5SYX3_RHIET S-adenosylmethionine:tRNA ribosy ltransferase-isomerase OS=Rhizobium etli bv. mimosae st r. Mim1 OX=1328306 GN=REMIM1_PF01004 PE=3 SV=1
MIAADRLDRQSARLLVVEADGTMRDLPRANLGTLFGPGDLVVANDAATLPASLQGTHLQCGKTIEIRLAGWLSPSAPVRFLAIVFGSGDHRTRTEDRLPPPALSSGDRLQFGPLEAVVKRVLDHPRLVELSFQGTRAAMFAGLAQHGRPIQYAHVPEPLALWDVWTRIAARPVAFEAPSASFALDWRTLQVWRRREIGFATLTHAAGISSTGDPALDSRLPFDEPYHIPECTVAQVARAQLRGSRIIAIGTSVVRALEAAANPDGSVRAGDGIATGRIAQGTPLRVVDAVLTGVHQPGESHFELLRAFADDGLLASASTALTACGYRAHEFGDSMLLNRQPRLYWREP

SEQ ID NO: 71280 - protein, 373 aa, Rhizobium etli
  misc_feature (1)..(373): sp|B3PZR1|QUEA_RHIE6 S-adenosylmethionine:tRNA ribosylt ransferase-isomerase OS=Rhizobium etli (strain CIAT 652 ) OX=491916 GN=queA PE=3 SV=1
MRVDLFDFDLPDERIALRPAEPRDSARLLVVNPHAESGPHAESVPHAESALSDHHVYDLPSFLRAGDALVFNDTKVIPAQLEGIRHRDGAGGQQVSATLHMRIGPSRWKAFAKPGKRIKEGDRIAFGHSGESCFLGALDATVEEKGEAGEVTLAFDLTGPALDEAIAAVGHIPLPPYIAAKRPEDERDRADYQTIYAREEGAVAAPTAGLHFTPDLFAALDKAGIERHFVTLHVGAGTFLPVKADDTDDHKMHLESGYVSAEIAARLNAVKARGGRIVCVGTTSLRLIESAAGEDGKIKPWAGATGIFITPGYRFKAVDMLMTNFHLPRSTLFMLVSAFSGFETMRAAYEHAISTGYRFYSYGDASLLFRKDK

SEQ ID NO: 71281 - protein, 360 aa, Rhizobium favelukesii
  misc_feature (1)..(360): tr|W6RHA1|W6RHA1_9RHIZ S-adenosylmethionine:tRNA ribosy ltransferase-isomerase OS=Rhizobium favelukesii OX=3488 24 GN=queA PE=3 SV=1
MRVDLFDFDLPDERIALRPADPRDSARLLVVDPAGEVQLSDHRISDLPDFLRAGDALVFNDTKVIPAQLEGVRHREGAGGQQVSATLHMRIGAGRWKAFAKPGKRIKIGDRISFGHDGNSCLLGKLECTVEEKSEGGEVTLAFDLSGPMLDEAIHSVGHIPLPPYIAAKRAEDERDRVDYQTIYAREEGAVAAPTAGLHFTPALFEAIDKSGVERHFVTLHVGAGTFLPVKADDTDEHKMHLESGYVSAETAASLNAVRARGGRIVCVGTTSLRLIESAAQENGEIRAWAGATGIFITPGYRFKAVDMLMTNFHLPRSTLFMLVSAFAGFETMHAAYRHAISTGYRFYSYGDSSLLFRKD

SEQ ID NO: 71282 - protein, 374 aa, Rhizobium favelukesii
  misc_feature (1)..(374): tr|W6RJ93|W6RJ93_9RHIZ S-adenosylmethionine:tRNA ribosy ltransferase-isomerase OS=Rhizobium favelukesii OX=3488 24 GN=LPU83_pLPU83c_0357 PE=3 SV=1
MIADLSDRRSARLFVVETGGTMRDLPRTRLATLFNPSDLVVANDAATLPASLHGTHIPSGEAIEIRLAGWLTLSDPTRFVAIAFGFGDHRTPTEDRLPPPALSTGDRLRLGPLDAVVERLLDHPRLLELRFPGNPAAVLAGMAQHGRPIQYAHVPEPLALWDVWTKIAARPLAFEAPSASFALDWRTLQTWRRRDVGFAALTHAAGVSSTGDPALDLRLPFDEPYHIPERTAERVARAKLCGSRIIAIGTSVVRALEAAANPDGSVRAGNGIATGRIAQGTSLRVADAVLTGVHQPGESHFELLRAFADDALLAETFAALTASGYRAHEFGDSVLYNCQPLQLSAGTEGEPLITRLGYDVGKIDGVPGVLDVKI

SEQ ID NO: 71283 - protein, 361 aa, Rhizobium fredii
  misc_feature (1)..(361): tr|A0A2L0H516|A0A2L0H516_RHIFR S-adenosylmethionine:tRN A ribosyltransferase-isomerase OS=Rhizobium fredii OX=3 80 GN=queA PE=3 SV=1
MRVDLFDFDLPETSIALRPASPRDSARMLVVRPEAEPVLSDHGVLDLPAFLRPGDALVFNDTKVIPAQLEGIRQRGEDVATQVSLTLHMRVGPDRWKAFARPARRLKPGDRIGFGHGGTACLLGSLDATVEEKGEAGEVTLRFDLSGPVLDEAIMSVGHIPLPPYIASKRPEDARDRADYQTVYAREEGAVAAPTAGLHFTDRLFARLDEAGIERHFVTLHVGAGTFLPVKAGDTDDHVMHEEIGHVAAATAERLNAVRARGGRIVCVGTTSLRLIESAATEEGQIRPWSGPTGIFITPGYRFRAADMLMTNFHLPKSTLFMLVSAFAGLDTMRAAYVHAIAAGYRFYSYGDASLLFRKDQ

SEQ ID NO: 71284 - protein, 366 aa, Rhizobium fredii
  misc_feature (1)..(366): tr|G9A6U6|G9A6U6_RHIFH S-adenosylmethionine:tRNA ribosy ltransferase-isomerase OS=Rhizobium fredii (strain HH10 3) OX=1117943 GN=queA PE=3 SV=1
MFGPSMRVDLFDFDLPETSIALRPASPRDSARMLVVRPEAEPVLSDHGVLDLPSFLRPGDALVFNDTKVIPAQLEGIRRRGEDVATQVSLTLHMRVAPDRWKAFARPARRLKPGDRISFGHGGNACLLGSLDATVEDKGEAGEVTLRFDLSGPVLDEAIMSVGHIPLPPYIASKRPEDSRDRTDYQTVYAREEGAVAAPTAGLHFTDRLFAELDEAGIERHFVTLHVGAGTFLPVKADDTDNHVMHEEIGHVDAATAERLNAVRARGGRIVCVGTTSLRLIESAATQDGKIHPWSGPTGIFITPGYRFRAVDMLMTNFHLPKSTLFMLVSAFAGLETMRGAYAHAIAAGYRFYSYGDASLLFRKDQ

SEQ ID NO: 71285 - protein, 361 aa, Rhizobium freirei
  misc_feature (1)..(361): tr|N6V262|N6V262_9RHIZ S-adenosylmethionine:tRNA ribosy ltransferase-isomerase OS=Rhizobium freirei PRF 81 OX=3 63754 GN=queA PE=3 SV=1
MRVDLFDFDLPDERIALRPAEPRDSARLLVVDPNSGANTLSDHQVRDLTSFLRPGDAMVFNDTKVIPAQLEGIRHREGAPGQQVSATLHMRAAPDRWKAFAKPGKRIKIGDRIQFGHGENVCALGTLDATVEEKGEGGEITLRFDLSGPALDEAIAAVGHIPLPPYIAAKRPEDERDRADYQTIYAREEGAVAAPTAGLHFTPSLFAALDALGIERHFVTLHVGAGTFLPVKADDTDDHKMHFEIGYVDAATAAKLNAVKARGGRIVCVGTTSLRLIESASAEDGTIKPWQGATGIFITPGYRFKAVDMLMTNFHLPRSTLFMLVSAFAGLDTMRAAYTHAIETGYRFYSYGDGSLLYRKD

SEQ ID NO: 71286 - protein, 361 aa, Rhizobium galegae
  misc_feature (1)..(361): tr|A0A5J5KND9|A0A5J5KND9_RHIGA tRNA preQ1(34) S-adenosy lmethionine ribosyltransferase-isomerase QueA OS=Rhizob ium galegae OX=399 GN=queA PE=4 SV=1
MRVDLFDFDLPEENIALRPASPRDSARLLVVRPEGEPVLADHRVSDLPGFLKPGDALVFNDTKVIPAQLEGIRHREGAGGQQVSATLHMRVAPDRWKAFAKPGKRIKIGDRIEFGHGGNACLIGSLAATVEDKGEGGEVTLRFDLSGPALDEAIMSVGHIPLPPYIAAKRPEDAQDQKDYQTIYAREEGAVAAPTAGLHFTSELFSSLEAAGVERHFVTLHVGAGTFLPVKADDTAEHKMHQEIGHVSAETAARLNAVKHAGGRIVCVGTTSLRLIESATADDGTINPWSGATGIFITPGYRFKAVDMLMTNFHLPRSTLFMLVSAFCGLETMRAAYAHAIETGYRFYSYGDSSLLFRDNR

SEQ ID NO: 71287 - protein, 339 aa, Rhizobium gallicum
  misc_feature (1)..(339): tr|A0A0B4XCE9|A0A0B4XCE9_9RHIZ S-adenosylmethionine:tRN A ribosyltransferase-isomerase OS=Rhizobium gallicum bv . gallicum R602 OX=1418105 GN=RGR602_PC00217 PE=3 SV=1
MTADDRSDQRSARLFVVEADGIMRDLPRTRLATLFDAGDLVVANDAATLPASLHGTHVPSGKLIEIRLAGWRLLHDPRRFVALAFGSGDHRTRTEDRLPPPSLSTGDHLRLGPLEAVVERVLYHPLLFELCFQGSRAAVLAGLAQHGRPIQYAHVPEPLALWDVWTKIAALPFAFEAPSAGFALDWRTLQTWRQRDVGFATLTHAAGVSSTGDPALDSRLPLDEPYRIPERTAAHVAQVKLRGSRIIAIGTSVVRALEAAADPDGSVRVGNGIATGRIARGTPLRVVDAIITGVHQPGESHFELLRAFADDGLLAKVSAALTACGYRAHEFGDSVLLNC

SEQ ID NO: 71288 - protein, 361 aa, Rhizobium gallicum
  misc_feature (1)..(361): tr|A0A0B4X3C8|A0A0B4X3C8_9RHIZ S-adenosylmethionine:tRN A ribosyltransferase-isomerase OS=Rhizobium gallicum bv . gallicum R602 OX=1418105 GN=queA PE=3 SV=1
MRVDLFDFDLPDERIALRPAEPRDSARLLVIDPHAEPALGDHAVGELPSFLRAGDALVFNDTKVIPAQLEGVRHREGAGGQQVSATLHMRVGASRWKAFSKPGKRIKVGDRIAFGHCGESCFLGQLDCTVEEKGEGGEVTLAFDLSGPALDEAIASVGHIPLPPYIAAKRPDDERDRTDYQTIYAREEGAVAAPTAGLHFTPRLFEAIDKAGVERHFVTLHVGAGTFLPVKADDTNDHKMHLESGYVSAETAAKLNAVKARGGRIICVGTTSLRLIESATADDGGIRAWAGATGIFITPGYRFKAVDILMTNFHLPRSTLFMLVSAFAGFETMQAAYKHAISTGYRFYSYGDASLLFRKDR

SEQ ID NO: 71289 - protein, 360 aa, Rhizobium grahamii
  misc_feature (1)..(360): tr|A0A370KS21|A0A370KS21_9RHIZ S-adenosylmethionine:tRN A ribosyltransferase-isomerase OS=Rhizobium grahamii OX =1120045 GN=queA PE=3 SV=1
MRVDLFDFDLPDERIALRPAEPRDSARLLVIDPGGAVQLSDHRVSELPSFLRAGDALVFNDTKVIPAQLEGIRHREGAGGQQVSATLHMRIGASRWKAFAKPGKRIKIGDRISFGHDGGSCLLGKLECTVEEKGEGGEVTLAFDLSGPMLDEAIQSVGHIPLPPYIAAKRAEDERDRADYQTIYAREEGAVAAPTAGLHFTADLFEAIDKAGVERHFVTLHVGAGTFLPVKADDTDDHKMHLESGCVSAETAASLNAVKARGGRIICVGTTSLRLIESAAQENGEIRAWAGATGIFITPGYRFKAVDMLMTNFHLPRSTLFMLVSAFAGFETMRAAYSHAISTGYRFYSYGDSSLLFRKD

SEQ ID NO: 71290 - protein, 360 aa, Rhizobium grahamii
  misc_feature (1)..(360): tr|S3I0C4|S3I0C4_9RHIZ S-adenosylmethionine:tRNA ribosy ltransferase-isomerase OS=Rhizobium grahamii CCGE 502 O X=990285 GN=queA PE=3 SV=1
MRVDLFDFDLPDERIALRPAEPRDSARLLVVDPGGEVQLSDHRVSELPSFLRAGDALVFNDTKVIPAQLEGIRHREGAGGQQVSATLHMRVGASRWKAFAKPGKRIKIGDRISFGHDGGSCLLGKLECTVEEKGEGGEVTLAFDLSGPMLDEAIHSVGHIPLPPYIAAKRAEDERDRADYQTIYAREEGAVAAPTAGLHFTADLFEAIDKAGVERHFVTLHVGAGTFLPVKADDTDDHKMHLESGYVSAETAASLNAVKARGGRIICVGTTSLRLIESAAQENGEIRAWAGATGIFITPGYRFKAVDMLMTNFHLPRSTLFMLVSAFAGFETMRAAYSHAISTGYRFYSYGDSSLLFRKD

SEQ ID NO: 71291 - protein, 361 aa, Rhizobium hainanense
  misc_feature (1)..(361): tr|A0A1C3UPC0|A0A1C3UPC0_9RHIZ S-adenosylmethionine:tRN A ribosyltransferase-isomerase OS=Rhizobium hainanense OX=52131 GN=queA PE=3 SV=1
MRVDLFDFDLPDERIALRPAEPRDSARLLVVDPNNGANTLSDHQVRDLPSFLRPGDAIVFNDTKVIPAQLEGIRHREGAPGQHVSATLHMRAAPDRWKAFAKPGKRIKIGDRIQFGHGENVCALGSLDATVEEKGEGGEITLRFDLSGPALDEAIASVGHIPLPPYIAAKRPEDDRDRADYQTIYAREEGAVAAPTAGLHFTPSLFAALDALGVERHFVTLHVGAGTFLPVKADDTDDHKMHFEIGHVDAATAEKLNAVKARGGRIVCVGTTSLRLIESAAADDGTIKPWQGATGIFITPGYRFKAVDMLMTNFHLPRSTLFMLVSAFAGLDTMRAAYTHAIETGYRFYSYGDGSLLHRKD

SEQ ID NO: 71292 - protein, 361 aa, Rhizobium hidalgonense
  misc_feature (1)..(361): tr|A0A2A6KI17|A0A2A6KI17_9RHIZ S-adenosylmethionine:tRN A ribosyltransferase-isomerase OS=Rhizobium hidalgonens e OX=1538159 GN=queA PE=3 SV=1
MRVDLFDFDLPDERIALRPAEPRDSARLLVVDPNAGSVLSDHRVSDLASFLRAGDALVFNDTKVIPAQLEGIRHRDGAGGQQVSATLHMRVGPSRWKAFAKPGKRIKEGDRISFGHSGESCFLGSLDATVEEKGEAGEVTLAFDLSGPALDEAIAAVGHIPLPPYIAAKRPEDERDRADYQTIYAREDGAVAAPTAGLHFTPGLFEALDRAGIERDFVTLHVGAGTFLPVKADDTADHKMHLETGTVSAEAAARLNAVKARGGRIICVGTTSLRLIESAAEESGEIKPWAGATGIFITPGYRFKAVDMLMTNFHLPRSTLFMLVSAFSGFETMHAAYNHAISTGYRFYSYGDASLLFRKDT

SEQ ID NO: 71293 - protein, 364 aa, Rhizobium ipomoeae
  misc_feature (1)..(364): tr|A0A4S8PAZ4|A0A4S8PAZ4_9RHIZ S-adenosylmethionine:tRN A ribosyltransferase-isomerase OS=Rhizobium ipomoeae OX =1210932 GN=queA PE=3 SV=1
MRVDLFDFDLPDENIALRPASPRDHARFLVVRPEADPILGDHHVYDLPSFLKPGDALVFNDTKVIPAQLEGIRHREGAEEIAVSCTLHMRVGASRWKAFAKPGKRIKQGDRIDFAMGQGEGAACLMGSLVATVAEKGEAGEIELAFDLSGPDLDQVIANVGHIPLPPYIAAKRPEDGQDRVDYQTIYAREEGAVAAPTAGLHFTPDLFAALDAAGIERHFLTLHVGAGTFLPVKADDTAEHKMHEEIGYISPSTAAALNAVRARGNRIVAVGTTSLRLLESAAADDGHIPAWSGATDIFITPGYRFKAVDMLMTNFHLPKSTLFMLVSAFAGLDTMRAAYAHAIETGYRFYSYGDSSLLFRKDD

SEQ ID NO: 71294 - protein, 361 aa, Rhizobium jaguaris
  misc_feature (1)..(361): tr|A0A387FTN3|A0A387FTN3_9RHIZ S-adenosylmethionine:tRN A ribosyltransferase-isomerase OS=Rhizobium jaguaris OX =1312183 GN=queA PE=3 SV=1
MRVDLFDFDLPDERIALRPAEPRDSARLLVVDPNNSEATLRDYRVRDLPSFLRPGDAVVFNDTKVIPAQLEGIRHREGAPGQQVSATLHMRAAPDRWKAFAKPGKRIKIGDRIQFGHGENVCILGALDAVVEEKGEGGEITLRFDLSGPALDEAIAAVGHIPLPPYIAAKRPEDERDRADYQTIYAREEGAVAAPTAGLHFTPSLFAALDAMDVERHFVTLHVGAGTFLPVKADDTEDHKMHFEIGYVDAMTATKLNTVKARGGRIVCVGTTSLRLIESAAGNDGTIKPWSGATGIFITPGYRFKAVDLLMTNFHLPRSTLFMLVSAFAGLDTMRAAYTHAVETGYRFYSYGDGSLLYRKD

SEQ ID NO: 71295 - protein, 350 aa, Rhizobium jaguaris
  misc_feature (1)..(350): tr|A0A387G7E5|A0A387G7E5_9RHIZ S-adenosylmethionine:tRN A ribosyltransferase-isomerase OS=Rhizobium jaguaris OX =1312183 GN=CCGE525_32705 PE=3 SV=1
MIAADHSNPHSARLFVIEADGTMRDLPRGGLGTLFDPGDLVVANDAATLPASLHGTHLPSDQAIEIRLAGWVSRSDPARFVAIAFGPGDHRTRTEDRLPPPPLSAGDRLRLGPLEAAIERLRGHPRLVELRFLNNHAAVLAGLARHGRPIQYAHVPEPVALWDVWTKIAASPFAFEAPSAGFALDWRTLQAWRRRAIGFTTLTHAAGVSSTGDPTLDLRLPFDEPYRIPEHTAAQVARAKLRGSRIIAIGTSVVRALEAAANPDGSVRAGDGIATGRIARGMPVRVVDSILTGIHQPGESHFELLRAFADDARLARTSASLTAYGYRAHEFGDSMLLNRQPLLLSTGRGA

SEQ ID NO: 71296 - protein, 361 aa, Rhizobium laguerreae
  misc_feature (1)..(361): tr|A0A1S9G7L7|A0A1S9G7L7_9RHIZ S-adenosylmethionine:tRN A ribosyltransferase-isomerase OS=Rhizobium laguerreae OX=1076926 GN=queA PE=3 SV=1
MRVDLFDFDLPDERIALRPAEPRDSARLLVIDPNAENSLSDHRVGDLTSFLRPGDALVFNDTKVIPAQLEGIRHRDGAGGQQVSATLHMRTGPSRWKAFAKPGKRIKQGDRISFGHSGESCFLGSLDATVGEKGEAGEVTLLFDLSGPALDEAIAAVGHIPLPPYIAAKRPEDERDRADYQTIYAREEGAVAAPTAGLHFTPGLFEALDRAGIERHFVTLHVGAGTFLPVKADDTADHKMHLESGYVSAEIAARLNAVRERGGRIICVGTTSLRLIESAAAESGEIMPWAGATGIFITPGYRFKAVDMLMTNFHLPRSTLFMLVSAFAGLETMHAAYQHAISTGYRFYSYGDASLLFRKDR

SEQ ID NO: 71297 - protein, 361 aa, Rhizobium laguerreae
  misc_feature (1)..(361): tr|A0A4R3R4L1|A0A4R3R4L1_9RHIZ S-adenosylmethionine:tRN A ribosyltransferase-isomerase OS=Rhizobium laguerreae OX=1076926 GN=queA PE=3 SV=1
MRVDLFDFDLPYERIALRPAEPRDSACLLVIDPNAENSLSDHRVGDLTSFLRPGDALVFNDTKVIPAQLEGIRHRDGAGGQQVSATLHMRTGPSRWKAFAKPGKRIKQGDRISFGHSGESCFLGSLDATVEEKGEAGEVTLLFDLSGPALDEAIAAVGHIPLPPYIAAKRPEDERDRADYQTIYAREEGAVAAPTAGLHFTPGLFEALDRAGIERHFVTLHVGAGTFLPVKADDTADHKMHLESGYVSAEIAARLNAVRERGGRIICVGTTSLRLIESAAAESGEIMPWAGATGIFITPGYRFKAVDMLMTNFHLPRSTLFMLVSAFAGLETMHAAYQHAISTGYRFYSYGDASLLFRKDR

SEQ ID NO: 71298 - protein, 361 aa, Rhizobium leguminosarum
  misc_feature (1)..(361): tr|A0A4Q8XYP5|A0A4Q8XYP5_RHILE S-adenosylmethionine:tRN A ribosyltransferase-isomerase OS=Rhizobium leguminosar um OX=384 GN=queA PE=3 SV=1
MRVDLFDFDLPDERIALRPAEPRDSARLLVVDPNAENSLSDHRVGDLTSFLRAGDALVFNDTKVIPAQLEGIRHRDGAGGQQVSATLHMRTGPSRWKAFAKPGKRIKEGDRIAFGHSGESCSLGSLDATVEHKGEAGEVTLLFDLSGPALDEAIAAVGHIPLPPYIAAKRPEDERDRTDYQTIYAREEGAVAAPTAGLHFTPALFEALDKAGIERHFVTLHVGAGTFLPVKADDTADHKMHLESGYVSAEIAARLNAVRERGGRIVCVGTTSLRLIESAAAESGEIMPWAGATGIFITPGYRFKAVDMLMTNFHLPRSTLFMLVSAFAGLETMHAAYKHAISTGYRFYSYGDASLLFRKDK

SEQ ID NO: 71299 - protein, 379 aa, Rhizobium leguminosarum; identical to SEQ ID NO: 71271
  misc_feature (1)..(379): sp|B5ZPR8|QUEA_RHILW S-adenosylmethionine:tRNA ribosylt ransferase-isomerase OS=Rhizobium leguminosarum bv. tri folii (strain WSM2304) OX=395492 GN=queA PE=3 SV=1

SEQ ID NO: 71300 - protein, 361 aa, Rhizobium loessense
  misc_feature (1)..(361): tr|A0A1G4T345|A0A1G4T345_9RHIZ S-adenosylmethionine:tRN A ribosyltransferase-isomerase OS=Rhizobium loessense O X=158890 GN=queA PE=3 SV=1
MRVDLFDFDLPDERIALRPAEPRDSARLLVIDPHAQPVLGDHAVSDLPSFLRAGDALVFNDTKVIPAQLEGVRHREGAGAQQVSATLHMRVGASRWKAFSKPGKRIKIGDRIAFGHDGESCFLGQLDCTVEEKGEGGEVTLAFDLSGPALDEAIASVGHIPLPPYIAAKRPDDVRDRTDYQTIYAREEGAVAAPTAGLHFTPRLFEAIDKAGVERHFVTLHVGAGTFLPVKADDTNDHKMHLESGYVSAETAAKLNAVKARGGRIICVGTTSLRLIESATADDGRIRAWAGATGIFITPGYRFKTVDILMTNFHLPRSTLFMLVSAFAGFETMQVAYKHAISTGYRFYSYGDASLLFRKDR

SEQ ID NO: 71301 - protein, 362 aa, Rhizobium loti
  misc_feature (1)..(362): tr|A0A1B4YEF3|A0A1B4YEF3_RHILI S-adenosylmethionine:tRN A ribosyltransferase-isomerase OS=Rhizobium loti OX=381 GN=queA PE=3 SV=1
MRVDLFDFDLPEERIALRPAEPRDSAKMLVVKPGEALDDRRVGDLPSLLRAGDVLVFNDTKVIPAQLKGIRRRGEAQAQVEATLHMRVAPDRWLAFMRPGKRIAAGDRIHFGHDGNSCFLGQLDATVIEKGEGGEALLGFDLSGPFLDEALHAVGHIPLPPYIASKRDDDERDRADYQTIYAREEGAVAAPTAGLHFTPELFAALDAKGVERHFVTLHVGAGTFLPVKADDTADHKMHAETGSVGRETADALNAAKARGGRIIAVGTTSLRLLESAAREDGTVPAWSGPTDIFITPGYRFRTADMLMTNFHLPRSTLFMLVSAFSGLGMMRAAYAHAIANRYRFYSYGDASLLYRAEISDGR

SEQ ID NO: 71302 - protein, 360 aa, Rhizobium loti
  misc_feature (1)..(360): tr|A0A2T3E443|A0A2T3E443_RHILI S-adenosylmethionine:tRN A ribosyltransferase-isomerase OS=Rhizobium loti OX=381 GN=queA PE=3 SV=1
MRVDLFDFDLPENSIALRPASPRDSARMLVVRPDGAPVLEDRGVLDLPSFLRPGDALVFNDTKVIPAQLEGVRYRGEDISTPVSLTLHMRVAPSRWKAFARPARRLKPGDRISFGHGGNACLLGSLEAVVEEKGDAGEVTLRFDLSGPSLDEAIMAVGHIPLPPYIASKRADDEQDRTDYQTVYAREEGAVAAPTAGLHFTDRLFAKLDEGGIERYFVTLHVGAGTFLPVKADDTADHVMHEEIGHVDPVTAAKLNAVRERGGRIVCVGTTSLRLIESAAAEDGNIRPWSGATGIFITPGYRFRAVDMLMTNFHLPKSTLFMLVSAFAGLETMHAAYAHAIATGYRFYSYGDSSLLFRKD

SEQ ID NO: 71303 - protein, 361 aa, Rhizobium lusitanum
  misc_feature (1)..(361): tr|A0A1C3VHD8|A0A1C3VHD8_9RHIZ S-adenosylmethionine:tRN A ribosyltransferase-isomerase OS=Rhizobium lusitanum O X=293958 GN=queA PE=3 SV=1
MRVDLFDFDLPDERIALRPADPRDNARLLVVDPNDRANTLSDHLVRDLPSFLRPGDAVVFNDTRVIPAQLEGIRHREGAPGQQVSATLHMRSAPDRWKAFARPGKRIKIGDRIQFGHGETVCSLGTLDATVEDKGEGGEITLRFDLSGPALDEAIATVGHIPLPPYIAAKRAEDERDRADYQTIYAREEGAVAAPTAGLHFTPALFAALDAMGVERHFVTLHVGAGTFLPVKADDTDDHKMHFEIGYVDAGTAVKLNAVKARGGRIICVGTTSLRLIESAADDDGTIQPWQGATGIFITPGYRFKAVDMLMTNFHLPRSTLFMLVSAFAGLDTMRAAYTHAIETGYRFYSYGDGSLLYRKD

SEQ ID NO: 71304 - protein, 360 aa, Rhizobium meliloti
  misc_feature (1)..(360): tr|A0A222JR68|A0A222JR68_RHIML S-adenosylmethionine:tRN A ribosyltransferase-isomerase OS=Rhizobium meliloti OX =382 GN=queA PE=3 SV=1
MRVDLFDFDLPENSIALRPASPRDSARMLVVRPDGAPVLEDRGVLDLPSFLRPGDALVFNDTKVIPAQLEGVRYRGEDISTPVSLTLHMRVAPSRWKAFARPARRLKPGDRISFGHGGNACLLGSLEAVVEEKGDAGEVTLRFDLSGPSLDEAIMAVGHIPLPPYIASKRADDERDRTDYQTVYAREEGAVAAPTAGLHFTDRLFAKLDEGGIERYFVTLHVGAGTFLPVKADDTADHVMHEEIGHVDPVTAAKLNAVRERGGRIVCVGTTSLRLIESAAAEDGNIRPWSGATGIFITPGYRFRAVDMLMTNFHLPKSTLFMLVSAFAGLETMHAAYAHAIATGYRFYSYGDSSLLFRKD

SEQ ID NO: 71305 - protein, 360 aa, Rhizobium meliloti
  misc_feature (1)..(360): sp|Q92PY5|QUEA_RHIME S-adenosylmethionine:tRNA ribosylt ransferase-isomerase OS=Rhizobium meliloti (strain 1021 ) OX=266834 GN=queA PE=3 SV=1
MRVDLFDFDLPENSIALRPASPRDSARMLVVRPDGAPVLEDRGVLDLPSFLRPGDALVFNDTKVIPAQLEGVRYRGEDISTPVSLTLHMRVAPSRWKAFARPARRLKPGDRISFGHGGSACLLGSLEAVVEEKGDAGEVTLRFDLSGPSLDEAIMAVGHIPLPPYIASKRADDERDRTDYQTVYAREEGAVAAPTAGLHFTDRLFAKLDEGGIERYFVTLHVGAGTFLPVKADDTADHVMHEEIGHVDPVTAAKLNAVRERGGRIVCVGTTSLRLIESAAAEDGNIRPWSGATGIFITPGYRFRAVDMLMTNFHLPKSTLFMLVSAFAGLETMHAAYAHAIATGYRFYSYGDSSLLFRKD

SEQ ID NO: 71306 - protein, 347 aa, Rhizobium mesoamericanum
  misc_feature (1)..(347): tr|K0Q5G6|K0Q5G6_9RHIZ S-adenosylmethionine:tRNA ribosy ltransferase-isomerase OS=Rhizobium mesoamericanum STM3 625 OX=1211777 GN=BN77_p11183 PE=3 SV=1
MIAADRLDRHSARLLVIEADGSMRHLQRAKFETLFDPGDLVIANDAATLPASLHGTHLPSDKLIEIRLAGWLSLSDPARFVAIAFGSGDHHTRTEDRLPPPGLSVGDRLRLGPLEAMIERLLGHPRLLELRFLSNRAAVFAGLARHGRPIQYAHVAEPLPLWDVWTKIAAAPVAFEAPSASFALDWHTLQAWRRRAVGFSTLTHAAGVSSTGDPALDLRLPFDEPYYIPRHTAVEIARAKLRGGRIVAIGTSVVRALEAATDCDGNVSAGGGVATGRIGRGTRLRVVDAVLTGVHQPGESHFELLRAFAEDDRLARASATLTACRYRTHEFGDSVLLHRQPTLLSRE

SEQ ID NO: 71307 - protein, 360 aa, Rhizobium mesoamericanum
  misc_feature (1)..(360): tr|K0PP63|K0PP63_9RHIZ S-adenosylmethionine:tRNA ribosy ltransferase-isomerase OS=Rhizobium mesoamericanum STM3 625 OX=1211777 GN=queA PE=3 SV=1
MRVDLFDFDLPDERIALRPAEPRDSARLLVVDPAGAVQLSDYRVSDLPAFLRAGDALVFNDTKVIPAQLEGVRHRDGAGGQQVSATLHMRIGASRWKAFAKPGKRIKIGDRISFGHDGSSCLLGKLECTVEEKGEGGEVTLAFDLSGPILDEAIHSVGHIPLPPYIAAKRAEDERDRADYQTIYAREEGAVAAPTAGLHFTPALFEAIDKAGVERHFVTLHVGAGTFLPVKADDTEDHKMHLESGYVSAETAASLNAVRARGGRIICVGTTSLRLIESAAQENGEIRAWAGATGIFITPGYRFKTVDVLMTNFHLPRSTLFMLVSAFAGFETMQVAYKYAISTGYRFYSYGDSSLLFRKD

SEQ ID NO: 71308 - protein, 361 aa, Rhizobium miluonense
  misc_feature (1)..(361): tr|A0A1C3X0K5|A0A1C3X0K5_9RHIZ S-adenosylmethionine:tRN A ribosyltransferase-isomerase OS=Rhizobium miluonense OX=411945 GN=queA PE=3 SV=1
MRVDLFDFDLPDERIALRPAEPRDSARLLVVDPNNEANTLSDHQVRDLPSFLRPGDAMVFNDTRVIPAQLEGIRYREGAPGQQVSATLHMRVAPDRWKAFAKPGKRIKIGDRIQFGHGENVCALGTLDATVEDKGEGGEITLRFDLSGPALDEAIATVGHIPLPPYIAAKRSEDERDRADYQTIYAREEGAVAAPTAGLHFTPPLFAALDAMGIERHFVTLHVGAGTFLPVKSDDTDDHKMHFEIGYVDAATAAKLNAVKARGGRIVCVGTTSLRLIESAAADDGTIKPWQGATGIFITPGYRFKAVDMLMTNFHLPRSTLFMLVSAFAGLDTMRAAYTHAIETGYRFYSYGDGSLLYRKD

SEQ ID NO: 71309 - protein, 361 aa, Rhizobium mongolense
  misc_feature (1)..(361): tr|A0A559SNP0|A0A559SNP0_9RHIZ S-adenosylmethionine:tRN A ribosyltransferase-isomerase OS=Rhizobium mongolense USDA 1844 OX=1079460 GN=queA PE=3 SV=1
MRVDLFDFDLPDERIALRPAEPRDSARLLVIDPHAQPVLGDHAVSDLPSFLRAGDALVFNDTKVIPAQLEGIRHREGAGGQQVSATLHMRVGASRWKAFSKPGKRIKIGDRIAFGHDGESCFLGQLDCTVEEKGEGGEVTLAFDLSGPALDEAIAAVGHIPLPPYIAAKRPDDVRDRTDYQTIYAREEGAVAAPTAGLHFTPRLFEAIDKAGVERHFVTLHVGAGTFLPVKADDTDDHKMHLESGYVSAETAAKLNAVKARGGRIICVGTTSLRLIESATADDGRIRAWAGATGIFITPGYRFKTVDILMTNFHLPRSTLFMLVSAFAGFETMQAAYKHAISTGYRFYSYGDASLLFRKDR

SEQ ID NO: 71310 - protein, 361 aa, Rhizobium multihospitium
  misc_feature (1)..(361): tr|A0A1C3WM81|A0A1C3WM81_9RHIZ S-adenosylmethionine:tRN A ribosyltransferase-isomerase OS=Rhizobium multihospit ium OX=410764 GN=queA PE=3 SV=1
MRVDLFDFDLPDERIALRPAEPRDSARLLVVDPNGGANTLSDHQVRDLPSFLRPGDAVVFNDTKVIPAQLEGIRHREGAPGQQVSATLHMRTAPDRWKAFAKPGKRIKIGDRIQFGHGENVCALGSLDATVEEKGEGGEITLRFDLSGPALDEAIASVGHIPLPPYIAAKRPEDERDRADYQTIYAREEGAVAAPTAGLHFTPSLFAALDALGVERHFVTLHVGAGTFLPVKADDTDDHKMHFEIGYVDAVTAEKLNAVKARGGRIVCVGTTSLRLIESAASDDGTIQPWQGATGIFITPGYRFKAVDMLMTNFHLPRSTLFMLVSAFAGLDTMRAAYTHAIETGYRFYSYGDGSLLYRKD

SEQ ID NO: 71311 - protein, 362 aa, Rhizobium naphthalenivorans
  misc_feature (1)..(362): tr|A0A512HD11|A0A512HD11_9RHIZ S-adenosylmethionine:tRN A ribosyltransferase-isomerase OS=Rhizobium naphthaleni vorans OX=1118451 GN=queA PE=3 SV=1
MRVDQFDFDLPDENIALRPVSPRDHSRMLVVRPDGESVLEDAHVYDLPSFLQPGDALVFNDTKVIPAQLEGVRLRDGAERTPVSATLHMRVDGARWKAFARPGKRIKVGDRIEFGHSGNDACLLGTLRAVVEEKGEAGEVTLRFDFSGASLDEAIATVGHIPLPPYIASKRHEDEKDRSDYQTMYAREEGAVAAPTAGLHFTPDLFARLDAAGIERHFVTLHVGAGTFLPVKAEDTADHKMHHEIGHVSAKTAAALNAVKARGGRIVSVGTTSLRLLESATTDSGEVQAWSGSTDIFITPGYRFKAVDVLMTNFHLPKSTLFMLVSAFAGFETMQGAYAHAITDGYRFYSYGDSSLLFRKDT

SEQ ID NO: 71312 - protein, 360 aa, Rhizobium nepotum
  misc_feature (1)..(360): tr|A0A0D8KAR0|A0A0D8KAR0_9RHIZ S-adenosylmethionine:tRN A ribosyltransferase-isomerase OS=Rhizobium nepotum 39/ 7 OX=1368418 GN=queA PE=3 SV=1
MRVDLFDFDLPEENIALRPANPRDSARLLVVDPDANRMEDHRVFDLISFLKPGDALVFNDTRVIPAQLEGVRLREGAPETAVSATLHMRADQSRWKAFARPGKRIKAGDRIRFGYERDNACGLAHLEATVEEKGDEGEITLLFDVSGPVLDEAIASVGHIPLPPYIAAKRPEDAQDQIDYQTIYAREKGAVAAPTAGLHFTPALFEALDNAGIERHFVTLHVGAGTFLPVKSDDTDDHKMHFEIGHVSEETAAKLNAVKARGGRIVSVGTTSLRLIESATDENGVIHPWSGATGIFITPGYRFRAVDILMTNFHLPKSTLFMLVSAFCGLETMRDAYAHAIETGYRFYSYGDSSLLFRKN

SEQ ID NO: 71313 - protein, 355 aa, Rhizobium oryzae
  misc_feature (1)..(355): tr|A0A1Q9AWM4|A0A1Q9AWM4_9RHIZ S-adenosylmethionine:tRN A ribosyltransferase-isomerase OS=Rhizobium oryzae OX=4 64029 GN=queA PE=3 SV=1
MRVDLFDFDLPDAAIALRPAQPRDAARLLVVRPDATADEVLADHGVLDLPDFLEPGDALVFNDTKVIPAQLQGIRRRGPDVATEVDFTLHMRIGAGSWKAFARPAKRLKPGDQVTFGPDLTAEITEKGEAGEVTLAFDRSGPALDQVIMTVGHIPLPPYIAAKRPEDEKDRADYQTIYAREEGAVAAPTAGLHFTERLFAALEARGIERHFVTLHVGAGTFLPVKVEDTDAHLMHQEIGYVSTETAAALNAVKARGGRIVCVGTTSLRLIESAANDDGTLKPWSGATGIFITPGYRFRAVDLLMTNFHLPRSTLFMLVSAFCGLETMHRAYAHAIQTGYRFYSYGDTSLLFRKTS

SEQ ID NO: 71314 - protein, 380 aa, Rhizobium oryzae
  misc_feature (1)..(380): tr|A0A1X7GG09|A0A1X7GG09_9RHIZ S-adenosylmethionine:tRN A ribosyltransferase-isomerase OS=Rhizobium oryzae OX=4 64029 GN=queA PE=3 SV=1
MARSAFGGAGFAFLEVQARMRVDLFDFDLPEESIALRPASPRDSARLLVVRPDGEPVLSDHRVSELPGFLKSGDALVFNDTKVIPAQLEGIRHREGAGGQQVSATLHMRAAPDIWKAFARPGKRIKIGDRIEFGHGGNACLLGSLAATVEEKGEGGEVTLRFDLSGPALDEAIMAVGHIPLPPYIAAKRPEDDQDRKDYQTIYAREEGAVAAPTAGLHFTPELFAALDAAGIERHFVTLHVGAGTFLPVKADDTEDHKMHQEIGYVSAETAARLNAVRRRGGRIVSVGTTSLRLIESAAAEDGTIKPWSGATGIFITPGYRFKAVDMLMTNFHLPRSTLFMLVSAFSGLETMRSAYAHAIEAGYRFYSYGDSSLLFRTDK

SEQ ID NO: 71315 - protein, 352 aa, Rhizobium oryziradicis
  misc_feature (1)..(352): tr|A0A1Q8ZPF4|A0A1Q8ZPF4_9RHIZ S-adenosylmethionine:tRN A ribosyltransferase-isomerase OS=Rhizobium oryziradici s OX=1867956 GN=queA PE=3 SV=1
MRVDLFDFDLPEENIALRLASPRDHARFLAVRPNGQPMLEDRQVFDLPSFLKAGDALVFNDTKVIPAQLEGVRLREGAERTPVSCTLHMRVAANSWKAFARPGKRIKQGDSIDFNGLLATVAAKGDAGEIDLVFDASGPELDQAIASVGHIPLPPYIAAKRPEDGQDKQDYQTIYAREEGAVAAPTAGLHFTPALFDALDKAGIERHFVTLHVGAGTFLPVKADDTNDHKMHQEIGHVSKATADALNAVRARGGRIVSVGTTSLRLLESASGDDGQVLPWSGATGIFITPGYRFKAVDMLMTNFHLPKSTLFMLVSAFAGMETMRAAYAHAIETGYRFYSYGDSSLLFRKDD

SEQ ID NO: 71316 - protein, 373 aa, Rhizobium phaseoli
  misc_feature (1)..(373): tr|A0A0M3GV63|A0A0M3GV63_9RHIZ S-adenosylmethionine:tRN A ribosyltransferase-isomerase OS=Rhizobium phaseoli Ch 24-10 OX=1128399 GN=queA PE=3 SV=1
MRVDLFDFDLPDERIALRPAEPRDSARLLVVNPHAESGPHAESVPHAESALSDHHVYDLPSFLRAGDALVFNDTKVIPAQLEGIRHRDGAGGQQVSATLHMRIGPSRWKAFAKPGKRIKEGDRIAFGHSGESCFLGALDATVEEKGEAGEVTLAFDLTGPALDEAIAAVGHIPLPPYIAAKRPEDERDRADYQTIYAREEGAVAAPTAGLHFTPDLFAALDKAGIERHFVTLHVGAGTFLPVKADDTDDHKMHLESGYVSAEIAARLNAVKARGGRIVCVGTTSLRLIESAAGEDGKIKPWAGATGIFITPGYRFKAVDMLMTNFHLPRSTLFMLVSAFSGFDTMRAAYEHAISTGYRFYSYGDASLLFRKDK

SEQ ID NO: 71317 - protein, 373 aa, Rhizobium phaseoli
  misc_feature (1)..(373): tr|A0A2U3CZ41|A0A2U3CZ41_9RHIZ S-adenosylmethionine:tRN A ribosyltransferase-isomerase OS=Rhizobium phaseoli OX =396 GN=queA PE=3 SV=1
MRVDLFDFDLPDERIALRPAEPRDSARLLVVNPHAESGPHAESVPHAESALSDHHVYDLPSFLRAGDALVFNDTKVIPAQLEGIRHRDGAGGQQVSATLHMRIGPSRWKAFAKPGKRIKEGDRIAFGHSGESCFLGALDATVEEKGEAGEVTLAFDLTGPALDEAIAAVGHIPLPPYIAAKRPEDERDRADYQTIYAREEGAVAAPTAGLHFTPDLFAALDKAGIERHFVTLHVGAGTFLPVKADDTDDHKMHLESGYVSAEIAARLNAVKARGGRIVCVGTTSLRLIESAAGEDGKIKPWAGATGIFITPGYRFNAVDMLMTNFHLPRSTLFMLVSAFSGFETMHAAYEHAISTGYRFYSYGDASLLFRKDK

SEQ ID NO: 71318 - protein, 361 aa, Rhizobium pisi
  misc_feature (1)..(361): tr|A0A3R9GUN2|A0A3R9GUN2_9RHIZ S-adenosylmethionine:tRN A ribosyltransferase-isomerase OS=Rhizobium pisi OX=574 561 GN=queA PE=3 SV=1
MRVDLFDFDLPDERIALRPAEPRDSARLLVVDPNGQTMLTDHRASDLPSFLRAGDALVFNDTKVIPAQLEGIRHREGAGGQQMSATLHMRVGANKWKAFAKPGKRIKEGDRIAFGHSGESCMIGSLDATVEEKGEAGEVTLAFDLSGPALDEAIAAVGHIPLPPYIAAKRPEDERDRADYQTIYAREKGAVAAPTAGLHFTPALFEALDKAGIERHFVTLHVGAGTFLPVKADDTDDHKMHLESGYVSAETAARLNEVKRSGGRIVCVGTTSLRLIESAAGESGEIKPWASPTGIFITPGYRFKAVDILMTNFHLPRSTLFMLVCAFAGFETMHAAYKQAISTGYRFYSYGDASLLFRKEK

SEQ ID NO: 71319 - protein, 360 aa, Rhizobium pusense
  misc_feature (1)..(360): tr|A0A4U1K6W0|A0A4U1K6W0_9RHIZ S-adenosylmethionine:tRN A ribosyltransferase-isomerase OS=Rhizobium pusense OX= 648995 GN=queA PE=3 SV=1
MRVDLFDFDLPEENIALRPANPRDSARLLVVDPNENRMEDHRVFDLPSFLRAGDALVFNDTRVIPAQLEGVRLREGAPETAVSATLHMRADQSRWKAFARPGKRIKQGDRIRFGYERDNACGLAHLEATVEQKGEEGEITLLFDVSGPVLDEAIASVGHIPLPPYIAAKRPEDAQDQTDYQTIYAREKGAVAAPTAGLHFTPDLFAALDKAGIERHFVTLHVGAGTFLPVKADDTDDHKMHFEIGHVSQETADRLNAVKARGGRIVCVGTTSLRLIESAAAEDGIIHPWSDATGIFITPGYRFRAVDMLMTNFHLPKSTLFMLVSAFCGLETMRDAYKHAIETGYRFYSYGDSSLLFRKN

SEQ ID NO: 71320 - protein, 360 aa, Rhizobium pusense; identical to SEQ ID NO: 62996
  misc_feature (1)..(360): tr|A0A1L9CTQ2|A0A1L9CTQ2_9RHIZ S-adenosylmethionine:tRN A ribosyltransferase-isomerase OS=Rhizobium pusense OX= 648995 GN=queA PE=3 SV=1

SEQ ID NO: 71321 - protein, 360 aa, Rhizobium radiobacter
  misc_feature (1)..(360): tr|A0A5B1APH0|A0A5B1APH0_RHIRD S-adenosylmethionine:tRN A ribosyltransferase-isomerase OS=Rhizobium radiobacter OX=358 GN=queA PE=3 SV=1
MRVDLFDFDLPEENIALRPANPRDSARLLVVDPNENRMEDHRVFDLPSFLKPGDALVFNDTRVIPAQLEGVRLREGAPETAVSATLHMRADQSRWKAFARPGKRIKEGDRIRFGYERDNACGLAHLEATVEEKGEEGEITLLFDVSGPVLDEAIASVGHIPLPPYIAAKRPEDAQDQTDYQTIYAREKGAVAAPTAGLHFTPDLFEALDGVGVERHFVTLHVGAGTFLPVKSDDTDDHKMHFEIGHVSQETADRLNAVKARGGRIVCVGTTSLRLIESAADENGVIHPWSDATGIFITPGYRFRAVDILMTNFHLPKSTLFMLVSAFCGLETMRAAYAHAIETGYRFYSYGDSSLLFRKN

SEQ ID NO: 71322 - protein, 366 aa, Rhizobium radiobacter
  misc_feature (1)..(366): tr|A0A176XEF8|A0A176XEF8_RHIRD S-adenosylmethionine:tRN A ribosyltransferase-isomerase OS=Rhizobium radiobacter OX=358 GN=queA PE=3 SV=1
MRVDLFDFDLPEENIALRPANPRDSARLLVVDPNENRMEDHRVFDLPSFLRPGDALVFNDTRVIPAQLEGVRLREGAPETAVSATLHMRTDQSRWKAFARPGKRIKQGDRIRFGYGRDVVNSSSGACGLAHLEATVEEKGEDGEITLLFDVSGPVLDEAIASVGHIPLPPYIAAKRPEDVRDQTDYQTIYAREKGAVAAPTAGLHFTPELFAALDKAGIERHFVTLHVGAGTFLPVKADDTDDHKMHFEIGHVSQETADRLNAVKARGGRIVCVGTTSLRLIESAAAEDGTIQPWSDATGIFITPGYRFRAVDMLMTNFHLPKSTLFMLVSAFCGLETMRDAYKHAIETGYRFYSYGDSSLLFRKN

SEQ ID NO: 71323 - protein, 354 aa, Rhizobium rhizosphaerae
  misc_feature (1)..(354): tr|A0A1Q9AFU2|A0A1Q9AFU2_9RHIZ S-adenosylmethionine:tRN A ribosyltransferase-isomerase OS=Rhizobium rhizosphaer ae OX=1672749 GN=queA PE=3 SV=1
MRVDLFDFDLPESAIALRPAEPRDSARLLLVHPQETERELADHGVLELPDFLQPGDALVFNDTKVIPAQLQGIRRRGPDVATTVDFTLHMRVAPDRWKAFARPAKRLKSGDAVEFGPELAAEIVEKGDAGEVTLAFDRAGPALDQAIMATGHIPLPPYIAAKRPEDARDRADYQTIYAREEGAVAAPTAGLHFTDRLFAALDARGIERYFVTLHVGAGTFLPVKAEDTDHHVMHQEIGQVSAETAAKLNAVKARGGRIVCVGTTSLRLIESAAREDGQIAPWSGATGIFITPGYRFRAVDGLMTNFHLPRSTLFMLVSAFCGLETMHRAYAHAIASGYRFYSYGDTSLLFRKTS

SEQ ID NO: 71324 - protein, 364 aa, Rhizobium rosettiformans
  misc_feature (1)..(364): tr|A0A4S8PZB2|A0A4S8PZB2_9RHIZ S-adenosylmethionine:tRN A ribosyltransferase-isomerase OS=Rhizobium rosettiform ans W3 OX=538378 GN=queA PE=3 SV=1
MRVDLFDFDLPDENIALRPASPRDHARFLVVRPDADPVLEDHHVFDLPSFLRPGDALVFNDTKVIPAQLEGIRHREGAEEIAVSCTLHMRVGASRWKAFAKPGKRIKTGDRIDFGAGQGHSAACLMGSLAATVAEKGEAGEIELAFDLSGPDLDQAIATVGHIPLPPYIAAKRPEDEKDRADYQTIYAREEGAVAAPTAGLHFTSDLFAKLDAAGVERHFVTLHVGAGTFLPVKADDTAEHKMHEEIGYISPSTAAALNAVRARGNRIIAVGTTSLRLLESAAEETGHIPAWSGATGIFITPGYRFKAVDMLMTNFHLPKSTLFMLVSAFAGLDTMRNAYAHAIETGYRFYSYGDSSLLFRKDD

SEQ ID NO: 71325 - protein, 361 aa, Rhizobium selenitireducens
  misc_feature (1)..(361): tr|A0A376AFT7|A0A376AFT7_9RHIZ S-adenosylmethionine:tRN A ribosyltransferase-isomerase OS=Rhizobium selenitired ucens ATCC BAA-1503 OX=1336235 GN=queA PE=3 SV=1
MRVDQFDFDLPDENIALRPISPRDQARLLVVRPDGQPMLEDARVCDLPSFLSPGDALVFNDTKVIPAQLEGVRLRDGAERTPVSATLHMRVDASRWKAFARPGKRIKLGDRIEFGHSGNACLLGTLGAVVEEKGEAGEVTLRFDFSGAALDEAIATVGHIPLPPYIASKRDEDEKDRTDYQTMYAKEEGAVAAPTAGLHFTPDLFARLDAAGIERHFVTLHVGAGTFLPVKAEDTADHKMHHEIGQVSRATASALNAVRARGGRIVSVGTTSLRLLESATSEGGEIQPWSGATDIFITPGYRFRAVDVLMTNFHLPKSTLFMLVSAFAGLDTMRAAYAHAIADGYRFYSYGDASLLFRKDT

SEQ ID NO: 71326 - protein, 360 aa, Rhizobium smilacinae
  misc_feature (1)..(360): tr|A0A5C4XEQ9|A0A5C4XEQ9_9RHIZ S-adenosylmethionine:tRN A ribosyltransferase-isomerase OS=Rhizobium smilacinae OX=1395944 GN=queA PE=3 SV=1
MRVELFDFDLPEENIALRPANPRDSARFLVVRPEAEPVLADHRVFELPDFLKPGDALVFNDTKVIPAQLEGIRHREGAGGQQVSATLHMRTEQDVWKAFAKPGKRIKVGDRIEFGHGTETCLLGSLMATVEEKGEGGEVTLRFDLSGPALDEAIMSVGHIPLPPYIAAKRAEDEKDRQDYQTIYAREEGAVAAPTAGLHFTPDLFAKLDAASIERHFVTLHVGAGTFLPMKVDDTVDHKMHQEIGYVSAEIAERLNAVKARGGRIVCVGTTSLRLIESAASEDGKILPWSGPTGIFITPGYRFKAVDLLMTNFHLPKSTLFMLVSAFCGLETMRHAYAHAIQTGYRFYSYGDSSLLFRKD

SEQ ID NO: 71327 - protein, 361 aa, Rhizobium sophoriradicis
  misc_feature (1)..(361): tr|A0A2A5KVV7|A0A2A5KVV7_9RHIZ S-adenosylmethionine:tRN A ribosyltransferase-isomerase OS=Rhizobium sophoriradi cis OX=1535245 GN=queA PE=3 SV=1
MRVDLFDFDLPDERIALRPAEPRDSARLLVVDPHAESALSDHHVYDLPSFLRAGDALVFNDTKVIPAQLEGIRHRDGAGGQQVSATLHMRLGPSRWKAFAKPGKRIKEGDRIAFGHSGESCFLGSLDATVEEKGEAGEVTLAFDLTGPALDEAIAAVGHIPLPPYIAAKRPEDERDRADYQTIYAREEGAVAAPTAGLHFTPDLFAALDKAGIERHFVTLHVGAGTFLPVKADDTDDHKMHLESGYVSGEIAARLNAVKARGGRIVCVGTTSLRLIESAAGESGEIKPWAGATGIFITPGYRFKAVDMLMTNFHLPRSTLFMLVSAFSGFETMHAAYEHAISTGYRFYSYGDASLLFRKDQ

SEQ ID NO: 71328 - protein, 360 aa, Rhizobium sp.
  misc_feature (1)..(360): tr|A0A246U6I4|A0A246U6I4_9RHIZ S-adenosylmethionine:tRN A ribosyltransferase-isomerase OS=Rhizobium sp. R72 OX= 1764278 GN=queA PE=3 SV=1
MRVDLFDFDLPDERIALRPAEPRDSARLLVVDPAGEVQLSDHRVSDLPDFLRAGDALVFNDTKVIPAQLEGIRHREGAGGQQVSATLHMRVGASRWKAFAKPGKRIKIGDRISFGHDGSSCLLGKLECTVEEKGEGGEVTLAFDLSGPMLDEAIHSVGHIPLPPYIAAKRAEDERDRADYQTIYAREEGAVAAPTAGLHFTPDLFEAIDKAGVGRHFVTLHVGAGTFLPVKADDTDDHKMHLESGYVSAETAASLNAVKARGGRIICVGTTSLRLIESAAQENGEIRAWAGATGIFITPGYSFKAVDMLMTNFHLPRSTLFMLVSAFAGFETMHAAYQHAISTGYRFYSYGDSSLLFRKD

SEQ ID NO: 71329 - protein, 361 aa, Rhizobium sp.
  misc_feature (1)..(361): tr|A0A2S6BGM4|A0A2S6BGM4_9RHIZ S-adenosylmethionine:tRN A ribosyltransferase-isomerase OS=Rhizobium sp. KAs_5_2 2 OX=2067668 GN=queA PE=3 SV=1
MRVDQFDFDLPDENIALRPVSPRDQARLLVVRPDGTPVLEDARVCDLPSFLKPGDALVFNDTKVIPAQLEGVRLRDGAERTPVSATLHMRVDASRWKAFARPGKRIKLGDRIEFGHSGNACLLGTLGAVVEEKGEAGEVTLRFDFSGSALDEAIATVGHIPLPPYIASKRDEDEKDRTDYQTMYAREEGAVAAPTAGLHFTPDLFARLDAAGIERHFVTLHVGAGTFLPVKAEDTADHKMHHEIGQVSRATASALNAVRARGGRIVSVGTTSLRLLESATSEAGEIQPWSGATDIFITPGYRFRAVDVLMTNFHLPKSTLFMLVSAFAGLDTMRDAYAHAIADGYRFYSYGDASLLFRKDT

SEQ ID NO: 71330 - protein, 362 aa, Rhizobium straminoryzae
  misc_feature (1)..(362): tr|A0A549TGK9|A0A549TGK9_9RHIZ S-adenosylmethionine:tRN A ribosyltransferase-isomerase OS=Rhizobium straminoryz ae OX=1387186 GN=queA PE=3 SV=1
MRVDLFDFDLPEDNIALRPASPRDSARLLVVQPDGATVLQDHVVRDLPSFLRPGDALVFNDTKVIPAQLEGIRSREGTPDLHVSATLHMRVAPDAWKAFAKPGKRLKIGDRIRFGHSGETCALGTLDAVLEEKGEGGEVLLRFDLSGPALDEAIMAVGHIPLPPYIAAKRPEDEQDSRDYQTIYAREEGAVAAPTAGLHFTPDLFAALDAAGIERHFVTLHVGAGTFLPVKADDTTEHKMHSEIGHVSAATAEALNAVKARGGRIVSVGTTSLRLLESAAEADGTLKAWSGATDIFITPGYRFRAVDVLMTNFHLPRSTLFMLVSAFAGLDTMRAAYTHAISTGYRFYSYGDSSLLFRKTTR

SEQ ID NO: 71331 - protein, 361 aa, Rhizobium subbaraonis
  misc_feature (1)..(361): tr|A0A285U9U4|A0A285U9U4_9RHIZ S-adenosylmethionine:tRN A ribosyltransferase-isomerase OS=Rhizobium subbaraonis OX=908946 GN=queA PE=3 SV=1
MRIELFDFDLPEERIALRPVTPREAARLLVVRPDADQPFEDRHVGDLSEFLQPGDALVFNDTRVIPAQLEGIRHREGAGGQQVSATLHMRIAADRWKAFAKPGKRIKLGDRITFGHRGNACLLGSLEATVEEKGEGGEVTLRFDLSGPMLDEAIASVGHIPLPPYIASKRADDAEDRRDYQTIYAREEGAVAAPTAGLHFTDALFAKLDARGVERHFVTLHVGAGTFLPVKADDTDDHVMHQEIGYVSRETAAALNAVRARGGRIVCVGTTSLRLLESAVSEDGTVEPWSGPTGIFITPGYRFRVADVLMTNFHLPKSTLFMLVSAFCGLETMREAYAHAIETGYRFYSYGDASLLFRKKP

SEQ ID NO: 71332 - protein, 339 aa, Rhizobium sullae
  misc_feature (1)..(339): tr|A0A2N0DGB4|A0A2N0DGB4_RHISU S-adenosylmethionine:tRN A ribosyltransferase-isomerase OS=Rhizobium sullae OX=5 0338 GN=CWR43_04870 PE=3 SV=1
MIAVARPDRHSARLFVVAADGMMRDLPRTKLATLFDPGDLVVANDAATLPASLQGTHVPSGKAIEIRLAGWLSLPDPTRFVAIAFGLGDHRTRTEDRLPPPALSTGDRLWLGPLEAVVERLLDHPRLLELCFPGNRAAVLAGMAQHGRPIQYAHVPEPLALWDVWTKIAARPFAFEAPSAGFGLDWRTLQAWRRRAVGFAALTHAAGVSSTGDPALDSRLPFDEPYRISERTAAQVARAKLRGSRIIAIGTSVVRALEAAANPDGSVRAGNGIATGRIERGTPLRVVDAILTGVHQPGESHFELLRAFADDALLAKASAALTACRYRAHEFGDSVLLNC

SEQ ID NO: 71333 - protein, 361 aa, Rhizobium sullae
  misc_feature (1)..(361): tr|A0A2N0D0H1|A0A2N0D0H1_RHISU S-adenosylmethionine:tRN A ribosyltransferase-isomerase OS=Rhizobium sullae OX=5 0338 GN=queA PE=3 SV=1
MRVDLFDFDLPDERIALRPAEPRDSARLLVVDPHAETVLSDHSVSELPSFLRQGDALVFNDTKVIPAQLEGIRHREGAGGQQVSATLHMRVGASRWKAFAKPGKRIKIGDRIAFGHSGESCFLGQLDCTVEEKGEGGEVTLAFDLSGPGLDEAIASVGHIPLPPYIAAKRPDDERDRTDYQTIYARDEGAVAAPTAGLHFTPRLFEALDKAGVERHFVTLHVGAGTFLPVKADDTADHKMHLESGYVSAETAAKLNAVKARGGRIICVGTTSLRLIESAAADDGEIRAWADATGIFITPGYRFKAVDVLMTNFHLPRSTLFMLVSAFSGFETMQAAYKHAISNGYRFYSYGDASLLSRKDK

SEQ ID NO: 71334 - protein, 363 aa, Rhizobium taibaishanense
  misc_feature (1)..(363): tr|A0A1Q9AB18|A0A1Q9AB18_9RHIZ S-adenosylmethionine:tRN A ribosyltransferase-isomerase OS=Rhizobium taibaishane nse OX=887144 GN=queA PE=3 SV=1
MRVDLFDFDLPEENIALRPANPRDHARFLVVRPDEDPQLQEAHVYDLPSFLKAGDALVFNDTKVIPAQLEGFRLRDGAERTAVSCTLHMRVAANRWKAFARPGKRIKQGDRITFGGSDNNACMLGELVATVAEKGEAGEIDLAFDLSGPDLDQAIATVGHIPLPPYIAAKRPEDGQDRMDYQTIYAREEGAVAAPTAGLHFTPALFEALDKAGIERHFVTLHVGAGTFLPVKADDTDDHKMHQEIGHVSAETAAALNAVKARGGRIVSVGTTSLRLLESAAGDDGLIHPWSDATGIFITPGYRFKAVDVLMTNFHLPKSTLFMLVSAFAGFETMRAAYAHAIETGYRFYSYGDSSLLFRKDKQ

SEQ ID NO: 71335 - protein, 262 aa, Rhizobium tibeticum
  misc_feature (1)..(262): tr|A0A1H8U5U0|A0A1H8U5U0_9RHIZ S-adenosylmethionine:tRN A ribosyltransferase-isomerase OS=Rhizobium tibeticum O X=501024 GN=queA_2 PE=3 SV=1
MIADRSDRRSARLFVVETDGTMRDLARTRLATLFSPGDLVVANDAATLPASLDGTHIPSGEAIEIRLAGWRSLPDPTRFVAIAFGVGDHRTPTEDRLPPPALSTGDRLRLGPLDAVIEGLLDHHRLLELRFPGTPAAVLAGMAQHGRPIQYAHVPELLALWDVWTKIAARPLAFEAPSASFALDWRTLQTWRLRDVGFAALTHAAGVSSTGDPALDSRLPFDEPYHIPERTAERVARAKLRRSRIIAIGTSVVRALEVIRGC

SEQ ID NO: 71336 - protein, 360 aa, Rhizobium tibeticum
  misc_feature (1)..(360): tr|A0A1H8LJF9|A0A1H8LJF9_9RHIZ S-adenosylmethionine:tRN A ribosyltransferase-isomerase OS=Rhizobium tibeticum O X=501024 GN=queA_1 PE=3 SV=1
MRVDLFDFDLPDERIALRPADPRDSARLLVVDPAGEVQLSDHRISDLPDFLRAGDALVFNDTKVIPAQLEGVRHREGAGGQQVSATLHMRIGASRWKAFAKPGKRIKIGDRISFGHDGNSCLLGKLECTVEEKSEGGEVTLAFDLSGPMLDEAIHSVGHVPLPPYIAAKRAEDERDRADYQTIYAREEGAVAAPTAGLHFTPALFEAIDKSGVERHFVTLHVGAGTFLPVKADDTDEHKMHLESGYVSAETAASLNAVRARGGRIVCVGTTSLRLIESAAQENGEIRAWAGATGIFITPGYRFKAVDMLMTNFHLPRSTLFMLVSAFAGFETMHAAYRHAISTGYRFYSYGDSSLLFRKD

SEQ ID NO: 71337 - protein, 361 aa, Rhizobium tropici
  misc_feature (1)..(361): tr|L0LIG0|L0LIG0_RHITR S-adenosylmethionine:tRNA ribosy ltransferase-isomerase OS=Rhizobium tropici CIAT 899 OX =698761 GN=queA PE=3 SV=1
MRVDLFDFDLPEERIALRPAEPRDSARLLVVDPNNGSHTLSDYQIRDLPSFLRPGDAVVFNDTKVIPAQLEGIRHREGAPGQQVSATLHMRAAPDRWKAFAKPGKRIKIGDRIQFGHGENVCALGSLDATVEEKGEGGEITLRFDLSGPALDEAIASVGHIPLPPYIAAKRPEDERDRADYQTIYAREEGAVAAPTAGLHFTPSLFAALDAMGVERHFVTLHVGAGTFLPVKADDTDDHKMHFEIGYVDAATAEKLNAVKARGGRIVCVGTTSLRLIESAAADDGTIHPWHGATGIFITPGYRFKAVDMLMTNFHLPRSTLFMLVSAFAGLDTMRAAYTHAIETGYRFYSYGDGSLLHRKD

SEQ ID NO: 71338 - protein, 358 aa, Rhizobium tropici
  misc_feature (1)..(358): tr|A0A2T0PG98|A0A2T0PG98_RHITR S-adenosylmethionine:tRN A ribosyltransferase-isomerase OS=Rhizobium tropici OX= 398 GN=queA PE=3 SV=1
MRTDLFDFDLPPESIALRPASPRDAARMLVVHPDGVLRDAKIADLPHWLEPGDQIVVNDTKVIAAQLRGRRIGRETEPKIEATLIKRLDGSRWQALVKPAKKLAPGDTIRFGNEGKVCLLGNLDAEVEAKGQEGEVTLSFSFHGPVLDQAIADVGATPLPPYIASKRTPDDQDVSDYQTMFAAQEGAVAAPTAGLHFTPALEAALKNRGVALHRLTLHVGAGTFLPVKVDDTSEHKMHAEWGCITAETASALNAARAKGGRIVAIGTTSLRLLESAANADGTIQPFAAETSIFITPGYRFRVVDVLLTNFHLPRSTLFMLVSAFSGLETMQAAYTHAIRDGYRFYSYGDACLLFRAKS

SEQ ID NO: 71339 - protein, 367 aa, Rhizobium tubonense
  misc_feature (1)..(367): tr|A0A2W4CK11|A0A2W4CK11_9RHIZ S-adenosylmethionine:tRN A ribosyltransferase-isomerase OS=Rhizobium tubonense O X=484088 GN=queA PE=3 SV=1
MRVDLFDFDLPDERIALRPAEPRDSARLLVVDPNSPSQLSDHRVQDLPSFLRPGDAIVFNDTRVIPAQLEGTRHREGAPGQQVSATLHMRVAPDRWKAFAKPGKRIKVGDRIQFGHDGNSCMLGSLEATVEEKGDSGEITLHFDLSGPSLDEAIATVGHIPLPPYIAAKRPEDERDRTDYQTIYAREEGAVAAPTAGLHFTPALFDTLDRLGVERHFVTLHVGAGTFLPVKADDTDDHKMHLEIGYVSAETAARLNAVKARGGRIVCVGTTSLRLIESAADNDGTIKAWSGPTGIFITPGYRFKAVDILMTNFHLPRSTLFMLVSAFAGFETMHGAYQHAIGSGYRFYSYGDASLLFRPALVPGQTR

SEQ ID NO: 71340 - protein, 357 aa, Rhizobium tumorigenes
  misc_feature (1)..(357): tr|A0A2W4C5B2|A0A2W4C5B2_9RHIZ S-adenosylmethionine:tRN A ribosyltransferase-isomerase OS=Rhizobium tumorigenes OX=2041385 GN=queA PE=3 SV=1
MRVDLFDFDLPDESIALRPAEPRDSARLLIVDPHATPELSDHFVHDLPLFLRAGDAVVFNDTRVIPAQLEGIRHRDGATSQQVSATLHMRMSPGSWKAFAKPGKRIKTGDRIQFGSETAEIALEAAVGEKGEGGEITLHFDLSGPELDAAIAAVGHIPLPPYIAAKRHEDERDSTDYQTIYAREKGAVAAPTAGLHFTPELFDALDRMGVERHFVTLHVGAGTFLPVKADDTEDHKMHLEIGHVSAATAEALTAVKARGGRIVCVGTTSLRLIESAAADDGTIDPWSGPTGIFITPGYRFKAVDILMTNFHLPRSTLFMLVSAFAGFETMHAAYAHAIGAGYRFYSYGDASLLFRKD

SEQ ID NO: 71341 - protein, 361 aa, Rhizobium vallis
  misc_feature (1)..(361): tr|A0A3S0SR51|A0A3S0SR51_9RHIZ S-adenosylmethionine:tRN A ribosyltransferase-isomerase OS=Rhizobium vallis OX=6 34290 GN=queA PE=3 SV=1
MRVDLFDFDLPDERIALRPAEPRDSARLLVVDPNGQTTLSDHRVSDLPSFLRAGDALVFNDTKVIPAQLEGIRHREGAGGQQVSATLHMRIGANKWKAFAKPGKRIKEGDRIAFGHSGESCMIGTLDATVEEKGEAGEVTLAFDLSGPALDEAIAAVGHIPLPPYIAAKRPEDERDRADYQTIYAREEGAVAAPTAGLHFTSALFEALDKAGIERHFVTLHVGAGTFLPVKADDTADHKMHLESGYVSAEIAARLNAVRERGGRIICVGTTSLRLIESAAEASGQIKAWAGATGIFITPGYRFKAVDILMTNFHLPRSTLFMLVSAFAGFETMHAAYKHAISTGYRFYSYGDASLLFRKDT

SEQ ID NO: 71342 - protein, 348 aa, Rhizobium vallis
  misc_feature (1)..(348): tr|A0A432PAQ6|A0A432PAQ6_9RHIZ S-adenosylmethionine:tRN A ribosyltransferase-isomerase OS=Rhizobium vallis OX=6 34290 GN=EFQ99_32590 PE=3 SV=1
MIAADRLDRQSARLLVVEPDGTMRDLPRANLGTLFDPGDLVVANDAATLPASLHGTHLQCGKTIEIRLAGWLSPSAPVRFLAIVFGSGDHRTRTEDRLPPPALSSGDRLQLGPLQAVVKRILDHPRLLELSFQGTRAAMFAGLAQHGRPIQYAHVPEPLALWDVWTRIAARPVAFEAPSASFALDWRTLQAWRRREIGFATLTHAAGISSTGDPALDSRLPFDEPYHIPECTVAQVARAQLKGSRIIAIGTSVVRALEAAANPDGSVRAGDGIATGRIARGTPLRVVDAVLTGVHQLGESHFELLRAFADDSLLASASTALTAYGYRAHEFGDSMLLNRQPPPNWREP

SEQ ID NO: 71343 - protein, 347 aa, Rhizomicrobium sp.
  misc_feature (1)..(347): tr|A0A177QEV5|A0A177QEV5_9PROT S-adenosylmethionine:tRN A ribosyltransferase-isomerase OS=Rhizomicrobium sp. SC GC AG-212-E05 OX=1799655 GN=queA PE=3 SV=1
MKVDAFDFDLPERLIALRPARPRDSARMLVVRPDGFEHRLVSDLPDFLSPGDALVTNDTRVIAARLHGVRLREAGPAKIEILLHRRLSSDSFSALARPARKLAPGDALEFGPIKASVVSRGDAGEAEIRFALAGTALDDAIAAQGEIPLPPYIAGKRAVDDSDAKDYQTVFARESGSVAAPTAGLHFTPELLARLAAIGVSREAVTLHVGLGTFLPVTAEDTGQHRMHAERLVLTPATAARLNAVHDAGRRIVAAGTTSLRSLESAADATGHLQAFDGDTDIFITPGYAFRAVDVLLTNFHLPRSTLFMLVSAFMGLDVMRTAYAEAIRENYRFYSYGDACLLIRQS

SEQ ID NO: 71344 - protein, 342 aa, Rhizorhabdus dicambivorans
  misc_feature (1)..(342): tr|A0A2A4G105|A0A2A4G105_9SPHN S-adenosylmethionine:tRN A ribosyltransferase-isomerase OS=Rhizorhabdus dicambiv orans OX=1850238 GN=queA PE=3 SV=1
MRVDLFDFDLPPENIALRPVSPRDSARMLVLEGAEGIFDRSVSDLPGLLRGGDCLVFNDTRVIPAQLEGRRGEARIGATLHKREGLRQWRAFVRNAKRVRTGDRIDFGVGVSAIAADRGEDGSILLDFEGSEPVELLLERAGTMPLPPYIAGKRPTDERDHEDYQTMFAREKGAVAAPTAALHFTPRLIEALAVAGIATETLTLHVGAGTFLPVKADDTDDHRMHAEWGRIDMATADRLNAVRAKGGRVIAVGTTSLRLIESAAGEDGLIHPFEGDTAIFITPGYRFRGIDGLMTNFHLPKSTLFMLVSALMGRERMQAAYAHAIGTGYRFYSYGDSSLLLP

SEQ ID NO: 71345 - protein, 343 aa, Rhizorhabdus sp.
  misc_feature (1)..(343): tr|A0A521SGV0|A0A521SGV0_9SPHN S-adenosylmethionine:tRN A ribosyltransferase-isomerase OS=Rhizorhabdus sp. OX=1 968843 GN=queA PE=3 SV=1
MRVDLFDFDLPPENIALRPASPRDSARMLVVEGASGLSDRFVSDLPGLLRAGDCLVFNDTRVIPAQLEGRRGEARIGATLHKREGLRQWRAFVRNAKRVRIGDRIDFGADVFAVAVDRGEDGSILLDFAGEEPVELLLERAGTMPLPPYIAGKRPADARDRDDYQTMFAKEKGAVAAPTAALHFTPGLMAALAEAGIASETLTLHVGAGTFLPVKAEDTDDHRMHAEWGRIDAATADRLNAVRARGGRVVAVGTTSLRLIESAAGDDGLIRPFDGDTAIFITPGYRFRGIDGLMTNFHLPKSTLFMLVSALMGRERMQAAYAHAIAAGYRFYSYGDSSLLLPG

SEQ ID NO: 71346 - protein, 343 aa, Rhodanobacter denitrificans
  misc_feature (1)..(343): tr|A0A368KJH5|A0A368KJH5_9GAMM S-adenosylmethionine:tRN A ribosyltransferase-isomerase OS=Rhodanobacter denitri ficans OX=666685 GN=queA PE=3 SV=1
MKKSDFDFELPSELIAQAPLPERSASRLLLLDVPAQSRQDRRFRELPDFLRPGDLLVFNDTRVLPARLYGRKDTGGAVEILIERVTGAHEAVVQLGVSKKPKEGARIELGDGSHALVLGRDESFFRLRFEAPEPLEKLLQKLGEMPLPPYIERHADASDMERYQTVFAREPGAVAAPTAGLHFDEAILARLRERGVEFGYVTLHVGAGTFQPVRVDDLQDHHMHREWLNVGAHLIGQIRRTRANGGRVIAVGTTVVRALESASKDGELHPFAGETQIFIFPGYRFTSIDGLITNFHLPQSTLLMLVSALAGREFMLGAYRHAVEQRYRFFSYGDAMLILPHGA

SEQ ID NO: 71347 - protein, 354 aa, Rhodanobacter denitrificans
  misc_feature (1)..(354): tr|M4NKB5|M4NKB5_9GAMM S-adenosylmethionine:tRNA ribosy ltransferase-isomerase OS=Rhodanobacter denitrificans O X=666685 GN=queA PE=3 SV=1
MPRFPLPAAPALKKSDFDFDLPHELVAQAPLPERSASRMLLLDVAAQSRQDRLFRELPDFLRPGDLLVFNDTRVLPARLYGRKDTGGAVEILIERVTGAHEAVVQLGVSKKPKEGARIELADSSHALVLGRDEGFFRLRFEAPEPLEKLLLKLGEMPLPPYIERHADASDMERYQTVFAREPGAVAAPTAGLHFDEAILGRLRERGVEFGYVTLHVGAGTFQPVRVDDLKDHCMHREWLNVGAHLIGQIRRTRANGGRVIAVGTTVVRALESASRDGELHPFAGETQIFIFPGYRFSSIDGLITNFHLPQSTLLMLVSALAGREFILDSYRHAVEQRYRFFSYGDAMLILPHGA

SEQ ID NO: 71348 - protein, 345 aa, Rhodanobacter fulvus
  misc_feature (1)..(345): tr|I4VXA6|I4VXA6_9GAMM S-adenosylmethionine:tRNA ribosy ltransferase-isomerase OS=Rhodanobacter fulvus Jip2 OX= 1163408 GN=queA PE=3 SV=1
MKKSDFDFELPPELIAQAPLAERSASRLLLLDAAAPALQDRMFRELPQMLRPGDLLVFNDTRVLPARLFGHKSTGGAVEILIERVTGAHEATVQLGVSKKPKVGGRIELADGSQAVVLGRDEGFFHLRFEAPEPLEKLLLKLGEMPLPPYIARHPDASDLERYQTVYAREPGAVAAPTAGLHFDQATLDALRERGVDTGYITLHVGAGTFQPVRAENLEDHHMHREWLNVGAHLIEQIRRTRAAGGRVIAVGTTVVRALESASKDGQLHPFAGETQIFIFPGYTFTSIDGLLTNFHLPQSTLLMLVSALAGREAILDAYRHAVAERYRFFSYGDAMLILPRPAGG

SEQ ID NO: 71349 - protein, 343 aa, Rhodanobacter glycinis
  misc_feature (1)..(343): tr|A0A5B9DX42|A0A5B9DX42_9GAMM S-adenosylmethionine:tRN A ribosyltransferase-isomerase OS=Rhodanobacter glycini s OX=582702 GN=queA PE=3 SV=1
MKKSDFNFDLPPELIAQAPLPERSASRLLLLDAAAAKRQDRMFRELPEFLNPGDLLVFNDTRVLPARLYGRKDTGGAVEILIERVTGAHEAVVQLGVSKKPKEGGRIELADGSHATVLGRDEGFFRLRFESPESLERLLLKLGEMPLPPYIERAADASDMERYQTVYAREPGAVAAPTAGLHFDEALLAKLHERGVDFGYVTLHVGAGTFQPVRADDISDHHMHSEWLNVGAGLIEQIHRTRAAGGRVIAVGTTVVRALESATAEGQLRPFAGETRIFIFPGYKITSIDGLITNFHLPQSTLLMLVSALAGRDYMLDAYRHAVEQRYRFFSYGDAMLILPQGA

SEQ ID NO: 71350 - protein, 343 aa, Rhodanobacter glycinis
  misc_feature (1)..(343): tr|A0A502CD24|A0A502CD24_9GAMM S-adenosylmethionine:tRN A ribosyltransferase-isomerase OS=Rhodanobacter glycini s OX=582702 GN=queA PE=3 SV=1
MKKSDFDFELPPELIAQAPLPERSASRMLVLDVPAQWRQDRMFRELPDYLRPGDLLVFNDTRVLPARLYGRKSTGGAVEILIERVTGAHEAIVQLGVSKKPKEGGRIELADGSHAVVLGRDDGFFRLHFEASEPLEKLLLKLGEMPLPPYIERHADASDMERYQTVFAREPGAVAAPTAGLHFDEAMLATLRERGVEFGYITLHVGAGTFQPVRADDLKDHHMHREWLNVGAHLVGQIRRARANGGRVIAVGTTVVRALESASKDGELHPFAGETQIFIFPGYHFSSIDGLLTNFHLPQSTLLMLVSALAGREFMLDSYRHAVTQGYRFFSYGDAMLILPQGG

SEQ ID NO: 71351 - protein, 343 aa, Rhodanobacter lindaniclasticus
  misc_feature (1)..(343): tr|A0A4V3UT24|A0A4V3UT24_9GAMM S-adenosylmethionine:tRN A ribosyltransferase-isomerase OS=Rhodanobacter lindani clasticus OX=75310 GN=queA PE=3 SV=1
MKKSDFDFDLPHELIAQAPLPERSASRMLLLDVAARSRQDRMFRELPDFLRPGDLLVFNDTRVLPARLYGRKESGGAVEILIERVTGAHEATVQLGVSKKPKEGGRIELADGSHAVVLGRDEGFFRLRFEAPEPLEKLLLKLGEMPLPPYIERHADASDMERYQTVFAREPGAVAAPTAGLHFDEAILDQLRERGVEFGYVTLHVGAGTFQPVRAVNLEDHHMHTEWLNVGAHLVEQIRRTRANGGRVIAVGTTVVRALESASKDGLVHPFAGETQIFIFPGYRFSSIDGLLTNFHLPQSTLLMLVSALAGREFMLDAYRHAVEQRYRFFSYGDAMLILPHGA

SEQ ID NO: 71352 - protein, 343 aa, Rhodanobacter sp.
  misc_feature (1)..(343): tr|A0A1V3P1Q7|A0A1V3P1Q7_9GAMM S-adenosylmethionine:tRN A ribosyltransferase-isomerase OS=Rhodanobacter sp. C05 OX=1945855 GN=queA PE=3 SV=1
MKKSDFDFELPPELIAQAPLAERSASRMLLLDVPAQARQDRMFRELPDFLRPGDLLVFNDTRVLPARLYGRKISGGAVEILIERVTGAHEATVQLGVSKKPKEGGRIELADGSHAVVLGRDEGFFRLHFEAPEPLEKLLLKLGEMPLPPYIERHADASDLERYQTVFAREPGAVAAPTAGLHFDEAMLATLRERGVEFGYITLHVGAGTFQPVRADDLKDHRMHREWLNVGAHLIGQIRRTRANGGRVIAVGTTVVRALESASKDGELHPFAGETQIFIFPGYRFSSIDGLLTNFHLPQSTLLMLVSALAGREFMLDAYRHAVEQGYRFFSYGDSMLILPQGG

SEQ ID NO: 71353 - protein, 345 aa, Rhodanobacter sp.
  misc_feature (1)..(345): tr|A0A522FY55|A0A522FY55_9GAMM S-adenosylmethionine:tRN A ribosyltransferase-isomerase OS=Rhodanobacter sp. OX= 1883446 GN=queA PE=3 SV=1
MKKSDFDFDLPRELIAQEPLAERSASRLLVLDVPAGAHEDHIFRELPDFLQPGDLLVFNDTRVLPARLYGRKESGGAVEIMLERVTGTHEAIVQLGVSHKPKTGARIELADGSHAVLLGREEDFFRLHFESPEPLEKLLMRLGEMPLPPYIERKPDEADKERYQTVYAREPGAVAAPTAGLHFDQPLLARLRERGVNFGYITLHVGAGTFQPVREDEISKHHMHREWLNVGAALVAQIHATRAAGHRVVAVGTTVVRALEAASVDGKVQPFAGETQIFIFPGYKITSIDALITNFHLPQSTLLMLVSALAGRDYMLAAYRYAVEQRYRFFSYGDAMLILPGGIKR

SEQ ID NO: 71354 - protein, 349 aa, Rhodanobacter spathiphylli
  misc_feature (1)..(349): tr|I4W5F0|I4W5F0_9GAMM S-adenosylmethionine:tRNA ribosy ltransferase-isomerase OS=Rhodanobacter spathiphylli B3 9 OX=1163407 GN=queA PE=3 SV=1
MPATPALKKSDFDFDLPPELIAQAPLPERSASRMLLLDVAAQSREDRMFRELPDFLRPGDLLVFNDTRVLPARLYGRKDTGGAVEILIERVTGAHEATVQLGVSKKPKEGGRIELADGSHAVVLGRDEGFFRLRFEAPEPLEKLLLKLGEMPLPPYIERHADASDMERYQTVFAREPGAVAAPTAGLHFDEATLARLRERGVEFGYVTLHVGAGTFQPVRADDLKDHHMHTEWLNVGAHLIGQIRRTRANGGRVIAVGTTVVRALESASKDGELHPFAGETQIFIFPGYRFSSIDGLLTNFHLPQSTLLMLVSALAGREYMLDAYRHAVEQRYRFFSYGDSMLILPKGV

SEQ ID NO: 71355 - protein, 343 aa, Rhodanobacter thiooxydans
  misc_feature (1)..(343): tr|A0A154QIS0|A0A154QIS0_9GAMM S-adenosylmethionine:tRN A ribosyltransferase-isomerase OS=Rhodanobacter thiooxy dans OX=416169 GN=queA PE=3 SV=1
MKKSDFDFELPPELIAQAPLPERSASRMLLLDVPAQSQQDRMFRELPEFLRPGDLLVFNDTRVLPARLYGRKDTGGAVEILIERVTGAHEAVVQLGVSKKPKEGARIELADGSHALVLGRDESFFRLRFEAPEPLEKLLQKLGEMPLPPYIARHADASDMERYQTVFAREPGAVAAPTAGLHFDQPILDRLRERGVDFGYITLHVGAGTFQPVRVDDIKDHHMHREWLNVGAHLIGQIRRARANGGRVIAVGTTVVRALESASRDGELHPFAGETQIFIFPGYRFSSIDGLITNFHLPQSTLLMLVSALAGREFMLGAYRHAVEQRYRFFSYGDAMLILPHGA

SEQ ID NO: 71356 - protein, 345 aa, Rhodanobacteraceae bacterium
  misc_feature (1)..(345): tr|A0A522R5A8|A0A522R5A8_9GAMM S-adenosylmethionine:tRN A ribosyltransferase-isomerase OS=Rhodanobacteraceae ba cterium OX=2052182 GN=queA PE=3 SV=1
MKKSDFHYDLPPELIAQQPLPERSASRLLMVDAPRQALSEHTFQDLPRLLQPGDLLVFNDTRVLPARLFGHKSSGGEVEIMLERITGTHTATALLGASKKPREGSLIELDDGTSARVLGRDGQFFELRFECAEPLEKLLLRIGHVPLPPYIARADESSDRERYQTVYAKHPGAVAAPTAGLHFDASLLDALRARNVEFGYVTLHVGAGTFQPVRAEKIEDHEMHREWLNVGAELVEKIHRTRARGGRVIAVGTTVVRALEAARGEHGEVEPFAGETRIFIFPGYRITSIDGLITNFHLPESTLLMLVSAFAGREFVLSAYRHAVGQRYRFYSYGDAMLVWPSQRT

SEQ ID NO: 71357 - protein, 356 aa, Rhodanobacteraceae bacterium
  misc_feature (1)..(356): tr|A0A522S2R4|A0A522S2R4_9GAMM S-adenosylmethionine:tRN A ribosyltransferase-isomerase OS=Rhodanobacteraceae ba cterium OX=2052182 GN=queA PE=3 SV=1
MKKSDFHYDLPHELIAQQPLPERSASRLLVVDAPRQVLADRAFHDLPQLLNPGDLLVFNDTRVLPARLFGRKPSGGAVEIMLERVTGTHTAVAMLGVSKKPREGSLIELDDGTPVRVLGREGQFFELRFECAEPLEKLLLKIGHMPLPPYIARADESSDRERYQTVYAKHLGAVAAPTAGLHFDEVLLDALRARGVDFDYITLHVGSGTFQPVRAEKIEDHAMHREWLNVGAELVEKIHRTRARGGRVIAVGTTVVRSLEAARGEHGEVEPFAGETDIFIFPGYRITSIDGLITNFHLPESTLLMLVSAFAGREFVLSAYKHAVEQRYRFYSYGDAMLVWPERRDSGLGTRDSAAR

SEQ ID NO: 71358 - protein, 349 aa, Rhodobaca barguzinensis
  misc_feature (1)..(349): tr|A0A2K8K618|A0A2K8K618_9RHOB S-adenosylmethionine:tRN A ribosyltransferase-isomerase OS=Rhodobaca barguzinens is OX=441209 GN=queA PE=3 SV=1
MKLSDFDFDLPEDLIATRPVRPRPAARLLLAQGSRIEDRHVSDLPDILRAGDLLVINTTKVIPARLTGQRHRDTAQGPVSARIEVTLTEPQPDGSWRALAKPLRKLAQGEEIIFTDALRAEVVARNPDDVVLRFNLAGEAFDAALDAAGQMPLPPYIAGRRAADAQDREDYQTVFARTPGAVAAPTASLHFDAALMAQLREIGVEFCEVTLHVGAGTFLPVKVDDVRDHKMHAEWGQVTAQAADQIMAARKAGGRIIPVGTTALRLIETAATGPGQIAAWAGKTDIFITPGFSFQLADALMTNFHLPKSTLMMLVSALMGRDQIMDIYAHAIAERYRFFSYGDASLLIP

SEQ ID NO: 71359 - protein, 355 aa, Rhodobacter aestuarii
  misc_feature (1)..(355): tr|A0A1N7J772|A0A1N7J772_9RHOB S-adenosylmethionine:tRN A ribosyltransferase-isomerase OS=Rhodobacter aestuarii OX=453582 GN=queA PE=3 SV=1
MKLDDFDFDLPEGLIATRPARPRTAAKLLVAEGEGIRDLTVADLPDLLGPGDRLVLNNTKVIPARLTGSRARDTGQGTVVAKIEVTLLEPAPGGAWSALAKPLRKVKEGEEITFSDRLSAKVLTIAEGQMQIAFNCTGADFDAALAEAGAMPLPPYIAALRAPDEDDKSDYQTVFARHSGAVAAPTASLHFTPELLETLRQKGVSFTEVTLHVGAGTFLPVKVEDVTTHKMHAEWGEVSAQAAAEINATKAAGGRVIPVGTTALRLIESAAVAEGEIAPFCDTTEIFIYPGYRFRIADALMTNFHLPKSTLLMLVSALMGQERIREIYAHAVAKGYRFFSYGDASLLLPKARNGG

SEQ ID NO: 71360 - protein, 346 aa, Rhodobacter azotoformans
  misc_feature (1)..(346): tr|A0A2T5KBE9|A0A2T5KBE9_9RHOB S-adenosylmethionine:tRN A ribosyltransferase-isomerase OS=Rhodobacter azotoform ans OX=43057 GN=queA PE=3 SV=1
MKLSDFDFDLPERLIATRPARPRTAARLLLAEGDRIEDRHVRDLVGIFRPGDRLVLNNTRVIPARLVGTRTRGEACAKIEITLMEPAAAGGWRALAKPLRKLKEGETIRFSDALSAEVAEKGETDLRLVFDRAGEDFDAALAEAGAMPLPPYIAARRAPDAQDREDYQTVFARHAGAVAAPTASLHFDRPLLEALAANGVAFTEVTLHVGAGTFLPVKVEDVTTHRMHAEWGEVTEAAAAEIAATKAAGGRVIPVGTTALRLIESASAAGTIRPWRGETDIFIYPGYRFRVTDALMTNFHLPKSTLLMLVSALMGEARIRAIYDHAVRHDYRFFSYGDASLLIPGG

SEQ ID NO: 71361 - protein, 346 aa, Rhodobacter blasticus
  misc_feature (1)..(346): tr|A0A2T4J790|A0A2T4J790_RHOBL S-adenosylmethionine:tRN A ribosyltransferase-isomerase OS=Rhodobacter blasticus DSM 2131 OX=1188250 GN=queA PE=3 SV=1
MKLSDFDFPLPEELIATRPARPRSSARLLVAEGDTLRDLVVRDLAGLLGPGDRLVLNNTRVIPARLFGTRTRGEAVARVEVTLLEPAATGGWRALAKPLRKVKEGEVIAFSDDLSARVAEKGETDLRLEFNQTGEAFDAALATAGAMPLPPYIAAKRAADEQDKDDYQTVFARHTGAVAAPTASLHFDADLLAALRAKGVQFTEVTLHVGAGTFLPVKVEDVTTHRMHAEWGQVTPQAAAEINATREAGGRVIPVGTTALRLIESAARSGRVEPWEGPTDIFIYPGFAFHVTDALMTNFHLPRSTLLMLVAALMGKGRMDRVYEHAIHNGYRFFSYGDASLLIPTR

SEQ ID NO: 71362 - protein, 350 aa, Rhodobacter capsulatus
  misc_feature (1)..(350): tr|D5ATK9|D5ATK9_RHOCB S-adenosylmethionine:tRNA ribosy ltransferase-isomerase OS=Rhodobacter capsulatus (strai n ATCC BAA-309 / NBRC 16581 / SB1003) OX=272942 GN=queA PE=3 SV=1
MNLSDFDFELPEGRIAIRPARPRTAAKLLVATPDAIRDLTVADLPDLLGPGDRLVLNTTKVIPARLSGRRTRQSAQGEVVARVEVTLLEPAPGGDWMALAKPLRKLKEGEEIVFSDALSARIAAIAEGQMRIRFNLTGPDFDAALAEAGAMPLPPYIAALRAPDEQDKTDYQTVFAQKPGAVAAPTASLHFTPDLLEKLRDKGVQFTEVTLHVGAGTFLPVKVEDVTTHRMHAEWGEVTPQAAAEINATKAAGGRVIPVGTTALRLIESAATGPGVIAPFAATTDIFIYPGYRFRIADALMTNFHLPKSTLLMLVSALMGQDRIRAIYDHALTKNYRFFSYGDASLLLPG

SEQ ID NO: 71363 - protein, 350 aa, Rhodobacter capsulatus; identical to SEQ ID NO: 71362
  misc_feature (1)..(350): tr|A0A0E2PVD8|A0A0E2PVD8_RHOCA S-adenosylmethionine:tRN A ribosyltransferase-isomerase OS=Rhodobacter capsulatu s Y262 OX=1415161 GN=queA PE=3 SV=1

SEQ ID NO: 71364 - protein, 346 aa, Rhodobacter johrii
  misc_feature (1)..(346): tr|A0A330H7G2|A0A330H7G2_9RHOB S-adenosylmethionine:tRN A ribosyltransferase-isomerase OS=Rhodobacter johrii OX =445629 GN=queA PE=3 SV=1
MQLSDFDFDLPERLIATRPARPRTAARLLLAEGDRIEDRHVRDLVGIFRPGDRLVLNNTRVIPARLTGTRTRGEAEARIEVTLMEPAAAGGWRAMAKPLRKLKPGETIRFSDALSAEVAEKGETDLRLVFDRAGEAFDAALAQAGAMPLPPYIAARRAPDAQDDEDYQTVFARHAGAVAAPTASLHFDRPLLEALAARGVGFTEVTLHVGAGTFLPVKVEDVTTHRMHAEWGEVTDTAAAEIAAAKAAGGRVIPVGTTALRLIESAAASGTIRPWRGETDIFIYPGYRFRVTDALMTNFHLPKSTLLMLVSALMGQERIRAIYDHAVRHDYRFFSYGDASLLIPGG

SEQ ID NO: 71365 - protein, 353 aa, Rhodobacter maris
  misc_feature (1)..(353): tr|A0A285T1Z8|A0A285T1Z8_9RHOB S-adenosylmethionine:tRN A ribosyltransferase-isomerase OS=Rhodobacter maris OX= 446682 GN=queA PE=3 SV=1
MMMTLDDFDFDLPEGLIATRPARPRSSAKLLVAKGGDLRDLTVADLPALFRPGDRLVLNNTKVIPARLSGRRSRASARGEVVAKVEVTLLEPAAGGEWSALAKPLRKLREGEEIVFSGALSARVMAIAEGQMRIAFNVTGADFDAALAEAGAMPLPPYIAALRAPDEADKSDYQTVFARHAGAVAAPTASLHFTPELLETLRENGVQFTEVTLHVGAGTFLPVKVADVTTHRMHAEWGEVSEQAAAEINATKAAGGRVIPVGTTALRLIESAAGEDGRVAPFRGTTDIFIYPGYRFRVTDALMTNFHLPKSTLLMLVSALMGQERIREIYAHAVARGYRFFSYGDASLLFPEP

SEQ ID NO: 71366 - protein, 346 aa, Rhodobacter megalophilus
  misc_feature (1)..(346): tr|A0A239C6T1|A0A239C6T1_9RHOB S-adenosylmethionine:tRN A ribosyltransferase-isomerase OS=Rhodobacter megalophi lus OX=418630 GN=queA PE=3 SV=1
MQLSDFDFDLPERLIATRPARPRTAARLLLAEGDRIEDRHVRDLVGIFRPGDRLVLNNTRVIPARLTGTRTRGEAEARIEVTLMEPAAAGGWRAMAKPLRKLKPGETIRFSDALSAEVAEKGETDLRLVFDRAGAAFDAALAEAGAMPLPPYIAARRAPDAQDDEDYQTVFARHAGAVAAPTASLHFDRPLLEALAARGVGFTEVTLHVGAGTFLPVKVEDVTTHRMHAEWGEVTEAAAAEIAATKAAGGRVIPVGTTALRLIESAAASGAIRPWRGETDIFIYPGYRFRVTDALMTNFHLPKSTLLMLVSALMGQERIRAIYDHAVRHDYRFFSYGDASLLIPGG

SEQ ID NO: 71367 - protein, 345 aa, Rhodobacter ovatus
  misc_feature (1)..(345): tr|A0A285CTL7|A0A285CTL7_9RHOB S-adenosylmethionine:tRN A ribosyltransferase-isomerase OS=Rhodobacter ovatus OX =439529 GN=queA PE=3 SV=1
MKLSDFDFDLPESLIATRPARPRTAARLLLAEGDTIRDLHVRDLLDIFRPGDRLVLNNTKVIPARLSGTRCRGDAVARVEVTLLEPAAQGWRALAKPLRKLKPGEEIRFSPDLSATVAEKGDTDLRLVFNLTGEDFDTALAQAGAMPLPPYIAAKRAPDAQDHKDYQTVFARHAGAVAAPTASLHFDRELLAALAAKGIGFTEVTLHVGAGTFLPVKVEDVTTHRMHAEWGEVTEQAAAEIAATKAAGGRVIPVGTTALRLIESAAADGQIRPWRGKTDIFIYPGYRFRVADALMTNFHLPKSTLLMLVSALMGPDRIRRIYDHALHEGYRFFSYGDASLLIPKG

SEQ ID NO: 71368 - protein, 351 aa, Rhodobacter sp.
  misc_feature (1)..(351): tr|A0A0R2TRL8|A0A0R2TRL8_9RHOB S-adenosylmethionine:tRN A ribosyltransferase-isomerase OS=Rhodobacter sp. BACL1 0 MAG-120910-bin24 OX=1655597 GN=queA PE=3 SV=1
MAVSLSDFDFELPEERIAIRPLKPKGEAKLLHYEKGLFYDRHVANLIDLLHEGDLLVLNNTRVIAARLRAERRRETAQGPVSAHIELTLMNPTAQGHWRAMAKPLRKVLVGEVLHISPDLWAEVVAKTDTDLTLAFNAEGAELDASIERSGQMPLPPYIAAKRPPDAQDRQDYQTVFARHMGAVAAPTASLHFDQSLLDALTRKGVCFCEVTLHVGAGTFLPVKVEDVTTHKMHAEWGDVSAHAAAQISATKTKGGRVIAVGTTALRLIETAAQTTGQIAPYQGFTDIFIYPGFDFKVTDGLMTNFHLPKSTLLMLVAALIGKGQLDKLYAHAIAAEYRFFSYGDSSLLLP

SEQ ID NO: 71369 - protein, 351 aa, Rhodobacter sp.; identical to SEQ ID NO: 71368
  misc_feature (1)..(351): tr|A0A348MPJ2|A0A348MPJ2_9RHOB S-adenosylmethionine:tRN A ribosyltransferase-isomerase OS=Rhodobacter sp. OX=10 62 GN=queA PE=3 SV=1

SEQ ID NO: 71370 - protein, 346 aa, Rhodobacter sphaeroides
  misc_feature (1)..(346): sp|Q3J252|QUEA_RHOS4 S-adenosylmethionine:tRNA ribosylt ransferase-isomerase OS=Rhodobacter sphaeroides (strain ATCC 17023 / 2.4.1 / NCIB 8253 / DSM 158) OX=272943 GN =queA PE=3 SV=1
MQLSDFDFDLPERLIATRPARPRTAARLLLAEGDRIEDRHVRDLVGIFRPGDRLVLNNTRVIPARLTGTRTRGEAEARVEVTLMEPAAAGGWRAMAKPLRKLKPGETIRFSDALSAEVAEKGETDLRLVFDRAGAAFDAALAEAGAMPLPPYIAARRAPDTQDDEDYQTVFARHAGAVAAPTASLHFDRPLLEALAARGVGFTEVTLHVGAGTFLPVKVEDVTTHRMHAEWGEVTETAAAEIAATKAAGGRVIPVGTTALRLIESAAASGAIRPWRGETDIFIYPGYRFRVTDALMTNFHLPKSTLLMLVSALMGQERIRAIYDHAVRHDYRFFSYGDASLLIPGG

SEQ ID NO: 71371 - protein, 346 aa, Rhodobacter sphaeroides
  misc_feature (1)..(346): sp|A4WTM7|QUEA_RHOS5 S-adenosylmethionine:tRNA ribosylt ransferase-isomerase OS=Rhodobacter sphaeroides (strain ATCC 17025 / ATH 2.4.3) OX=349102 GN=queA PE=3 SV=1
MKLSDFDFDLPERLIATRPARPRTAARLLLAEGDRIEDRHVRDLVGIFHPGDRLVLNNTRVIPARLVGTRTRGEACAKIEITLMEPAAAGGWRALAKPLRKLKEGETIRFSDALSAEVAEKGETDLRLVFDRAGEDFDAALAEAGAMPLPPYIAARRAPDAQDREDYQTVFARHAGAVAAPTASLHFDRPLLEALAANGVAFTEVTLHVGAGTFLPVKVEDVTTHRMHAEWGEVTEAAAAEIAATKAAGGRVIPVGTTALRLIESASAAGTIRPWRGETDIFIYPGYRFRVTDALMTNFHLPKSTLLMLVSALMGEARIRAIYDHAVRHDYRFFSYGDASLLIPGG

SEQ ID NO: 71372 - protein, 349 aa, Rhodobacter veldkampii
  misc_feature (1)..(349): tr|A0A2T4JKW8|A0A2T4JKW8_9RHOB S-adenosylmethionine:tRN A ribosyltransferase-isomerase OS=Rhodobacter veldkampi i DSM 11550 OX=1185920 GN=queA PE=3 SV=1
MKLSDFDFDLPEGLIATRPARPRPAARLLVAEGAAIRDLHVRDLVGLLRPGDRLVLNNTKVIPARLSGTRRRATPQGEAVAKVEVTLLEPAPGGAWMALAKPLRKLRVGETISFASRLSAEVLAIVEGQAQLAFNLTGNDFDTALAEAGAMPLPPYIAALRAPDAADKDDYQTVFARHSGAVAAPTASLHFDADLLAALAAKGVAFTEVTLHVGAGTFLPVKVEDVTTHRMHAEWGEVSAQAAAEINATRAAGGRIIPVGTTALRLIESAATPEGRVQPFRGTTEIFIYPGYRFRVTDALMTNFHLPKSTLLMLVSALMGEACIRRIYAHAVAQGYRFFSYGDASLLIP

SEQ ID NO: 71373 - protein, 350 aa, Rhodobacter vinaykumarii
  misc_feature (1)..(350): tr|A0A1N7L5A1|A0A1N7L5A1_9RHOB S-adenosylmethionine:tRN A ribosyltransferase-isomerase OS=Rhodobacter vinaykuma rii OX=407234 GN=queA PE=3 SV=1
MKLEDFDFDLPEGLIATRPVRPRPAARLLVAQGPEGWSDAHVRDLPGLLRPGDLLVLNDTRVIPARLSGLRARQTPQGEVHARIEVTLMEPGTDGEWQALVKPLRKLRPGEEIVFAPGFSAEVREIAEGRARLAFSVGGAAFETALAEVGAMPLPPYIAALRAPDAADHEDYQSVFARRPGAVAAPTASLHFDDALMAELSARGVGFARVTLHVGAGTFLPVKVEDVTTHRMHAEWGEITPEAAAAINATRAAGGRVIAVGTTALRLVESAATPEGEVRPFAGTTEIFIYPGYRFRAIDGLMTNFHLPRSTLLMLVSALMGRERIHALYQHAIGQGYRFFSYGDASLLIP

SEQ ID NO: 71374 - protein, 350 aa, Rhodobacter viridis
  misc_feature (1)..(350): tr|A0A318U2K9|A0A318U2K9_9RHOB S-adenosylmethionine:tRN A ribosyltransferase-isomerase OS=Rhodobacter viridis O X=1054202 GN=queA PE=3 SV=1
MNLSDFDFDLPEGLIATRPARPRTAAKLLVATPEAIRDLTVADLPDLLGPGDRLVLNTTKVIPARLSGRRTRQSAQGEVVAKVEVTLLEPAPGGDWMALAKPLRKLKEGEEIVFSASLSARVEAIAEAQMRIRFNLTGPDFDAALAEAGAMPLPPYIAALRAPDEQDKTDYQTVFAQNPGAVAAPTASLHFTPELLEKLREKGVQFTEVTLHVGAGTFLPVKVEDVTTHRMHAEWGEVSAQAAAEINATKLAGGRVIPVGTTALRLIESAATGPGVIAPFAATTDIFIYPGYRFRIADALMTNFHLPKSTLLMLVSALMGQERIREIYAHALTKNYRFFSYGDASLLLPG

SEQ ID NO: 71375 - protein, 341 aa, Rhodobacteraceae bacterium
  misc_feature (1)..(341): tr|A0A3N9Q7P5|A0A3N9Q7P5_9RHOB S-adenosylmethionine:tRN A ribosyltransferase-isomerase OS=Rhodobacteraceae bact erium CH30 OX=2490538 GN=queA PE=3 SV=1
MQLSDFDYHLPEHLVAQHPPEVRGGSRLLHVAGKQLSDTLFAELPGFLSAGDVLVFNDTRVIKARLFGEKASGGKIEALIERVLDEHTALAHVRASKSPKPGTRLVFAGRWQAEMVERVGELFKLRFLAEENLFDILEASGKLPLPPYIERDTDSDDDSRYQTVYAKEQGAVAAPTAGLHFTDEMLARLEAQGVKLAYVTLHVGAGTFQPVRVDNIADHKMHSEIYDIPEQTRAMIEEAHAAGHKVVSVGTTSMRALESAARGGALVAGRGETDIFITPGYRFNVVDRLLTNFHLPKSTLLMLVSAFAGYDEMRAAYVHAVEKEYRFFSYGDAMLLERKDG

SEQ ID NO: 71376 - protein, 354 aa, Rhodobacteraceae bacterium
  misc_feature (1)..(354): tr|A0A2V2LKF4|A0A2V2LKF4_9RHOB S-adenosylmethionine:tRN A ribosyltransferase-isomerase OS=Rhodobacteraceae bact erium TG-679 OX=2072018 GN=queA PE=3 SV=1
MKLDDFDFDLPEDLIATRPVRPRSAARLLVADPARITDAHVGDLPSFLRPGDRLVLNDTRVLPVRLTGTRTRATDSGTGAARIEVTLLEPQADGAWTALVKPLRKLADGEVIVFTDRLAATMLGRTGEGTARLGLSLKGDALEAELAQAGAMPLPPYIAARRPADARDLEDYQTVFARRSGAVAAPTASLHFDADLLARIAAAGVDFTHVTLHVGAGTFLPVKVDDPAQHKMHAEWGEVTPDAAAEIAATREAGGRIIPVGTTALRLLETAAQGTGEVVPMAEPTDIFIYPGFRFRVTDGLMTNFHLPKSTLMMLVSAFMGTDRMRAVYAHAIAQRYRFFSYGDASLLLPTKRA

SEQ ID NO: 71377 - protein, 348 aa, Rhodobacterales bacterium
  misc_feature (1)..(348): tr|A0A1Y5HIM1|A0A1Y5HIM1_9RHOB S-adenosylmethionine:tRN A ribosyltransferase-isomerase OS=Rhodobacterales bacte rium 56_14_T64 OX=1856299 GN=queA PE=3 SV=1
MKLSDFDFELPDSLIATRPASPRSAARLLVAEGDVIHDRTVTDLVDWLRPGDRLVLNDTKVIPARLSGLRHRLSAQGPVAAKIEVTLLEPRADGCWSALLKPLKKIKIGEDVVFCEGFSATLEAIADGQGQLRFNLAGDDFDAALAQAGAMPLPPYIAAKRPADAQDKQDYQTVWARHSGAVAAPTASLHFDDALLAALAAKGVEFTHVTLHVGAGTFLPVKVEDVTSHKMHAEWGRVSPQAAAEIAATKAAGGRVIPVGTTALRLIESAARGGEITPWEGDTDIFIYPGFTFHVTNALMTNFHLPKSTLLMLVSALIGQDRVRAIYEHAVSDEYRFFSYGDASLLIP

SEQ ID NO: 71378 - protein, 349 aa, Rhodobacterales bacterium
  misc_feature (1)..(349): tr|A0A1Q4CQ42|A0A1Q4CQ42_9RHOB S-adenosylmethionine:tRN A ribosyltransferase-isomerase OS=Rhodobacterales bacte rium 65-51 OX=1895824 GN=queA PE=3 SV=1
MKLADFDFDLPEHLIATRPVKPRPAARLLLAEGDAIRDLHVRDLVTLLRPGDRLVLNNTKVIPARLNGTRWRDTGQGRVSAKVEITLLEPVASSGWRALAKPLRKLAQGEVIVFSDQLSAQVSRKGETDLVLEFNLTGPDFDAALAAAGQMPLPPYIAAKRAPDAQDHQDYQTVFARHSGAVAAPTASLHFDAGLLAALRARGVEFTEVTLHVGAGTFLPVKVEDVTTHRMHAEWGEVTEAAVAEIAATKAAGGRVIPVGTTALRLIESAAQGGALAPWRGETDIFIYPGFTFRVADGLMTNFHLPRSTLMMLVAALMGRDRILRIYDHAISEGYRFFSYGDASLLLPG

SEQ ID NO: 71379 - protein, 362 aa, Rhodobiaceae bacterium
  misc_feature (1)..(362): tr|A0A3D5HKP4|A0A3D5HKP4_9RHIZ S-adenosylmethionine:tRN A ribosyltransferase-isomerase OS=Rhodobiaceae bacteriu m OX=2026785 GN=queA PE=3 SV=1
MQVEAFDFDLPDELIALRPASPRDSAKLLHVAPNGHLTDKFIRDLSSYFVKGDVLLVNDTRVIPAKLSGTRLRESVAGDTQQSGAHVELNLIERQGTSTWKCLLKPAKKVKPGDIIRFQDKEGVVYPATVLEKDQGEALIDFKLSLDKMDALLGLIGSMPLPPYIAGKRRPDEKDNQDYQTLFAEHDGAVAAPTAGLHFTPNLQAELEAMGVEICRVTLHVGAGTFLPVKVENTANHKMHAEWGEVKPEIADKLNNAKQNGHRICCVGTTSLRLLESATKKDGIIEPFADATDIFIKPGYCFRAADMLLTNFHLPKSTLFMLVSAFSGLDTMKKAYEHAVQNNYRFYSYGDACLLELADKNN

SEQ ID NO: 71380 - protein, 362 aa, Rhodobiaceae bacterium
  misc_feature (1)..(362): tr|A0A2D7H6U3|A0A2D7H6U3_9RHIZ S-adenosylmethionine:tRN A ribosyltransferase-isomerase OS=Rhodobiaceae bacteriu m OX=2026785 GN=queA PE=3 SV=1
MQVDLFDFDLPEELIALRPAVPRDSARLLYVGDTGDTGDHTVSDLPEFLKEGDVLVVNTTKVIPARLTGRRVRRGVDDNTHSGAKIEVTLTERKGPLAWQCFLKPARRVNVGDKLVFGDAAITVEAEVTARDGPEAGLMFHLAPDAMEGTLARIGAMPLPPYIAGKRSPDARDVDDYQTLFAAHEGAVAAPTAGLHFTPELVARLHDRGIALVDVTLHVGPGTFLPVKVDDTRSHVMHSEWGEVSAAAAAQINAAKAGGHRVICVGTTALRLIESACSEIGRISAFRGDTDIFITPGYAFRMCDLLVTNFHLPRSTLFMLVSAFSGLSVMQNAYATAIEKKYRFYSYGDACLLTRREVSGEV

SEQ ID NO: 71381 - protein, 362 aa, Rhodobium orientis
  misc_feature (1)..(362): tr|A0A327JHQ0|A0A327JHQ0_9RHIZ S-adenosylmethionine:tRN A ribosyltransferase-isomerase OS=Rhodobium orientis OX =34017 GN=queA PE=3 SV=1
MRVEDFDFELPEERIALRPARPRDAARMLVVHPGGDPELTDRIVRDLPGMLRPGDALVSNDTRVIPAQLEGKRIGRGDSAPKIAVTLHKRAGLDAWYGFARPAKKLAPGDRVAFAADCTFCYGGALMASVVEKGEGGEVLFRFDRSGEMLDIELARVGAMPLPPYIASKRKIDGRDARDYQTMFASRDGAVAAPTAGLHFTDDLIAALDERGVSRHTVTLHVGAGTFLPVKVDDLKDHRMHAEWGEIGEETADALNAVKARGGRIVSVGTTSLRLLESAADEDGIIKPFCDDTSIFISPGYRFRAVDILMTNFHLPRSTLFMLVSAFCGLDVMRRAYGHAIAENYRFYSYGDASLLFREGAA

SEQ ID NO: 71382 - protein, 346 aa, Rhodoblastus acidophilus
  misc_feature (1)..(346): tr|A0A212RAW4|A0A212RAW4_RHOAC S-adenosylmethionine:tRN A ribosyltransferase-isomerase OS=Rhodoblastus acidophi lus OX=1074 GN=queA PE=3 SV=1
MRVDVFDFDLPEDRIALRPASPRESARLLAIGEDLRDLHVGDLPSQLRPGDVLVVNDAKVIPAQLFGTRTRGEAVARIEATLHKKQDGAHWRAFVRPAKKLKLGETVAFGDDGALQAVVEAKNEGEVLLGFNLSGPALDNALMAVGHMPLPPYIAARRAEDAQDAQDYQTVFAQKPGAVAAPTAGLHFTPALLAAAQAAGARIEKVTLLVGAGTFLPVKAEDTKDHVMHAEWGEIDAETAARLNAARAQGGRIVAVGTTSLRILESAADETGIKPFSGETSIFITPGYRFNAVDMLMTNFHLPRSTLFMLVCAFAGLERMQSAYAHAIRSGYRFYSYGDACLLMGK

SEQ ID NO: 71383 - protein, 347 aa, Rhodoblastus sphagnicola
  misc_feature (1)..(347): tr|A0A2S6NA62|A0A2S6NA62_9RHIZ S-adenosylmethionine:tRN A ribosyltransferase-isomerase OS=Rhodoblastus sphagnic ola OX=333368 GN=queA PE=3 SV=1
MRVNLFDFDLPEERIALRPAQPRESARLLVIGDALRDLRVGDLPSLLRPGDVLVVNDAKVIPAQLFGTRARGEVFARIEATLHKKVDAAHWRAFVRPAKKLKIGETIVFGGVGGELRAQVEEKNEGEVLLGFDLSGPALDTVLMAIGHMPLPPYIAARRPEDAQDARDYQTVFAEKLGAVAAPTAGLHFTPNLLEAARAAGVRVEKVTLLVGAGTFLPVKAEDTEDHVMHAEWGEIDAGTAERLNAARAAGGRVVAVGTTSLRILESAADETGIRPFVGETSIFITPGYCFNAADALMTNFHLPRSTLFMLVSAFAGLERMQAAYAHAIEAGYRFYSYGDACLLLRK

SEQ ID NO: 71384 - protein, 352 aa, Rhodococcus jostii
  misc_feature (1)..(352): tr|Q0SK86|Q0SK86_RHOJR S-adenosylmethionine:tRNA ribosy ltransferase-isomerase OS=Rhodococcus jostii (strain RH A1) OX=101510 GN=RHA1_ro00214 PE=3 SV=1
MTRARIPSAAEFRFVLPQRLEASGPPESRGLLRDSVRMLVSDRGRVEHSRFHDLPRFLRPGDVVVVNASSTLAAAVDGTVDAVGPVVVHFSTDLADGDWAVEVRAPGPVSGALDTIAAGTRIILPRGVVATLVKPWPLGSTRLWRASIDGVADVAAELLATSGRPITYAYVHERWPLSSYQTIFGRTGGSAEMASAARPFTHSMVTDLATSGVVVAPILLHTGVSSPERGEPPIPERFEVPEQTARLVNDRRAAGGRVIAVGTTVTRALETAATSGGMAVAGAGWTDLVLSAGRPTLVVDGLITGWHAPGASHLMLLESVVGEKAVRRAYDEALARGYLWHEFGDSALLLRR

SEQ ID NO: 71385 - protein, 367 aa, Rhodococcus jostii
  misc_feature (1)..(367): tr|A0A1H5ML53|A0A1H5ML53_9NOCA S-adenosylmethionine:tRN A ribosyltransferase-isomerase OS=Rhodococcus jostii OX =132919 GN=SAMN04490220_9081 PE=3 SV=1
MTGARTAAAAELRFVLPRRLEASGPPESRGLRRDAVRLLVSDRGRVEHSRFHELPRYLRPGDVVVVNTSSTLAAAVDGTVAGVGPVVVHFSTELEHGEWAVEVRAPGPVAGALGSVGAGTRISLPLGAVATLAEPWPRGSTRLWRAGIDGVTDVPTELLATSGRPITYAYVPEHWPLPDYQTIFGRIGGSAEIASAARPFTHAVITELVTSGVVVAPVLLHTGVSSPERGEPPIPERYEVPEPTARLVNDRRAAGGRVIAVGTTVTRALETRATSDGRAVAGAGWTDLVLSARRPTRVVDGLITGWHAPGASHLMLLESVVGAAAVRHAYDEALAGGYLWHEFGDSALLLRRCRDLTARAGCPSPGK

SEQ ID NO: 71386 - protein, 352 aa, Rhodococcus koreensis
  misc_feature (1)..(352): tr|A0A1H5CER3|A0A1H5CER3_9NOCA S-adenosylmethionine:tRN A ribosyltransferase-isomerase OS=Rhodococcus koreensis OX=99653 GN=SAMN04490239_9152 PE=3 SV=1
MTRSGSDSVTEFRFVLPQRLEASGPPEERGLLRDSVKLLVSDRGNLVHSTFHDLPRFLRPGDVVVVNASATLAAAMDGTVDTVGPVVVHFSTELEGGDWAVEVRAPGPVSGALDSVTEGTRIRLSRGAVATLQEPWPRGSTRLWRASVDGVTDVAAELLATAGRPITYAYVHERWPLSYYQTIFGRTGGSAEMASAARPFTHPIVTDLATSGVVTAPILLHTGVSSPERGEPPIPERYEVPEHTARLINDRRAAGGRVIAVGTTVTRALETRATPDGLAVAGGGWTNLVLSAGRPARVVDGLITGWHAPGASHLMLLESVVGAAAVRRAYDEALARGYLWHEFGDSALLLRR

SEQ ID NO: 71387 - protein, 366 aa, Rhodococcus maanshanensis
  misc_feature (1)..(366): tr|A0A1H7FA84|A0A1H7FA84_9NOCA S-adenosylmethionine:tRN A ribosyltransferase-isomerase OS=Rhodococcus maanshane nsis OX=183556 GN=SAMN05444583_101112 PE=3 SV=1
MTEVRVEAAAGPDFVLPDRLEASGPPESRGQLRDTVRLLVAEGERVEHARFHELPRYLRAGDVVVVNTSATLAAAVDGTVDGVGPVVVHFSMPLDDGAWVVEVRAPGPVTGPLDDAAAGMRIRLPLSAEATLREPWPRTSIRLWRAEIDGVADVARDLLAVAGRPITYAYVRERWPLPYYQTIFGRDRGSAEMASAARPFTHTMITELAVSGVVVAPVLLHTSVSSAEPGEPPIPERYEIPEWTARLINDRRAAGGRVIAVGTTVTRALETGATERGTVVAGAGWTDLVLSARRPARVVDGLVTGWHAPGASHLMLLESVVGPAVVRRAYEAALEEGYLWHEFGDSALLLRAKGQLARLTPTAVRG

SEQ ID NO: 71388 - protein, 352 aa, Rhodococcus opacus
  misc_feature (1)..(352): tr|A0A3A9U3G8|A0A3A9U3G8_RHOOP S-adenosylmethionine:tRN A ribosyltransferase-isomerase OS=Rhodococcus opacus OX =37919 GN=COO55_36340 PE=3 SV=1
MTRARVASAAEFRFVLPQRLEASGPPESRGLLRDSVRLLVSDRGRVEHTRFHELPRFLQPGDVVVVNASSTLAAAVDGTVDTVGPVVVHFSTDLEDGDWVVEVRAPGPVSVALDAVAAGTRIILPRGVVATLVEPWPLGSTRLWRASIDGVADVAAELLATSGRPITYAYVHERWPLSSYQTIFGRTGGSAEMASAARPFTHPMVTDLVTSGVVVAPILLHTGVSSPERGEPPIPERYEVPEQTARLVNDRRAAGGRVIAVGTTVTRALETQATSDGMSLAGAGWTDLVLSAARPTRVVDGLITGWHAPGASHLMLLESVVGEAAVRRAYDEALAHGYLWHEFGDSALLLRR

SEQ ID NO: 71389 - protein, 352 aa, Rhodococcus opacus
  misc_feature (1)..(352): tr|A0A1B1K742|A0A1B1K742_RHOOP S-adenosylmethionine:tRN A ribosyltransferase-isomerase OS=Rhodococcus opacus OX =37919 GN=A8787_0291 PE=3 SV=1
MTRARVASAAEFRFVLPQRLEASGPPESRGLLRDSVRLLVSDRGRVEHTRFHELPRFLQPGDVVVVNASSTLAAAVDGTVDTVGPVVVHFSTDLEDGDWVVEVRAPGPVSVALDAVAAGTRIILPRGVVATLVEPWPLGSTRLWRASIDGVADVAAELLATSGRPITYAYVHERWPLSSYQTIFGRTGGSAEMASAARPFTHPMVTDLVTSGVVVAPILLHTGVSSPERGEPPIPERYEVPEQTAHLVNDRRAAGGRVIAVGTTVTRALETQATSDGMSLAGAGWTDLVLSAARPTRVVDGLITGWHAPGASHLMLLESVVGEAAVRRAYDEALAHGYLWHEFGDSALLLRR

SEQ ID NO: 71390 - protein, 342 aa, Rhodococcus qingshengii
  misc_feature (1)..(342): tr|A0A4R6A5C9|A0A4R6A5C9_9NOCA S-adenosylmethionine:tRN A ribosyltransferase-isomerase OS=Rhodococcus qingsheng ii OX=334542 GN=E2R56_03850 PE=3 SV=1
MAATAFDFYLPSELNATHPPERRGIRRDHVKMMVLNKQTGNVRHDRFFRLADYLKPGDLVVMNNSRTVPAILQAGLIRNTKQIHPEVEIRLARRRDEEIWDVLIVTDEVNLGDILHFSPDLTAVVIDIRKESPLKTILFSKKGTDLFNCIYALGEPVRYEYIHKKWELDYYQTVFASQPGSVEMPSAGRAFSWELLFNLQRKGIELDFIQLHTGLSYLLDDDYEPSPTDNYEEYHLSEKTIEKIHMTKAAGGRVIAVGTTVVRALESAGVTGELNGVTNLYINQSFPLKMVDGIITGFHEPKASHLDMLTAFVPQDLLWSAYEEAIEQQYLWHEFGDMNLIL

SEQ ID NO: 71391 - protein, 342 aa, Rhodococcus qingshengii
  misc_feature (1)..(342): tr|A0A4R6A3M9|A0A4R6A3M9_9NOCA S-adenosylmethionine:tRN A ribosyltransferase-isomerase OS=Rhodococcus qingsheng ii OX=334542 GN=queA PE=3 SV=1
MKVDLFDFHLPEELIAQVPLQNRTDSRLMVVNKETGVIKHEIFKNISEYLREGDCLVLNDTKVLPARLFGVKKDTGAKIEVLLLKQLEGDQWETLVKPAKRIKEGTEIDFGDGLLTAVCTGSSEHGGRVLEFHYEGIFYEILNQLGEMPLPPYIKEQLEDRDRYQTVFAREPGSAAAPTAGLHFTEDLLNEVREKGVHVAFITLHVGLGTFRPVSVDDVLEHDMHSEFYMITEGTARLLNEVRQNGGRIITVGTTSTRTLETIASENNGSFIESSGWTNIFIYPGYEFKAIDGMITNFHLPKSTLIMLVSALAGRENILHAYTTAVNEHYRFFSFGDAMLII

SEQ ID NO: 71392 - protein, 356 aa, Rhodococcus sp.
  misc_feature (1)..(356): tr|A0A541B4D3|A0A541B4D3_9NOCA S-adenosylmethionine:tRN A ribosyltransferase-isomerase OS=Rhodococcus sp. C9-5 OX=2546320 GN=FK531_16620 PE=3 SV=1
MTTADRTSEPRTRFELSHRQEADVPPEARGLARDGVRLLVSDREKLEHSVFRDIPRFLRAGDLLVVNTSATLPAAVDAEIDGEGRVVVHFSTPLGSGPLGGQDWAVEVRGPGPVTGPLPGIGVGTRIRLPRNASVMLLEPWPPGSRRLWRARVDGMADVTSDLLAAEGRPVTYAYVSGRWPLPYYQTVFGRDPGSAEMPSAGRPFTDVLIADLVARSVLVAPVLLHTGVSSPEAGEPPLPERYAVPATTARLVNETRAAGGRVIAVGTTVTRALETAATVGGRAVEGAGWTDLVLGRHRRARVVDGLVTGWHAPGASHLMLLEAVVGESVVRRAYEAALTHGYLWHEFGDSALLLR

SEQ ID NO: 71393 - protein, 352 aa, Rhodococcus sp.
  misc_feature (1)..(352): tr|A0A285E560|A0A285E560_9NOCA S-adenosylmethionine:tRN A ribosyltransferase-isomerase OS=Rhodococcus sp. OK270 OX=1882814 GN=SAMN05447004_11960 PE=3 SV=1
MTEVRVEAAAGPDFVLPNRLEASGPPESRGQLRDTVRLLVAEGDRVEHARFHELPRYLRGGDVVIVNTSATLAAAVDGTVDGVGRVVVHFSTPLDDGAWVVEVRAPGPVTGPLGAASAGMRIRLPLGAQATLREPWPRTSIRLWRAEIDGVADVARDLLAVAGRPITYAYVRERWPLPYYQTIFGKDRGSAEMASAARPFTHPMMTDLAVSGVAVAPILLHTSVSSAEPGEPPIPERYELPEWTARLINDRRAAGGRVIAVGTTVTRALETGATEGGTAVAGAGWTDLVLSGRRPARVVDGLITGWHAPGASHLMLLESVVGPAAVRRAYEAALAEGYLWHEFGDSALLLRA

SEQ ID NO: 71394 - protein, 352 aa, Rhodococcus wratislaviensis
  misc_feature (1)..(352): tr|A0A3D9QY73|A0A3D9QY73_9NOCA S-adenosylmethionine:tRN A ribosyltransferase-isomerase OS=Rhodococcus wratislav iensis OX=44752 GN=C8E05_0328 PE=3 SV=1
MTGARVASAAEFRFVLPRRLEASGPPESRGLLRDAVRLLVSDRGRVEHTRFHDLPRFLRPGDVVVVNASSTLAAAVDGTVDAVGPVVVHFSTDLGDGDWAVEVRAPGPVSGALDTVAAETRIILPRGVVATLMEPWPVGSTRLWRASIVGVKDVAAELLATSGRPITYAYVHDRWPLPSYQTIFGRTGGSAEMASAARPFTHPMVTDLATSGVVMAPILLHTGVSSPERGEPPIPERYEVPEQTAQLVNDRRAAGGRVIAVGTTVTRALETQATSDGMAVAGAGWTDLVLSAGRPTRVVDGLITGWHAPGASHLMLLESVVGEGAVRHAYDEALARGYLWHEFGDSALLLRR

SEQ ID NO: 71395 - protein, 352 aa, Rhodococcus wratislaviensis
  misc_feature (1)..(352): tr|X0R5U8|X0R5U8_9NOCA S-adenosylmethionine:tRNA ribosy ltransferase-isomerase OS=Rhodococcus wratislaviensis N BRC 100605 OX=1219028 GN=RW1_030_00770 PE=3 SV=1
MTGARVASAAEFRFVLPRRLEASGPPESRGLLRDAVRLLVSDRGRVEHTRFHDLPRFLRPGDVVVVNASSTLAAAVDGTVDAVGPVVVHFSTDLGDGDWAVEVRAPGPVSGALDTVAAETRIILPRGVVATLMEPWPVGSTRLWRASIDGVKDVAAELLATSGRPITYAYVHDRWPLPSYQTIFGRTGGSAEMASAARPFTHPMVTDLATSGVVTAPILLHTGVSSPERGEPPIPERYEVPEQTAQLVNDRRAAGGRVIAVGTTVTRALETQATSDGMAVAGAGWTDLVLSAGRPTRVVDGLITGWHAPGASHLMLLESVVGEAAVRHAYDEALAHGYLWHEFGDSALLLRR

SEQ ID NO: 71396 - protein, 342 aa, Rhodocyclaceae bacterium
  misc_feature (1)..(342): tr|A0A431KYZ0|A0A431KYZ0_9RHOO S-adenosylmethionine:tRN A ribosyltransferase-isomerase OS=Rhodocyclaceae bacter ium OX=1898103 GN=queA PE=3 SV=1
MALTLDDFDYLLPQELIAQAPLERRTDSRLLQVSTTLGDLRFSDLPSLLAPGDLLVFNDTRVLHARLFGTKDTGGQVEVMIERPLGAHEALAQIRASKSPKPGTRLHLEGALEVEVLGRAGEFFHLRFPATEDLVELLERHGRLPLPPYIERSAGNADESRYQTVYARNPGSVAAPTAGLHFDEPLLARLAEQGVNSAYVTLNVGAGTFQPVRVQDLSEHQMHTEAYFVPKATVDAIAATKAAGKRVVCVGTTSMRALESAARSRTLQAGEAESDLFILPGYEFNVADALITNFHLPKSTLLMLVSALAGMDTIRRAYAHAIEQRYRFFSYGDAMFLTRDSQ

SEQ ID NO: 71397 - protein, 370 aa, Rhodocyclaceae bacterium
  misc_feature (1)..(370): tr|A0A524BCD9|A0A524BCD9_9RHOO S-adenosylmethionine:tRN A ribosyltransferase-isomerase OS=Rhodocyclaceae bacter ium OX=1898103 GN=queA PE=3 SV=1
MTSLSVDDFDFHLPPELIAQHPAAERRGSRLLHVCPRGLPAGCCGEPENPAKIGSKGLQLVDRQFADLPGLLRAGDLLVFNDTRVIKARFFGCKDTGGHIEVMLERIVDATHAICQIRASKAPKAGSTLRLADAFDVRMTGRAGTDGDFFALELVDAGNFWELSEQYGKLPLPPYIEHPAEGADETRYQTVYAREPGAVAAPTAGLHFDEAMLETLRAQGINTAFLTLHVGAGTYRPMRVEKIADHRMHSERFEIPQATVEAIAATRAAGGRIIAVGTTSLRALESAGNDNGAVRVGGAETDIFITPGYRFKVVDRLITNFHLPKSTLLMLVSAFSGMAAIREAYAHAVAQRYRFFSYGDAMLLEKADAV

SEQ ID NO: 71398 - protein, 344 aa, Rhodocyclales bacterium
  misc_feature (1)..(344): tr|A0A363SGR5|A0A363SGR5_9RHOO S-adenosylmethionine:tRN A ribosyltransferase-isomerase OS=Rhodocyclales bacteri um OX=2072421 GN=queA PE=3 SV=1
MPLSLADFDYDLPPELIAQFPLPERTASRLLAVDGDKLEDRRFSEIAQLLRAGDLLVFNDTRVLHARLHGVKDSGGRVEVLIERPVGRHEALAQIRASHAPWPGSRLVLEGVLEVSVVAREGAFFLLRFPGPEDLVDLLERHGKLPLPPYIQRQSEDADEARYQTVYARNRGSVAAPTAGLHFDAPLLDALRAKGVDFAWLTLHVGAGTFQPVRVEDLAHHRMHRERYVIPVDTANALAAARARGGRIVAVGTTSLRALEAAAQEGEILAGPGETELFILPGFRFRTADALITNFHLPKSTLLMLVSAFGGLENLRRAYAHALAERYRFFSYGDAMFITRHDTP

SEQ ID NO: 71399 - protein, 372 aa, Rhodocyclales bacterium
  misc_feature (1)..(372): tr|A0A2M7Y6F4|A0A2M7Y6F4_9RHOO S-adenosylmethionine:tRN A ribosyltransferase-isomerase OS=Rhodocyclales bacteri um CG_4_9_14_3_um_filter_68_10 OX=1974089 GN=queA PE=3 SV=1
MGHGFPAFGAAHRDDELATRPAEVSRTIAPVKLSDFDYALPPELVARHPLPSRSASRLLVLRGSRIDDRCFRDLPALLRPGDLLVANDTRVVHARLRGAKPSGGRVEALVERIVGEHEADAQLRASHKPQPGTRLLIDGGLELEVVAREGDFFRLRFPGDDNVMTLLERHGSLPLPPYLGREPEAADEIRYQTVYARSDGSAAAPTAGLHFDRALLDELAARAVGFAHLTLDVGAGTFQPVRVEDLAQHRMHRERYRVPEETVRAVAAARAAGGRVLAVGTTSLRALEAAAASGTLEAGEGETGLFILPGYRFRVPDGLITNFHLPRTTLLMLACAFGGTRNVLHAYGHAIRCGYRFYSYGDAMFIEREAQA

SEQ ID NO: 71400 - protein, 374 aa, Rhodoferax antarcticus
  misc_feature (1)..(374): tr|A0A1Q8YIF4|A0A1Q8YIF4_9BURK S-adenosylmethionine:tRN A ribosyltransferase-isomerase OS=Rhodoferax antarcticu s ANT.BR OX=1111071 GN=queA PE=3 SV=1
MNINTPLHPRPYTLSDFDFELPPELIAQHPAPERSGSRLLDGSASTPVDRIFRGLPALLQPGDLMVFNDTQVMNARLFGEKPTGGKVELLVERVLGANQVAAHMRVSKKPEVGTSLALIGAPGTREHLSATLLGRWPDEQGTLFRFVLSNDAGDDPYTLMARHGHVPLPPYITHTDSPEDAKRYQTVFAKNPGAVAAPTAALHFDEALLAQIDAMGVQRAHVTLHVGAGTFQPVKTENLAEHQMHSEWFEVPVATQQALADCHARGGRVVAVGTTTVRTLESWALENGIGSPMAQQPRALTPFSRDTRIFITPGFDFKVVDALITNFHLPKSSLMMLVSAFAGFEHIRALYAHAIREKYRFFSYGDAMLLARRA

SEQ ID NO: 71401 - protein, 360 aa, Rhodoferax fermentans
  misc_feature (1)..(360): tr|A0A1T1ATG4|A0A1T1ATG4_RHOFE S-adenosylmethionine:tRN A ribosyltransferase-isomerase OS=Rhodoferax fermentans OX=28066 GN=queA PE=3 SV=1
MNTSSPSAPRSFTLSDFDFQLPPELIAQHPAPERSGSRLLDGRSASPVDRVFRDLPALLQPGDLMVFNDTQVMNARLFGEKPTGGKLELLVERVLGGNQVAAHMRVSKKPEVGTTVALVSAPGSTDHLSATLLGRWPDEQGALFRFVLSNDAGDDPYTLMSRHGHVPLPPYITHTDSEEDARRYQTVFAKNPGAVAAPTAALHFDEALLAQIDALGVQRAQVTLHVGAGTFQPVKTENLSEHQMHSEWYEVPASTQQAIADCRARGGRIVAVGTTTVRTLESWAQSGTSTGDTRIFITPGFEFRQVDALITNFHLPKSSLMMLVSAFAGYEHIMALYAHAIQEKYRFFSYGDAMLLTRQP

SEQ ID NO: 71402 - protein, 360 aa, Rhodoferax ferrireducens
  misc_feature (1)..(360): tr|Q221C4|Q221C4_RHOFT S-adenosylmethionine:tRNA ribosy ltransferase-isomerase OS=Rhodoferax ferrireducens (str ain ATCC BAA-621 / DSM 15236 / T118) OX=338969 GN=queA PE=3 SV=1
MPLTLADAARAFTLSDFDFHLPPELIAQHPAPERSGSRLLDSTSATPQDRVFRDLPSLLQPGDLLVFNDTRVINARLFGEKSTGGKLELLVERVLGGNQVAAHLRVSKKPEVGASVALTGAPGTHENLRATLLGRWPDAQGALFRFVLTNDAGDDPFTLMARHGHVPLPPYITHSDSAEDAARYQTVFAKNPGAVAAPTAALHFDDALLAALDARGVQRAFVTLHVGAGTFQPVKTENLAEHQMHSEWYDVPTATQQAIADCRARGGRLIAVGTTTVRTLESWAKTGQTTGDTQIFITPGFEFQLVDLLVTNFHLPKSSLMMLVSAFAGYEPVMALYQHAMAAQYRFFSYGDAMLLARQR

SEQ ID NO: 71403 - protein, 375 aa, Rhodoferax ferrireducens
  misc_feature (1)..(375): tr|A0A1W9KSM2|A0A1W9KSM2_9BURK S-adenosylmethionine:tRN A ribosyltransferase-isomerase OS=Rhodoferax ferrireduc ens OX=192843 GN=queA PE=3 SV=1
MNTYTHHSPRPYTLSDFDFELPPELIAQHPAPERSSSRLLDGSGGKPVDRIFRDLPMLLQPGDLMVFNDTQVMNARLFGEKPTGGKVELLIERVLGGNQVVAHMRVSKKPEIGTTITLVAAPGYTDHPSATLLGRWPDAQGTLFRLVLSNDAGDNPYTLMARHGHVPLPPYITHTDSVEDAQRYQTVFAKHPGAVAAPTAALHFDDALLAQIDALGVQRAHVTLHVGAGTFQPVKTENLAEHQMHSEWFEVPVATQQAIADCRARGGRVVAVGTTTVRTLESWAACATTPGPNVADAPLVPVSGDTRIFITPGFDFQMVDALITNFHLPKSSLMMLVSAFAGYEPIRALYAHAIREKYRFFSYGDAMWLVRQAKE

SEQ ID NO: 71404 - protein, 359 aa, Rhodoferax koreense
  misc_feature (1)..(359): tr|A0A1P8JR04|A0A1P8JR04_9BURK S-adenosylmethionine:tRN A ribosyltransferase-isomerase OS=Rhodoferax koreense O X=1842727 GN=queA PE=3 SV=1
MSTRPFTLSDFDFILPEALIAQHPATERSASRLLDGTAAHPVDRVFRDLPGLLRAGDLLVFNDTKVVKARLFGEKASGGKVELLVERVLTGNQVAAHMRVSKKPEPGATISLAGKDEESGFRATLLGRWPDADGTLFRFVLSNDAGDDPYTLMERHGHVPLPPYITHTDSAEDAERYQTVFARAPGAVAAPTAALHFDAAVLAGLDARGVQRASVTLHVGAGTFQPVKTENIAEHQMHSEWYEVPAATQQAIAECRARGGRVVAVGTTSVRTLESWAASGLASGDTRIFITPGFDFQVVDVLITNFHLPKSTLMMLVSAFAGYEPIMALYRHAIAQQYRFFSYGDAMLLERKSVDGAAA

SEQ ID NO: 71405 - protein, 363 aa, Rhodoferax saidenbachensis
  misc_feature (1)..(363): tr|A0A1P8K6C4|A0A1P8K6C4_9BURK S-adenosylmethionine:tRN A ribosyltransferase-isomerase OS=Rhodoferax saidenbach ensis OX=1484693 GN=queA PE=3 SV=1
MPLHPSDADRVYTLSDFDFELPEALIAQHPAPERSGSRLLDGTGATSVDRIFRELPSLLKTGDLLVFNDTKVINARLFGEKATGGKVELLIERVLGGNQVAAHMRVSKKPEVGATIKMTCAPGQEDGLSATLLGRWPNVDGPIYRFVLSNDRGDDPYTLMERHGHVPLPPYITHSDSPEDVQRYQTVFAKNPGAVAAPTAALHFDEALFAQFDAMGVSRAHVTLHVGAGTFQPVKTENLAEHQMHSEWYDVPAATQQAIAECKARGGRIVAVGTTTVRTLESWAKTGLASGDTNIFITPGFDFQLIDLLVTNFHLPKSSLMMLVSAFAGYEHIMGLYGEAIARGYRFFSYGDAMLLERTRALP

SEQ ID NO: 71406 - protein, 360 aa, Rhodoferax sp.
  misc_feature (1)..(360): tr|A0A1G3HTS3|A0A1G3HTS3_9BURK S-adenosylmethionine:tRN A ribosyltransferase-isomerase OS=Rhodoferax sp. RIFCSP LOWO2_12_FULL_60_11 OX=1802019 GN=queA PE=3 SV=1
MPLTLADAARAFTLSDFDFHLPPELIAQHPAPERSGSRLLDSTGATPQDRVFRDLPSLLQPGDLLVFNDTRVINARLFGEKSTGGKLELLVERVLGGNQVAAHLRVSKKPEVGASVALTGAPGTHENLRATLLGRWPDAQGALFRFVLTNDAGDDPFTLMARHGHVPLPPYITHTDSAEDAARYQTVFAKNPGAVAAPTAALHFDDALLAAIDARGVQRAFVTLHVGAGTFQPVKTENLAEHQMHSEWYDVPAATQQAIAECRARGGRLIAVGTTTVRTLESWAKTGQTTGDTQIFITPGFEFQLVDLLVTNFHLPKSSLMMLVSAFAGYEPVMALYRHAMAAQYRFFSYGDAMLLARQR

SEQ ID NO: 71407 - protein, 367 aa, Rhodoferax sp.
  misc_feature (1)..(367): tr|A0A515EK19|A0A515EK19_9BURK S-adenosylmethionine:tRN A ribosyltransferase-isomerase OS=Rhodoferax sp. Gr-4 O X=2527691 GN=queA PE=3 SV=1
MTLASAAARTFTLSDFDFALPDNLIAQHPAPQRTASRLLDGTGANSVDRIFKDLPTLLRAGDLMVFNDTKVINARLFGEKATGGKLELLIERVLGGNQVAAHMRVSKKPEVGATVKLVCAPGCEDGLSATLLGRWPNADGPLFRFVLSNDAGDNPYTLMERHGHVPLPPYITHTDSAEDAQRYQTVFAKNPGAVAAPTAALHFDEALLAQLDAMGVQRAHVTLHVGAGTFQPVKTENIAEHQMHSEWYQVPQATIDAIAACKARGGRVIAVGTTTVRTLESWAKSCTGPGFAGGITEGDTNIFITPGFAFEVVDMLITNFHLPKSSLMMLVSAFAGYVPIMALYRDAIAREYRFFSYGDAMLLARAA

SEQ ID NO: 71408 - protein, 333 aa, Rhodohalobacter barkolensis
  misc_feature (1)..(333): tr|A0A2N0VEU1|A0A2N0VEU1_9BACT S-adenosylmethionine:tRN A ribosyltransferase-isomerase OS=Rhodohalobacter barko lensis OX=2053187 GN=queA PE=3 SV=1
MSYTLDDFDYHLPEELIAQKPATPRDHSRLLVYDRETGTIRDDYFYNIGDYLPVNTSLVVNNSKVEKCRLLFNEDKVEIFVTKAVNDRVVEAMVRPGKKFKPGKTVDLADGLTAKTLNIAEDGIRTIELSRSLDDEITEKYKHTPFPPYIERDESLADRYQTVYAKDEGSKAAPTAGLHFTPDLLEKLEKQGIEKKEVTLHVGLGTFAPVKADKIEDHIMHSEWFQISQKQADELNRSKSITAVGTTSVRVLESAQKIEGKFVAGSGETDIFITPGYSFKSVDHLITNFHLPKSTLLMLISAFIGMDETKRIYQHAIREKYRFYSFGDAMLLL

SEQ ID NO: 71409 - protein, 348 aa, Rhodohalobacter sp.
  misc_feature (1)..(348): tr|A0A371QKQ2|A0A371QKQ2_9BACT S-adenosylmethionine:tRN A ribosyltransferase-isomerase OS=Rhodohalobacter sp. S W132 OX=2293433 GN=queA PE=3 SV=1
MKLTDFKFEIEDFNVPEEPVNPRDSSKLMVLNREDQSIKHETFADIHKYVNEGDVIIYNNTKVFPAKLKGKKEKTDADIEVFLLRELMPENMLWDVLVEPARKIRIGNKLYFGEDLMAEVVDNTTSRGRTIRFLYEGSNEELYERLDEIGDMPLPPYIEREPVEGDKERYQTIFAKERGAVAAPTAGMHFTEELVEKIEKKGAEFLPVTLHIGWGTFRNVEVEDLTKHRMDSENFLISKDTSDKINTALKSKKNKVIACGTSAVRVIETSVMASGMSKPGTGWTDKFIYPDYDFKITEAVITNFHRPESTLLMLAAAFGSYDFIMKAYEEAKENDYRFFTFGDAMLIL

SEQ ID NO: 71410 - protein, 333 aa, Rhodohalobacter sp.
  misc_feature (1)..(333): tr|A0A371QTB1|A0A371QTB1_9BACT S-adenosylmethionine:tRN A ribosyltransferase-isomerase OS=Rhodohalobacter sp. S W132 OX=2293433 GN=queA PE=3 SV=1
MSFTLDDFDYNLPEELIAQKPATPRDHSRLLVYNRETGEITDDYFYNIGDYLPPDTSLVVNNSKVEKCRLLFNDGKVEIFVTRAVNNRVVEAMVRPGKKFRSGKTVDLTDELSAKTISIADDGIRTIELSHPLDHPVVTPYKHTPFPPYIERDESLSERYQTVYAKDSGSKAAPTAGLHFTPELLEKLAAQGIRKNEVTLHVGLGTFAPVKADRIEDHIMHSEWYQISQQQADALNKTKRVTAVGTTSVRVLESAPKEEGSFIPCSGETDIFITPGYTFKSVDHLITNFHLPKSTLLMLIAAFTGFDEMKKIYQHAIQQNYRFYSFGDAMLIL

SEQ ID NO: 71411 - protein, 364 aa, Rhodomicrobium udaipurense
  misc_feature (1)..(364): tr|A0A037V241|A0A037V241_9RHIZ S-adenosylmethionine:tRN A ribosyltransferase-isomerase OS=Rhodomicrobium udaipu rense JA643 OX=858455 GN=queA PE=3 SV=1
MHLKDFDFELPKSAIALRPASPRDAARLLRVDPAAPEPLSEATIRDLPAFFRPGDIMVFNDTRVLSAELSGTRPPRDADAPAVDVSLNLIEREASGSWKAFARPARRLRPGDAIHFETGGQASRLIVVAKSDEGEITLAAPDGDSVEAVMQRHGAMPLPPYIARQRPADERDRSDYQTVFARNEGAVAAPTAGLHFTPELLARLAERGVETAFVTLHVGAGTFLPVKSETVEDHEIHAEWFEIGDETARAINAARERGSRIIAAGTTSLRVLETATREDGFIEPAKGFTRIFIKPGHRFRSADLLVTNFHLPKSTLFMLVCAFSGTDIMKRAYAHAVDAGFRFYSYGDACLLSRADALPSAARP

SEQ ID NO: 71412 - protein, 391 aa, Rhodomicrobium vannielii
  misc_feature (1)..(391): tr|E3I2T6|E3I2T6_RHOVT S-adenosylmethionine:tRNA ribosy ltransferase-isomerase OS=Rhodomicrobium vannielii (str ain ATCC 17100 / ATH 3.1.1 / DSM 162 / LMG 4299) OX=648 757 GN=queA PE=3 SV=1
MSGRTRALIFYFGTCPPLGLPFLRRRIVHLTDFDFELPKSAIALRPASPRDAARLLRVDPAAPQPLSEATIRDLPAFFRPGDIMVFNDTRVLSAELSGTRPPRDADAPAVDVSLNLIEREASGSWKAFARPARRLRPGDAIHFETGGHASRLIVVAKSDEGEITLAAPDGDSVEAIMQRHGAMPLPPYIARQRPADERDRSDYQTVFARNEGAVAAPTAGLHFTPELLARLAERGIETAFVTLHVGAGTFLPVKSETVEDHEIHAEWFEIGDATARAINAARERGGRIIAAGTTSLRVLETATREDGFIEPAKGFTRIFIKPGHCFRSADLLVTNFHLPKSTLFMLVCAFSGTDLMKRAYAHAVEAGFRFYSYGDACLLARADAQPSTARP

SEQ ID NO: 71413 - protein, 409 aa, Rhodonellum psychrophilum
  misc_feature (1)..(409): tr|U5BU99|U5BU99_9BACT S-adenosylmethionine:tRNA ribosy ltransferase-isomerase OS=Rhodonellum psychrophilum GCM 71 = DSM 17998 OX=1123057 GN=queA PE=3 SV=1
MRTNPTWEDLKLSDYEYTLPEDRIAKFPLEKRDESKLLHYKNSKIEHLHFSELPKLIPSGSLMVFNNTKVIPARLIFQRPTGAKIEIFLLKPVLPTTVINEVMLETGSVSWETMIGNLKKWKEGEVLEGVITIKEEKLVLSAELVDRENRMVRLSWTDSAIPFVSIVEAAGEVPLPPYLNRKATEEDKPRYQTIYSKKEGAVAAPTAGLHFTEKILNQIEERNIGIDYLTLHVGAGTFQPIKEEEVSKHGMHSEQIVVDISTITRISEHEHALIAVGTTSMRSLESLYWFGVKLQQNAGEEFLIPKLYPYQPFTSLPSRKESFETILKWMEAKGIGEITGSTEILIMPGYNFRVCQGLVTNFHQPSSTLILLVAAFTGGNWRKIYDSALKNEYRFLSFGDSSLLWHEEF

SEQ ID NO: 71414 - protein, 349 aa, Rhodonellum psychrophilum
  misc_feature (1)..(349): tr|U5C3M4|U5C3M4_9BACT S-adenosylmethionine:tRNA ribosy ltransferase-isomerase OS=Rhodonellum psychrophilum GCM 71 = DSM 17998 OX=1123057 GN=queA PE=3 SV=1
MKLSDFKFDVPRKLISLYPAENRDESRLMVVHRKTGEIEHRIFKDIIEYFDEGDVFVMNNTKVFPARLYGNKEKTGAKIEVFLLRELNQELRLWDVLVDPARKIRVGNKLYFGDSDLVAEVIDNTTSRGRTIRFLFDGTDEEFYKTVDTLGETPILKEFIERSVEAEDRERYQTIFAKHVGAVAAPTAGLHFTPHLLKRLELKGVDVTPITLHVGLGTFRQVDVEDLTKHKMDSENFDIPEETVNLVNRALDSKKRVVSVGTTTLKTIESSVTANGRLKEDRGWTDKFITPPYEFKIANALITNFHLPESTLLMTASAFGGYDLIMKAYQIAIKEKYRFFSYGDAMLIL

SEQ ID NO: 71415 - protein, 358 aa, Rhodopila globiformis
  misc_feature (1)..(358): tr|A0A2S6NLN1|A0A2S6NLN1_RHOGL S-adenosylmethionine:tRN A ribosyltransferase-isomerase OS=Rhodopila globiformis OX=1071 GN=queA PE=3 SV=1
MPVATDVEPPVTPLTLADFDYTLPPERIAHEPARPRDSARLLHVHPGGLADRLVRDLPGLLRPGDVLVANDTRVFPAQLTALRGAARIGITLDRPRRDGAWKALARNARRLHAGDALAIAGAGMLTARVVDKHADGSVGLAFNLDGDDLMAAFHEAGALALPPYIDRPHGPLPSDSADYQTVFAQREGAVAAPTAGLHFTPALLAALDAAGVRRVTLTLHVGIGTFLPVRVERVADHRMHAERGEITAEAAAAINQARRDGGRVIAVGTTSLRLLESAAWPAGTVQPFRGETSLFILPGYGFKAVDRLLTNFHLPRSTLLMLVSAFSGRARILAAYEHAIVAGYRFHSYGDACFLEPG

SEQ ID NO: 71416 - protein, 402 aa, Rhodopirellula baltica
  misc_feature (1)..(402): tr|L7CK20|L7CK20_RHOBT S-adenosylmethionine:tRNA ribosy ltransferase-isomerase OS=Rhodopirellula baltica SWK14 OX=993516 GN=queA PE=3 SV=1
MFRQAVLATIAERPYAGRSILSDTFLRSYASFRMPSLDLYDYELPRELIAQEPLQNRVDARLMVIDRASGEIEHHHVRDLPQLLRAEDVMVKNNSRVVPARLFGRRTKTGGRWQGLFLRSDRATGVWELLTKTRGTLQTGETITLDDRDARAGGELMVIGRDDQGHLLVQPVPNESFEGPPQAIEPGKWLDKYGRVPIPPYIRDGHMVDADVTNYQTVFASTNPEDAGSVAAPTAGLHFTKQLLDEIAKGQTASAEVTLHVGIGTFRPIEVDDIDQHQMHEEWGRIEEDAVETINDRRSGGGRCVAVGTTSVRVLESCVANRNETNGRGVAATWTGATDIFIKPPYRFGVVDALMTNFHLPKSSLLVLVSAFAGHELIRRAYQEAIANEYRFFSYGDAMLIV

SEQ ID NO: 71417 - protein, 402 aa, Rhodopirellula baltica
  misc_feature (1)..(402): tr|K5E3S5|K5E3S5_RHOBT S-adenosylmethionine:tRNA ribosy ltransferase-isomerase OS=Rhodopirellula baltica SH28 O X=993517 GN=queA PE=3 SV=1
MFRQAVLATIAERPYAGRSILSDTFLRSYASFRMPSLDLYDYELPRELIAQEPLQNRVDARLMVIDRASGEIEHHHVRDLPQLLRAEDVMVKNNSRVVPARLFGRRTKTGGRWQGLFLRSDRATGVWELLTKTRGTLQTGETITLDDRDARAGGELMVIGRDDQGHLLVQPVPNESFEGPPQAIEPGKWLDKYGRVPIPPYIRDGHMVDADVTNYQTVFASTNPEDAGSVAAPTAGLHFTKQLLDEIAKGQTASAEVTLHVGIGTFRPIEVDDIDQHKMHEEWGRIEEDAVETINDRRSGGGRCVAVGTTSVRVLESCVANRNETNGRGVAATWTGATDIFIKPPYRFGVVDALMTNFHLPKSSLLVLVSAFAGHELIRRAYQEAIANEYRFFSYGDAMLIV

SEQ ID NO: 71418 - protein, 388 aa, Rhodopirellula europaea
  misc_feature (1)..(388): tr|M2AX02|M2AX02_9PLAN S-adenosylmethionine:tRNA ribosy ltransferase-isomerase OS=Rhodopirellula europaea 6C OX =1263867 GN=queA PE=3 SV=1
MLVDRLFPTHFLRPYASFRMPSLDLYDYELPRELIAQEPLQNRVDARLMVIDRASGEIEHHHVRDLPQLLRAEDVMVKNNSRVVPARLFGRRTKTGGRWQGLFLRSDRATGVWELLTKTRGTLQTGETITLDDRDARAGGELMVIGRDDQGHLLVQPVPNEFFDGPPQAIEPGKWLDKYGRVPIPPYIRDGHMVDADVTNYQTVFASINPEDAGSVAAPTAGLHFTKQLLDEIAKGQTASAEVTLHVGIGTFRPIEVDDIDQHQMHEEWGRIEEDAVETINDRRSGGGRCVAVGTTSVRVLESCVTNRNETNGRGVAATWTGATDIFIKPPYRFGVVDALMTNFHLPKSSLLVLVSAFAGHDLIRRAYKEAIANEYRFFSYGDAMLIV

SEQ ID NO: 71419 - protein, 388 aa, Rhodopirellula europaea
  misc_feature (1)..(388): tr|M5RYU6|M5RYU6_9PLAN S-adenosylmethionine:tRNA ribosy ltransferase-isomerase OS=Rhodopirellula europaea SH398 OX=1263868 GN=queA PE=3 SV=1
MLFDRFFPTLFLRPYASFRMPSLDLYDYELPRELIAQEPLQNRVDARLMVIDRASGEIEHHHVRDLPQLLRAEDVMVKNNSRVVPARLFGRRTKTGGRWQGLFLRSDRATGVWELLTKTRGTLQTGETITLDDRDARAGGELMVIGRDDQGHLLVQPVPNESFDGPPQAIEPGKWLDKYGRVPIPPYIRDGHMVDADVTNYQTVFASTNPEDAGSVAAPTAGLHFTKQLLDEIAKGQTASAEVTLHVGIGTFRPIEVDDIDQHQMHEEWGRIEEDAVETINDRRSGGGRCVAVGTTSVRVLESCVTNRDETNGRGIAATWTGATDIFIKPPYRFGVVDALMTNFHLPKSSLLVLVSAFAGHDLIRRAYKEAIANEYRFFSYGDAMLIV

SEQ ID NO: 71420 - protein, 397 aa, Rhodopirellula islandica
  misc_feature (1)..(397): tr|A0A0J1BJD5|A0A0J1BJD5_RHOIS S-adenosylmethionine:tRN A ribosyltransferase-isomerase OS=Rhodopirellula island ica OX=595434 GN=queA PE=3 SV=1
MVAAIAQRPYAGRSILPTHFLCSDASFRMPSLDLYDYELPRERIAQEPLPNRVDARLMVIDRASGEIEHHHVRDLPQLLRAEDVMVMNNSRVVPARLFGRRTKTGGRWQGLFLRSDRATGVWELLTKTRGTLQTGETITLDDRDARAGGELMVIGRDDQGHLLVQPVPNDFFEGPAKAIEPGKWLDRYGRIPIPPYIRDGHMVDADVTNYQTVFASSKPEDAASVAAPTAGLHFTKSLLTEIAKGQTAMAEVTLHVGIGTFRPIEVNDIDEHRMHEEWGRIESDAVSQINDRRSGGGRCVAIGTTSVRVLESCVANRNESDGRGVAETWTGATDIFIKPPYRFGVVDALMTNFHQPKSSLLVLVSAFAGHDLIRRAYQEAIENEYRFFSYGDAMLIV

SEQ ID NO: 71421 - protein, 358 aa, Rhodopirellula maiorica
  misc_feature (1)..(358): tr|M5RTV0|M5RTV0_9PLAN S-adenosylmethionine:tRNA ribosy ltransferase-isomerase OS=Rhodopirellula maiorica SM1 O X=1265738 GN=queA PE=3 SV=1
MSDIEQYDYDLPRERIAQEPLATRSDARLMLVDRKAGTIDHHYVRDLPELLKADDTLVLNNTRVIPAKLVGYRAETSGQWQGLFLRADAATGVWEVLTKTRGTLRPGEAITIKDREGRPSMQLVVVSRTDDGHLLVTPRLPGRDESEWPREPADWLERYGRIPLPPYIRDGQMVDADVKNYQTVFAEHRGSVAAPTAGLHFTDKLLEYIRTGGTDIQEVTLHVGIGTFRPIAVDRLDEHTMHSEWGQIDAATAETIRARRAHGRCIAVGTTSVRVLESAAQNAEGQLEPWTGATDLFIKPPYQFKVVDALMTNFHLPRSSLLVLVSAFAGRELIMEAYQNAIENEYRFFSYGDAMLIV

SEQ ID NO: 71422 - protein, 367 aa, Rhodopirellula sallentina
  misc_feature (1)..(367): tr|M5TXH4|M5TXH4_9PLAN S-adenosylmethionine:tRNA ribosy ltransferase-isomerase OS=Rhodopirellula sallentina SM4 1 OX=1263870 GN=queA PE=3 SV=1
MHSLNLYDYTLPRELIAQEPLRNRVDARLMIIDRAKGTIEHHHVRDLPELLRAEDSLVLNNSRVVPARLIGYRTRTRGRWQGLFLRSDQESGVWELLTKTRGTLKTGETITLQDRDARDGGQLEVIGRDDEGHLLVRPLAESVHLDDSLAGHETSPTHWLERFGRVPIPPYIRDGRMVDADLVNYQTVFASKRDEDKASVAAPTAGLHFTENLLSNIRKGQTAIHEVTLHVGIGTFRPIESDNIDEHHMHHEWGRIDEQTCQNIQARRAAGGRCVAVGTTSVRVLESSVAANGGELKEWTGATDLFIKPPYQFGAVDALMTNFHLPKSSLLVLVSALAGRELIMEAYRQAIESEYRFFSYGDAMLIT

SEQ ID NO: 71423 - protein, 367 aa, Rhodopirellula sp.
  misc_feature (1)..(367): tr|A0A1Z8MKR8|A0A1Z8MKR8_9PLAN S-adenosylmethionine:tRN A ribosyltransferase-isomerase OS=Rhodopirellula sp. TM ED11 OX=1986614 GN=queA PE=3 SV=1
MSEIDQYDYQLPRELIAQEPLNNRSDARLMLINRASGEIQHHHVRDLPDLLRSEDTLVLNDSRVIPARMVGYRTRTGGRWQGLFLRQDPATGIWEVLTKTRGTLVAGETITIEDRNGLPGMRLQVVSRTDDGHLIAVPMPPEDRHAGGELPPIDGDSIDAAVWLERYGRVPLPPYIRDGHMMDSDVTNYQTVFAKAPGSVAAPTAGLHFTPNLLQQIVSGGTETASVTLHVGLGTFRPVSCERLEDHPMHTEWGQITEENAELINQRRSTGGRCVAVGTTSVRVLESAAAANGGQLKPWTATTDLFIRPPHDFKVVDALMTNFHLPKSTLMVLVSALAGRELIMEAYRQAIAEEYRFYSYGDCMMIV

SEQ ID NO: 71424 - protein, 366 aa, Rhodopirellula sp.
  misc_feature (1)..(366): tr|A0A255R0H7|A0A255R0H7_9PLAN S-adenosylmethionine:tRN A ribosyltransferase-isomerase OS=Rhodopirellula sp. MG V OX=2023130 GN=queA PE=3 SV=1
MSEIDIYDFELPRELVAQQPLPTRSDARLMLVNRRSGTIEHHHVRDLPDLLRSEDTLVLNDSRVIPARMIGFRTRTGGRWQGLFLRADADSGIWEVLTKTRGKLVAGETITVEDRNGLPGMRLEVVARTNEGHLLVMPRPATESFGQMSSEGLDEDSPPHEWLQRYGRVPLPPYIRDGHMVDDDVERYQTVFSKTPGSVAAPTAGLHFTPPLLKQIQSGGTETASVTLHVGLGTFRPVATESLDDHVMHTEWAEISEENAALINERRTAGGRCVAVGTTSVRTLESAAAALDGALDAWSGTTDLFIRPPYQFKVVDALMTNFHLPKSTLLILVSALAGRELILEAYAKAVESEYRFFSYGDAMLIV

SEQ ID NO: 71425 - protein, 363 aa, Rhodoplanes elegans
  misc_feature (1)..(363): tr|A0A327JYF5|A0A327JYF5_9RHIZ S-adenosylmethionine:tRN A ribosyltransferase-isomerase OS=Rhodoplanes elegans O X=29408 GN=queA PE=3 SV=1
MRTDLFDFDLPQERIALRPASPRDSARLLVVRPQAGADAAPALEDHVVRDLPSLLRPGDQLVVNDTKVIPAQLFGRRLGRGPEVAIEATLVERLDGSRWKALVKGSKKLSVGDTVRFGDEGKVCFLGQLDASVEQKGEGGAVTLAFTFHGPVLDQAIAERGAMPLPPYIAARRPADEQDRADYQTLFAREEGAVAAPTAGLHFTDDLLARLRDAGGGLHTVTLHVGPGTFLPVKADDTADHRMHAEYGVVSEATAAALNAAKRAGGRIVAVGSTSLRLLESAADEDGTIRPFAAETAIFITPGYRFRAVDVMMTNFHLPRSTLFMLVAAFSGLDTMRRAYAHAVATGYRFYSYGDASLLFRGE

SEQ ID NO: 71426 - protein, 360 aa, Rhodoplanes piscinae
  misc_feature (1)..(360): tr|A0A447CVP8|A0A447CVP8_9RHIZ S-adenosylmethionine:tRN A ribosyltransferase-isomerase OS=Rhodoplanes piscinae OX=444923 GN=queA PE=3 SV=1
MRTDLFDFELPPDRIALRPVSPRDSARLLVVRPSGAPELDDRVVRDLPTLLRPGDQLVVNDTKVIPAQLFGRRLGRGAEVAIEATLIERLDGSRWRALVKGAKKLAAGDTVRFGDEGKVCFLGQLDATVEDKGEAGEVTLSFAFHGPVLDQAIAERGAMPLPPYIAGRRPADEQDRSDYQTLFAREEGAVAAPTAGLHFTDDLLARLAAAGVGLHRVTLHVGAGTFLPVKAEDTAEHRMHAERGQVSEATAAALNAARRAGGRIVAVGSTSMRLLESAADDDGTIRPFAGETAIFITPGYRFRAIDVMMTNFHLPRSTLFMLVSAFSGLDTMRRAYAHAVATGYRFYSYGDATLLFRETT

SEQ ID NO: 71427 - protein, 360 aa, Rhodoplanes piscinae
  misc_feature (1)..(360): tr|A0A327K693|A0A327K693_9RHIZ S-adenosylmethionine:tRN A ribosyltransferase-isomerase OS=Rhodoplanes piscinae OX=444923 GN=queA PE=3 SV=1
MRTDLFDFDLPQDRIALRPVSPRDSARLLVVRPGGAPELDDRVVRDLPTLLRPGDQLVVNDTKVIPAQLSGRRIGRGAEAAIEATVIERLDGSRWRALVKGAKKLAAGDTVRFGDEGKVCFLGQLDATVEDKGEAGEVTLSFAFHGPVLDQAIAERGAMPLPPYIAGRRPADEQDRSDYQTLFAREEGAVAAPTAGLHFTDDLLARLAAAGIGLHRVTLHVGAGTFLPVKAEDTAAHRMHAERGQVSEATAAALNAARRAGGRIVAVGSTSMRLLESAADADGIIRPFAGETAIFITPGYRFRAIDVMMTNFHLPRSTLFMLVSAFSGLDTMRRAYAHAVATGYRFYSYGDATLLFRETT

SEQ ID NO: 71428 - protein, 358 aa, Rhodoplanes roseus
  misc_feature (1)..(358): tr|A0A327KJS0|A0A327KJS0_9RHIZ S-adenosylmethionine:tRN A ribosyltransferase-isomerase OS=Rhodoplanes roseus OX =29409 GN=queA PE=3 SV=1
MRTDLFDFDLPPERIALRPASPRDSARLLVVRPGGAPELADHIVRDLPGLLRAGDQIVVNDTKVIPAQLFGRRLGRGLEVAIEATLVERIDGSRWRALVKGSKKLAVGDTVRFGDEGKVCFLGQLDATVEHKGEAGAVTLAFAFHGPVLDQAIAERGAMPLPPYIAARRPADEQDRADYQTLFAREEGAVAAPTAGLHFTDDLLARLDAAGIGLHTVTLHVGPGTFLPVKVDDTADHRMHAEYGVVSEVTAAALDAARKSGGRIVAVGSTSLRLLESAAEPDGTIAPFAAETSIFITPGYAFRAVDVMMTNFHLPRSTLFMLVAAFAGLDPMRRAYAHAIATGYRFYSYGDASLLFRE

SEQ ID NO: 71429 - protein, 359 aa, Rhodoplanes sp.
  misc_feature (1)..(359): tr|A0A127EUM6|A0A127EUM6_9RHIZ S-adenosylmethionine:tRN A ribosyltransferase-isomerase OS=Rhodoplanes sp. Z2-YC 6860 OX=674703 GN=queA PE=3 SV=1
MRTDLFDFDLPPERIALRPVSPRDAARLLVVRPGGTPEFDDRGVRDLPDLLNPGDALVVNDTKVISARLMGHRIGRGPDAKIEATLTERIDGSRWRAFAKPGKKLAPGDVIRFGEEGKVCFLGQLDATVESKGEGGEITLSFAFHGVVLDQAIAERGDMPLPPYIAGKRKPDAQDRDDYQTYFAREEGSVAAPTAGLHFTEALLGRLQARGVALHKVTLHVGPGTFLPVHADDTSDHKMHSEHAVLTAETAAALNAVHAKGGRIVAVGSTALRTLESAADDTGTIKPFSGDTALFITPGYRFKAVDVMMTNFHLPRSTLFMLVSALCGLDTMQRAYAHAIAGGYRFYSYGDASLLFRTQ

SEQ ID NO: 71430 - protein, 364 aa, Rhodopseudomonas faecalis
  misc_feature (1)..(364): tr|A0A318TAT3|A0A318TAT3_9BRAD S-adenosylmethionine:tRN A ribosyltransferase-isomerase OS=Rhodopseudomonas faec alis OX=99655 GN=queA PE=3 SV=1
MSCQAFMRTDLFDFELPASAIALRPASPRDAARMLVVEPGRALHDQIVRDLPDWLRPGDALVVNDTKVIAAQLSGRRIGRATEPKIEATLIKRLDGSRWQALVKPAKKLTPGDVVRFGHDGRVCLLGQLDATVEHKGDAGEIILSFAMHGAVLDQAIAELGAPPLPPYIASKRTPDDRDASDYQTMFAAREGAVAAPTAGLHFTPALQEALAARGVSLHRVTLHVGAGTFLPVKTDDTAEHKMHAEWGCISSETAAALNAVHAAGGRIIAVGTTSLRLLESAAAEDGQLKPFADETSIFITPGYRFKAVDVLMTNFHLPRSTLFMLVSAFAGLGTMQHAYAHAISSGYRFYSYGDACLLFRTTP

SEQ ID NO: 71431 - protein, 360 aa, Rhodopseudomonas palustris
  misc_feature (1)..(360): sp|Q6N6L0|QUEA_RHOPA S-adenosylmethionine:tRNA ribosylt ransferase-isomerase OS=Rhodopseudomonas palustris (str ain ATCC BAA-98 / CGA009) OX=258594 GN=queA PE=3 SV=2
MRTELFDFDLPAENIALRPVSPRDAARMLVVRPGAPLEDRIVRDLPALLAPGDQLVVNDTRVIAAQLTGRRIGRGLEPKIEATLIKRLDGARWQALVKPAKKLLPGDVVRFGHDGRVCLLGHLDATVEAKGDAGEVTLVFSFHGPVLDQAIAEVGATPLPPYIASKRAPDAQDIADYQTMFASNEGAVAAPTAGLHFTAELETALAACGVGLHRITLHVGAGTFLPVKAEDTSEHRMHAEWGTISSGTAEALNAARAAGGRIVAVGTTSLRLLESAARDDGRIAPFADETSIFITPGYRFRAVDVLMTNFHLPRSTLFMLVSAFCGLDTMQAAYAHAIRTGYRFYSYGDASLLFRNDITP

SEQ ID NO: 71432 - protein, 358 aa, Rhodopseudomonas palustris
  misc_feature (1)..(358): sp|Q07MX7|QUEA_RHOP5 S-adenosylmethionine:tRNA ribosylt ransferase-isomerase OS=Rhodopseudomonas palustris (str ain BisA53) OX=316055 GN=queA PE=3 SV=1
MRTDLFDFDLPQGAIALRPASPRDAARMLVVEASGALHDRVVSELPEWLRPGDALVVNDTKVIAAQLTGRRIGRDTEPKIDATLIKRLDGSRWQALVKPAKKLLPGDIVRFGHDGRVCLLGQLDATVEAKGEAGEIILAFTLHGPVLDQAIAELGAPPLPPYIASKRAPDDRDAADYQTMFAANEGAVAAPTAGLHFTKALEQALAARGVTLHRVTLHVGAGTFLPVKTEDTAEHKMHAEWGCLSRETADALNAARAADGRIVAVGTTSLRLLESAAGDDGRLAPFADDTAIFITPGYRFKAVDVLMTNFHLPRSTLFMLVSAFAGLDTMQRAYAHAIKSGYRFYSYGDACLLFRNPS

SEQ ID NO: 71433 - protein, 373 aa, Rhodopseudomonas pentothenatexigens
  misc_feature (1)..(373): tr|A0A336JY82|A0A336JY82_9BRAD S-adenosylmethionine:tRN A ribosyltransferase-isomerase OS=Rhodopseudomonas pent othenatexigens OX=999699 GN=queA PE=3 SV=1
MDRRIKSGDDGYRMRTDLFDFDLPAENIALRPVSPRDAARMLVVRPGAPLEDRIVRDLPSLLAPGDQLVVNDTRVIAAQLTGRRIGRGPEPKIEATLIKRLDGARWQALVKPAKKLLPGDVVRFGHDGRVCLLGHLDATVEAKGEAGEVTLAFSFHGPVLDQAIAEIGATPLPPYIASKRPPDAQDVADYQTMFAANEGAVAAPTAGLHFTAELEAALAARGVGLHRITLHVGAGTFLPVKAEDTSEHRMHAEWGTISSGTADALNAARAAGGRIVAVGTTSLRLLESAARDDGRIAPFADETSIFITPGYRFRAVDVLMTNFHLPRSTLFMLVSAFCGLDTMQAAYAHAIRTGYRFYSYGDASLLFRNDITP

SEQ ID NO: 71434 - protein, 360 aa, Rhodopseudomonas pseudopalustris
  misc_feature (1)..(360): tr|A0A1H8SSV0|A0A1H8SSV0_9BRAD S-adenosylmethionine:tRN A ribosyltransferase-isomerase OS=Rhodopseudomonas pseu dopalustris OX=1513892 GN=queA PE=3 SV=1
MRTELFDFDLPASSIALRPVSPRDAARMLVVRPGATLEDRAVRDLPALLQPGDQLVVNDTRVIAAQLTGRRIGRATEPRIEATLIKRLDGSRWQALVKPAKKLAEGDVVRFGHDGRVCLLGHLDATVEAKGDAGEVTLAFTFHGPALDQAIAELGATPLPPYIASKRTPDDQDAADYQTMFAANEGAVAAPTAGLHFTPELDAALKARGVTLHRLTLHVGAGTFLPVKVDDTAEHKMHAEWGTISRATADALNAARAQGGRIVAVGTTSLRLLESAAREDGTIAPFADETAIFITPGYRFRAVDVLMTNFHLPRSTLFMLVSAFCGLETMQAAYRHAIDSGYRFYSYGDASLLFREPASR

SEQ ID NO: 71435 - protein, 360 aa, Rhodopseudomonas sp.
  misc_feature (1)..(360): tr|A0A0N1LRU2|A0A0N1LRU2_9BRAD S-adenosylmethionine:tRN A ribosyltransferase-isomerase OS=Rhodopseudomonas sp. AAP120 OX=1523430 GN=queA PE=3 SV=1
MRTDLFDFDLPTDNIALRPVSPRDAARMLVVRPGAVLEDRIVRDLPALLAPGDQLVVNDTRVIAAQLAGRRIGRATEPKIDATLIKRLDGSRWQALVKPAKKLSEGDVVRFGHDGRVCLLGHLDATVEAKGDAGEVTLSFSLHGPALDQAIAELGATPLPPYIASKRAADAQDAADYQTMFAANEGAVAAPTAGLHFTPDLDAALATRGVALHRVTLHVGAGTFLPVKADDTAEHKMHAEWGTISKATADALNTARTQGGRIVAVGTTSLRLLESAARPDGTIAPFADETSIFITPGYRFRAVDILMTNFHLPRSTLFMLVSAFCGLETMQAAYRHAIDSGYRFYSYGDASLLFREPVSV

SEQ ID NO: 71436 - protein, 349 aa, Rhodosalinus sediminis
  misc_feature (1)..(349): tr|A0A3D9BT57|A0A3D9BT57_9RHOB S-adenosylmethionine:tRN A ribosyltransferase-isomerase OS=Rhodosalinus sedimini s OX=1940533 GN=queA PE=3 SV=1
MKLSEFDFDLPEELIATRPARPRSSARLLVAEGDRITDAVARDLPEFLRPGDRLVLNDTKVIPARLSGTRQRHGDAGPSEARIEVTLLEPRAGGLWTALVKPMKKLAADEVIRFSDELSARMEGREEEKALLAFDLTGKDFDEALARAGAMPLPPYIERRRAADAQDAEDYQTVWARRPGAVAAPTASLHFDETLLDALRAAGIGMTHVTLHVGAGTFLPVKVDDVTEHRMHAEWGEVSEAAAAEIAETRRAGGRIIPVGTTALRLLETAGRSGEVVPWSGDTDIFIYPGFEFRVADALMTNFHLPKSTLMMLVAAFMGRARIERIYAHAIAERYRFFSYGDASLLVPA

SEQ ID NO: 71437 - protein, 350 aa, Rhodosalinus sp.
  misc_feature (1)..(350): tr|A0A365U5E6|A0A365U5E6_9RHOB S-adenosylmethionine:tRN A ribosyltransferase-isomerase OS=Rhodosalinus sp. E84 OX=2259333 GN=queA PE=3 SV=1
MQLSDFDFDLPDELIATRPARPRSSARLLVAEGDRITDAIVRDLPEFLRPGDRLILNDTKVIPARLSGTRSRHGAAGASDARIEVTLLEPRPGGLWTALVKPLKKLAPGEVIRFSDDLSARMQGREGEQALLEFDQTGKAFDEALARAGAMPLPPYIERRRAPDEQDREDYQTVWAARPGAVAAPTASLHFDAALLDALRAADIGMTHVTLHVGAGTFLPVKVDDVTRHRMHAEWGEVSESAAAQIAETRRAGGRIIPVGTTALRLIETAGQGGEIAPWEGDTDIFIYPGFRFRMTDALMTNFHLPKSTLMMLVAALMGLDRVRRIYAHAITERYRFFSYGDASLLVPGE

SEQ ID NO: 71438 - protein, 364 aa, Rhodospira trueperi
  misc_feature (1)..(364): tr|A0A1G6ZV84|A0A1G6ZV84_9PROT S-adenosylmethionine:tRN A ribosyltransferase-isomerase OS=Rhodospira trueperi O X=69960 GN=queA PE=3 SV=1
MTHSAAPFHADRDATAMRVDLFDFDLPADRIASRPADPRDSARLLRVTADGGLEDRAVADLPSVLSPGDVLVLNDTRVIPARLFARVGQARVEVMLHRRVGPDAWWAFARPAKKVRPGTDLLFAEGFTGACAEKGEGGEVLVRFDRAGAALTAALEDHGHVPLPPYIKRPDDQADRETYQTVFARADGAVAAPTAGLHFTERLFAALDERGVRRVTVTLHVGAGTFLPVKAEDTDEHRMHVEDGEISAAAAQAICEARAGGGRVVAVGTTSLRILESAAAPDGTLGAFSGGTDLFITPGYRFRAVDRLVTNFHLPKSTLFMLVSAFSGLRTMQAAYAHAIAGGYRFYSYGDACLLDGRPRERCD

SEQ ID NO: 71439 - protein, 344 aa, Rhodospirillaceae bacterium
  misc_feature (1)..(344): tr|A0A1Z9JGE3|A0A1Z9JGE3_9PROT S-adenosylmethionine:tRN A ribosyltransferase-isomerase OS=Rhodospirillaceae bac terium TMED167 OX=1986863 GN=queA PE=3 SV=1
MKVSDFDFDLPPDLIAQTPAEPRESARLLHVGDTLGDRHVRDLPSLLSPGDLLVFNNTKVIPTRLRGKRREAGLEVTLHKQESGKTWWAFARPARKLSVGDKIDFAREFTANVLDKHTGGEVLLGFQQSDGDLITMLQQYGIMPLPPYIKRPKDGIPGDAADYQTVFAEKEGAVAAPTAGLHFSETLLKMLNTAGIQTAFVTLHVGAGTFLPVKVEETTDHQMHSEWGTIPAATLKLVNDTRSAGAAVVPVGSTSLRLLETAADDTGVLRPFTGETDIFMTPGHPFKIADKMITNFHLPKSTLFMLVAAFAGLNRMTAAYGHAIRSGYRFYSYGDACLLERGET

SEQ ID NO: 71440 - protein, 352 aa, Rhodospirillaceae bacterium
  misc_feature (1)..(352): tr|A0A2E2E4V3|A0A2E2E4V3_9PROT S-adenosylmethionine:tRN A ribosyltransferase-isomerase OS=Rhodospirillaceae bac terium OX=1898112 GN=queA PE=3 SV=1
MKVDLFDFDLPDQCIAQSPAEPRDSAKLLHVPVSGGFADRRVSDLPDLLQLQDLLVVNDTKVLPTRLFGQRGTAGIEVTLIKERASDLWDAFARPGKKLKPKDQIIFADDLVALVEDKHLDGQITLRFNCQGAALREALWQRGTMPLPPYIKRSRTPDRDTDAKDRDHYQTLFAQREGAVAAPTASLHFTPNLLQRLQDKGVPMVRLTLHVGAGTFLPVKVEDTDDHPMHSEWAQLSPEAAERLNAHKASGGRIVAVGTTPMRTLESAAAPDGTLAAFEGETDIFITPGYRFRAVDRLMTNFHLPRSTLFMLVSAFSGLDRMQAAYAHAISSGYRFYSYGDSSLLDRAPVEG

SEQ ID NO: 71441 - protein, 343 aa, Rhodospirillales bacterium
  misc_feature (1)..(343): tr|A0A257NJI3|A0A257NJI3_9PROT S-adenosylmethionine:tRN A ribosyltransferase-isomerase OS=Rhodospirillales bact erium 20-58-10 OX=1970564 GN=queA PE=3 SV=1
MRLEDFGYDLPASHIATEPARPRESAKLLHVKPDALGDYQVRDLPDLLRAGDLLVVNDTRVIPAQLTAMRGAARIGITLDKPNEHGDWLVLLRNARRVRAGDMLQIDEAFSAEVMAVHEGGTAALRFNVSDAAFLAALGRTGALALPPYIARPEGITEQDKADYQTMFAEHDGAVAAPTAGLHFTPALLEALAAKGVETVRVTLHVGAGTFLPVRVEDVTTHKMHAERGIVSAEAAARINEVKARGGRVIPVGTTALRLIESAADDDGVVKPFVRETDIFILPGYRFKVADVLFTNFHLPHSTLLMLVSAFAGMARIKSAYDYAIAHDYRFYSYGDACLLERP

SEQ ID NO: 71442 - protein, 347 aa, Rhodospirillales bacterium
  misc_feature (1)..(347): tr|A0A259MCT2|A0A259MCT2_9PROT S-adenosylmethionine:tRN A ribosyltransferase-isomerase OS=Rhodospirillales bact erium 39-66-50 OX=1970570 GN=queA PE=3 SV=1
MRVDLFDFALPDDLIAQRPVSPRDSARLLDVTGETLHDRTVRSLPGLLRRGDLLVFNDTRVIPARLKGVRPGQGIRQDVAVEALLIRDLGSRRWRAFARPGKRLRPGDALVFSGLRARVEAKEEDGSLVLAFTQEGHAFLTALEQEGTVPLPPYIRGGTADAQDRKDYQTLFARHEGSVAAPTAGLHFTPELMAALADSGITTAGVTLHVGAGTFQPVRVDDTDAHTMHAEWGEVSEATARAVEATRILGGRVVSIGTTSLRLLETVAREHDGALKPWSGETDIFITPGFQFRAVDLLLTNFHLPRSTLFMLVSAFAGLERMKQVYEHAVAARYRFYSYGDCCLLRR

SEQ ID NO: 71443 - protein, 345 aa, Rhodospirillum rubrum
  misc_feature (1)..(345): sp|Q2RXQ9|QUEA_RHORT S-adenosylmethionine:tRNA ribosylt ransferase-isomerase OS=Rhodospirillum rubrum (strain A TCC 11170 / ATH 1.1.1 / DSM 467 / LMG 4362 / NCIB 8255 / S1) OX=269796 GN=queA PE=3 SV=1
MRVDLFDFDLPRDLIAVRPAVPRDSARLLLVEGESRRDLGVGDLPGLLDPGDILVFNDTRVIPARLKGRIGDGGVEVTLHKRVGPDAWDCFARPARKLKPGVVILFAEGFTATVAARGEDGEATLRFDRAGAALMAALEAYGHIPLPPYIKRPDDARDRADYQTIYAREDGAVAAPTAGLHFTPALLAALEARGVSRAMVTLHVGAGTFLPVKVEDTDDHRMHAETGTLTAQTAEAINAARAAGGKVVAVGTTAMRLLESATGADKVIRPFHGDTSIFITPGYRFNAVDRLMTNFHLPRSTLFMLVSAFAGASRMRNAYAHAISQGYRFYSYGDSSLLSHAEDPR

SEQ ID NO: 71444 - protein, 351 aa, Rhodothalassium salexigens
  misc_feature (1)..(351): tr|A0A4R2PPI1|A0A4R2PPI1_RHOSA S-adenosylmethionine:tRN A ribosyltransferase-isomerase OS=Rhodothalassium salex igens DSM 2132 OX=1188247 GN=queA PE=3 SV=1
MRVDAFDFHLPEDRIALRPAEPRDAARLLVVRPDELLDRGVLDLPDLLGPGDVLVVNNTRVIPSRLHGRRGEARVEVTLHKSEGGTVWAAFARPARKCRPGDTLVFGDLCAQVVERRAGGEVVLAFDCADDQMMAALEAHGEMPLPPYIAGRRAVDTKDDSDYQTAFAAEAGAVAAPTAGLHFTDRLLAALAARGVGREEVTLHVGAGTFLPVKAEDTDAHVMHAEWGRVPRAVAERLTAARAAGGRVVAVGTTSLRLLESAADQAGRIQPFEGDTDIFITPGYRFRAIDRLMTNFHLPRSTLFMLVSAFSGLDRMQSAYAHAVAERYRFYSYGDACLLHPSTPSVGGAGR

SEQ ID NO: 71445 - protein, 349 aa, Rhodothermaceae bacterium
  misc_feature (1)..(349): tr|A0A2E3QSS1|A0A2E3QSS1_9BACT S-adenosylmethionine:tRN A ribosyltransferase-isomerase OS=Rhodothermaceae bacte rium OX=2026787 GN=queA PE=3 SV=1
MPHALADYAFDLPDGLIAQRPAERRDGSRMLVLHRATGALEDARFADLGRYLEAGDALVFNDTRVVPARLVGRRPTGGRAELFLVERATDGTWSALAKPGRRLTAGGEVLFGDGLTAAIEAVEEGGRRRIRILRDGEPLDGAAEEAALEAIGRMPLPPYVDREADATDRERYQTVFARTPGAVAAPTAGLHFTPATVDGLREAGVVTAEVTLHVGYGTFEPVRAEDLRDHRVAAERIEVPATTAATLNAVRAARGRIVAVGTTSTRALETAADDEGRFHPVSGPTDLTVTPGYRFRAIDGLLTNFHLPSSSLLVLTATFGGREAVMEAYRHAVREGYRFYSYGDCMLIL

SEQ ID NO: 71446 - protein, 336 aa, Rhodothermaceae bacterium
  misc_feature (1)..(336): tr|A0A424HK57|A0A424HK57_9BACT S-adenosylmethionine:tRN A ribosyltransferase-isomerase OS=Rhodothermaceae bacte rium TMED105 OX=1986665 GN=queA PE=3 SV=1
  misc_feature (4)..(4): Xaa can be any naturally occurring amino acid
  misc_feature (12)..(12): Xaa can be any naturally occurring amino acid
  misc_feature (21)..(21): Xaa can be any naturally occurring amino acid
  misc_feature (24)..(24): Xaa can be any naturally occurring amino acid
  misc_feature (42)..(43): Xaa can be any naturally occurring amino acid
  misc_feature (215)..(215): Xaa can be any naturally occurring amino acid
  misc_feature (238)..(238): Xaa can be any naturally occurring amino acid
MDKXTLSDFDYXLPEELIAQXPSXKRDHSRLLVYDRSDQSIXXTQFHHIGKHLPSNTTLVMNNTKVDECRLQWEEGKKEVFIVSSMADNPVTAMVRPGRQFKKGAYHQLSETCRLEVEEVLEDGLRRCRLDPDPSDPAWLPFFHTPFPPYIKPNEELADRYQTVYSRTPGSKAAPTAGLHFTPELLQGLQNQGIRRTEVTLNVGLGTFAPVKSEXILSHKMHEEFFSVSPSALESIAXAKHITAVGTTSCRTLESLAAADLLPPYQTVTRETGIFIHPGYTWKRTNALLTNFHLPKSTLLMLLAALVGVEEWKRIYEEAIRERYRFYSFGDAMLVL

SEQ ID NO: 71447 - protein, 348 aa, Rhodothermaeota bacterium
  misc_feature (1)..(348): tr|A0A2A5X835|A0A2A5X835_9BACT S-adenosylmethionine:tRN A ribosyltransferase-isomerase OS=Rhodothermaeota bacte rium MED-G18 OX=1986239 GN=queA PE=3 SV=1
MKLSEFDFKLAATRTAIHPAANRDESRLMILHKKTGKIEHKQFKDIIKFFKEDDVLVLNDTKVFPARLYGQKEKTGAKIEVFLLRELNPELNLWDVLVDPARKIRVGNKLYFGEGELVAEVIDNTTSRGRTIRFIPEDTERDFHDIIQEYGETPLPKEIKRKVDKKDEERFQTVYAKNIGAVAAPAAGLHFTDILLKKLILKGVKIVKITSHTGLGTFKDIDVEDLTKHKMDSENFSVPVETEIEVNRALDNGNRIFAVGTSTMKTLETAVSASNRLKAKSGWTDKFIFPPYDFKICGAMITNFHSPKSTLLMMASAYGGFDQVMKVYKVAIKEKYMFHTYGDALMII

SEQ ID NO: 71448 - protein, 351 aa, Rhodothermaeota bacterium
  misc_feature (1)..(351): tr|A0A2A5XWH6|A0A2A5XWH6_9BACT S-adenosylmethionine:tRN A ribosyltransferase-isomerase OS=Rhodothermaeota bacte rium MED-G12 OX=1986237 GN=queA PE=3 SV=1
MKLTDFRYEIEGLNIPDAPLKERDSAKLMVLNRAEQTIEHRSFSDIHEYLNEGDVLVYNNTKVFPARLNGKKEKTEADIEVFLLRELQPENMLWDVLVEPARKIRIGNKLYFGEGEDELMAEVVDNTTSRGRTIRFLFDGPNHELYERLDSLGKMPLPPYIEREPVDEDKERYQTVFASERGAVAAPTAGMHFTEDLLEKIKAKGVHVLPITLHIGWGTFRNVEVEDLTKHRMDSENYFISQDTSDQINVALKSKKHKVIAMGTSVVRAIETSVMASGMSKQGTGWTDKFIYPHYQFKITESLITNFHRPESTLLMLGAAFAGYDLLMKAYEEAKENNYRLFSFGDAMMVI

SEQ ID NO: 71449 - protein, 348 aa, Rhodothermus marinus
  misc_feature (1)..(348): tr|G2SHG2|G2SHG2_RHOMG S-adenosylmethionine:tRNA ribosy ltransferase-isomerase OS=Rhodothermus marinus (strain SG0.5JP17-172) OX=762570 GN=queA PE=3 SV=1
MRLSDLHYDYPKSLVAKYPAEPRDSARLMVLDRKRRSIEHRIFRDIVDYFNEGDVLVVNNTKVFPARLYGRKEKTGARIEVLLLRELNAESRLWDALVDPARKIRVGNKIYFDGGLVAEVIDNTTSRGRTIRFLFDGSDEELYQKIEEVGHMPLPPYIKREDEPEDRERYQTIFAQETGSVAAPTAGLHFTPELVERLKQKGVDVVPITLHVGLGTFRPIEVEDLTKHRMDSEYFTITEEAAERINRALLSPEHTVTAVGTTVVRALESSISATGTVKPGFGWTDKFIYPPYDFKIVERLITNFHMPRSTLLALVVAFAGYDFVMEAYRTAVQEKYRLFSFGDAMLIL

SEQ ID NO: 71450 - protein, 348 aa, Rhodothermus marinus
  misc_feature (1)..(348): tr|D0MHN0|D0MHN0_RHOM4 S-adenosylmethionine:tRNA ribosy ltransferase-isomerase OS=Rhodothermus marinus (strain ATCC 43812 / DSM 4252 / R-10) OX=518766 GN=queA PE=3 SV =1
MRLSDLHYDYPKSLVAKYPAEPRDSARLMVLDRKRRTIEHRIFRDIVDYFNEGDVLVVNNTKVFPARLYGRKEKTGAKIEVLLLRELNAESRLWDALVDPARKIRVGNKIYFDGGLVAEVIDNTTSRGRTIRFLFDGSDEELYQKIEEVGHMPLPPYIKREDEPEDRERYQTIFAQETGSVAAPTAGLHFTPELVERLKQKGVDIVPITLHVGLGTFRPIEVEDLTKHRMDSEYFTITEEAAERINRALLSPEHTVTAVGTTVVRALESSISATGTVKPGFGWTDKFIYPPYDFKIVERLITNFHMPRSTLLALVVAFAGYDFVMEAYRTAVQEKYRLFSFGDAMLIL

SEQ ID NO: 71451 - protein, 348 aa, Rhodothermus profundi
  misc_feature (1)..(348): tr|A0A1M6WH09|A0A1M6WH09_9BACT S-adenosylmethionine:tRN A ribosyltransferase-isomerase OS=Rhodothermus profundi OX=633813 GN=queA PE=3 SV=1
MRLSDLHYEYPKSLIAKYPAEPRDSARLMVLNRKCKTIEHRIFRDIVDYFNEGDVLVVNNTKVFPARLYGRKEKTGARIEVLLLRELNAESRLWDALVDPARKIRVGNKIYFDGGLVAEVIDNTTSRGRTIRFLFDGNDEELYRKIEEIGHMPLPPYIKREDEPEDRERYQTIFARETGSVAAPTAGLHFTPALVERLKQKGVDIVPITLHVGLGTFRPIEVEDLTKHRMDSEYFIITEEAAERINRALLSPDHTVTAVGTTVVRALESSISATGTLKAGSGWTDKFIYPPYDFRIVERLITNFHMPRSTLLALVVAFAGHDFVMEAYRIAVQEKYRLFSFGDAMLIL

SEQ ID NO: 71452 - protein, 346 aa, Rhodovarius sp.
  misc_feature (1)..(346): tr|A0A437MMI8|A0A437MMI8_9PROT S-adenosylmethionine:tRN A ribosyltransferase-isomerase OS=Rhodovarius sp. CCP-6 OX=1979269 GN=queA PE=3 SV=1
MTLTAADFDYPLPDDRIAQHPARPRDAALLLDARAPALVDRGVLDLPALLEPGDLLVVNDTRVIPARLTARRGQARVEIMLNRAEGNGIWHALVRNARRLKAGDTVEIEGAPITARVVEDPAEGAVRLDFGPDEAALAAALDQAGEIPLPPYIQRAAGPEDEADYQTLFADRPGAVAAPTASLHFTPRLIEALEARGVRRATLTLHVGAGTFLPLRGDNPAEHKMHAEWGQITPETAALINETRARGRRIVAVGTTVLRLLETAATGDIAQPVRPFDGLTSIFLLPGHRFTTADLLMTNFHLPKSTLMMLVAGFAGLDHMRAVYAHALAGPYRFTSYGDSSLWARA

SEQ ID NO: 71453 - protein, 369 aa, Rhodovulum adriaticum
  misc_feature (1)..(369): tr|A0A4R2NP78|A0A4R2NP78_RHOAD S-adenosylmethionine:tRN A ribosyltransferase-isomerase OS=Rhodovulum adriaticum OX=35804 GN=queA PE=3 SV=1
MKLSDFDFDLPEALIATRPARPRSSARLLVADGDRTRDLHVRDLPGLLRPGDLLVLNDTRVIPARLTGTRTRDTGQGPVTARIEVTLMEPAAGGGWRAMAKPLRKLKPGERVVFSDTLSAEVVDKGAEDVTLTFDLEGAAFEEALAQAGAMPLPPYIAARRPADERDREDYQTVWAARPGAVAAPTASLHFDPPLLAALAERGVAFTHVTLHVGAGTFLPVKVDDVSQHKMHAEWGEVTDTAAAEINATRAAGGRIIPVGTTALRLIESAAAPDGAMHPWQGETDIFIRPGYRFRVADALMTNFHLPKSTLMMLVSALMGTERIRGIYAHAIGAGYRFFSYGDASLLIPAGETRHGGVAGGHSPGDSPA

SEQ ID NO: 71454 - protein, 369 aa, Rhodovulum bhavnagarense
  misc_feature (1)..(369): tr|A0A4R2RM04|A0A4R2RM04_9RHOB S-adenosylmethionine:tRN A ribosyltransferase-isomerase OS=Rhodovulum bhavnagare nse OX=992286 GN=queA PE=3 SV=1
MKLSDFDFDLPEVLIATRPARPRSAARLLVAEGDAMRDLHVYDLVKVLRPGDRLVLNDTRVIPARLSGARTRESGQGPVTARIEVTLMEPAPVGRWRAMARPLRKLRPGERIVFSEALSAEVVERGPEDVTLAFNLEGEAFEAALAEAGAMPLPPYIAARRAADAQDRDDYQTVWATRPGAVAAPTASLHFDPPLLQALAGRGVLFTHVTLHVGAGTFLPVKVDDVEDHKMHAEWGEVTETAAAEINSTRAAGGRIIPVGTTALRLIESAAAPDGTVHPWQGETDIFIRPGYRFRVADGLMTNFHLPKSTLMMLVSALMGTDRIRRLYAHAIKTGYRFFSYGDASLLVPEDETRHGQVAERQHRGGAPA

SEQ ID NO: 71455 - protein, 362 aa, Rhodovulum euryhalinum
  misc_feature (1)..(362): tr|A0A4R2KCG1|A0A4R2KCG1_9RHOB S-adenosylmethionine:tRN A ribosyltransferase-isomerase OS=Rhodovulum euryhalinu m OX=35805 GN=queA PE=3 SV=1
MKLSDFDFDLPEDLIATRPARPRSAARLLVAEGDAMRDLHVRDLPGLLLPGDRLVLNDTRVIPARLTGTRRRETPQGPVEARVEVTLMDPAPGGRWRAMAKPLRKLGTGETVVFSDSLRAQVAGKGAEDVTLAFNLGGAAFDAALAAAGAMPLPPYIAAKRPADAQDREDYQTVWAARPGAVAAPTASLHFDEPLLAALRERGVASTHVTLHVGAGTFLPVKTDDISAHRMHAEWGEVTDAAAAEINATRAAGGRIIPVGTTALRLIESAADEAGHLHPWAGETDIFIRPGYRFRITDALMTNFHLPRSTLMMLVSALMGIERTRRIYTHAVNSRYRFFSYGDASLLIPGPEAVTQGSQTGI

SEQ ID NO: 71456 - protein, 349 aa, Rhodovulum imhoffii
  misc_feature (1)..(349): tr|A0A2T5BVT8|A0A2T5BVT8_9RHOB S-adenosylmethionine:tRN A ribosyltransferase-isomerase OS=Rhodovulum imhoffii O X=365340 GN=queA PE=3 SV=1
MKLSDFDFALPEDLIATRPARPRSSARLLLARGEEIADRHVGDLVTILRPGDRLVLNDTRVLPARLTGTRRRKTAQGMVEARVEVTLMHPTPQGGWRAMAKPLRKLRAGEEIVFSETLQAEVIGKSDENVTLAFGLSGAEFDAALAQAGAMPLPPYIAARRPADEQDRVDYQTVWAARPGAVAAPTASLHFDTPLLKALAARGVQFSHVTLHVGAGTFLPVKVDDVSQHKMHAEWGEVGAQAAAEINATRAGGGRVIPVGTTALRLIESAAAPDGTLPPWRGETDIFITPGYHFRVTDGLMTNFHLPRSTLMMLVSALMGQGRIRRIYAHAIDQRYRFFSYGDASLLIP

SEQ ID NO: 71457 - protein, 369 aa, Rhodovulum kholense
  misc_feature (1)..(369): tr|A0A2T5UKK8|A0A2T5UKK8_9RHOB S-adenosylmethionine:tRN A ribosyltransferase-isomerase OS=Rhodovulum kholense O X=453584 GN=queA PE=3 SV=1
MKLSDFDFDLPEALIATRPARPRSSARLLVAEGDTIRDLQVRDLVDLLGPGDRLILNDTRVIPARLSGQRLRQTGQGPAEARVEVTLMEPAAGGQWRAMARPLKKLQPGDRIRFSDALSAEVAARGPEDVTLAFDCAGAAFDAALAEAGAMPLPPYIAARRPADAQDREDYQTVWAARPGAVAAPTASLHFDEPLLAALAARGVAFSHVTLHVGAGTFLPVKVDDVSDHRMHAEWGEVSETAAAEINATRAAGGRIIPVGTTALRLIETAADETGRIAPWRGETDIFIRPGYRFRMTDALITNFHLPRSTLLMLVSALMGVGCIRNIYLHAVEHGYRFFSYGDASLLIPPGRDRLDSGRPGHPPSAPTA

SEQ ID NO: 71458 - protein, 362 aa, Rhodovulum marinum
  misc_feature (1)..(362): tr|A0A4R2Q0N5|A0A4R2Q0N5_9RHOB S-adenosylmethionine:tRN A ribosyltransferase-isomerase OS=Rhodovulum marinum OX =320662 GN=queA PE=3 SV=1
MKLSDFDFDLPDELIATRPARPRSAARLLVAEGERVRDLHVRDLPGLLGPGDRLVLNDTRVIPARLTGTRRRESAQGPVVARVEVTLMEPAPDGRWRAMAKPLRKLKPGETVVFSEKLSAEVVAKGTQDVTLAFNLVGEDFDAALAEAGAMPLPPYIAAKRPADAQDTEDYQTVWAARPGAVAAPTASLHFDDALLAALRARGVSFTHVTLHVGAGTFLPVKTDDVSAHKMHAEWGEVTEAAAAEINATRAAGGRIIPVGTTALRLIESAADEAGRLHPWVGETDIFIRPGYRFRIADALMTNFHLPRSTLMMLVSALMGTETIRKIYAHAVTSRYRFFSYGDASLLIPAAQPGRQGSQTGI

SEQ ID NO: 71459 - protein, 369 aa, Rhodovulum robiginosum
  misc_feature (1)..(369): tr|A0A428JVC4|A0A428JVC4_9RHOB S-adenosylmethionine:tRN A ribosyltransferase-isomerase OS=Rhodovulum robiginosu m OX=68292 GN=queA PE=3 SV=1
MKLSDFDFDLPEALIATRPARPRSAARMLVAEGDAIDDLHVRDLPDLLRPGDRLVLNDTKVIAARLTGTRRRDTAQGPVEARVEITLMAPDPAGRWRAMAKPLRKLKEGETVVFSDALRAEVAVKTDEDVTLAFNLDGADFDTALAAAGAMPLPPYIAARRPADDRDREDYQTVWAARTGAVAAPTASLHFDEALLAALKGRGVGFTHVTLHVGAGTFLPVKVDDVSRHRMHAEWGEVTQAAADEINAARAAGGRIIPVGTTALRLIETAADPAGQLHPWQGETDIFIRPGYRFRITDALITNFHLPRSTLLMLVSALMGVGTVRRIYAHAVAERYRFFSYGDASLLIPEDETRRAQVAGGHLHPAQEP

SEQ ID NO: 71460 - protein, 355 aa, Rhodovulum sp.
  misc_feature (1)..(355): tr|A0A369R1I9|A0A369R1I9_9RHOB S-adenosylmethionine:tRN A ribosyltransferase-isomerase OS=Rhodovulum sp. 12E13 OX=2203891 GN=queA PE=3 SV=1
MKLSDFDFDLPEELIATRPARPRSSARLLLAEGEATRDLHVFDLPDILRPGDLMVLNDTRVIPARLTGTRRRATSQGDTQAQIEVTLLEARADGTWAALAKPMKKVRDGETIVFSPELSADVAGRGDGQLHLAFSLSGEDFDRALNEAGAMPLPPYIAARRAADAQDREDYQTVFARRAGAVAAPTASLHFDAALLDKIARRGVRFAHVTLHVGAGTFLPVKVDDVTTHRMHAEWGEVTQEAADAINAAKAEGGRIVAVGTTALRLIESAATEGGIAPWRGETDIFIYPGFRFRVADGLMTNFHLPKSTLMMLVSALMGRERIMALYAHAIAERYRFFSYGDASLLFPQRMDKPL

SEQ ID NO: 71461 - protein, 349 aa, Rhodovulum sp.
  misc_feature (1)..(349): tr|A0A095EYE1|A0A095EYE1_9RHOB S-adenosylmethionine:tRN A ribosyltransferase-isomerase OS=Rhodovulum sp. NI22 O X=1469613 GN=queA PE=3 SV=1
MKLSDFDFDLPEELIATRPARPRTAARMLVAEGDTLRDCHVYDLPSLLRAGDRLVLNNTKVIPARLFGRRLRHTPEGVVEAKVEITLLEPQPGGGWAALAKPLRKLKQGEEIVFSDALSARVTARREGDVVLGFNLEGDDFDAALAEAGAMPLPPYIAAKRPADAQDKTDYQTVFARHAGAVAAPTASLHFDAELLEKLRATGVTFTEVTLHVGAGTFLPVKVEDVESHKMHAEWGEVTAQAAAEINATRAAGGRIIPVGTTALRLIESAAQADGTMVPWRGETDIFIRPGYRFRVTGALMTNFHLPKSTLLMLVSALMGVERMRAVYAHAVAGRYRFFSYGDASLLIP

SEQ ID NO: 71462 - protein, 362 aa, Rhodovulum steppense
  misc_feature (1)..(362): tr|A0A4R1YTK8|A0A4R1YTK8_9RHOB S-adenosylmethionine:tRN A ribosyltransferase-isomerase OS=Rhodovulum steppense OX=540251 GN=queA PE=3 SV=1
MKLSDFDFDLPEALIATRPARPRTAARLLVAEGDRLRDLHVRDLPDLLQPGDRLVLNDTRVIPARLSGLRRRETAQGPVEARIEVTLMEPAPGGCWRAMARPLKKLKPGDRVIFSDRLSARVVAKGDEDAVLDFDQTGAAFDTALAEAGAMPLPPYIAAKRPADAQDAEDYQTVWAARPGAVAAPTASLHFDEPLLAALAARGVGFSHVTLHVGAGTFLPVKTDDVSAHRMHAEWGEVTARAAAEINATRAAGGRIIPVGTTALRLIESAADEAGVLHPWTGETDIFIRPGYRFRIADALMTNFHLPRSTLMMLVSALMGTERIRRIYIHAVNSGYRFFSYGDASLLIPGPQAVRQGSQTGI

SEQ ID NO: 71463 - protein, 348 aa, Rhodovulum sulfidophilum
  misc_feature (1)..(348): tr|A0A2W5NF32|A0A2W5NF32_RHOSU S-adenosylmethionine:tRN A ribosyltransferase-isomerase OS=Rhodovulum sulfidophi lum OX=35806 GN=queA PE=3 SV=1
MRLEDFDFDLPEELIALRPARPRPASRLLVATPERLIDSTVAALGDWLRPGDLLVLNDTKVIPARLSGLRRRANGAEARIEATLIAAQPDGAWRALARPGKRLAVGDVIAFGAALTAEVRDKDGAEVVLAFDRAGAGLDAALQAVGEMPLPPYIAARRAPDARDREDYQTVFATRPGAVAAPTASLHFDEALLAALEARGVAQTRVTLHVGAGTFLPVKVENIEAHRMHAEWGEIDAEAAGAIEATLAAGGRVIPVGTTALRLIETAATGPARIASWRGETDIFIRPGHGFRVTRGLMTNFHLPKSTLLMLVSALMGVGRMREVYAHAIAERYRFFSYGDSSLLLPKG

SEQ ID NO: 71464 - protein, 369 aa, Rhodovulum sulfidophilum
  misc_feature (1)..(369): tr|A0A0D6B2E5|A0A0D6B2E5_RHOSU S-adenosylmethionine:tRN A ribosyltransferase-isomerase OS=Rhodovulum sulfidophi lum OX=35806 GN=queA PE=3 SV=1
MKLSDFDFDLPEALIATRPVRPRSAARLLVAEGDTIRDLHVRDLADLLGPGDRLVLNDTRVIPARLSGLRRRETGQGPAEARVEVTLMEPAAAGQWRAMARPLKKLRPGDRIRFSDALSAEVVARGPEDATLAFDCEGAAFDAALAEAGAMPLPPYIAARRPADAQDREDYQTVWAARPGAVAAPTASLHFDAALLAALEAKGVAFTHVTLHVGAGTFLPVKVDDVSEHRMHAEWGEVSEAAAAEINATRAAGGRIIPVGTTALRLIESAAVAEDRIAPWRGETDIFIRPGYRFRLTDALITNFHLPRSTLLMLVSALMGCARIRKIYLHAVEHGYRFFSYGDASLLIPPGRDRRDSSRPKAPPSGPTA

SEQ ID NO: 71465 - protein, 369 aa, Rhodovulum visakhapatnamense
  misc_feature (1)..(369): tr|A0A4R8G2D2|A0A4R8G2D2_9RHOB S-adenosylmethionine:tRN A ribosyltransferase-isomerase OS=Rhodovulum visakhapat namense OX=364297 GN=queA PE=3 SV=1
MKLSDFDFDLPEALIATRPARPRSSARLLVAEGDTIRDLHMRDLSDLLGPGDRLVLNDTRVIPARLSGQRLRQTGQGPAEARVEVTLMEPAAGGQWRAMARPLKKLKPGDRIRFSDALSAEVAARGDEDVTLAFDCTGAAFDAALAEAGAMPLPPYIAARRPADAQDREDYQTVWAARPGAVAAPTASLHFDEPLLAALAAKGVAFSHVTLHVGAGTFLPVKVDDVSDHRMHAEWGEVSETAAAEINATRAAGGRIIPVGTTALRLIETAADETGRIAPWRGETDIFIRPGYRFRLTDALITNFHLPRSTLLMLVSALMGVGSIRKIYLHAVEHGYRFFSYGDASLLIPPGRDRPDSGRPGHPPSAPTA

SEQ ID NO: 71466 - protein, 122 aa, Richelia intracellularis
  misc_feature (1)..(122): tr|M1WVV4|M1WVV4_9NOST S-adenosylmethionine:tRNA ribosy ltransferase-isomerase OS=Richelia intracellularis HM01 OX=1165095 GN=RINTHM_9460 PE=3 SV=1
MHGEWIKVSAETVEQIHKTRADGGRIIAVGTTVVRSLESAAASGAIQPFCGKSNLFIYPGYKWKVVDGLITNFHLPRSSLLMLVSALIGRERLLNIYQQAIISGYRFYSFGDAMLILPEAVN

SEQ ID NO: 71467 - protein, 388 aa, Richelia intracellularis
  misc_feature (1)..(388): tr|M1WTH7|M1WTH7_9NOST S-adenosylmethionine:tRNA ribosy ltransferase-isomerase OS=Richelia intracellularis HH01 OX=1165094 GN=queA PE=3 SV=1
MKTASALGLPLKQNSNSVLAVNNLELCLSGYDYELPIDIIAQNPASPRDSSKLLIVDSVNTGNSKQPTCEVFRNLPNILQPGDLLVMNNTRVIPARLHGHKSTGAEIEVLLLEERQHNYWLALVKPGKRFKLGTELIFTTGTQKNGSKFNLGREMKATVVGSDQATGGRLLRFELPEGISLIELLDVFGEIPLPPYINKNHSGKEKYQTIYAEYPGAVAAPTAGLHFTPSLLKKLQSRGINQAFVTLHVGIGTFRPVEVENITKHKMHGEWIKVSAETVEKIHKTRADGGRIIAVGTTVVRSLESAAASGAVQPFCGKSNLFIYPGYKWKVVDGLITNFHLPRSSLLMLVSALIGRERLLNIYQQAIISGYRFYSFGDAMLILPEAVN

SEQ ID NO: 71468 - protein, 388 aa, Richelia sp.; identical to SEQ ID NO: 71467
  misc_feature (1)..(388): tr|A0A3B9F6T6|A0A3B9F6T6_9NOST S-adenosylmethionine:tRN A ribosyltransferase-isomerase OS=Richelia sp. OX=20536 05 GN=queA PE=3 SV=1

SEQ ID NO: 71469 - protein, 365 aa, Rickettsia africae
  misc_feature (1)..(365): sp|C3PMQ3|QUEA_RICAE S-adenosylmethionine:tRNA ribosylt ransferase-isomerase OS=Rickettsia africae (strain ESF- 5) OX=347255 GN=queA PE=3 SV=1
MKLSDFDFDLPSELIAQYPSRERDNSDLLIAVTPPIKTKFYNIIDYLKEGDLLVFNNSKVIKAKLNLGENITINLNQKLSDDSWSAFAKPARKLHVNDEFYFDNHKVIITEKLAMGEIKVKFELNDISVFEFLNKYGEMPLPVYIRRSHSLCHPVATTTGSKTYLNNDWIPWSNHGMTNTQNDNDRYQTVYSQIEGSVAAPTAGLHFTKDILDKLKAEGIQATFLTLHVGAGTFLPVKTENIHEHKMHTEYCSITPDTAKIINKAKQEGKRIIAVGTTTLRTLESSCNNGIVKAGSFKTDIFITPGFKFQTADMLLTNFHFPKSTLFMLICAFAGFKEMHELYKYAIKEAMRFFSYGDATLLCRK

SEQ ID NO: 71470 - protein, 371 aa, Rickettsia akari
  misc_feature (1)..(371): sp|A8GMK3|QUEA_RICAH S-adenosylmethionine:tRNA ribosylt ransferase-isomerase OS=Rickettsia akari (strain Hartfo rd) OX=293614 GN=queA PE=3 SV=1
MKLSAFDFNLPSELIAQSPSSERDNSDLLIAAMPPIKTKFYNIIDYLKEGDLLVLNNSKVIKAKLHLWKNVTINLNQKLSDDSWSAFAKPTRKLHVNDEFYFDNHKVIITEKLVMGEIKVKFDLDNISVFEFLDKYGEMPLPVYIRRSHSLYHTTSTLCHTRENGYSEKLDAFFRRNDIKDKDNDIVYDNERYQTIYSQIEGSVAAPTAGLHFTNDILDKLKTKGIHTAFLTLHVGAGTFLPVKTENIHEHKMHTEYCSITPETAEIINKAKQERRRIIAVGTTTLRTVESFCNNGIIKAGSFETDIFITPGFKFQTADMLLTNFHFPKSTLFMLICAFAGFKEMHELYKYAIKEKMRFFSYGDATLLYRK

SEQ ID NO: 71471 - protein, 365 aa, Rickettsia amblyommatis
  misc_feature (1)..(365): tr|A0A0F3QXV8|A0A0F3QXV8_RICAM S-adenosylmethionine:tRN A ribosyltransferase-isomerase OS=Rickettsia amblyommat is str. Darkwater OX=1359166 GN=queA PE=3 SV=1
MKLSDFDFDLPSELIAQYPYSERDNSDLLIAVTPPIKTKFYNIIDYLKEGDLLVFNNSKVIKAKLNLGKNITINLNQKLSDDSWSAFAKPARKLHVNDEFYFDNHKVIITEKLAMGEIKVKFEFNNISIFEFLNKYGEMPLPVYIRRSHSLCHPVTTTTGSTKYLNNDWIPWSNYGMTNTQNDNDRYQTVYSQIEGSVAAPTAGLHFTKDILDKLKAKGIQATFLTLHVGAGTFLPVKTENIHEHKMHTEYCSITPDTAEIINKAKQEGKRIIAVGTTTLRTLESSCNNGIVKAGSFETDIFITPGFKFQTADMLLTNFHFPKSTLFMLICAFAGFKEMHELYKYAIKEAMRFFSYGDATLLCRK

SEQ ID NO: 71472 - protein, 365 aa, Rickettsia amblyommatis; identical to SEQ ID NO: 71471
  misc_feature (1)..(365): tr|H8K4F9|H8K4F9_RICAG S-adenosylmethionine:tRNA ribosy ltransferase-isomerase OS=Rickettsia amblyommatis (stra in GAT-30V) OX=1105111 GN=queA PE=3 SV=1

SEQ ID NO: 71473 - protein, 365 aa, Rickettsia argasii
  misc_feature (1)..(365): tr|A0A0F3RG10|A0A0F3RG10_9RICK S-adenosylmethionine:tRN A ribosyltransferase-isomerase OS=Rickettsia argasii T1 70-B OX=1268837 GN=queA PE=3 SV=1
MKLSDFDFDLPSELIAQYPSSERDNSDLLIAVTPPIKTKFYNIIDYLKEGDLLVFNNSKVIKAKLNLGKNVTINLNQKLSDDSWSAFAKPARKLHVNDEFYFDNHKVIITEKLAMGEIKVKFELNDISVFEFLNKYGEMPLPVYIRRSHSLCHPVATTTGSKKYLNNDWIPWSNHGMTNTQNDNDRYQTVYSQIEGSVAAPTAGLHFTKDILDKLKAEGIQATFLTLHVGAGTFLPVKTENIHEHKMHTEYCSITPDTAEIINKAKQEGKRIIAVGTTTLRTLESSCNNGIIKAGSFETDIFITPGFKFQTADMLLTNFHFPKSTLFMLICAFAGFKEMHELYKYAIKEAMRFFSYGDATLLCRK

SEQ ID NO: 71474 - protein, 362 aa, Rickettsia asembonensis
  misc_feature (1)..(362): tr|A0A0C2MNN7|A0A0C2MNN7_9RICK S-adenosylmethionine:tRN A ribosyltransferase-isomerase OS=Rickettsia asembonens is OX=1068590 GN=queA PE=3 SV=1
MKLSDFDFDLPSDLIAQYPASERDNSDLLIARTKPIKTKFYNILDYLKEGDLLVFNNSKVIKAKLHLGKNITINLNQKLSDNCWSAFAKPARKLNISDEFYFDNHKVIITDKLAMGEIKVKFELDNISVFEFLDKYGEMPLPIYIRRSHSLCHPRTTLLRESENILGVIPWLDHGMTNDNERYQTIYNQIEGSVAAPTAGLHFTKDILDKLNTKGVHTAFVTLHVGAGTFLPVKTENIHEHKMHTEYCSITPETTEIINKAKQERRRIIVVGTTTLRTLESSCNNGVVKAGSFETNIFITPGFKFQTADMLLTNFHFPKSTLFMLICAFAGFKEMHELYKYAIKEKMRFFSYGDATLLYRKV

SEQ ID NO: 71475 - protein, 403 aa, Rickettsia asiatica
  misc_feature (1)..(403): tr|A0A510G6M2|A0A510G6M2_9RICK S-adenosylmethionine:tRN A ribosyltransferase-isomerase OS=Rickettsia asiatica O X=238800 GN=queA PE=3 SV=1
MKLSDFDFDLPSELIAQYPSSKRDRSDLLIAATPPIKTKFYNIIDYLKEGDLLVFNNSKVIKAKLHLGRNITINLNKKLSDIVNSVGFAYKEQGAKPITNRRATSDIVGESKSIDYNSWSAFAKPARKLNIGDEFYFDNHKVIITKKFAMGEINIKFELDNISVFEFLDKYGEMPLPVYIRRSFKRHCEEGRSPDAAISLQDPEIAMASQIMPRNDDKLDPLRYQTVYSQIEGSVAAPTAGLHFTKDIIDKLKAKNIQTTFLTLHVGAGTFLPVKTENIHEHKMHTEYCSITPETAEIINKTKQEGRRIIAVGTTTLRTLESSCNNGIVKASDFETNIFITPGFKFQTANMLLTNFHFPKSTLFMLICAFAGFKEMHELYKYAIKEKMRFFSYGDATLLYRKV

SEQ ID NO: 71476 - protein, 371 aa, Rickettsia australis
  misc_feature (1)..(371): tr|H8K8F7|H8K8F7_RICAC S-adenosylmethionine:tRNA ribosy ltransferase-isomerase OS=Rickettsia australis (strain Cutlack) OX=1105110 GN=queA PE=3 SV=1
MKLSDFDFNLPSELIAQYPSSERDNSDLLIAAMPPIKTKFYNIIDYLKEGDLLVFNNSKVIKAKLHLWKNVTINLNQKLSDDSWSAFAKPTRKLHVDDEFYFDNHKVIITEKLVMGEIKVKFDLDNISVFEFLDKYGEMPLPVYIRRSHSLYHTRSTLYHTPENGYPEKLDSCFRRNDIKDKDNDIVYDNERYQTIYSQIEGSVATPTAGLHFTKDILDKLKTKGVHTAFLTLHVGAGTFLPVKTENIHEHKMHTEYCSITPETAEIINRAKQERRRIIAVGTTTLRTVESSCNNGIVKAGSFETDIFITPGFKFQTADMLLTNFHFPKSTLFMLICAFAGFKEMHELYKYAIKEKMRFFSYGDATLLYKK

SEQ ID NO: 71477 - protein, 353 aa, Rickettsia bellii
  misc_feature (1)..(353): tr|A0A0F3QCN2|A0A0F3QCN2_RICBE S-adenosylmethionine:tRN A ribosyltransferase-isomerase OS=Rickettsia bellii str . RML An4 OX=1359193 GN=queA PE=3 SV=1
MKLSDFDFDLPLELIAQNPISKRDESNLLIASTQQYVKTKFYNIIDYLKEGDLLVFNNSKVIKAKLSLDKNITINLNQRLKDNRRATNDDAGRLKSIDYWSAFAKPARKLKVGDEFYFDNHKIIITEKLEMGEIKIKFELANISVFEFLDKYGEMPLPLYIKRPERQKSDDERYQTVYSNIQGSVAAPTAGLHFTNDIINKLKAKGVQVAFVTLHVGAGTFMPVKTENINEHKMHTEYCSITPETAAIINKAKKEKRRIIAVGTTSLRTLESSGINGNVNSGDFETDIFITPGFKFQIVDMLLTNFHFPKSTLFMLVCAFAGFKEMHELYKYAIEEQMRFFSYGDATLLYRKV

SEQ ID NO: 71478 - protein, 353 aa, Rickettsia bellii
  misc_feature (1)..(353): sp|A8GVG9|QUEA_RICB8 S-adenosylmethionine:tRNA ribosylt ransferase-isomerase OS=Rickettsia bellii (strain OSU 8 5-389) OX=391896 GN=queA PE=3 SV=1
MKLSDFDFDLPLELIAQNPISKRDESNLLIASTQQYVKTKFYNIIDYLKEGDLLVFNNSKVIKAKLSLDKNITINLNQRLKDNRRATNDDAGRLKSIDYWSAFAKPARKLKVGDEFYFDNHKIIITEKLEMGEIKIKFELANISVFEFLDKYGEMPLPLYIKRPERQKSDDERYQTVYSNIQGSVAAPTAGLHFTNDIINKLKAKGVQVAFVTLHVGAGTFMPVKTENINEHKMHTEYCSITPETAAIINKAKKEKRRIIAVGTTSLRTLESSGINGNVNSGDFETDIFITPGFKFQIVDMLLTNFHFPKSTLFMLVCAFAGFKEMHELYKYAIEEQMRFFSYGDATLLYKKV

SEQ ID NO: 71479 - protein, 386 aa, Rickettsia canadensis
  misc_feature (1)..(386): sp|A8EXV6|QUEA_RICCK S-adenosylmethionine:tRNA ribosylt ransferase-isomerase OS=Rickettsia canadensis (strain M cKiel) OX=293613 GN=queA PE=3 SV=1
MKLSDFDFDLPSELIAQYPSSKRDHSDLLIAATPPIKTKFYNIIDYLKEGDLLVFNNSKVIKAKLNLEKNRPLSKLAYRDKFEGDMECRTAVYTNVREDSSTGSTYKLPLEVELEKRSNITINLNQRLSNNCWSAFAKPARRLNIGDEFHFDNHKVIIVEKLAIGEIKVKFELDDISVFEFLDKYGEMPLPLYIRHHEAQKSNNERYQNIYSSIEGSVAAPTAGLHFTNDILNKLKAKNIQTTFLTLHVGAGTFLPVKTENIHEHKMHTEYCSITPDTARLINKAKQEKQRIIAVGTTTLRTLESSCNNGTVKACDFETDIFITPGFKFQTADILLTNFHFPKSTLFMLICAFAGFKEMHKLYKYAIKEKMRFFSYGDATLLYRKI

SEQ ID NO: 71480 - protein, 365 aa, Rickettsia conorii
  misc_feature (1)..(365): sp|Q92IY7|QUEA_RICCN S-adenosylmethionine:tRNA ribosylt ransferase-isomerase OS=Rickettsia conorii (strain ATCC VR-613 / Malish 7) OX=272944 GN=queA PE=3 SV=1
MKLSDFDFDLPSELIAQYPSSERDNSDLLIAVTPPIKTKFYNIIDYLKEGDLLVFNNSKVIKAKLNLGKNITINLNQKLSDDNWSAFAKPARKLHVNDEFYFDNHKVIITEKLAMGEIKVKFELNDISVFEFLNKYGEMPLPVYIRRSHSLCHPVATTTGSKTYLNNDWIPWSNHGMTNTQNDNDRYQTVYSQIEGSVAAPTAGLHFTKDILDKLKAEGIQATFLTLHVGAGTFLPVKTENIHEHKMHTEYCSITPDTAEIINKAKQEGKRIIAVGTTTLRTLESSCNNGIVKAGSFKTDIFITPGFKFQTADMLLTNFHFPKSTLFMLICAFAGFKEMHELYKYAIKEAMRFFSYGDATLLCRK

SEQ ID NO: 71481 - protein, 366 aa, Rickettsia endosymbiont
  misc_feature (1)..(366): tr|A0A0F3RCC5|A0A0F3RCC5_9RICK S-adenosylmethionine:tRN A ribosyltransferase-isomerase OS=Rickettsia endosymbio nt of Ixodes pacificus OX=1133329 GN=queA PE=3 SV=1
MKLSDFDFDLPSELISQYPSNKRDHSDLLIATTPLIKTKFYNIINYLKEGDLLVFNNSKVIKAKLHLGKNITINLNQKLPDNCWSAFAKPARKLNIGDEFYFDNHKVIITAKLAMGEIKVKFELDNISVFEFLDKYGEMPLPVYIRRSHSLCHTVATTTGSKKFLNNDWIPWSSHGMTNTQNDNERYQTIYSQIEGSVAAPTAGLHFTKDILDKIKAEGIQTTFLTLHVGAGTFLPVKTENIHEHKMHTEYCSITPETAEIINKAKQEGRRIIAVGTTTLRTLESSCNKGTVKAGDFETDIFITPGFKFQTADMLLTNFHFPKSTLFMLICAFAGFKEMHELYKYAIKEKMCFFSYGDATLLYRKI

SEQ ID NO: 71482 - protein, 365 aa, Rickettsia endosymbiont
  misc_feature (1)..(365): tr|A0A161QNF9|A0A161QNF9_9RICK S-adenosylmethionine:tRN A ribosyltransferase-isomerase OS=Rickettsia endosymbio nt of Proechinophthirus fluctus OX=1462733 GN=queA PE=3 SV=1
MKLSDFDFDLPSELIAQYPSSERDNSDLLIAVTPPIKTKFYNIIDYLKEGDLLVFNNSKVIKAKLNLGKNITINLNQKLSDDSWSAFAKPTRKLHINDEFYFDNHKVIITEKLAMGEIKVKFELNDISVFEFLNKYGEMPLPVYIRRSHSLCHPVATTTGSKTYLNNDWIPWSNHGMTNTQNDNDRYQTVYSQIEGSVAAPTAGLHFTKDILDKLKAEGIQATFLTLHVGAGTFLPVKTENIHEHKMHTEYYSITPDTAEIINKAKQEGKRIIAVGTTTLRTLESSCNNGIIKAGSFKTDIFITPGFKFQTADMLLTNFHFPKSTLFMLICAFAGFKEMHELYKYAIKEAMRFFSYGDATLLCRK

SEQ ID NO: 71483 - protein, 367 aa, Rickettsia felis
  misc_feature (1)..(367): tr|A0A0F3MUD2|A0A0F3MUD2_RICFI S-adenosylmethionine:tRN A ribosyltransferase-isomerase OS=Rickettsia felis str. Pedreira OX=1359196 GN=queA PE=3 SV=1
MKLSDFDFDLPTELIAQYPASERDNSDLLIATTPPIKTKFYNIIDYLKEGDLLVFNNSKVIKAKLNLERNITINLNQKLSDDSWSAFAKPARKLNIGDEFYSDNHKVIITEKFAMGEIKVKFELDNISVFEFLDKYGEMPLPVYIRRSKRHGEEEESSDEAISSQNPEIATESKRTPSNDDKLDSLRYQTIYSQIEGSVAAPTAGLHFTKEILDKLKAKGVQIAFVTLHVGAGTFLPVKTENIHEHKIHTEYCSITPETAEIINKAKQERRRIIAVGTTTLRTLESSCNNGVVKAGSFETDIFITPGFKFQTTDMLLTNFHFPKSTLFMLICAFAGFKEMHELYKYAIKEKMRFFSYGDATVLYRKV

SEQ ID NO: 71484 - protein, 367 aa, Rickettsia felis; identical to SEQ ID NO: 71483
  misc_feature (1)..(367): sp|Q4UMM7|QUEA_RICFE S-adenosylmethionine:tRNA ribosylt ransferase-isomerase OS=Rickettsia felis (strain ATCC V R-1525 / URRWXCal2) OX=315456 GN=queA PE=3 SV=1

SEQ ID NO: 71485 - protein, 365 aa, Rickettsia heilongjiangensis
  misc_feature (1)..(365): tr|G0GX66|G0GX66_RICH0 S-adenosylmethionine:tRNA ribosy ltransferase-isomerase OS=Rickettsia heilongjiangensis (strain ATCC VR-1524 / 054) OX=1032845 GN=queA PE=3 SV= 1
MKLSDFDFDLPSELIAQYPSSERDNSDLLIAVTPPIKTKFYNIIDYLKEGDLLVFNNSKVIKAKLNLGKNVTINLNQKLSDDSWSAFAKPARKLHVNDEFYFDNHKVIITEKLAMGEIKIKFELNDISVFEFLNKYGEMPLPVYIRRSHSLCHPVATTTGSKKYLNNDWIPWSNHGMTNTQNDNDRYQTVYSQIEGSVAAPTAGLHFTKDILDKLKAEGIQATFLTLHVGAGTFLPVKTENIHEHKMHTEYCSITPDTAEIINKAKQEGKRIIAVGTTTLRTLESSCNNGIIKAGSFETDIFITPGFKFQTADMLLTNFHFPKSTLFMLICAFAGFKEMHELYKYAIKEAMRFFSYGDATLLCRK

SEQ ID NO: 71486 - protein, 365 aa, Rickettsia japonica
  misc_feature (1)..(365): tr|G4KMD3|G4KMD3_RICJY S-adenosylmethionine:tRNA ribosy ltransferase-isomerase OS=Rickettsia japonica (strain A TCC VR-1363 / YH) OX=652620 GN=queA PE=3 SV=1
MKLSDFDFDLPSELIAQYPSSERDNSDLLIAVTPPIKTKFYNIIDYLKEGDLLVFNNSKVIKAKLNLGKNVTINLNQKLSDDSWSAFAKPARKLHVNDEFYFDNHKVIITEKLAMGEIKVKFELNDISVFEFLNKYGEMPLPVYIRRSHSLCHPVATTMGSKKYLNNDWIPWSNHGMTNTQNDNDRYQTVYSQIEGSVAAPTAGLHFTKDILDKLKAEGIQATFLTLHVGAGTFLPVKTENIHEHKMHTEYCSITPDTAEIINKAKQEGKRIIAVGTTTLRTLESSCNNGIIKAGSFETDIFITPGFKFQTADMLLTNFHFPKSTLFMLICAFAGFKEMHELYKYAIKEAMRFFSYGDATLLCRK

SEQ ID NO: 71487 - protein, 365 aa, Rickettsia japonica; identical to SEQ ID NO: 71486
  misc_feature (1)..(365): tr|A0A3B7DA82|A0A3B7DA82_RICJA S-adenosylmethionine:tRN A ribosyltransferase-isomerase OS=Rickettsia japonica O X=35790 GN=queA PE=3 SV=1

SEQ ID NO: 71488 - protein, 365 aa, Rickettsia massiliae
  misc_feature (1)..(365): tr|H6QL64|H6QL64_RICMA S-adenosylmethionine:tRNA ribosy ltransferase-isomerase OS=Rickettsia massiliae str. AZT 80 OX=1105112 GN=queA PE=3 SV=1
MKLSDFDFDLPSELIAQYPSSERDNSDLLIAVTPPIKTKFYNIIDYLKEGDLLVFNNSKVIKAKLNLGKNITINLNQKLSDDSWSAFAKPARKLHVNDEFYFDNHKVIITEKLAMGEIKVKFELNDISVFEFLNKYGEMPLPVYIRRSHSLSHPVATTTGSKKYLNNDWIPWSNHGMTNTQNDNDRYQTVYSQIEGSVAAPTAGLHFTKDILNKLKAEGIQATFLTLHVGAGTFLPVKTENIHEHKMHTEYCSITPDTAEIINKAKQEGKRIIAVGTTTLRTLESSCNNGIVKAGSFETDIFITPGFKFQTADMLLTNFHFPKSTLFMLICAFAGFKEMHELYKYAIKEAMRFFSYGDATLLCRK

SEQ ID NO: 71489 - protein, 366 aa, Rickettsia monacensis; identical to SEQ ID NO: 71481
  misc_feature (1)..(366): tr|A0A0B7J2J8|A0A0B7J2J8_9RICK S-adenosylmethionine:tRN A ribosyltransferase-isomerase OS=Rickettsia monacensis OX=109232 GN=queA PE=3 SV=1

SEQ ID NO: 71490 - protein, 365 aa, Rickettsia montanensis
  misc_feature (1)..(365): tr|H8KCL5|H8KCL5_RICMS S-adenosylmethionine:tRNA ribosy ltransferase-isomerase OS=Rickettsia montanensis (strai n OSU 85-930) OX=1105114 GN=queA PE=3 SV=1
MKLSDFDFDLPSELIAQYPSSERDNSDLLIAVTPPIKTKFYNIIDYLKEGDLLVFNNSKVIKAKLNLGKNITINLNQKLSDDSWSAFAKPARKLHVNDEFYFDNHKVIITEKLAMGEIKVKFELNDISVFEFLNKYGEMPLPVYIRRSHSLCHPVATTTGSKKYLNNDWIPWSNHGMTNTQNDNDRYQTVYSQIEGSVAAPTAGLHFTKDIFDKLKAEGIQATFLTLHVGAGTFLPVKTENIHEHKMHTEYCSITPDTAEIINKAKQEGKRIIAVGTTTLRTLESACNNGIVKAGSFETDIFITPGFKFQTADMLLTNFHFPKSTLFMLICAFAGFKEMHELYKYAIKEAMRFFSYGDATLLCRK

SEQ ID NO: 71491 - protein, 365 aa, Rickettsia parkeri
  misc_feature (1)..(365): tr|A0A0F3QRT7|A0A0F3QRT7_RICPA S-adenosylmethionine:tRN A ribosyltransferase-isomerase OS=Rickettsia parkeri st r. Grand Bay OX=1359203 GN=queA PE=3 SV=1
MKLSDFDFDLPSELIAQYPSSERDNSDLLIAVTPPIKTKFYNIIDYLKEGDLLVFNNSKVIKAKLNLGKNITINLNQKLSDDSWSAFAKPARKLHVNDEFYFDNHKVIITEKLAMGEIKVKFELNDISVFEFLNKYGEMPLPVYIRRSHSLCHPVATTTGSKTYLNNDWIPWSNHGMTNTQNDNDRYQTVYSQIEGSVAAPTAGLHFTKDILDKLKAEGIQATFLTLHVGAGTFLPVKTENIHEHKMHTEYCSITPDTAEIINKAKQEGKRIIAVGTTTLRTLESSCNNGIVKAGSFKTDIFITPGFKFQTADMLLTNFHFPKSTLFMLICAFAGFKEMHELYKYAIKEAMRFFSYGDATLLCRK

SEQ ID NO: 71492 - protein, 365 aa, Rickettsia peacockii
  misc_feature (1)..(365): sp|C4K0Y4|QUEA_RICPU S-adenosylmethionine:tRNA ribosylt ransferase-isomerase OS=Rickettsia peacockii (strain Ru stic) OX=562019 GN=queA PE=3 SV=1
MKLSDFDFDLPSELIAQYPSSERDNSDLLIAVTPLIKTKFYNIIDYLKEGDLLVFNNSKVIKAKLNLGKNITINLNQKLSDDSWSAFAKPARKLHVNDEFYFDNHKVIITEKLAMGEIKVKFELNDISVFEFLNKYGEMPLPVYIRRSHSLCHPVATTTGSKTYLNNDWIPWSNHGMTNTQNDNDRYQTVYSQIEGSVAAPTAGLHFTKDILDKLKAEGIQATFLTLHVGAGTFLPVKTENIHEHKMHTEYCSITPDTAEIINKAKQEGKRIIAVGTTTLRTLESSCNNGIVKAGSFKTDIFITPGFKFQTADMLLTNFHFPKSTLFMLICAFAGFKEMHELYKYAIKEAMRFFSYGDATLLCRK

SEQ ID NO: 71493 - protein, 365 aa, Rickettsia philipii
  misc_feature (1)..(365): tr|H6PWK9|H6PWK9_RICP3 S-adenosylmethionine:tRNA ribosy ltransferase-isomerase OS=Rickettsia philipii (strain 3 64D) OX=481009 GN=queA PE=3 SV=1
MKLSDFDFDLPSELIAQYPSSERDNSDLLIAVTPPIKTKFYNIIDYLKEGDLLVFNNSKVIKAKLNLGKNITINLNQKLSDDSWSAFAKPARKLHVNDEFYFDNHKVIITEKLAMGEIKVKFELNDISVFEFLNKYGEMPLPVYIRRSHSLCHPVATTTGSKTYLNNDWIPWSNHEMTNTQNDNDRYQTVYSQIEGSVAAPTAGLHFTKDILDKLKAEGIQATFLTLHVGAGTFLPVKTENIHEHKMHTEYCSITPDTAEIINKAKQEGKRIIAVGTTTLRTLESSCNNGIVKAGSFKTDIFITPGFKFQTADMLLTNFHFPKSTLFMLICAFAGFKEMHELYKYAIKEAMRFFSYGDATLLCRK

SEQ ID NO: 71494 - protein, 383 aa, Rickettsia prowazekii
  misc_feature (1)..(383): sp|Q9ZDV6|QUEA_RICPR S-adenosylmethionine:tRNA ribosylt ransferase-isomerase OS=Rickettsia prowazekii (strain M adrid E) OX=272947 GN=queA PE=3 SV=1
MKLSDFDFNLPSALIAQYPSSERDNSDLLIAGTKHIKTKFYNIIDYLKKGDLLVFNNSKVIKAKLHLGKNITINLNKKLSDNCWIAFAKPARKLNIGDEFYFDTHKIIITEKLAIGEIKVKFMLDNISIIKFLDKYGEIPLPFYIKRPSPVCYSNMALCCKPENTLKIKSIPHNMSKIVTNNSNTVNLRSNDGIIDSTNDNDRYQTIYSQIEGSVAAPTAGLHFTKNILDKLKTKGVHTAFVTLHVGAGTFLPVKTENIHEHKMHTEYCSITTETAEIINKTKQEGRSIIAVGTTTLRTIESACNNGIVRAGNFETDIFITPGFNFQVVDMLLTNFHFPKSTLFILICAFAGFKEMHALYKYAIKEKMRFFSYGDATLLYRKV

SEQ ID NO: 71495 - protein, 383 aa, Rickettsia prowazekii; identical to SEQ ID NO: 71494
  misc_feature (1)..(383): tr|D5AWD4|D5AWD4_RICPP S-adenosylmethionine:tRNA ribosy ltransferase-isomerase OS=Rickettsia prowazekii (strain Rp22) OX=449216 GN=queA PE=3 SV=1

SEQ ID NO: 71496 - protein, 366 aa, Rickettsia raoultii
  misc_feature (1)..(366): tr|A0A126E903|A0A126E903_9RICK S-adenosylmethionine:tRN A ribosyltransferase-isomerase OS=Rickettsia raoultii O X=369822 GN=queA PE=3 SV=1
MKLSDFDFDLPSELIAQYPSSERDNADLLIAVTPPIKTKFYNIIDYLKEGDLLVFNNSKVIKAKLNLGKNITINLNQKLSDDSWSAFAKPARKLHVHDEFYFDNHKVIITEKLAMGEIKVKFELNDISVFEFLNKYGEMPLPVYIRRSHSLCHPVAMTTESKKYLNNDWIPWSNHHGMTNTQNDNDRYQTVYSQIEGSVAAPTAGLHFTKDILDKLKAEGIQATFLTLHVGAGTFLPVKTENIHEHKMHTEYCSITPDTAEIINKAKQEGKRIIAVGTTTLRTLESSCNNGIVKAGSFETDIFITPGFKFQTADMLLTNFHFPKSTLFMLICAFAGFKEMHELYKYAIKEAMRFFSYGDATLLCRK

SEQ ID NO: 71497 - protein, 366 aa, Rickettsia rhipicephali
  misc_feature (1)..(366): tr|A0A0S2CAE6|A0A0S2CAE6_RICRH S-adenosylmethionine:tRN A ribosyltransferase-isomerase OS=Rickettsia rhipicepha li OX=33992 GN=queA PE=3 SV=1
MKLSDFDFDLPSELIAQYPSSERDNSDLLIAVTPPIKTKFYNIIDYLKEGDLLVFNNSKVIKAKLNLGKNITINLNQKLSDDSWSAFAKPARKLHVNDEFYFDNHKVIITEKLAMGEIKVKFELNDISVFEFLNKYGEMPLPVYIRRSHSLCHPVATTTGSKKYLNNDWIPWSNHGMTNTQNDNDRYQTVYSQIEGSVAAPTAGLHFTKDILNKLKAEGIQATFLTLHVGAGTFLPVKTENIHEHKMHTEYCSITPDTAEIINKAKQEGKRIIAVGTTTLRTLESSCNNGIVKAGSFETDIFITPGFKFQTADMLLTNFHFPKSTLFMLICAFAGFKEMHELYKYAIKEAMRFFSYGDATLLCRKR

SEQ ID NO: 71498 - protein, 365 aa, Rickettsia rhipicephali; identical to SEQ ID NO: 71488
  misc_feature (1)..(365): tr|A0A0F3PFX0|A0A0F3PFX0_RICRH S-adenosylmethionine:tRN A ribosyltransferase-isomerase OS=Rickettsia rhipicepha li str. Ect OX=1359199 GN=queA PE=3 SV=1

SEQ ID NO: 71499 - protein, 365 aa, Rickettsia rickettsii
  misc_feature (1)..(365): sp|B0BWL5|QUEA_RICRO S-adenosylmethionine:tRNA ribosylt ransferase-isomerase OS=Rickettsia rickettsii (strain I owa) OX=452659 GN=queA PE=3 SV=1
MKLSDFDFDLPSELIAQYPSSERDNSDLLIAVTPPIKTKFYNIIDYLKEGDLLVFNNSKVIKAQLNLGKNITINLNQKLSDDSWSAFAKPARKLHVNDEFYFDNHKVIITEKLAMGEIKVKFKLNDISVFEFLNKYGEMPLPVYIRRSHSLCHPVATTTGSKTYLNNDWIPWSNHGMTNTQNDNDRYQTVYSQIEGSVAAPTAGLHFTKDILDKLKAEGIQATFLTLHVGAGTFLPVKTENIHEHKMHTEYCSITPDTAEIINKAKQEGKRIIAVGTTTLRTLESSCNNGIVKAGSFKTDIFITPGFKFQTADMLLTNFHFPKSTLFMLICAFAGFKEMHELYKYAIKEAMRFFSYGDATLLCRK

SEQ ID NO: 71500 - protein, 365 aa, Rickettsia rickettsii; identical to SEQ ID NO: 71499
  misc_feature (1)..(365): sp|A8GR69|QUEA_RICRS S-adenosylmethionine:tRNA ribosylt ransferase-isomerase OS=Rickettsia rickettsii (strain S heila Smith) OX=392021 GN=queA PE=3 SV=1

SEQ ID NO: 71501 - protein, 365 aa, Rickettsia sibirica
  misc_feature (1)..(365): tr|Q7PB21|Q7PB21_RICS2 S-adenosylmethionine:tRNA ribosy ltransferase-isomerase OS=Rickettsia sibirica (strain A TCC VR-151 / 246) OX=272951 GN=queA PE=3 SV=1
MKLSDFDFDLPSELIAQYPSSERDNSDLLIAVTPPIKTKFYNIIDYLKEGDLLVFNNSKVIKAKLNLGKNITINLNQKLSDDSWSAFAKPARKLHVNDEFYFDNHKVIITEKLAMGEIKVKFELNDISVFEFLNKYGEMPLPVYIRRSHSLCHPVATTTGSKAYLNNDWIPWSNHGMTNTQNDNDRYQTVYSQIEGSVAAPTAGLHFTKDILDKLKAEGIQATFLTLHVGAGTFLPVKTENIHEHKMHTEYCSITPDTADIINKAKQEGKRIIAVGTTTLRTLESSCNNGIVKAGSFKTDIFITPGFKFQTADMLLTNFHFPKSTLFMLICAFAGFKEMHELYKYAIKEAMRFFSYGDATLLCRK

SEQ ID NO: 71502 - protein, 365 aa, Rickettsia slovaca
  misc_feature (1)..(365): tr|H8LMB7|H8LMB7_RICSL S-adenosylmethionine:tRNA ribosy ltransferase-isomerase OS=Rickettsia slovaca str. D-CWP P OX=1105109 GN=queA PE=3 SV=1
MKLSDFDFDLPSELIAQYPSSERDNSDLLIAVTPPIKTKFYNIIDYLKEGDLLVFNNSKVIKAKLNLGTNITINLNQKLSDDSWSAFAKPARKLHVNDEFYFDNHKVIITEKLAMGEIKVKFELNDISVFEFLNKYGEMPLPVYIRRSHSLCHPVATTTGSKTYLNNDWIPWSNHGMTNTQNDNDRYQTVYSQIEGSVAAPTAGLHFTKDILDKLKAEGIQATFLTLHVGAGTFLPVKTENIHEHKMHTEYCSITPDTAEIINKAKQEGKRIIAVGTTTLRTLESSCNNGIVKAGSFKTDIFITPGFKFQTADMLLTNFHFPKSTLFMLICAFAGFKEMHELYKYAIKEAMRFFSYGDATLLCRK

SEQ ID NO: 71503 - protein, 387 aa, Rickettsia sp.
  misc_feature (1)..(387): tr|A0A1C3EVD7|A0A1C3EVD7_9RICK S-adenosylmethionine:tRN A ribosyltransferase-isomerase OS=Rickettsia sp. wb OX= 1851512 GN=queA PE=3 SV=1
MKLSDFDFDLPLELIAQNPVSKRDESNLLIASTEQYVKTKFYNIVDYLKEGDLLVFNNSKVIKAKLNLDKNININLNQRLKDIATNDDADRLKSIDYWSAFAKPARKLKVGDEFYFDNHKIIITEKLEMGEIKIKFELANISVFEFLDKYGEMPLPLYIKRPFQKSLAQRHCEERHSPDTAISLQNPEIATASQRTPRNDNKLDDERYQTVYSNIQGSVAAPTAGLHFTNDIINKLKEKGVQVAFVTLHVGAGTFMPVKTENISEHKMHTEYCSITPETAVIINKAKQEKRRIIAVGTTSLRTLESSAINGNLNSGEFETDIFITPGFKFQIVDMLLTNFHFPKSTLFMLVCAFAGFKEMHELYKYAIKEQMRFFSYGDATLLYRKV

SEQ ID NO: 71504 - protein, 387 aa, Rickettsia sp.; identical to SEQ ID NO: 71503
  misc_feature (1)..(387): tr|A0A249E5E4|A0A249E5E4_9RICK S-adenosylmethionine:tRN A ribosyltransferase-isomerase OS=Rickettsia sp. MEAM1 (Bemisia tabaci) OX=1182263 GN=queA PE=3 SV=1

SEQ ID NO: 71505 - protein, 375 aa, Rickettsia typhi
  misc_feature (1)..(375): sp|Q68XF6|QUEA_RICTY S-adenosylmethionine:tRNA ribosylt ransferase-isomerase OS=Rickettsia typhi (strain ATCC V R-144 / Wilmington) OX=257363 GN=queA PE=3 SV=1
MKLSDFDFNVPNALIAQYPSSERDNSDLLIAGTKHIKTKFYNIIDYLKEGDLLVFNNSKVIKAKLHLGKNITINLNKKLSDNCWGAFAKPARKLNIGDEFYFDTHKIIITEKLAMGEIKVKFILNNISMIKFLDKYGEMPLPFYIKRTSSVCCSNMALFCDHDNTLKITSISHNSNTVNFRSTDSMIDSTNDNDRYQTIYSQIEGSVAAPTAGLHFTKDILDKLKTKGINTAFVTLHVGAGTFLPVKTENIHKHKMHTEYCSITAETAEIINKTKQKGRDIIAVGTTTLRTLESSCNNGIVKAGNFETDIFITPGFNFQIVDMLLTNFHFPKSTLFILICAFAGFKEMHALYKYAIKEKMRFFSYGDATLLYRKV

SEQ ID NO: 71506 - protein, 340 aa, Rickettsiaceae bacterium
  misc_feature (1)..(340): tr|A0A1W9SBC3|A0A1W9SBC3_9RICK S-adenosylmethionine:tRN A ribosyltransferase-isomerase OS=Rickettsiaceae bacter ium 4572_127 OX=1971637 GN=queA PE=3 SV=1
MKLSDFNFDLPEELIAKYPPENRTDSRMLVVPKNLDKKFTDFPDLLNAGDVLVLNNTKVIPARIYGVRGEAKIEATLHKKIDERTWLAFVKNSKRLKINDTIDFSKMTAKVLEKTDAGTLLKFNKSGENLLAILDKIGHMPLPPYMKRNDDSADKLRYQTVFAERNGSVAAPTAGLHFTDEILKKIKAKNVKIVFVTLHVGAGTFLPVKTENLDEHIMHSEWGEIDKKTADILNKTRESGGRIIAVGTTATRILETATNNKKIVESFCGETDIFITPGYKFKAIDVMLTNFHLPKSTLFMLVSALAGTSEMKSAYAHAIEKKYRFYSYGDCCLLEKKERK

SEQ ID NO: 71507 - protein, 348 aa, Rickettsiaceae bacterium
  misc_feature (1)..(348): tr|A0A4V1SW56|A0A4V1SW56_9RICK S-adenosylmethionine:tRN A ribosyltransferase-isomerase OS=Rickettsiaceae bacter ium OX=2023360 GN=queA PE=3 SV=1
MKLSDFDFFLPKELIAQEPSMLRDHSALLITDQDKKLIHTKFYNIIDYLKEGDVLVFNNSKVIKSKIILTKLDRTIELFFSKQINTNNWRGFAKPAKKLKEGDVFFVDTHKIIITKKLYMGEIEAEIQLDQLSFFEFLNSYGQMPLPPYIKSNKDKEAFNTSSKRYQTVYSDILGSVAAPTAGLHFTDELIDKIKMKGIHVAFLHLHVGTGTFMPIKSHDIEQHTMHSEYCNIPIHTAEVVNKAKIEGRRIIAVGTTSLRALESAACDNKILAKEFETDIFIKPGFKFQIVDCLITNFHLPKSTLLVLACAFSGYTKIMRAYYYAIEQKMRFFSYGDAMLLLKSEDMT

SEQ ID NO: 71508 - protein, 268 aa, Rickettsiales bacterium
  misc_feature (1)..(268): tr|A0A2D7Q810|A0A2D7Q810_9RICK S-adenosylmethionine:tRN A ribosyltransferase-isomerase OS=Rickettsiales bacteri um OX=2026788 GN=CMM89_05065 PE=3 SV=1
  misc_feature (7)..(7): Xaa can be any naturally occurring amino acid
  misc_feature (192)..(192): Xaa can be any naturally occurring amino acid
  misc_feature (197)..(197): Xaa can be any naturally occurring amino acid
  misc_feature (210)..(210): Xaa can be any naturally occurring amino acid
  misc_feature (217)..(217): Xaa can be any naturally occurring amino acid
  misc_feature (233)..(233): Xaa can be any naturally occurring amino acid
  misc_feature (235)..(235): Xaa can be any naturally occurring amino acid
  misc_feature (251)..(251): Xaa can be any naturally occurring amino acid
MIKKKKXWSAFIRSNKKIQLEQNIYLKNSIYCKVIEIKKEKNYVSYIIKFSLRYLDLIEFLNSHGKIPLPAYIKKKRLINQSDIKNYQTIFADKIGAVAAPTASLHFTKRLIDKIKKKGINIITLTLHVNGGTFLPIKSNVVEDHLMHFEKGVITQESASKINYFKKKGGRIFAVGTTVLRLLESSKDNQGXIKAFXGETNIYIKPGWKXNTIDALXTNFHTPKSTLLLLIYXIXGKKRTQEIYSFAIKHXMRFFSYGDACLIWNKNE

SEQ ID NO: 71509 - protein, 342 aa, Rickettsiales bacterium
  misc_feature (1)..(342): tr|A0A1Z9MX29|A0A1Z9MX29_9RICK S-adenosylmethionine:tRN A ribosyltransferase-isomerase OS=Rickettsiales bacteri um TMED211 OX=1986869 GN=queA PE=3 SV=1
  misc_feature (336)..(336): Xaa can be any naturally occurring amino acid
MLTKKFDFEIPDSLIALEPANPRDSSKLIEVSNVFNINNFTNILDILKKNDCLVLNDTKVLPASLKGECEKKEIKVTLNKLIKTSPKIIWSVFVKPLKKAKDNVTIEFEGGFLGKLKRSNNQVLLEFNYTYDRFMIFIHRYGVLALPPYISKKRKFQKIDYQNYQTVFAKKEGAVAAPTASLHFTENLLKKIIDKGVKLVMITLHVNGGTFTPIRKHNIEEHEMHFEFGEITKNAAKIINETRLMGNKCIAVGTTVLRLLETSKKRNGQITEYCGETNIFIKPGWKINSIDGLITNFHTPKSTLFVLICAMIGINKAKRLYKFAVKNKIRFFSYGXACLLWK

SEQ ID NO: 71510 - protein, 342 aa, Rickettsiales endosymbiont
  misc_feature (1)..(342): tr|A0A3S8T546|A0A3S8T546_9RICK S-adenosylmethionine:tRN A ribosyltransferase-isomerase OS=Rickettsiales endosym biont of Stachyamoeba lipophora OX=2486578 GN=queA PE=3 SV=1
MKLSDFDFELPEGLIAKHPTEPRDQCKMLVVDNDHFDDKKFYELLNYVNAGDVVVFNDTKVLPSYLKAYNNNGALININLHKYKNDLIWEAFVKPAKRVRVGEKLVVADDFVFEITAKDDGGIVYLKTNYDTKEFFNKLDYYGKMPIPPYIKREVESGDEQNYQTVYAKFSGSVAAPTAGLHFTDDLLKRLVEKGVSLEYVTLHVGAGTFMPVKVDHIKDHVMHSEYCEISFATANKINQAKANGNKIIAVGTTTLRTLESAVDKDGLVRSFCGNTNIFITPGAKIKSADMLITNFHLPKSTLLMLVSAFCGYNNIINAYKHAINNQYRFFSYGDACLLFKA

SEQ ID NO: 71511 - protein, 354 aa, Rickettsiales endosymbiont
  misc_feature (1)..(354): tr|A0A4Q7DQB0|A0A4Q7DQB0_9RICK S-adenosylmethionine:tRN A ribosyltransferase-isomerase OS=Rickettsiales endosym biont of Peranema trichophorum OX=2486577 GN=queA PE=3 SV=1
MKLSDFDYHLPKELIAQTPLPRSRSRLLNVTDIMEDLHITDLPMYLSKGDVLVLNNTRVIPSLLRARKVSKFGDDVINDGIISFNLYKNVQGNVWLAFAKPGKKVRVGDTFAVNGKILLFQIIGKSQNSPEITIQFACQGDSLISQLKLYGDVPLPPYIKRSAPTEADTSDYQTVFASVDGAVAAPTAGLHFTTGMLEDIQAQGVRLAYITLHVGGGTFLPIRSEHITEHEMHEEAFLIPTDSAAIINDARANGNKVIAVGTTVLRTLEATADERGFLRGCHGSTNLFIYPGYRFKAVDMLLTNFHLPKSTLFILVCAFAGTERMKRAYLHAVQQKYRFFSYGDACFLRRYRQA

SEQ ID NO: 71512 - protein, 350 aa, Rickettsiella grylli
  misc_feature (1)..(350): tr|A8PK82|A8PK82_9COXI S-adenosylmethionine:tRNA ribosy ltransferase-isomerase OS=Rickettsiella grylli OX=59196 GN=queA PE=3 SV=1
MLQTRLQTQYKPEDFFYELPEKLIAHYPTEQRTDSRLLCLNKTTGVMQHKKFKDILDFINPGDLLVLNNTQVIPARLFAKKITGGKVEILIERILERQRILAQLKSSKSLQRGTRLILENEMHVEIVNRTETMYELVFLIEPNLSILELLNQIGHIPLPPYIQRADELFDGERYQTVFASVPGAIAAPTAGLHFDEDLLTELKTKGVHIAYITLHVGAGTFQPIRSDRLEDHRMHHEYVTVSKTVCEQIIRAKQLNKRIIAVGTTVVRSLETAALQGQINPLAGETNLFIYPGFNFHCIDALITNFHLPRSTLLMLVCALGGYELIMQAYQEAVFQGYRFFSYGDAMWIS

SEQ ID NO: 71513 - protein, 349 aa, Riemerella anatipestifer
  misc_feature (1)..(349): tr|E4T9E1|E4T9E1_RIEAD S-adenosylmethionine:tRNA ribosy ltransferase-isomerase OS=Riemerella anatipestifer (str ain ATCC 11845 / DSM 15868 / JCM 9532 / NCTC 11014) OX= 693978 GN=queA PE=3 SV=1
MKTSDFNFNLPPELLAEHPSEHRDEARLMVLNRKNQTIEHKLFKDVIDYFDENDLFIFNNTKVFPARLYGNKEKTGAKIEVFLLRELDKETRVWDVLVDPARKIRIGNKLFFDEDESLVAEVIDNTTSRGRTLRFLYDGSYEEFRAKLKELGETPLPKYIKREVEPEDAERYQTIYAKKEGAVAAPTAGLHFSKHLMKRLEIKGINFAEVTLHVGLGTFNPIEVEDLSKHKMECEEAFIDQKNADIINKAIDEDRRICAVGTTTMRTIETSVSSNRKLSAYHGWTNKFIYPPYDFAVADSMITNFHTPKSTLIMMIAAFAGKDFVMHAYEEAVKEKYKFYSYGDAMLIL

SEQ ID NO: 71514 - protein, 349 aa, Riemerella anatipestifer
  misc_feature (1)..(349): tr|J9R8Y6|J9R8Y6_RIEAN S-adenosylmethionine:tRNA ribosy ltransferase-isomerase OS=Riemerella anatipestifer RA-C H-1 OX=1228997 GN=queA PE=3 SV=1
MKTSDFNFNLPPELLAEHPSEHRDEARLMVLNRKNQTIEHKLFKDVIDYFDENDLFIFNNTKVFPARLFGNKEKTGAKIEVFLLRELDKDTRVWDVLVDPARKIRIGNKLFFDEDESLVAEVIDNTTSRGRTLRFLYDGSYEEFRAKLKELGETPLPKYIKREVEPEDAERYQTIYAKNEGAVAAPTAGLHFSKHLMKRLEIKGINFAEVTLHVGLGTFNPIEVEDLSKHKMECEEAFIDQKNADIINKAIDEDRRICAVGTTTMRTIETSVSSNRKLSAYHGWTNKFIYPPYDFAVADSMITNFHTPKSTLIMMIAAFAGKDFVMHAYEEAVKEKYKFYSYGDAMLIL

SEQ ID NO: 71515 - protein, 349 aa, Riemerella columbipharyngis
  misc_feature (1)..(349): tr|A0A1G7BPJ9|A0A1G7BPJ9_9FLAO S-adenosylmethionine:tRN A ribosyltransferase-isomerase OS=Riemerella columbipha ryngis OX=1071918 GN=queA PE=3 SV=1
MKTSDFNFNLPAELLAERPSEHRDEARLMVLDRAKQTIEHKLFKDVVNYFDENDLFIFNNTKVFPARLYGNKEKTGARIEVFLLRELDKETRVWDVLVDPARKIRIGNKLFFDKEETLLAEVIDNTTSRGRTLRFLYDGSYEEFREKLREIGNTPLPKYIKREAEPEDAERYQTIYAKVEGAVAAPTAGLHFSKHLMKRLEIKGINFAEITLHVGLGTFNPIEVEDLSKHKMECEETIIDQKNADLINKAIEEDRKICAVGTTVMRAIETSVSSNRRIGPYHGWTNKFIYPPYDFGIANTMITNFHTPKSTLLMMIAAFAGKDFVMEAYEEAIREKYKFYSYGDAMLIL

SEQ ID NO: 71516 - protein, 349 aa, Rikenella microfusus
  misc_feature (1)..(349): tr|A0A379MML2|A0A379MML2_9BACT S-adenosylmethionine:tRN A ribosyltransferase-isomerase OS=Rikenella microfusus OX=28139 GN=queA_1 PE=3 SV=1
MKLSQYKYDFSPDMLAKYPAENRDESRLLVFDRKSGKIEHKIFKDIIGYFKEGDVMIFNNTKVFPARLYGNKEKTGAEIEIFLLRELNREQRLWDVLVDPARKIRIGNKLYFGDDDALVAEVIDNTTSRGRTLRFLFDGDYDQFKAALYKLGETPLPRWIRPKVEPIDAERYQTIYAKVEGAVAAPTAGLHFSKHLLKRLEIKGVGCAEVTLHVGLGNFRSVDVEDLTKHKMDSEQIFISEEAVKIVNTARAKEKRVCAIGTTVMRTIESSVSTDGMLKPFEGWTNKFIFPPYEFSVANAMVTNFHLPYSTQLMMVSAFAGYDQLMNLYEVAKKEDYKFGTYGDAMLIL

SEQ ID NO: 71517 - protein, 402 aa, Rikenella microfusus
  misc_feature (1)..(402): tr|A0A379MTW9|A0A379MTW9_9BACT S-adenosylmethionine:tRN A ribosyltransferase-isomerase OS=Rikenella microfusus OX=28139 GN=queA_2 PE=3 SV=1
MEKAIDISEFDYPLPDERIARFPLEDRAASKLLLYRNGTVGEDVFRNVADYLPAGALVVFNDTKVIRARLLFHKATGARIEIFCLEPHAPADYERAFAVTGRCEWHCIVGNSKKWKSGPLEMPYDGGILSAERIQDDRIGFAWTSEHTFGQLLELLGRTPIPPYLCRESEEIDTVRYQTVYSKWEGSVAAPTAGLHFTSEIIESLSGRGFDTAEVTLHVGAGTFLPVKEKDARNHRMHTEFFQVGLATLEKLAAAAAEGKIVAVGTTSVRTLESLAVLGERVLLTGDAAPERTVGQWEAYTNGATADGESAPLGALAEWMRSWKMTQLHAATEIMIVPSYRWRTVRGLITNFHQPQSTLLLLISALVGERWREIYSYALEHGFRFLSYGDSSLLLPEKGSGE

SEQ ID NO: 71518 - protein, 350 aa, Rikenellaceae bacterium
  misc_feature (1)..(350): tr|A0A350IHD7|A0A350IHD7_9BACT S-adenosylmethionine:tRN A ribosyltransferase-isomerase OS=Rikenellaceae bacteri um OX=2049048 GN=queA PE=3 SV=1
MKLSQFQFPISLKKDIAHEPTGKWRDESRMMVLHKDTGEIEHKIFKNIVDYFGKGDTFVLNDTKVFPARLLGKKEKTGADIEVFLLRELNKEQRLWDVIVEPARKIRIGNKLYFGEDSLVAEVIDNTTSRGRTLRFLYDGKYEDFKQTLFSLGDIPVPKWVKEKTTPEDKVNFQTIFAKNEGAVSAPAAGLHFSRELFNMMTLKDINKTFITEHMGIGYFRKVDVEDLSKHKMDSERLIITPESAEIINKTKAEGHKVLAVGVTVMRGLETYVTTNDEVQPYDGWTNKFIFPPYRYAVPNAIVSNFHLPGSTMLMAVAAFGRYEPVKKAYETALQEGYKFGPYGDALLII

SEQ ID NO: 71519 - protein, 349 aa, Rikenellaceae bacterium
  misc_feature (1)..(349): tr|A0A3B8X1A3|A0A3B8X1A3_9BACT S-adenosylmethionine:tRN A ribosyltransferase-isomerase OS=Rikenellaceae bacteri um OX=2049048 GN=queA PE=3 SV=1
MKLSQFNFDLPADRIAKEPTRWRDEARLMVLHKDTGEIEHRLFKDIIDYFGKGDIFVLNDTKVFPARLYGKKEKTGADIMVLLLRELNREQRLWDVIVDPARKIRIGNKLYFGEDESLVAEVIDNTTSRGRTLRFLFDGPYEDFKEALFSLGEPYVPEWVKEKTTPEDVENYQTIFAAHEGAVSAPAASLHFSRELFNRMILKDIEKTFITVHMGIGHFRTVDVEDLSKHRMDSERLIISEEAAAAINKAKRSGKKVVAIGATVMRGLETYVTTTHEVNPYDGWTNKFIFPPYQYSVPDACVSNFHLPQSTMLMSVAAFGGYKGVMAAYEEALKEGYRFGPYGDALLIV

SEQ ID NO: 71520 - protein, 372 aa, Rippkaea orientalis
  misc_feature (1)..(372): tr|B7JVE6|B7JVE6_RIPO1 S-adenosylmethionine:tRNA ribosy ltransferase-isomerase OS=Rippkaea orientalis (strain P CC 8801) OX=41431 GN=queA PE=3 SV=1
MNDDHLLASYDYHLPAELIAQSPVTPRDSSRLLVLNSLTTQVHSVFRELPQWLRSGDLLVLNNTRVIPARLYGQKTTGAPVEILLLEEKAPLSWLALVKPGKRFKRGSQIWFPHSPDETTESSVYLKATVIDVDPETGGRLLQFEADSVEAFWSAIEELGKIPLPPYVTSSEAQPGQYQTVYAQKPGAVAAPTAGLHFTPDLLQRLQAQGIQQSYITLHVGVGTFRPVEVGDITQHQMHSEWLEVPSSTVEAIAETKARGGRVIAVGTTVVRSLEGVAQIAKAEGKSGLIPFRGRTDLFIYPGYSWQVVEGMITNFHLPRSSLLMLVSALIGRERLMSVYQTAIDEKYRFYSFGDGMLILPEAVKSPNYSSV

SEQ ID NO: 71521 - protein, 371 aa, Rivibacter subsaxonicus
  misc_feature (1)..(371): tr|A0A4Q7VVU9|A0A4Q7VVU9_9BURK S-adenosylmethionine:tRN A ribosyltransferase-isomerase OS=Rivibacter subsaxonic us OX=457575 GN=queA PE=3 SV=1
MQPSASEPSATRDWSVADFDFELPPELIAQHPAPERSASRLLDGRGALPVDRVFRELPALLSPGDLLVFNDTRVIKARLFGRKTTAGVRGGAGGGRVEALIERVLPGTREVWAHLRASKSPRAGSVVRFGDDEAHAFDAEVLGRCGAEDALFHLRFPEDPFVLLERSGHVPLPPYITHADAAEDVRRYQTVFADKPGAVAAPTASLHFDEALLEQLAARGVQRASVTLHVGAGTFQPVRVERIKEHRMHSEWFDVPAVTVDAIAQTRARGGRVVAVGTTTLRALESAALDRADRLPAVGARETEIFITPGFDFRVVDRLVTNFHLPKSTLLMLVSAFAGFEHMHALYAHAIAQRYRFFSYGDAMLLDRRVS

SEQ ID NO: 71522 - protein, 342 aa, Rivicola pingtungensis
  misc_feature (1)..(342): tr|A0A318KKN1|A0A318KKN1_9NEIS S-adenosylmethionine:tRN A ribosyltransferase-isomerase OS=Rivicola pingtungensi s OX=1054498 GN=queA PE=3 SV=1
MQLSDFDFELPEALIAQFPPATRGDSRLLHVDGLCCTDDHFSQLSAYLRAGDVLVFNDTRVLKARLFGQKASGGQVEILVERVLDAHRVLAHVRASKSPKPGSRLLLEGRWQAEMVERQEALFLLRFLDEANVLDILEQSGKLPLPPYITRDADSPDDERYQTVYARHQGAVAAPTAGLHFTDAQLDALRAQGVKLAFVTLHVGAGTFQPVRVDNIAEHRMHSERYDIPPATVEAITQAHASGGRVVAVGTTSLRALESAARGGELAAGQGETDIFITPGYRFRVVDRLLTNFHLPKSTLMMLVSAFAGMAPIRAAYHHAIEQQYRFFSYGDAMLLEKSPDA

SEQ ID NO: 71523 - protein, 393 aa, Rivularia sp.
  misc_feature (1)..(393): tr|K9R7R9|K9R7R9_9CYAN S-adenosylmethionine:tRNA ribosy ltransferase-isomerase OS=Rivularia sp. PCC 7116 OX=373 994 GN=queA PE=3 SV=1
MAISNSSNPQSNTSQSVYSSNQDSTHINLDVSLDGYDYHLPPEFIAQNPAVPRDSSRLLVVDSLDTGIKSIPSHHVFRDLSVILRPQDLLVMNDTKVIPARLYGRKSTGAQVEVLLLEEKHVDCWLALVKPGKRFKKGSEIIFETKRENSQQNCKKLVATVLETDEATGGRLLQFDVPAGMSLIQLLEDFGEVPLPPYISASEAESGQYQTVYAQNPGAVAAPTAGLHFTPELLEKLEEKGINRTFVTLHVGVGTFRPVEVEDVTTHEMHGEWIEIPAETVEKIRETKAKGGRIIAVGTTAVRALEGAAKAGEAELQPFCGETDLFIYPGYEWKVVDGLITNFHLPRSSLLMLVSALIGRERLLNIYQEAIKSQYRFYSFGDAMLILPEAVSG

SEQ ID NO: 71524 - protein, 349 aa, Rivularia sp.
  misc_feature (1)..(349): tr|K9RGY9|K9RGY9_9CYAN S-adenosylmethionine:tRNA ribosy ltransferase-isomerase OS=Rivularia sp. PCC 7116 OX=373 994 GN=Riv7116_4309 PE=3 SV=1
MSTPFTFLLPAELSAKEPPERRGIARDGVRLMTINRNSGEVDHSRFNGISEFLRPGDLLIFNTSRTLPASLQGCDCTLDKYLEIRLAQHLPDDSWLALLMCQQGNPFACGLQEGMNLDFGEGLTAKVENQDIHIPRLWKISFSLAGTQLMDSIYRLGNPIRYEYVSKPWDLDYYQTVYAKEPGSAEMPSAGRAFTWKLLFDLKRKGIETAQIVLHTGLSSYMDDELDALHPASEEEYFISETAAKKINRVRQEGGRIIAVGTTVVRALESAVDIEGLIKPQHSYTRLHISAEHQLKIVDGLLTGMHEPEASHLDLLTAFLSAEQIQVAYEDAVQRGYLWHEFGDLNLIL

SEQ ID NO: 71525 - protein, 390 aa, Robbsia andropogonis
  misc_feature (1)..(390): tr|A0A0F5JZL0|A0A0F5JZL0_9BURK S-adenosylmethionine:tRN A ribosyltransferase-isomerase OS=Robbsia andropogonis OX=28092 GN=queA PE=3 SV=1
MYTLSDFDFNLPEALIAQYALPERSASRLLHVGPPAPGSTSPHLTDHHFADLVSFLRPGDLLVFNDTKVLKARFFGTKASGGHVEVLVERLIEDPPGTRPVGAGGTTALAQIRASKSPRAGTTLRLADAFDVIVGERVGPFYTLTFPGPCLDLIEQYGRLPLPPYIQHTPDASDETRYQTVYAAHPGAVAAPTAGLHFDEALLAALDAAGIQRGTLTLHVGAGTFQPVRTENIADHVMHSESYEIPAALADAISTTRAAGGRVIAVGTTSMRALESAARDQATATGASDLGTPANVAVDDRSSTAPQLRAHRAETDIFITPGYPFRIVDCLITNFHLPKSTLMMLVSAFAGMAPIRAAYRHAIAAQYRFFSYGDAMFLTRTPEAPSDAQV

SEQ ID NO: 71526 - protein, 379 aa, Robbsia sp.
  misc_feature (1)..(379): tr|A0A494XKK8|A0A494XKK8_9BURK S-adenosylmethionine:tRN A ribosyltransferase-isomerase OS=Robbsia sp. DHC34 OX= 2419776 GN=queA PE=3 SV=1
MYTLSDFDFDLPPDLIAQTALADRTASRLLEVTHGGTDAGTGAAIDTGLAANPGTGTGIDPTLIDRHFSELLACVSPGDLLVFNDTKVLKARFHGHKASGGKIEVLIERLTGPRTALAQIRASKSPGEGTTIRLADAFDVTIGPRVEPFFTLHFPDDCLTLIEQYGRLPLPPYITHEADALDETRYQTVYAANPGAVAAPTAGLHFDATLLDALDAAGVRRATLTLHVGAGTFQPVRTEKLADHTMHTEWYDIPASLVDEIAATRACGGRVIAVGTTSMRALEAAARDAIRAGAAPGTLRAGSAETDIFITPGYTFNIVDRLVTNFHLPKSTLLMLVSAFAGYETIRAAYRHAIAQRYRFFSYGDAMLLTRAAPIPDHA

SEQ ID NO: 71527 - protein, 349 aa, Robertkochia marina
  misc_feature (1)..(349): tr|A0A4S3M1E0|A0A4S3M1E0_9FLAO S-adenosylmethionine:tRN A ribosyltransferase-isomerase OS=Robertkochia marina O X=1227945 GN=queA PE=3 SV=1
MKLSHFNFDLPKDLLAEYPSENRDEARLMVVHRKDGKIEHKMFKDLIDYFDEGDVMVLNNTKVFPARLFGNKEKTGARIEVFLLRELNVEQRLWDVLVDPARKIRIGNKLYFGEDESLVAEVIDNTTSRGRTLRFLYDGSYDEFRKKLNELGETPLPKYIKREVEPEDEERYQTIYAKEEGAVAAPTAGLHFSKHLLKRLEIKGIDFAELTLHVGLGTFNPVEVEDLSKHKMDSEELFIAEEAADIVNKAKKNKKRVCAVGTTVMRGLESSVSSERTLNSFEGWTNKFIFPPYEFSIADCMVTNFHTPKSTLLMMISAFAGHDLTMKAYKEAVKEKYRFYSYGDAMLIL

SEQ ID NO: 71528 - protein, 349 aa, Robiginitalea biformata
  misc_feature (1)..(349): tr|A4CPN7|A4CPN7_ROBBH S-adenosylmethionine:tRNA ribosy ltransferase-isomerase OS=Robiginitalea biformata (stra in ATCC BAA-864 / HTCC2501 / KCTC 12146) OX=313596 GN=q ueA PE=3 SV=1
MKLSHFNFELPKELLAEYPTENRDESKLMVVHRETGKIEHKLFKDLIDYFEEDDVVVLNNTKVFPARLYGNKEKTGARIEVFLLRELNEEQRLWDVLVDPARKIRIGNKLYFGEDEALVAEVIDNTTSRGRTLRFLYDGSYTDFRRKMRELGQTPLPKYIKRDPEPEDESRYQTIYAKYEGAVAAPTAGLHFSKHLLKRLEIKGINFAELTLHVGLGTFSPVEVEDLSKHKMDSEELVIDERATEIVNTAKKNKRKVCAVGTTVMRGLESAVSSEHMLNTHEGWTNKFIFPPYEFSIANCMVTNFHLPKSTLLMMVSAFMGHDLMKRAYKEAILEQYRFYSYGDAMLIL

SEQ ID NO: 71529 - protein, 349 aa, Robiginitalea myxolifaciens
  misc_feature (1)..(349): tr|A0A1I6FRD7|A0A1I6FRD7_9FLAO S-adenosylmethionine:tRN A ribosyltransferase-isomerase OS=Robiginitalea myxolif aciens OX=400055 GN=queA PE=3 SV=1
MKLSHFNFELPKELLAEYPAENRDESKLMVIHRDTGKIEHKMFKDMIDYFDEGDVMVLNNTKVFPARLFGNKEKTGARIEVFLLRELNEEQRLWDVLVDPARKIRIGNKLYFGEDETLVAEVIDNTTSRGRTLRFLYDGSYTDFRRKLRELGQTPLPKYIKREPEPEDESRYQTIYAKHEGAVAAPTAGLHFSKHLLKRLEIKGIDFAELTLHVGLGTFSPVEVEDLSKHKMDSEELIIDERATEIVNRAKKNKRKVCAIGTTVMRGLESAVSSEHTLNTHEGWTNKFIFPPYDFSIATSMVTNFHLPKSTLLMMVSAFMGHDLMKRAYKEAILEQYRFYSYGDAMLIL

SEQ ID NO: 71530 - protein, 361 aa, Robiginitomaculum sp.
  misc_feature (1)..(361): tr|A0A2G2LKU8|A0A2G2LKU8_9RHOB S-adenosylmethionine:tRN A ribosyltransferase-isomerase OS=Robiginitomaculum sp. OX=2030823 GN=queA PE=3 SV=1
  misc_feature (21)..(21): Xaa can be any naturally occurring amino acid
  misc_feature (83)..(83): Xaa can be any naturally occurring amino acid
MRVDQFDFDLPEACIALRPAXPRDASRLLEVTPGQPLADRMFTDLADRLRPGDVLVLNDTKVLPAALYGLRAARDVGGGGPAXIEVNLHKRLDASHWRAFVRPAKRLRVGDVIAFGDQNEACMAGALNGRVIDKHEGEITLEFEFAGPVLDEAIARVGQMPLPPYIARKRAVDARDEHDYQTIFAQYPGSVAAPTASLHFSDAMFAALDARGVERVSLTLHVGAGTFLPVKTDDTAGHKMHGERYEVSEKTAAALNTARAEGRRIIAAGTTALRTLESIADENGVLHAGAGDTDIFITPGYTFRAVYGLLTNFHLPRSTLFMLVCALAGFDEMHAAYAHAIANGYRFYSYGDASLLWRKDT

SEQ ID NO: 71531 - protein, 360 aa, Robiginitomaculum sp.
  misc_feature (1)..(360): tr|A0A2G2LZ89|A0A2G2LZ89_9RHOB S-adenosylmethionine:tRN A ribosyltransferase-isomerase OS=Robiginitomaculum sp. OX=2030823 GN=queA PE=3 SV=1
MRVDLFDFNLPEACIALRPACPRDASRLLEVTPGEPLADRMFTDLAERLRPGDVLILNDTKVLPAALYGSRPAREHGGGGPVRVEVNLHKRLDAARWRAFVRPAKRLRDGDVIAFGDDNEACMAGALNGRVCDKHEGEITLAFEFSGAVLDEAIARVGQMPLPPYIARKRAVDARDEHDYQTIFAQELGSVAAPTASLHFSDAMFAALDARGVTRQILTLHVGAGTFLPVKTDDTAGHKMHGERYEVSEVTAAALNTARAQGRRIIAAGTTALRTLESIADADGVLHAGSGDTDIFITPGYKFRAVDGLLTNFHLPRSTLFMLVSALAGLDEMRAAYAHAIADNYRFYSYGDASLLWREL

SEQ ID NO: 71532 - protein, 341 aa, Robinsoniella peoriensis
  misc_feature (1)..(341): tr|A0A4U8QGY0|A0A4U8QGY0_9FIRM S-adenosylmethionine:tRN A ribosyltransferase-isomerase OS=Robinsoniella peorien sis OX=180332 GN=queA PE=3 SV=1
MKTSDFYFDLPQELIAQDPLEDRSSSRLLVLDRETGEIRHQIFKDIAAYLNPGDCLVVNDTKVIPARLFGTKVGTDAKIEVLLLKRKENNIWETLVKPGKKAKPGTKISFGEGLLMGEVIDVVEEGNRLIQFSYEGVFEEILDQLGQMPLPPYITHQLKDKNRYQTVYAKHDGSAAAPTAGLHFTPELLEEIQRKGIKIAHVTLHVGLGTFRPVKVEDVTEHHMHSEFYIVEEDQAKLINDTKKNGGKVISVGTTSCRTLESATDENGILKAGSGWTEIFIYPGYQFKMIDHLITNFHLPESTLLMLVSALAGKENIMNAYETAVKERYRFFSFGDAMFIV

SEQ ID NO: 71533 - protein, 341 aa, Robinsoniella sp.
  misc_feature (1)..(341): tr|A0A371AUE3|A0A371AUE3_9FIRM S-adenosylmethionine:tRN A ribosyltransferase-isomerase OS=Robinsoniella sp. MCW D5 OX=1812858 GN=queA PE=3 SV=1
MKVTDFYFDLPKELIAQDPLKDRSSSRLLLLDKKTGEIEHNVFRNIIEFLNLGDCLVLNDTKVLPARLIGSRIGTDAKIEILLLKRKDNDVWETLVKPGKKAKIGTKISFGEGILIGEIVDIVEEGNRLIQFSYNGIFEEILDELGQMPLPPYITHQLEDKNRYQTVYAKHSGSAAAPTAGLHFTPELVEEIEKKGIAIAYITLHVGLGTFRPVKVENVLDHHMHSEFYTINQKEADKMNKAKENGNRIIAVGTTSCRTLESAVKEDGRISETSGWTEIFIYPGYKFKFIDCLITNFHLPESTLLMLVSALAGRESIMNAYQVAVNEKYRFFSFGDAMFIY

SEQ ID NO: 71534 - protein, 341 aa, Robinsoniella sp.; identical to SEQ ID NO: 71532
  misc_feature (1)..(341): tr|A0A0J1GFI3|A0A0J1GFI3_9FIRM S-adenosylmethionine:tRN A ribosyltransferase-isomerase OS=Robinsoniella sp. RHS OX=1504536 GN=queA PE=3 SV=1

SEQ ID NO: 71535 - protein, 363 aa, Rodentibacter genomosp.
  misc_feature (1)..(363): tr|A0A1V3J3A0|A0A1V3J3A0_9PAST S-adenosylmethionine:tRN A ribosyltransferase-isomerase OS=Rodentibacter genomos p. 1 OX=1908264 GN=queA PE=3 SV=1
MRVSDFHFDLPDELIARYPKADRSSCRLLTLNGENGEISHRTFTDVLDLIDEGDLLIFNNTRVIPARMFGRKASGGKIEVLVERMLDEHRFLAHIRSSKSPKEGTELFLGEDKLGENKGIQAVMIERHDTLFEVELTDKSTSLLTVLQQIGHMPLPTYIDRPDEEADQECYQTVYNKVPGAVAAPTAGLHFDDELLAKLQAKGVNFEFVTLHVGAGTFQPVRVENIEEHIMHAEYVELSQEVCNAIIDTKKAGKRVIAVGTTSVRSIETAALSAEENGNPDLIEPYFSDTSIFIYPGKKFRVVDALITNFHLPESTLIMLVSAFAGFNHTMNAYKSAVENRYRFFSYGDAMFITKNTRVRGLE

SEQ ID NO: 71536 - protein, 363 aa, Rodentibacter genomosp.
  misc_feature (1)..(363): tr|A0A1V3JNS9|A0A1V3JNS9_9PAST S-adenosylmethionine:tRN A ribosyltransferase-isomerase OS=Rodentibacter genomos p. 2 OX=1908266 GN=queA PE=3 SV=1
MRVSDFHFDLPDELIARYPKADRSSCRLLTLNGENGEISHRTFTEVLDLIDEGDLLIFNNTRVIPARMFGCKASGGKIEVLVERMLDEHRFLAHIRSSKAPKEGTELFLGEDKLGENNGIQAVMTARHSTLFEMELEDKSTTLLTVLQQIGHMPLPPYIDRPDEEADQECYQTVYSKVPGAVAAPTAGLHFDDELLAKLRSKGVNFEFVTLHVGAGTFQPVRVENIEDHIMHAEYVELSQEVCNAIIATKKAGKRVIAVGTTSVRSIETAALSAEENGNPDLIEPYFSDTSIFIYPGKKFRVVDALITNFHLPESTLIMLVSAFAGFTRTMNAYKSAVENRYRFFSYGDAMFITKNPNVIGLE

SEQ ID NO: 71537 - protein, 363 aa, Rodentibacter heidelbergensis
  misc_feature (1)..(363): tr|A0A1V3IBA9|A0A1V3IBA9_9PAST S-adenosylmethionine:tRN A ribosyltransferase-isomerase OS=Rodentibacter heidelb ergensis OX=1908258 GN=queA PE=3 SV=1
MRVSDFHFDLPDELIARYPKEERSSCRLLTLNGENGAISHRTFTEVLELIEEGDLLIFNNTRVIPARMFGRKASGGKIEVLVERMLDEHRFLAHIRSSKSPKEGAELILGEDKLGENHGISTVMTARHGSLFEVELKDKTTTVLAVLQQIGHMPLPPYIDRPDEEADQECYQTVYSKVPGAVAAPTAGLHFDDELLAKLQAKGVNFEFVTLHVGAGTFQPVRVENIEDHIMHAEYVELSQEVCNAIIATKKAGKRVIAVGTTSVRSIETAALSAEENGNSDLIEPYFSDTSIFIYPGKIFRVVDALITNFHLPESTLIMLVSAFAGFRHTMNAYKSAVENRYRFFSYGDAMFITKNPKVKGLE

SEQ ID NO: 71538 - protein, 363 aa, Rodentibacter heylii
  misc_feature (1)..(363): tr|A0A1V3KM76|A0A1V3KM76_9PAST S-adenosylmethionine:tRN A ribosyltransferase-isomerase OS=Rodentibacter heylii OX=1906744 GN=queA PE=3 SV=1
MRVSDFHFDLPDELIARYPKKDRSSCRLLTLNGENGEISHRTFTDVFDLIDAGDLLIFNNTRVIPARMFGRKASGGKIEVLVERMLDEHRFLAHIRSSRSPKEGTELFLGEDKLGENKGIQAVMIARHDTLFEVELTDKSTALLTVLQQIGHMPLPPYIDRPDEEEDQECYQTVYNKVPGAVAAPTAGLHFDDELLAKLQAKGVNFEFVTLHVGAGTFQPVRVENIEDHIMHAEYVELSQEVCNAIIETKKAGKRVIAVGTTSVRSIETAALSAEENGNPDLIEPYFSDTSIFIYPGKKFRVVDVLITNFHLPESSLIMLVSAFAGFTHTMNAYKSAVENRYRFFSYGDAMFITKNTRVKGLE

SEQ ID NO: 71539 - protein, 363 aa, Rodentibacter heylii
  misc_feature (1)..(363): tr|A0A1V3KSK1|A0A1V3KSK1_9PAST S-adenosylmethionine:tRN A ribosyltransferase-isomerase OS=Rodentibacter heylii OX=1906744 GN=queA PE=3 SV=1
MRVSDFHFDLPDELIARYPKKDRSSCRLLTLNGENGEISHRIFTDVFDLIDAGDLLIFNNTRVIPARMFGRKASGGKIEVLVERMLDEHRFLAHIRSSKSPKEGTELFLGEDKLGENKGIQAVMTARHDTLFEVELTDKSTALLTVLQQIGHIPLPPYIDRPDEEEDQECYQTVYNKVPGAVAAPTAGLHFDDELLAKLQAKGVNFEFVTLHVGAGTFQPVRVENIEDHIMHAEYVELSQEVCNAIIETKKAGKRVIAVGTTSVRSIETAALSAEENGNPDLIEPYFSDTSIFIYPGKKFRVVDALITNFHLPESTLIMLVSAFAGFTHTMNAYKSAVENRYRFFSYGDAMFITKNTRVKGLE

SEQ ID NO: 71540 - protein, 366 aa, Rodentibacter mrazii
  misc_feature (1)..(366): tr|A0A1V3IGF2|A0A1V3IGF2_9PAST S-adenosylmethionine:tRN A ribosyltransferase-isomerase OS=Rodentibacter mrazii OX=1908257 GN=queA PE=3 SV=1
MRVSDFHFDLPDELIARYPKADRSSCRLLTLNGENGEISHRTFTEVLDLIDEGDLLIFNNTRVIPARMFGCKASGGKIEVLVERMLNEHRFLAHIRSSKAPKEGTELFLGEDKLGENNGIQAVMTARHSTLFEVELEDKSTTLLTVLQQIGHMPLPPYIDRPDEEADQECYQTVYSKVPGAVAAPTAGLHFDDELLAKLRSKGVNFEFVTLHVGAGTFQPVRVENIEDHIMHAEYVELSQEVCNAIIATKKAGKRVIAVGTTSVRSIETAALSAEENGNPDLIEPYFSDTSIFIYPGKKFRVVDALITNFHLPESTLIMLVSAFAGFTRTMNAYKSAVENRYRFFSYGDAMFITKNPNVIGLEQVV

SEQ ID NO: 71541 - protein, 363 aa, Rodentibacter myodis
  misc_feature (1)..(363): tr|A0A1V3JLI6|A0A1V3JLI6_9PAST S-adenosylmethionine:tRN A ribosyltransferase-isomerase OS=Rodentibacter myodis OX=1907939 GN=queA PE=3 SV=1
MRVSDFYFDLPDELIARYPKEDRTSCRLLQLNGENGEVFHRTFTDVLALINEGDLLIFNNTRVIPARMFGRKASGGKIEVLVERILDEHRFLAHIRSSKSPKEGAELFLGEDKLGENNGIKAVMMARHGALFEVALSDKSTALLTVLQEIGHMPLPPYIDRPDEEADQECYQTVYGTVPGAVAAPTAGLHFDDALLEKLRAKGVNFEFVTLHVGAGTFQPVRVENIEDHIMHAEYVELSQEVCNAIIDTKKAGKRVIAVGTTSVRSIETAALSAEENGNPDLIEPYFSDTAIFIYPGKKFRVVDALITNFHLPESTLIMLVSAFAGYQNTMNAYKSAVENRYRFFSYGDAMFITKNPQVKGLE

SEQ ID NO: 71542 - protein, 363 aa, Rodentibacter pneumotropicus
  misc_feature (1)..(363): tr|A0A4S2PKJ8|A0A4S2PKJ8_9PAST S-adenosylmethionine:tRN A ribosyltransferase-isomerase OS=Rodentibacter pneumot ropicus OX=758 GN=queA PE=3 SV=1
MLVSDFHFDLPDELIARYPKEDRSSCRLLTLNGENGEISHRTFTDVLDLIDEGDLLIFNNTRVIPARMFGRKASGGKIEVLVERMLDDHRFLAHIRSSKAPKEGAELFLGEDKLGENQGIQAVMTARHDTLFEVELKDKSTAFLTVLQQIGHMPLPPYIDRPDEEADQECYQTVYSKVPGAVAAPTAGLHFDDELLAKLRAKGVNFEFVTLHVGAGTFQPVRVENIEDHIMHAEYVELSQEVCNAIIETKKAGKRVIAVGTTSVRSIETAALSSEENSNPDLIEPYFSDTSIFIYPGKKFRVVDALITNFHLPESTLIMLVSAFAGFSRTMNAYKSAVENRYRFFSYGDAMFITKNPNVKGLE

SEQ ID NO: 71543 - protein, 363 aa, Rodentibacter pneumotropicus
  misc_feature (1)..(363): tr|A0A1V3K773|A0A1V3K773_9PAST S-adenosylmethionine:tRN A ribosyltransferase-isomerase OS=Rodentibacter pneumot ropicus OX=758 GN=queA PE=3 SV=1
MRVSDFHFDLPDELIARYPKEDRSSCRLLTLNGENGKISHRTFTDVLDLIDEGDLLIFNNTRVIPARMFGRKASGGKIEVLVERMLDDHRFLAHIRSSKAPKEGAELFLGEDKLGENQGIQAVMTARHDTLFEVELKDKSTALLTALQQIGHMPLPPYIDRPDEEADQECYQTVYSKVPGAVAAPTAGLHFDDALLAKLRAKGVNFEFVTLHVGAGTFQPVRVENIEDHIMHAEYVELSQEVCNAIIETKKAGKRVIAVGTTSVRSIETAALSSEENGNPDLIEPYFSDTSIFIYPGKKFRVVDALITNFHLPESTLIMLVSAFAGFSHTMNAYKSAVENRYRFFSYGDAMFITKNPNVKGLE

SEQ ID NO: 71544 - protein, 363 aa, Rodentibacter rarus
  misc_feature (1)..(363): tr|A0A1V3IRW3|A0A1V3IRW3_9PAST S-adenosylmethionine:tRN A ribosyltransferase-isomerase OS=Rodentibacter rarus O X=1908260 GN=queA PE=3 SV=1
MRVSDFHFDLPDELIARYPKEERSSCRLLTLNGENGAISHRTFTEVLDLIEEGDLLIFNNTRVIPARMFGRKASGGKIEVLVERMLDEYRFLAHIRSSKSPKEGAELILGEDKLGENHGISAVMTARHGSLFEVELKDKSTTLLAVLQQIGHMPLPPYIDRPDEDADQECYQTVYSKVPGAVAAPTAGLHFDDELLAKLRAKGVNFEFVTLHVGAGTFQPVRVENIEDHIMHAEYVELSQEVCNAIIATKKAGKRVIAVGTTSVRSIETAALSAEENGNSDLIEPYFSDTSIFIYPGKSFRVVDALITNFHLPESTLIMLVSAFAGFRHTMNAYKSAVENRYRFFSYGDAMFITKNPKVKGLE

SEQ ID NO: 71545 - protein, 363 aa, Rodentibacter ratti
  misc_feature (1)..(363): tr|A0A1V3L9B6|A0A1V3L9B6_9PAST S-adenosylmethionine:tRN A ribosyltransferase-isomerase OS=Rodentibacter ratti O X=1906745 GN=queA PE=3 SV=1
MRVSDFHFDLPDELIARYPKTDRSSCRLLTLTGENGEISHRTFTDILDLINEGDLLIFNNTRVIPARMFGRKASGGKIEVLVERMLDEHRFLAHIRSSKSPKEGAELFLGEDKLGENNGIPAMMTARHDTLFEVELKDKSTTLLTVLQQIGHMPLPPYIDRPDEEADQECYQTVYSKVPGAVAAPTAGLHFDDELLAKLRTKGVNFEFVTLHVGAGTFQPVRVENIEDHTMHAEYVELSQEVCNAIIATKKAGKRVIAVGTTSVRSIETAALSAEENGNPDLLEPYFSDTSIFIYPGKKFRVVDALITNFHLPESTLIMLVSAFAGFSHTMNAYKSAVENRYRFFSYGDAMFITKNPNVKGLA

SEQ ID NO: 71546 - protein, 363 aa, Rodentibacter ratti
  misc_feature (1)..(363): tr|A0A1V3L8H4|A0A1V3L8H4_9PAST S-adenosylmethionine:tRN A ribosyltransferase-isomerase OS=Rodentibacter ratti O X=1906745 GN=queA PE=3 SV=1
MRVSDFHFDLPDELIARYPKTDRSSCRLLTLTGENGEISHRTFTDILDLINEGDLLIFNNTRVIPARMFGRKASGGKIEVLVERMLDEHRFLAHIRSSKSPKEGTELFLGEDKLGENNGIPAVMTARHDTLFEVELKDKSTTLLTVLQQIGHMPLPPYIDRPDEEADQECYQTVYSKVPGAVAAPTAGLHFDDELLANLRAKGVNFEFVTLHVGAGTFQPVRVENIEDHTMHAEYVELSQEMCNAIIATKKAGKRVIAVGTTSVRSIETAALSAEENGNPDLLEPYFSDTSIFIYPGKKFRVVDALITNFHLPESTLIMLVSAFAGFSHTMNAYKSAVENRYRFFSYGDAMFITKNPNVKGLA

SEQ ID NO: 71547 - protein, 363 aa, Rodentibacter sp.
  misc_feature (1)..(363): tr|A0A1V3K2G5|A0A1V3K2G5_9PAST S-adenosylmethionine:tRN A ribosyltransferase-isomerase OS=Rodentibacter sp. Ppn 85 OX=1908525 GN=queA PE=3 SV=1
MRVSDFHFDLPDELIARYPKKDRSSCRLLTLNGENGEISHRTFTDVFDLIDAGDLLVFNNTRVISARMFGRKASGGKIEVLVERMLDEHRFLAHIRSSKSPKEGTELFLGEDKLGDNKGIQAVMTARHNTLFEVKLTDKSTTLLTVLQQIGHMPLPPYIDRPDEEADQECYQTVYSKVPGAVAAPTAGLHFDDELLAKLQAKGVNFEFVTLHVGAGTFQPVRVENIEDHIMHAEYVELSQEVCNAIIETKKAGKRVIAVGTTSVRSIETAALSAEENGNPDLIEPYFSDTSIFIYPGKKFRVVDALITNFHLPESTLIMLVSAFAGFTRTMNAYKSAVENRYRFFSYGDAMFITKNTNVKGLE

SEQ ID NO: 71548 - protein, 363 aa, Rodentibacter trehalosifermentans
  misc_feature (1)..(363): tr|A0A1V3IM74|A0A1V3IM74_9PAST S-adenosylmethionine:tRN A ribosyltransferase-isomerase OS=Rodentibacter trehalo sifermentans OX=1908263 GN=queA PE=3 SV=1
MRVSDFHFDLPNELIARYPKEDRTSCRLLTLNGENGEMAHRTFTDVLDLVETGDLLIFNNTRVIPARMFGRKASGGKIEVLLERMLDEHRFLAHIRSSKSPKEGAELFLGEDKLGENNGIQAVMIARHGALFEVALKDKSTTLLTVLQQIGHMPLPPYIDRPDEQADQECYQTVYSKVPGAVAAPTAGLHFDDALLAKLQAKGVNFEFVTLHVGAGTFQPVRVENIEEHIMHAEYVELSQEVCNAIIAAKKAGKRVIAVGTTSVRSIETAALSAEENGNSDLIEPYFSDTSIFIYPGKTFRVVDALITNFHLPESTLIMLVSAFAGFSHTMNAYKSAVENRYRFFSYGDAMFITKNPKVKGLE

SEQ ID NO: 71549 - protein, 341 aa, Romboutsia hominis
  misc_feature (1)..(341): tr|A0A2P2BUA2|A0A2P2BUA2_9FIRM S-adenosylmethionine:tRN A ribosyltransferase-isomerase OS=Romboutsia hominis OX =1507512 GN=queA PE=3 SV=1
MKTSDFYFDLPEELIAQVPIKDRSSSKLMVLDRESGEIEHKIFKDVINYLNPGDCLVLNNTRVIPARLIGEKLDTGGKIEFLLLKRTEEDTWQALVKPGKRAKVGAKFSFGNGKLIGEVVGLAEEGSRIIKFYYEGIFEEVLDELGNMPLPPYITERLEERERYQTVYSKHNGSAAAPTAGLHFTQELLSEIKAKGVDIAFVTLHVGLGTFRPVKVEDVLNHEMHSEFYMVDKEAADKINKAKANGKKVICVGTTSCRTVESASSEDGVVQESSGWTNIFIYPGYKFKVVDRLITNFHLPESTLIMLVSALCGKDKTLNAYNVAVEEKYRFFSFGDAMIIK

SEQ ID NO: 71550 - protein, 341 aa, Romboutsia ilealis
  misc_feature (1)..(341): tr|A0A1V1I3C1|A0A1V1I3C1_9FIRM S-adenosylmethionine:tRN A ribosyltransferase-isomerase OS=Romboutsia ilealis OX =1115758 GN=queA PE=3 SV=1
MKTSDFYFDLPEELIAQVPILDRSSSKLMVLDKETGEIEHKTFKNVIDYLNPGDCLVLNNTRVIPARLIGEKVDTGGKIEFLLLKRTEEDTWQALVKPGKRAKIGTKFSFGNGKLIGEVVGLAEEGSRIIKFHYEGIFEEVLDELGNMPLPPYITERLEERERYQTVYSKHNGSAAAPTAGLHFTEELLQQIKDKGVDIAFVTLHVGLGTFRPVKVDNVLEHEMHSEYYMVDKEAAQKINNAKKNGHNVVCVGTTSCRTVESATNEDGIIEETSGWTNIFIYPGYKFKMVDKLITNFHLPESTLIMLVSALSSKENVLNAYEAAVKERYRFFSFGDAMIVK

SEQ ID NO: 71551 - protein, 341 aa, Romboutsia lituseburensis
  misc_feature (1)..(341): tr|A0A1G9R9P7|A0A1G9R9P7_9FIRM S-adenosylmethionine:tRN A ribosyltransferase-isomerase OS=Romboutsia litusebure nsis DSM 797 OX=1121325 GN=queA PE=3 SV=1
MKTSDFYFDLPEELIAQVPIKDRSSSKLMVLDKKTGEIEHKIFKDVINYLNPGDCLVLNNTRVIPARLIGEKLDTGGKIEFLLLERTEEDTWQALVKPGKRAKIGTKFSFGNGKLIGEVVRLAEEGSRIIKFHYEGIFEEVLDELGNMPLPPYITERLEERERYQTVYSKHNGSAAAPTAGLHFTEELLNQIKEKGVDIAFVTLHVGLGTFRPVKVDDVLNHEMHSEYYVVDKEASEKINKAKANGNKVICVGTTSCRTVESASNEDGSINECSGWTNIFIYPGYKFKVVDKLITNFHLPESTLIMLVSALCSKESTLNAYDIAVQERYRFFSFGDAMIIK

SEQ ID NO: 71552 - protein, 341 aa, Romboutsia maritimum
  misc_feature (1)..(341): tr|A0A371IRE9|A0A371IRE9_9FIRM S-adenosylmethionine:tRN A ribosyltransferase-isomerase OS=Romboutsia maritimum OX=2020948 GN=queA PE=3 SV=1
MKTSDFYFDLPDELIAQVPIEDRSSSKLMVLDKNTGEIEHKIFKDVIEYLNPGDCLVLNNTRVIPARLIGEKVDTGGKIEFLLLKRTEEDTWQALVKPGKRAKVGTKFSFGEGKLIGEVVGLAEEGSRIIKFHYEGIFEQVLDELGNMPLPPYITARLEEKERYQTVYSKHNGSAAAPTAGLHFTEELLQKIKDKGVEIAFVTLHVGLGTFRPVKVDDVLNHEMHSEYYMVHKEAADKINTAKQNGNKVICVGTTSCRTVESACDEDGFVKETSGWTNIFIYPGYKFKVVDNLITNFHLPESTLIMLVSALVNKEAVLNAYDVAVKERYRFFSFGDAMIIK

SEQ ID NO: 71553 - protein, 341 aa, Romboutsia weinsteinii
  misc_feature (1)..(341): tr|A0A371J8V8|A0A371J8V8_9FIRM S-adenosylmethionine:tRN A ribosyltransferase-isomerase OS=Romboutsia weinsteini i OX=2020949 GN=queA PE=3 SV=1
MKTSDFYFNLPDELIAQVPIKDRSSSKLMVLDRETGEIEHKIFKDVVDYLNPGDCLVLNNTRVLPARLIGEKVDTGGKIEFLLLKRTEDDTWQALVKPGKRAKVGTKFSFGNGKLVGEVVGLAEEGSRIVKFHYEGIFEEVLDELGNMPLPPYITERLEEKERYQTVYSKHNGSAAAPTAGLHFTEDLLQTIKDKGVDIAFVTLHVGLGTFRPVKVDDVLNHEMHSEYYMVDEEAAQKINKAKANGKNVICVGTTSCRTVESASDENGVIKESSGWTNIFIYPGYKFKIVDRLITNFHLPESTLIMLVSALANKESVLNAYETAVENEYRFFSFGDAMIVK

SEQ ID NO: 71554 - protein, 348 aa, Roseateles aquatilis
  misc_feature (1)..(348): tr|A0A246ISL2|A0A246ISL2_9BURK S-adenosylmethionine:tRN A ribosyltransferase-isomerase OS=Roseateles aquatilis OX=431061 GN=queA PE=3 SV=1
MRMSRPYTVSDFDFALPPELIAQHPAAERSASRLLDGRAEPPVDRIFRELPDLLNPGDLLVFNNTKVIKARLYGAKSSGGAVEALVERVLPGTREVWAHMRASKSPKAGAVVRFAEAFDAEVLGRCGPDDGLFHLRLSGDPFELLERHGHVPLPPYIEHGDSADDVRRYQTVFAREPGAVAAPTAALHFDEALLARLAERGVGTAHVTLHVGAGTFQPVRVESLADHKMHSEWFQVAPETVDAIARCRAAGGKVTAVGTTTLRALESAALGGTLKAGARETDIFITPGFDFQVVDRLVTNFHLPKSTLMMLVSAFAGYEPVMALYRHAIAQRYRFFSYGDAMLLERRR

SEQ ID NO: 71555 - protein, 349 aa, Roseateles depolymerans
  misc_feature (1)..(349): tr|A0A0U3LIG8|A0A0U3LIG8_9BURK S-adenosylmethionine:tRN A ribosyltransferase-isomerase OS=Roseateles depolymera ns OX=76731 GN=queA PE=3 SV=1
MSRLFTVSDFDFALPEDLIAQHPAEQRSASRLLDGRTGTPVDRIFRDLPELLDPKDLLVFNNTRVIKARLYGAKASGGAVEALIERVLPGTHEVWAHMRASKSPKPGAVVRFAEAFDAEVLGRCGPDNGLFHLRLSGDPFELLEQHGHVPLPPYIAHDDSADDVRRYQTVFAREPGAVAAPTAALHFDEPLLERLAARGIQTAHVTLHVGAGTFQPVRVDNLADHKMHSEWFQVPEETVAAIERCRAEGGRVTAVGTTTLRALESAAVGGALRAGARETDIFITPGFDFQVVDRLITNFHLPKSTLMMLVSALAGYEHIMALYRHAIDQRYRFFSYGDAMLLDRRRADA

SEQ ID NO: 71556 - protein, 358 aa, Roseateles depolymerans
  misc_feature (1)..(358): tr|A0A2W5FQS9|A0A2W5FQS9_9BURK S-adenosylmethionine:tRN A ribosyltransferase-isomerase OS=Roseateles depolymera ns OX=76731 GN=queA PE=3 SV=1
MSRSFTVADFDFDLPPELIAQHPAAERSASRLLDGLGEGAVDRVFRELPALLQPGDLLVFNNTQVIKARLYGHKASGGGVEGLVERVLPAGNGGAAREVWMHLRASKSPKPGSRVRFADAFDAEVLGRCGPDNGLFHLRFDGDAFALLQRHGHVPLPPYIAHADDADDERRYQTVFAREPGAVAAPTAALHFDEGVLAALAARGVATAHVTLHVGAGTFQPVRVEQIADHKMHSEWCQVPAETAQRIAATRAAGGRIVAVGTTTLRTLESAALAAHQAGTGELLQVGARETDIFITPGFEFRVVDRLLTNFHLPKSTLMMLVSAFAGYEHVMALYRHAIAQRYRFFSYGDAMLLARRG

SEQ ID NO: 71557 - protein, 346 aa, Roseateles sp.
  misc_feature (1)..(346): tr|A0A1H7KC95|A0A1H7KC95_9BURK S-adenosylmethionine:tRN A ribosyltransferase-isomerase OS=Roseateles sp. YR242 OX=1855305 GN=queA PE=3 SV=1
MSRLFSVSDFDFALPDDLIAQHPAAERSASRLLDGRGDAPVDRVFRELPDLLDPKDLLVFNNTRVIKARLYGAKSSGGAVEALVERVLPGTREVWAHMRASKSPKPGAVVRFADAFDAEVLGRCGPDNGLFHLRLSGEPFELLERHGHVPLPPYIAHDDSADDVRRYQTVFAREPGAVAAPTAALHFDEALLERLAARGVQTAHVTLHVGAGTFQPVRVDTLAEHKMHSEWFQVPQETVDAIARCRAAGGRVTAVGTTTLRALESAARGGSLQAGARETDIFITPGFEFQVVDRLVTNFHLPKSTLMMLVSALAGYERIMVLYQHAIEQRYRFFSYGDAMLLDRRG

SEQ ID NO: 71558 - protein, 345 aa, Roseburia faecis
  misc_feature (1)..(345): tr|A0A173RKA9|A0A173RKA9_9FIRM S-adenosylmethionine:tRN A ribosyltransferase-isomerase OS=Roseburia faecis OX=3 01302 GN=queA PE=3 SV=1
MTEGMNVKDYDYDLPEELIAQDPLEDRSSSRLMVLDRQTGDVEHRHFTDILEYLHPGDCLVINNTKVIPARLFGVKEDTQAKIEVLLLKRKENDIWETLVKPGKKAKPGTKLVFGDGLLTAEVVDVVEEGNRLIQFHYDGIFEEILDQLGQMPLPPYITHQLKDKNRYQTVYAKYDGSAAAPTAGLHFTKELLQKVKDMGVDIAEVTLHVGLGTFRPVKVENVLDHHMHSEFYMVSQEAADKINRAKESGHRVIAVGTTSTRTLEAAADENGRLHETSGWTEIFIYPGYQFKVIDALITNFHLPQSTLVMLVSALAGRAHVLHAYEIAVKERYRFFSFGDAMLIK

SEQ ID NO: 71559 - protein, 345 aa, Roseburia faecis
  misc_feature (1)..(345): tr|A0A0M6WLE6|A0A0M6WLE6_9FIRM S-adenosylmethionine:tRN A ribosyltransferase-isomerase OS=Roseburia faecis OX=3 01302 GN=queA PE=3 SV=1
MTEGMNVKDYDYDLPEELIAQDPLEDRSSSRLMVLDRQTGDVEHRHFTDILEYLHPGDCLVINNTKVIPARLFGVKEDTQAKIEVLLLKRKENDIWETLVKPGKKAKPGTKLVFGDGLLTAEVVDVVEEGNRLIQFHYDGIFEEILDQLGQMPLPPYITHQLKDKNRYQTVYAKYDGSAAAPTAGLHFTKELLQKVKDMGVDIAEVTLHVGLGTFRPVKVENVLDHHMHSEFYMVSQEAADKINRAKESGHRVIAVGTTSTRTLEAAADENGRLHETSGWTEIFIYPGYQFKVIDALITNFHLPQSTLVMLVSALAGREHVLHAYEIAVKERYRFFSFGDAMLIK

SEQ ID NO: 71560 - protein, 343 aa, Roseburia hominis
  misc_feature (1)..(343): tr|G2T1M9|G2T1M9_ROSHA S-adenosylmethionine:tRNA ribosy ltransferase-isomerase OS=Roseburia hominis (strain DSM 16839 / NCIMB 14029 / A2-183) OX=585394 GN=queA PE=3 S V=1
MDVKDFYYDLPQELIAQDPLEDRSSSRLMVLDKATGEVEHRHFKDIVDYLRPGDCLVINNTKVIPARLYGVKEGTEAKIEILLLKRKENDVWETLVKPGKKCKIGTRINFGEGLLTGEVIDIVEEGNRLIQFHYEGIFEEILDQLGQMPLPPYITHQLKDKNRYQTVYAKYDGSAAAPTAGLHFTPELLEQVRAMGVEIAEVTLHVGLGTFRPVKESDVLKHHMHSEFYRIEQSEADKINRAKQEGHRVIAVGTTSTRTLEAAADEHGVLHETSGWTEIFIYPGYQFKVIDALITNFHLPESTLVMLVSALAGREHVLHAYEIAVQERYRFFSFGDAMFITAK

SEQ ID NO: 71561 - protein, 343 aa, Roseburia hominis
  misc_feature (1)..(343): tr|A0A395V9L0|A0A395V9L0_9FIRM S-adenosylmethionine:tRN A ribosyltransferase-isomerase OS=Roseburia hominis OX= 301301 GN=queA PE=3 SV=1
MDVKDFYYDLPQELIAQDPLEDRSSSRLMVLDKATGEVEHRHFKDIVDYLRPGDCLVINNTKVIPARLYGVKEGTEAKIEILLLKRKENDVWETLVKPGKKCRIGTRINFGEGLLTGEVIDIVEEGNRLIQFHYEGIFEEILDQLGQMPLPPYITHQLKDKNRYQTVYAKYDGSAAAPTAGLHFTPELLEQVRAMGVEIAEVTLHVGLGTFRPVKESDVLKHHMHSEFYRIEQSEADKINRAKQAGHRIIAVGTTSTRTLEAAADEHGVLHETSGWTEIFIYPGYQFKVIDALITNFHLPESTLVMLVSALAGREHVLHAYEIAVQERYRFFSFGDAMFITAK

SEQ ID NO: 71562 - protein, 345 aa, Roseburia intestinalis
  misc_feature (1)..(345): tr|D4KXN8|D4KXN8_9FIRM S-adenosylmethionine:tRNA ribosy ltransferase-isomerase OS=Roseburia intestinalis XB6B4 OX=718255 GN=queA PE=3 SV=1
MDVKDFYYDLPQELIAQDPLKDRSSSRLMVLDKNTGEVTHRVFKDITDYLRPGDCLVINNTKVIPARLYGVKEGTEAKIEILLLKRKENDIWETLVKPGKKCKVGTKISFGDGLLTGEVIDIVEEGNRLIQFHYDGIFEEILDQLGQMPLPPYITHQLQDKNRYQTVYAKYDGSAAAPTAGLHFTPELLKKVKEMGVEIAEVTLHVGLGTFRPVKETDVLKHHMHSEFYRIEQSEADKINHAKETGHRVIAVGTTSTRTLEAASDENGFLRETSGWTEIFIYPGYRFKVIDSLITNFHLPESTLVMLVSALAGREHVLNAYEIAVQEKYRFFSFGDAMLITDTTV

SEQ ID NO: 71563 - protein, 345 aa, Roseburia intestinalis
  misc_feature (1)..(345): tr|D4KQT3|D4KQT3_9FIRM S-adenosylmethionine:tRNA ribosy ltransferase-isomerase OS=Roseburia intestinalis M50/1 OX=657315 GN=queA PE=3 SV=1
MDVKDFYYDLPQELIAQDPLEDRSSSRLMVLDKNTGEVTHRVFKDITDYLRPGDCLVINNTKVIPARLYGVKEGTEAKIEILLLKRKENDIWETLVKPGKKCKVGTKISFGDGLLTGEVIDIVEEGNRLIQFHYDGIFEEILDQLGQMPLPPYITHQLQDKNRYQTVYAKYDGSAAAPTAGLHFTPELLKKVKEMGVEIAEVTLHVGLGTFRPVKETDVLKHHMHSEFYRIEQSEADKINHAKETGHRVIAVGTTSTRTLEAASDENGFLRETSGWTEIFIYPGYRFKVIDSLITNFHLPESTLVMLVSALAGREHVLNAYEIAVQEKYRFFSFGDAMLITDTTV

SEQ ID NO: 71564 - protein, 345 aa, Roseburia inulinivorans
  misc_feature (1)..(345): tr|A0A396AH72|A0A396AH72_9FIRM S-adenosylmethionine:tRN A ribosyltransferase-isomerase OS=Roseburia inulinivora ns OX=360807 GN=queA PE=3 SV=1
MDVKDFYYDLPQELIAQDPLEDRSSSRLMVLDKITGEVEHRHFKDIVEYLRPGDCLVINNTKVIPARLYGVKEGTEAKIEILLLKRKENDIWETLVKPGKKCKIGTKIVFGEGILTGEVVDIVEEGNRLIQFHYEGIFEEILDRLGQMPLPPYITHQLQDKNRYQTVYAKYDGSAAAPTAGLHFTPELLQQVRDMGVEIAEVTLHVGLGTFRPVKESDVLKHHMHSEFYKIEQSEADKINKAKKEGHRVIAVGTTSTRTLESAADENGFLTEKSGWTEIFIYPGYQFKVIDALITNFHLPESTLVMLVSALAGREHVLAAYETAVEEKYRFFSFGDAMFIVDRES

SEQ ID NO: 71565 - protein, 345 aa, Roseburia inulinivorans
  misc_feature (1)..(345): tr|A0A173R0D4|A0A173R0D4_9FIRM S-adenosylmethionine:tRN A ribosyltransferase-isomerase OS=Roseburia inulinivora ns OX=360807 GN=queA PE=3 SV=1
MDVKDFYYDLPQELIAQDPLEDRSSSRLMVLDKITGEVEHRHFKDIIEYLRPGDCLVINNTKVIPARLYGVKEGTEAKIEILLLKRKENDIWETLVKPGKKCKIGTKIVFGEGILTGEVVDIVEEGNRLIQFHYEGIFEEILDRLGQMPLPPYITHQLQDKNRYQTVYAKYDGSAAAPTAGLHFTPELLQQVRDMGVEIAEVTLHVGLGTFRPVKETDVLKHHMHSEFYKIEQSEADKINKAKKEGHRVIAVGTTSTRTLESAADENGFLTEKSGWTEIFIYPGYQFKVIDALITNFHLPESTLVMLVSALAGREHVLAAYETAVEEKYRFFSFGDAMFIVDRES

SEQ ID NO: 71566 - protein, 341 aa, Roseburia sp.
  misc_feature (1)..(341): tr|A0A1Q6TLI6|A0A1Q6TLI6_9FIRM S-adenosylmethionine:tRN A ribosyltransferase-isomerase OS=Roseburia sp. CAG:197 _41_10 OX=1897018 GN=queA PE=3 SV=1
MNVKDYDYDLPEELIAQDPLEDRSSSRLMVLDRQTGDVEHKHFTDILEYLHPGDCLVINNTKVIPARLFGVKEDTQAKIEVLLLKRKENDIWETLVKPGKKAKPGTKIIFGEGLLTGEVVDVVEEGNRLIQFHYEGIFEEILDQLGQMPLPPYITHQLKDKNRYQTVYAKYDGSAAAPTAGLHFTKELLEKVKEMGVDIAEVTLHVGLGTFRPVKVDNVLDHHMHSEFYMVSAEAAEKVNRTKANGGRVISVGTTSTRTLESAADENGILHETSGWTEIFIYPGYKFKVIDGLITNFHLPQSTLVMLVSALAGREHVLHAYEIAVKEKYRFFSFGDAMLIQ

SEQ ID NO: 71567 - protein, 223 aa, Roseburia sp.
  misc_feature (1)..(223): tr|R5TYD3|R5TYD3_9FIRM S-adenosylmethionine:tRNA ribosy ltransferase-isomerase OS=Roseburia sp. CAG:50 OX=12629 49 GN=BN683_01037 PE=3 SV=1
MIDIVEEGNRLIQFTYEGIFEEILDQLGQMPLPPYITHQLKDKNRYQTVYAKYDGSAAAPTAGLHFTPELLQQVKDMGVDIAEVTLHVGLGTFRPVKVDNILEHHMHSEFYMVTQEAADKINNAKKNGHRVICVGTTSCRTIESAADENGMLKESSGWTEIFIYPGYQFKVLDCLITNFHLPESTLLMLVSALAGREHVLAAYEEAVKEGYRFFSFGDAMFIQ

SEQ ID NO: 71568 - protein, 364 aa, Roseiarcus fermentans
  misc_feature (1)..(364): tr|A0A366F706|A0A366F706_9RHIZ S-adenosylmethionine:tRN A ribosyltransferase-isomerase OS=Roseiarcus fermentans OX=1473586 GN=queA PE=3 SV=1
MRVDAFDFDLPPDRIALEPASPRDSARMLVVASDGALADARVADLPGLLRPGDALVVNDTRVIAARLDGIRVRGEAVASIEATLIKRIDDCRWRALVRPAKKLRVGERVRFGEASESMACLLAALDAEVEDKGEAGEVTLRFDFSGAALDEAIDRLGSPPLPPYIAARRPPGDKDRADYQTMFAAREGAVAAPTAGLHFTPDLAARLAERGVTLHRVTLHVGAGTFLPVKADDTDDHVMHSEWGAIDAATADALNVARAAGGRIVAVGTTSARILESAADDAGGVRPFAGETAIFITPGYRFRAVDALMTNFHLPRSTLFMLVSAFSGLATVKAAYAHAIAAGYRFYSYGDACLLIGRRDRDAA

SEQ ID NO: 71569 - protein, 356 aa, Roseibaca calidilacus
  misc_feature (1)..(356): tr|A0A0P7WCQ4|A0A0P7WCQ4_9RHOB S-adenosylmethionine:tRN A ribosyltransferase-isomerase OS=Roseibaca calidilacus OX=1666912 GN=queA PE=3 SV=1
MKLSDFDFDLPEALIATRPARPRSSAKLLVAQGDTITDRHVRDLPEVLRAGDLLVLNTTKVIPARLSGHRHRDSAQGPVVARVEVTLTEPQPDGSWRALAKPLRKLAEGEDIVFAAGLVARVAERGAEDVRLAFNLDGPAFDAALEQAGQMPLPPYIEARRKADEQDRTDYQTVFARDAGAVAAPTASLHFDEDLLAQLRAKGVEFAEVTLHVGAGTFLPVKTDDVSNHKMHAEWGHVSETAAAQITRARAEGRRVIPVGTTALRVIETAATGPGQIAPYTGMTDIFITPGFRFQIASGLMTNFHLPKSTLMMLVAGLMGRARIMAIYAHAIAQDYRFFSYGDSSLLLPDDLSGNP

SEQ ID NO: 71570 - protein, 356 aa, Roseibaca ekhonensis
  misc_feature (1)..(356): tr|A0A3B0MEQ5|A0A3B0MEQ5_9RHOB S-adenosylmethionine:tRN A ribosyltransferase-isomerase OS=Roseibaca ekhonensis OX=254356 GN=queA PE=3 SV=1
MKLSDFDFELPEALIATRPARPRSAARLLVAQGDAMADRHVRDLPDMLRAGDLLVLNTTKVIPARLSGRRHRDSAQGPVVAKVEITLTEPQPDGTWRALAKPLRKLADGEEVVFAAGLAAKVVERGAEDVRLRFNLDGPEFDAALDQAGQMPLPPYIESRRRADAQDRDDYQTVFARDAGAVAAPTASLHFDDDLLAALRARGVEFAEVTLHVGAGTFLPVKTDDVSAHKMHAEWGQVTQTAASQIARARAEGRRVIPVGTTALRVLETAATGPGQIAPWAGMTDIFITPGFEFQIATGLMTNFHLPKSTLMMLVAAKMGQDRIKRIYAHAIAQGYRFFSYGDSSLLLPEEVSQTA

SEQ ID NO: 71571 - protein, 323 aa, Roseibacillus sp.
  misc_feature (1)..(323): tr|A0A1Z8P5N0|A0A1Z8P5N0_9BACT S-adenosylmethionine:tRN A ribosyltransferase-isomerase OS=Roseibacillus sp. TME D18 OX=1986590 GN=queA PE=3 SV=1
MRTEAFDYDLPSELIASHPLAERSASRMMVINREEGTITHHRFCDLPTFVRENDLFVFNDTRVVPARFFSNDRRVELLRVDCADPLHWRCLVRPGKRMKVGRTVEVGPSTGTVTGIDELGYRLITWDHPVDEAIHGELALPPYMERGEEPSDNERYQTVYARQDGAVAAPTAGLHFTPELIASLPHAFLTLHVGPGTFRPVQVDDPAEHRMHEEAYELGPNPAERITRAGRVISVGTTVTRVLEHLGQNGSVTAGQGRTDIFIYPPYSFRIVDALLTNFHLPKSTLLMLVSAFANRELILEAYEEAVRERYRFFSYGDCMLIL

SEQ ID NO: 71572 - protein, 323 aa, Roseibacillus sp.
  misc_feature (1)..(323): tr|A0A2E7YRN0|A0A2E7YRN0_9BACT S-adenosylmethionine:tRN A ribosyltransferase-isomerase OS=Roseibacillus sp. OX= 2024856 GN=queA PE=3 SV=1
MRTDDFDYDLPPELIATHPLAERTASRMMVIDRERDTIEHHLFAGLPAFLRENDLLVFNDTRVIPARFFSNDKRIELLRVDHSDPLHWRCLVRPGKRMKIGRTVEVGASTGTVTAIDELGYRLITWDHPVDENTHGELALPPYMQRGEEECDAERYQTVYARQDGAVAAPTAGLHFTPELIDALPHAFLTLHVGPGTFRPVQVDDPAEHRMHDEAYELGADSAERITRAGRVISVGTTVTRVLEHLGRNGPVPAGQGRTDIFIYPPYEFQVVDALLTNFHLPKSTLLMLVSAFANRELILEAYEQAVRERYRFYSYGDCMLIL

SEQ ID NO: 71573 - protein, 351 aa, Roseibacterium elongatum
  misc_feature (1)..(351): tr|W8S428|W8S428_9RHOB S-adenosylmethionine:tRNA ribosy ltransferase-isomerase OS=Roseibacterium elongatum DSM 19469 OX=1294273 GN=queA PE=3 SV=1
MKLDDFDFDLPDERIATRPARPRSSARLLVADGPDTRDCHVYDLPDLLQPGDRLVLNDTRVIPARLTGHRHRDSAQGPVAAKIEVTLMEPQADGSWSALAKPLRKLAVGETVVFSDALSADVVSLEHGLRLRFNLSGADFDAALNASGAMPLPPYIAGKRAPDERDREDYQTIWAKRAGAVAAPTASLHFDEELVAALTARGIAFTFVTLHVGAGTFLPVTVEDVTTHKMHAEWGEVREKAAEEINATRAAGGRIIPVGTTALRLIETAAAEDGTMRPFEGDTDIFIYPGYTWRVTDALMTNFHLPKSTLMMLVSALMGQARIKAIYDHALANGYRFFSYGDASLLIPSRI

SEQ ID NO: 71574 - protein, 364 aa, Roseibium hamelinense
  misc_feature (1)..(364): tr|A0A562THI7|A0A562THI7_9RHOB S-adenosylmethionine:tRN A ribosyltransferase-isomerase OS=Roseibium hamelinense OX=150831 GN=queA PE=3 SV=1
MRVDLFDFDLPNERIALRPARPRDSARMLVVRPEGSLAGAPDLQDRGVRDLPNLLEPGDALVFNDTKVIPAQLEGTRTRGDAVANISATLHLRASGDTWWAFVRPAKKLQTGDKVVFKGAEGAELAANVLEKGDAGDVLLRFDEKGPVLDAAIAAVGHIPLPPYIAQKRGEDAQDREDYQTVYAEKDGAVAAPTAGLHFTPELLDALDQRGIERHIVTLHVGAGTFLPVKSDETEDHKMHAEWGEVTAETATALKAVQARGNKVVAVGTTSLRILESAAQGDTGLEPFRGETSIFITPGYRFRAIDGLMTNFHLPRSTLFMLVSAFSGLETMQRAYAHAIETDYRFYSYGDSSLLFPAETAARG

SEQ ID NO: 71575 - protein, 357 aa, Roseibium sp.
  misc_feature (1)..(357): tr|E2CRA0|E2CRA0_9RHOB S-adenosylmethionine:tRNA ribosy ltransferase-isomerase OS=Roseibium sp. TrichSKD4 OX=74 4980 GN=queA PE=3 SV=1
MRVEDFDFVLPNERIALRPARPRDSARMLVVQPGDTAELSDFGVRDLPLLLEPGDALVFNDTKVIPAQLEGKRVRGDIEARISATLHLRAAADRWKAFVRPGKKVQLGDVLVFEEGGVTLTARAEEKSPAGDVLLVFDRSAAELDEAIASVGHIPLPPYIAQKRGEDEQDRSDYQTMFAEKDGAVAAPTAGLHFTPDLLAALDARGIEQHRVTLHVGAGTFLPVKVDDTDDHQMHAEWGEVSEETAAALQAVKARGNKVVSVGTTSLRILESAAQGSGGLQAFAGETSIFITPGYEFRAIDALMTNFHLPRSTLFMLVSALSGLDVMKRAYTHAIDHEYRFYSYGDASLLFPQKPTV

SEQ ID NO: 71576 - protein, 356 aa, Roseicitreum antarcticum
  misc_feature (1)..(356): tr|A0A1H2ZXH1|A0A1H2ZXH1_9RHOB S-adenosylmethionine:tRN A ribosyltransferase-isomerase OS=Roseicitreum antarcti cum OX=564137 GN=queA PE=3 SV=1
MQLSDFDFDLPEGLIATRPVRPRPAARMLVASGTAISDAHVRDLSLWLRPGDRMVLNNTRVIPARLTGRRWRDSAQGRVSAKIEVTLMEPLPDGDWRAMVKPLRKLAVGEDVVFSETLHAHVTAKGAEDATLRFNLTGDAFDAALSQVGAMPLPPYIAGRRAADAQDDDDYQTVFARERGAVAAPTASLHFDLDLLQALRDHGVDFTEVTLHVGAGTFLPVKVDDISTHKMHAEWGQITPQAAAEINATRAAGGRIIAVGTTALRLIESAAAPDGTLREWTGKTDIFITPGYRFRVTDGLMTNFHLPKSTLMMLVAALMGQSAIQNIYSHAVGQGYRFFSYGDASLLIPEGKEGCT

SEQ ID NO: 71577 - protein, 351 aa, Roseicyclus mahoneyensis
  misc_feature (1)..(351): tr|A0A316GQE5|A0A316GQE5_9RHOB S-adenosylmethionine:tRN A ribosyltransferase-isomerase OS=Roseicyclus mahoneyen sis OX=164332 GN=queA PE=3 SV=1
MKLEDFDFDLPEALIATRPARPRSSARLLHAEAGATGDRHVFDLPKILRPGDRLVLNDTRVIPARLTGQRTRQSAQGTVTARIEVTLMEPQADGTWSALAKPLRKIKIGESIFFSNDLLAEVQALDEGLRLRFNLAGSDFDAALDAAGAMPLPPYIAGKRAPDARDREDYQTVWAKRAGAVAAPTASLHFDEPLIAALTHRGVDFTFVTLHVGAGTFLPVTVEDVTTHKMHAEWGEVRAAAAAEINATRAGGGRIIPVGTTALRLIESATAADGTVHPFEGDTDIFIYPGYRFRVTDGLMTNFHLPKSTLMMLVSALMGEARVRQVYAHAIAEGYRFFSYGDASLLIPSHP

SEQ ID NO: 71578 - protein, 377 aa, Roseimaritima ulvae
  misc_feature (1)..(377): tr|A0A5B9QSV3|A0A5B9QSV3_9PLAN S-adenosylmethionine:tRN A ribosyltransferase-isomerase OS=Roseimaritima ulvae O X=980254 GN=queA PE=3 SV=1
MKHDSRPSPLAPGRQLAASSVSFAMMNEHNIASYDYDLPRERIAQEPVAVRSDARLMVLDRYSGTIQHRYIRDLPELLHADDTLILNNSRVVPARLLGYRTRTRGRWQGLYLRSDANTGVWEVLSKTRGRLEIGETITLQDRNTRDGVLLEVMARTDNGNLLVKPQADAAAGELLRQFGWIPLPPYIRDGRMVDADVQSYQTVYAAHDGSVAAPTAGLHFTKPLLKQLTEKGLHLAEVTLHVGIGTFRPIAVEDLNQHVMHTEWGSIDAAAAQTLNDTVSRGGRRIAVGTTSVRTVESAAQDDGTLQAWTGMCDLFIQPGYRFKAIDGLLTNFHLPRSSLLVLVSAFAGRERIMQAYDEAIQNEYRFFSYGDAMLII

SEQ ID NO: 71579 - protein, 324 aa, Roseimicrobium gellanilyticum
  misc_feature (1)..(324): tr|A0A366HLR2|A0A366HLR2_9BACT S-adenosylmethionine:tRN A ribosyltransferase-isomerase OS=Roseimicrobium gellan ilyticum OX=748857 GN=queA PE=3 SV=1
MLTSDFDYHLPEELIASEPLADRAASRMMVVHREEGRIEHRSFRDLPEYLHEGDLVVLNDTRVVPARYFSNDGSKELLRLQAFSPTKWRCMVKPGRKLRLGNAITIGEATGTVLEIYENGDRLIEFDRVVDEKSHGHLALPPYMHRQDREDDKERYQTVFAREEGSIAAPTAGLHFTPDVLSKLPHAFVTLHVGVGTFQPVKVDRVQDHVMHSERYSLSEETVAKIADAKRVLAVGTTATRVLESTAAKHGKVVAESGETNIFIHPPYQFRVVGALLTNFHLPKSTLMMLVSAFAGRELMLRAYEEAIREQYRFYSYGDCMLIV

SEQ ID NO: 71580 - protein, 349 aa, Roseinatronobacter monicus
  misc_feature (1)..(349): tr|A0A543K9I6|A0A543K9I6_9RHOB S-adenosylmethionine:tRN A ribosyltransferase-isomerase OS=Roseinatronobacter mo nicus OX=393481 GN=queA PE=3 SV=1
MKLSDFDFDLPEDLIATRPVRPRQAARMLLARGDMIEDRHVADLPEILRPGDLLVINTTKVIPARLTGQRHRDSAQGPVSARIEITLIEPQPDGSWRALAKPLRKLALGEEIVFSDTLRAEVVARNPEDVVLRFNLEGDAFDAALDSAGQMPLPPYIAGRRAADAQDRDDYQTVFARIPGAVAAPTASLHFDAGLMAHLRNMGVGFCEVTLHVGAGTFLPVKVDDVRDHKMHAEWGQVTDKAADQIMAARKAGGRIIPVGTTALRLIETAATGPGQIGAWAGKTDIFITPGFSFQLADGLMTNFHLPKSTLMMLVSALMGRDRVMAIYAHAIAERYRFFSYGDSSLLLP

SEQ ID NO: 71581 - protein, 349 aa, Roseinatronobacter thiooxidans
  misc_feature (1)..(349): tr|A0A2W7QI65|A0A2W7QI65_9RHOB S-adenosylmethionine:tRN A ribosyltransferase-isomerase OS=Roseinatronobacter th iooxidans OX=121821 GN=queA PE=3 SV=1
MKLSDFDFDLPEDLIATRPVRPRRAARLLLAQGKTIADRQVADLPDILRAGDLLVINTTKVLPARLTGQRHRDSAQGPVSAKIEITLIEPQPDGSWRALAKPLRKLAQGEEIFFTDALRAVVVARHAEDVILRFNLEGDDFDTALDAAGQMPLPPYIAGRRAADAQDREDYQTVFARNAGAVAAPTASLHFDTALMAQLRDMGVAFCEVTLHVGAGTFLPVKVDDVRDHKMHAEWGQVTEQAAAQIMAARKAGGRIIPVGTTALRLIETAATGAGQIGPWTGKTDIFITPGFSFQLADGLMTNFHLPKSTLMMLVSALMGREQVMEIYAHAIAARYRFFSYGDSSLLIP

SEQ ID NO: 71582 - protein, 351 aa, Roseisalinus antarcticus
  misc_feature (1)..(351): tr|A0A1Y5RJC4|A0A1Y5RJC4_9RHOB S-adenosylmethionine:tRN A ribosyltransferase-isomerase OS=Roseisalinus antarcti cus OX=254357 GN=queA PE=3 SV=1
MKLSDFDFDLPEKLIATRPARPRSSARLLLAEGDGIADRLVTDLVDILRPGDRLVLNDTRVIPARLSGRRFRDGAEGRTAARIEVTLLEPRTGGRWSALIKPLKKLRTGEQIVFSDELSARLEAREEGQGILGFNLQGEDFDAALAEAGAMPLPPYIAGKRPADDEDKRDYQTIWAERPGAVAAPTASLHFDAPLLEALRGRGVRFSHVTLHVGAGTFLPVKVDDIRDHRMHAEWGEVTATAAAEIAATQAAGGRVIPVGTTALRLIETAAAATGAIAPWTGDTDIFITPGFTFRVAAGLMTNFHLPKSTLMMLVSALLGPERIRAIYAHAIAREYRFFSYGDSSLLLPGA

SEQ ID NO: 71583 - protein, 359 aa, Roseitalea porphyridii
  misc_feature (1)..(359): tr|A0A4P6V0R0|A0A4P6V0R0_9RHIZ S-adenosylmethionine:tRN A ribosyltransferase-isomerase OS=Roseitalea porphyridi i OX=1852022 GN=queA PE=3 SV=1
MRVDEFDFELPEDRIALRPASPRDAARMLVVRGDTLTDAGVMDLPSFLSAGDLMVFNDTRVIPAQLEGTRERDGQIATIGTTLHMRTAPNRWMAFARGAKKLKPGDRVRFGETGDACLLGTLDASVIAKGEGGEVELAFDLAGPDLDAAIALAGHIPLPPYIASKRADDERDRADYQTVYAREDGAVAAPTAGLHFTDRLFDKLDAAGINRAFVTLHVGAGTFLPVKADNTEDHRMHAEIGHVSEATAALINQTRARGGSIVSVGTTSLRLLESAADEAGTIQPFAGATDIFITPGYRFRCVDVLMTNFHLPRSTLMMLVSAFAGLGTMRRAYAHAIDAGYRFYSYGDSSLLFRNDPDG

SEQ ID NO: 71584 - protein, 348 aa, Roseivirga echinicomitans
  misc_feature (1)..(348): tr|A0A150XDF8|A0A150XDF8_9BACT S-adenosylmethionine:tRN A ribosyltransferase-isomerase OS=Roseivirga echinicomi tans OX=296218 GN=queA PE=3 SV=1
MKLSAFKFELSEDKIAKYPTENRDESKLMVLHRDTGEIEHKMFKDIVDYFEEGDVLVNNDTKVFPARLYGQKEKTGAKIEVFLLRELNPEMHLWDVLVDPARKIRVGNKLYFGEGELVAEVIDNTTSRGRTIRFLFDGTDEEFYKTIDTLGETPLPRTITRETEPEDRERFQTIYAKNIGAVAAPVAGLHFTKQVMKRMEIKGIDIVSVTLHIGLGTFRQVDVEDLTKHKMDSENYAIIQSTADAVNKALDNKKRVCSVGTTSMRALESSVSAGGRLKANEAWTDKFIFPEYEFKICNALITNFHLPESTLLMQAAAFAGYDKIMNAYKVAQKEGYRFFSYGDAMLII

SEQ ID NO: 71585 - protein, 403 aa, Roseivirga echinicomitans
  misc_feature (1)..(403): tr|A0A150X3A0|A0A150X3A0_9BACT S-adenosylmethionine:tRN A ribosyltransferase-isomerase OS=Roseivirga echinicomi tans OX=296218 GN=queA PE=3 SV=1
MMNTEKEINLSDYTYSLPDERIAKYPLDKRDLSKLLHYHKGVIEHKKFKEIEELIPDHSTLFFNNTKVIPARLIFHKSTGAQIEIFLLKPISPSPILSVVMEERETVIWECMIGNFKKWKDDIPLMRDLILGDKNIILQASIHDREKRQIKFSWNDDSISFSEIVEASGKVPLPPYLNRQPEEDDKPRYQTVYSAHDGAVAAPTAGLHFTPEILKSLADRGIKESFLTLHVSAGTFQPIKTENILEHPMHSEQMVVDRQSIQSVVEAQNSIIAIGTTSMRTLESLYWFGVRLMHGDEGFAIEKLEPYQSQQKAARSEAFSAILEWMDRNNLNQIIGTTEIFIFPGYQFRVCDGLITNFHQPGSTLILLVAAFIGEDWRKVYHEADINGYRFLSYGDSSFLLPK

SEQ ID NO: 71586 - protein, 348 aa, Roseivirga ehrenbergii
  misc_feature (1)..(348): tr|A0A150XTN3|A0A150XTN3_9BACT S-adenosylmethionine:tRN A ribosyltransferase-isomerase OS=Roseivirga ehrenbergi i OX=279360 GN=queA PE=3 SV=1
MKLSAFKFELSEDKIAKYPTENRDESKLMVLHRDTGEIEHKMFKDIVDYFDEGDVLVNNDTKVFPARLYGQKEKTGAKIEVFLLRELNQEMHLWDVLVDPARKIRVGNKLYFGEGELVAEVIDNTTSRGRTIRFLFDGTDEEFYKTIDTLGETPLPRTIPRETEPEDRERFQTIYAKNIGAVAAPVAGLHFTKQVMKRLEIKGVDIASITLHIGLGTFRQVDVEDLTKHKMDSENYAILQSTADAVNKALDNKKRVCSVGTTSMRALESSVSAGGRLKANEAWTDKFIFPEYEFKICNALITNFHLPESTLLMQAAAFGGYEKTMNAYKVAQKEGYRFFSYGDAMLII

SEQ ID NO: 71587 - protein, 403 aa, Roseivirga ehrenbergii
  misc_feature (1)..(403): tr|A0A150X028|A0A150X028_9BACT S-adenosylmethionine:tRN A ribosyltransferase-isomerase OS=Roseivirga ehrenbergi i OX=279360 GN=queA PE=3 SV=1
MMNTEKEINLSDYTYSLPDERIAKYPLAKRDQSKLLHYHNGSIEHKSFKEIEELIPDQSTLFFNNTKVIPARLIFHKSTGAQIEIFLLKPISPSPILSIVMEERETVIWECMIGNVKKWKEDIPLVRELIIDDNKITLQASIHDREKRQIQFSWNDDSISFSEIVEASGKVPLPPYLNRQPEEDDKPRYQTVYSAHDGAVAAPTAGLHFTPEILKSLANRGIKESFLTLHVSAGTFQPIKTENILEHPMHSEQMVVNRQSIQSVVEAEGKIIAIGTTSMRTLESLYWFGVRLINGNEDFSIQKLEPYQSKHEASRSEAFSAILKWMDKNELSQVIGTTEIFIFPGYQFRVCDGLITNFHQPGSTLILLVAAFIGEDWRKVYQEADNNGYRFLSYGDSSFLLPK

SEQ ID NO: 71588 - protein, 348 aa, Roseivirga seohaensis
  misc_feature (1)..(348): tr|A0A150Y1B6|A0A150Y1B6_9BACT S-adenosylmethionine:tRN A ribosyltransferase-isomerase OS=Roseivirga seohaensis OX=1914963 GN=queA PE=3 SV=1
MKLSAFKFDLSEDKIAKYPTENRDESKLMVLHRDTGEIEHKMFKDIVDYFDEGDVLVNNDTKVFPARLYGQKEKTGAKIEVFLLRELNQEMHLWDVLVDPARKIRVGNKLYFGEGELVAEVIDNTTSRGRTIRFLFDGTDEEFYKTIDTLGETPLPRTIPRETEPEDRERFQTIYAKNIGAVAAPVAGLHFTKQVMKRLEIKGVDIASITLHIGLGTFRQVDVEDLTKHKMDSENYTILQSTADAVNKALDNKKRVCSVGTTSMRALESSVSAGGRLKANEAWTDKFIFPEYEFKICNALITNFHLPESTLLMQAAAFGGYEKTMNAYKVAQKEGYRFFSYGDAMLII

SEQ ID NO: 71589 - protein, 403 aa, Roseivirga seohaensis
  misc_feature (1)..(403): tr|A0A150XQ83|A0A150XQ83_9BACT S-adenosylmethionine:tRN A ribosyltransferase-isomerase OS=Roseivirga seohaensis OX=1914963 GN=queA PE=3 SV=1
MMKPEKEINLSNYTYSLPDERIAKYPLAKRDQSKLLHYHNGLIEHKSFKDIEALIPDQSTLFFNNTKVIPARLIFHKSTGAQIEIFLLKPISPSPILSVVMEERETVIWECMIGNVKKWKDDIPLVRQLTIGEKNITLSASIHDRESRQIQFSWSDDSISFSEIVEASGKVPLPPYLNRQPEEDDKPRYQTVYSAHDGAVAAPTAGLHFTPEILKSLADRGIKESFLTLHVSAGTFQPIKTENILEHPMHSEQMVVDRQSIQSVVEAEGKIIAIGTTSMRTLESLYWFGVRLMNGNENFAIEKLEPYQSPQKASRLEAFSAILKWMDKNELSQVIGTTEIFIFPGYQFRVCDGLITNFHQPGSTLILLVAAFIGEDWRKVYQEADTNGYRFLSYGDSSFLLPK

SEQ ID NO: 71590 - protein, 348 aa, Roseivirga sp.
  misc_feature (1)..(348): tr|A0A316KBW1|A0A316KBW1_9BACT S-adenosylmethionine:tRN A ribosyltransferase-isomerase OS=Roseivirga sp. XM-24b in3 OX=2133949 GN=queA PE=3 SV=1
MKLSAFKFELPQDRIAKYPAENRDESRMLVLHRDTGEIEHKVFKDIVDYFDEGDVMVNNDTKVFPARLYGQKEKTGAQIEVFLLRELNQEMHLWDVLVDPARKIRVGNKLYFGEGELVAEVIDNTTSRGRTIRFLFDGTDEEFYKTIDTLGETPLPRTIPRDTEPEDRERFQTIYAKHVGAVAAPVAGLHFTMQVLKRLEIKGIDVTPITLHIGLGTFRPVDVEDLTKHKMDSENYSIGEPTAQLVNRALDEKKRVVSIGTTSMRALESSVSAGGRLKANSAWTDKFIFPPYEFKICNALVTNFHLPESTLLMQAAAFGGYENVMKAYKEAIKEKYRFFSYGDAMLII

SEQ ID NO: 71591 - protein, 401 aa, Roseivirga sp.
  misc_feature (1)..(401): tr|A0A316KF77|A0A316KF77_9BACT S-adenosylmethionine:tRN A ribosyltransferase-isomerase OS=Roseivirga sp. XM-24b in3 OX=2133949 GN=queA PE=3 SV=1
MAIPPAPDLKAINYSLPDEKIAKYPLAQRDQSKLLTYSGGNISDTQFKNLSEILDANTSLFFNNTKVIPARLFFQKETGAQIEIFLLNPVSPTHIISLMMEETGAVVWECMVGNFKKWKDDTILARKFEHNGSSVELRAKIVDREQKQIEFSWSDKSHSFAEIVELSGKVPLPPYLNRTDEPEDKERYQTVYSKQEGAVAAPTAGLHFTDQVLSDLEQKGVSLNYLTLHVSAGTFQPIKASDAREHNMHSEQVEVNRSTVELLSKTERVVAVGTTSMRTLESLYWFGVRLMNGNEDFSIQKLEPYETEENLPSRKEVFVFMLNWMDENNTSIVTGKTEIFIMPGYQFRVCNGLITNFHQPGSTLMLLVWAFIGENWKRVYKHALSNDYRFLSYGDSSILLP

SEQ ID NO: 71592 - protein, 401 aa, Roseivirga spongicola
  misc_feature (1)..(401): tr|A0A150X5X1|A0A150X5X1_9BACT S-adenosylmethionine:tRN A ribosyltransferase-isomerase OS=Roseivirga spongicola OX=333140 GN=queA PE=3 SV=1
MAIPPAPDLKAINYSLPDEKIAKYPLAQRDQSKLLTYSGGNISDTEFKNLPEILDANTSLFFNNTKVIPARLFFQKETGAQIEIFLLNPVSPTHIISLMMEETGAVVWECMVGNFKKWKDDTILARKFENNGSSVEIRAKIVDREQKQIEFSWSDKSLSFAEIVELSGKVPLPPYLNRTDEPEDKERYQTVYSKQEGAVAAPTAGLHFTDQVLSDLEQKGVNLNYLTLHVSAGTFQPIKASDAREHNMHSEQVEVNRSTVELLSKTERVVAVGTTSMRTLESLYWFGVRLMNGNEDFSIQKLEPYETEENLPSRKEVFAFMLNWMDENNTSILTGKTEIFIMPGYQFRVCNGLITNFHQPGSTLMLLVWAFIGENWKKVYKHALSNDYRFLSYGDSSILLP

SEQ ID NO: 71593 - protein, 348 aa, Roseivirga spongicola; identical to SEQ ID NO: 71590
  misc_feature (1)..(348): tr|A0A150XBP6|A0A150XBP6_9BACT S-adenosylmethionine:tRN A ribosyltransferase-isomerase OS=Roseivirga spongicola OX=333140 GN=queA PE=3 SV=1

SEQ ID NO: 71594 - protein, 350 aa, Roseivivax halodurans
  misc_feature (1)..(350): tr|X7EMY3|X7EMY3_9RHOB S-adenosylmethionine:tRNA ribosy ltransferase-isomerase OS=Roseivivax halodurans JCM 102 72 OX=1449350 GN=queA PE=3 SV=1
MRLDDFDFDLPEELIATRPARPRSSARLLVAEGDRITDAVVSDLGQWLRPGDRLVLNDTRVIPARLSGARTRLSAEGEVQARIEVTLLEPGADGTWTALVKPLKKVREGETIRFSDALSAELVAKDEGQGRLRFNLAGEDFDAALAEAGAMPLPPYIAGRRPADDRDREDYQTIWAEKPGAVAAPTASLHFDDALLGDLAKRGIAFSHVTLHVGAGTFLPVKVEDVTTHRMHAEWGEVSDAAAAEIAETRAKGGRIIPVGTTALRLLETAARETGEVRAWQGETDIFIYPGFRFHAADALMTNFHLPKSTLLMLVSALMGRERMLAIYAHAVSERYRFFSYGDASLLIPG

SEQ ID NO: 71595 - protein, 363 aa, Roseivivax halotolerans
  misc_feature (1)..(363): tr|A0A1I5X025|A0A1I5X025_9RHOB S-adenosylmethionine:tRN A ribosyltransferase-isomerase OS=Roseivivax halotolera ns OX=93684 GN=queA PE=3 SV=1
MKLSDFDFDLPEDRIATRPARPRSSAKLLVAEGDRISDSVVSDLPDWLRPGDRLVLNDTKVIPARLSGERRRMGAEGESSARIEATLLEPQADGTWSALVKPLKKLREGETVVFSSDLSAVLEAKADGQGRLRFNLAGEAFDAALSEAGAMPLPPYIAARRPADARDKNDYQTVWAARSGAVAAPTASLHFDAPLLEALMARGVTFTHVTLHVGAGTFLPVKVEDVTTHRMHAEWGEVSAEAAAEIAATKASGGRVIPVGTTALRLIETAAQSGVIAPFEGDTDIFIYPGFEFRVTDALMTNFHLPKSTLMMLVAALMGRERILRIYDHAIAEGYRFFSYGDASLLIPDMQGRNATTDGRLSR

SEQ ID NO: 71596 - protein, 349 aa, Roseivivax isoporae
  misc_feature (1)..(349): tr|X7F875|X7F875_9RHOB S-adenosylmethionine:tRNA ribosy ltransferase-isomerase OS=Roseivivax isoporae LMG 25204 OX=1449351 GN=queA PE=3 SV=1
MRLDDFDFDLPEELIATRPARPRSSARLLVAAGDAIHDGTVTDLVDWLRPGDRLVLNDTRVIPARLSGTRTRPGAAGEGTARIEVTLLEPGTDGTWRALVKPLKKLREGEEVRFAAGLSAVLEARDEGQAVLRFNLAGAAFDAALAEAGAMPLPPYIAQRRAADAQDREDYQTVWAARPGAVAAPTASLHFDAPLLARLKARGVTFTHVTLHVGAGTFLPVKVEDVTRHRMHAEWGEVSEAAAAEIAATRAAGGRIVPVGTTALRLLETAARDTGAVVPWQGETDIFIYPGFTFRAADALMTNFHLPKSTLMMLVSAFLGPERIRRVYAHAVAERYRFFSYGDASLLLP

SEQ ID NO: 71597 - protein, 354 aa, Roseivivax jejudonensis
  misc_feature (1)..(354): tr|A0A1X6YT04|A0A1X6YT04_9RHOB S-adenosylmethionine:tRN A ribosyltransferase-isomerase OS=Roseivivax jejudonens is OX=1529041 GN=queA PE=3 SV=1
MSLHIDAFDFDLPEDLIATRPARPRSSARLLVAEGDRITDAVVRDLGDWLRPGDRLVLNDTKVIPARLSGTRARTGAEGRTEARVEVTLLEPRTDGTWAALVKPLKKVRDGETIRFSDALSAVLESRGDGQGVLRFNLEGEAFDTALAEAGAMPLPPYIAGRRAADARDREDYQTVWAARPGAVAAPTASLHFDDALLADLSARGIAFSHVTLHIGAGTFLPVKVEDVTTHRMHAEWGEVSERAADEIAATRAAGGRIIPVGTTALRLIETAARDTGNVRPWTGETDIFIYPGFAFRATDALMTNFHLPRSTLMMLVSALMGAERIRAIYAHAVAERYRFFSYGDASLLVPGDA

SEQ ID NO: 71598 - protein, 352 aa, Roseivivax lentus
  misc_feature (1)..(352): tr|A0A1N7N1V8|A0A1N7N1V8_9RHOB S-adenosylmethionine:tRN A ribosyltransferase-isomerase OS=Roseivivax lentus OX= 633194 GN=queA PE=3 SV=1
MQLSDFDFDLPEDRIATRPARPRSAARLLVAEGDRAITDAVVRDLPDWLRPGDRLVLNDTKVIPARLSGTRTRAGANGPTEARIEVTLLEPAADGCWTALIKPLKKLRDGETVVFSSALSAVLEGREAGQGRLRFNLAGDDFDAALAQAGAMPLPPYIAAKRPADARDREDYQTIWAENAGAVAAPTASLHFDEALLAALEARGVAFTHVTLHVGAGTFLPVKVDDVTTHKMHAEWGAVSAAAAAEIAATKAAGGRVIPVGTTALRLIETAARATGEIAPFEGETDIFIYPGFTFRVTDALMTNFHLPKSTLMMLVSALMGRDRIMEIYAHAVARNYRFFSYGDASLLIPGR

SEQ ID NO: 71599 - protein, 351 aa, Roseivivax marinus
  misc_feature (1)..(351): tr|W4HQA0|W4HQA0_9RHOB S-adenosylmethionine:tRNA ribosy ltransferase-isomerase OS=Roseivivax marinus OX=1379903 GN=queA PE=3 SV=1
MQLSDFDFDLPEELIATRPAKPRSSARLLVAEGDAITDAVVRDLGDWLRPGDRLVLNDTRVIPARLSGTRTREGAEGRTEARIEATLLEARADGAWSALVKPLKKVRDGETIRFSDRLSAVLEAREGGQGVLRFDLAGEDFDAALAEAGAMPLPPYIAQRRAADAQDAEDYQTVWAERSGAVAAPTASLHFDTALLDDLAARGIAFSRVTLHVGAGTFLPVKVDDVTTHKMHAEWGEVSEVAAAEIAETRAAGGRIIPVGTTALRLIETAARETGAVVPWSGETDIFIYPGFTFRATDALMTNFHLPKSTLMMLVSALMGPERVRRIYDHAVAERYRFFSYGDASLLVPRP

SEQ ID NO: 71600 - protein, 345 aa, Roseivivax pacificus
  misc_feature (1)..(345): tr|A0A2T6AQM9|A0A2T6AQM9_9RHOB S-adenosylmethionine:tRN A ribosyltransferase-isomerase OS=Roseivivax pacificus OX=1267769 GN=queA PE=3 SV=1
MKLSDFDFDLPEGRIATRPASPRSSARLLVAQGDAITDGVVTDLVDWLRPGDRLVLNDTRVIPARLSGTRRRGESEARIEATLLEPQADGTWAALLKPLKRVKDGEEIRFSDALSAVVEAREDGQARLRFNLSGEDFDAALEAAGAMPLPPYIAALRAADEKDREDYQTVWAKNSGAVAAPTASLHFDEALLAALEAKGVAFTHVTLHVGAGTFLPVKVDDVTQHRMHGEWGEVSEHAAQEISATKAAGGRVIPVGTTALRLIETAAEGGEIAPFSGVTEIFIYPGYRFRVTDALMTNFHLPKSTLLMLVSALMGQDRTRRIYDHAVAEGYRFFSYGDASLLIPE

SEQ ID NO: 71601 - protein, 346 aa, Roseivivax roseus
  misc_feature (1)..(346): tr|A0A1H9TL42|A0A1H9TL42_9RHOB S-adenosylmethionine:tRN A ribosyltransferase-isomerase OS=Roseivivax roseus OX= 641238 GN=queA PE=3 SV=1
MRLSDFDFDLPDDLIATRPARPRTSARLLVAEGDGITDSRVSALDQWLRPGDRLVLNDTKVIPARLSGQRHRGESAARIESTLLEPRADGTWRALLKPLKKVRDGEEIVFSPDLSARVEGRDDGAAVLSFNLRGQDFDAALDAAGQMPLPPYIAARRAADESDREDYQTVWARHAGAVAAPTASLHFDDSLLSTLRERGVTFSYVTLHVGAGTFLPVKADDISEHRMHAEWGEITQSTADEISATRAAGGRVIPVGTTALRLIETAAREGAIRAWQGETDIFITPGFRFQVTEGLMTNFHLPRSTLLMLVSALMGPERIRRIYEHAVTERYRFFSYGDASILLPHR

SEQ ID NO: 71602 - protein, 350 aa, Roseivivax sediminis
  misc_feature (1)..(350): tr|A0A1I1Y143|A0A1I1Y143_9RHOB S-adenosylmethionine:tRN A ribosyltransferase-isomerase OS=Roseivivax sediminis OX=936889 GN=queA PE=3 SV=1
MRLDEFDFDLPEELIATRPARPRSAARLLVAEGDRITDAVVRDLGDWLRPGDRLVLNDTRVIPARLSGMRTRAGAEGETSARIEATLLEPGADGTWSALVKPLKKVREGETIRFSEALSAVLEAKGDGQGRLRFNLSGAKFDAALAEAGAMPLPPYIAGRRAADAQDREDYQTVWADKPGAVAAPTASLHFDAPLLDGLAARGVTFSQLTLHVGAGTFLPVKVEDVTTHRMHAEWGEVSERAAAEIAETRAAGGRIIPVGTTALRLIETAARATGQVEPWRGETDIFIYPGFTFRATDALMTNFHLPKSTLLMLVSALMGQERVRAIYAHAVAERYRFFSYGDASLLIPT

SEQ ID NO: 71603 - protein, 356 aa, Rosenbergiella nectarea
  misc_feature (1)..(356): tr|A0A1H9DZB4|A0A1H9DZB4_9ENTR S-adenosylmethionine:tRN A ribosyltransferase-isomerase OS=Rosenbergiella nectar ea OX=988801 GN=queA PE=3 SV=1
MRVADFNFALPESLIAHYPQPERSACRLLSLDGPSGELQHGVFTDVLDKLQPGDLLVFNNTRVIPARVYGQKASGGKLEMLVERMLDDKRVLAHVRASKAPKPGTELLLGDTLEVRATMVARHDTLFEIEFHDSREVLDILNHIGHMPLPPYIDRPDEEADRELYQTVYSAKPGAVAAPTAGLHFDQPLLDALRQKGIETAFVTLHVGAGTFQPVRVESIEDHIMHAEYAEVPQEVVDAVLACKARGNKVVAVGTTSVRSLESAAKAADNALIAPFFDDTQIFIYPGYQYQVIDALITNFHLPESTLIMLVSAFAGYKNTMHAYQQAVVQQYRFFSYGDAMFITQNPEAVNEVMSA

SEQ ID NO: 71604 - protein, 351 aa, Roseobacter denitrificans
  misc_feature (1)..(351): sp|Q164S6|QUEA_ROSDO S-adenosylmethionine:tRNA ribosylt ransferase-isomerase OS=Roseobacter denitrificans (stra in ATCC 33942 / OCh 114) OX=375451 GN=queA PE=3 SV=1
MKLSDFDFDLPEDLIATRPAVPRTSARLLVAKGRQISDSIVSDLPNWLSPGDRLVLNDTRVIPARLTGARHRDTAQGPMQARIEVTLLEPDAQGNWSALIKPLKKVKIAEEIIFSDRLRATLRAVKDGQGVLQFNLEGDDFDAALNAAGAMPLPPYIATRRPADERDKSDYQTVFAQNSGAVAAPTASLHFDKALLSELAARGVLFSYVTLHVGAGTFLPVKVEDVTTHKMHAEWGQVSAAAAAEINATKQAGKRVIPVGTTALRLIETAGREGQIKAWEGDTDIFIYPGFRFNVADALMTNFHLPKSTLMMLVSALMGYDEVRAIYDHAVAEKYRFFSYGDASLLIPQRD

SEQ ID NO: 71605 - protein, 351 aa, Roseobacter litoralis
  misc_feature (1)..(351): tr|F7ZEZ8|F7ZEZ8_ROSLO S-adenosylmethionine:tRNA ribosy ltransferase-isomerase OS=Roseobacter litoralis (strain ATCC 49566 / DSM 6996 / JCM 21268 / NBRC 15278 / OCh 1 49) OX=391595 GN=queA PE=3 SV=1
MKLSDFDFDLPEDLIATRPAVPRTSARLLVAKGQQISDSIVSDLPNWLSPGDRLVLNDTRVIPARLTGARHRDTAQGPMQARIEVTLLEPDARGDWSALIKPLKKVKIGEEIIFSDVLRATLQSVTDGQGFLKFNLEGDDFDAALNAAGAMPLPPYIATRRPADERDKSDYQTVFAQNNGAVAAPTASLHFDEALLSELAARGVLFSYVTLHVGAGTFLPVKVEDVTTHKMHAEWGQVSAVAAAEINATKQAGKRVIPVGTTALRLIETAGREGQITAWEGDTDIFIYPGFRFNVADALMTNFHLPKSTLMMLVSALMGYDEVRTIYNHAIAEKYRFFSYGDASLLIPKTD

SEQ ID NO: 71606 - protein, 350 aa, Roseobacter sp.
  misc_feature (1)..(350): tr|A4EKB5|A4EKB5_9RHOB S-adenosylmethionine:tRNA ribosy ltransferase-isomerase OS=Roseobacter sp. CCS2 OX=39159 3 GN=queA PE=3 SV=1
MKLSEFDFDLPDSLIATRPARPRSSARLLLAQGATIEDRIVNQLPDILQPGDRLILNDTKVIPARLFGLRHRSGEAGETAAKMDVTLLEPRADGSWSALIKPLKKVRDGEVIVFSDDLEAEVTGRGDGQGYLAFNLKGDDFDAALNAVGAMPLPPYIAGKRSADDADKTDYQTYWARNSGAVAAPTASLHFDGPLLAALAARGVQFTHVTLHVGAGTFLPVKVDDVRDHKMHAEWGEVTADAAAEINATKAAGHRVIPVGTTALRLIESAAQRGVMQPWTGPTDIFITPGFQFQMADGLMTNFHLPKSTLMMLVSALMGTDTIRAIYAHAIAQNYRFFSYGDSSLLLPHK

SEQ ID NO: 71607 - protein, 350 aa, Roseobacter sp.
  misc_feature (1)..(350): tr|A6FRD4|A6FRD4_9RHOB S-adenosylmethionine:tRNA ribosy ltransferase-isomerase OS=Roseobacter sp. AzwK-3b OX=35 1016 GN=queA PE=3 SV=1
MKLSDFDFDLPEDLIATRPARPRSSARLLVAQGDAIRDAIVRDLGDFLRPGDRLVLNDTAVIPARLSGMRRREGPEGVTQAKIEVTLLEPGPEGDWSALVKPLKKVRDGEVIVFGAGLEAEVLARREGQGLLRFNLEGEAFDTALNDAGAMPLPPYIAARRAADAQDRTDYQTVWARHKGAVAAPTASLHFDAELLERLEAMGVTFSHVTLHVGAGTFLPVKVEDVTTHRMHAEWGRVSEAAAAEIAATKAAGGRVIPVGTTALRLIESAAQASGAIAPWEGETDIFIYPGFTFRVADALMTNFHLPKSTLMMLVSALMGQDRIKDIYDHAVENRYRFFSYGDASLLIPD

SEQ ID NO: 71608 - protein, 356 aa, Roseococcus sp.
  misc_feature (1)..(356): tr|A0A4R0YIB4|A0A4R0YIB4_9PROT S-adenosylmethionine:tRN A ribosyltransferase-isomerase OS=Roseococcus sp. SYP-B 2431 OX=2496640 GN=queA PE=3 SV=1
MTLATSDFDYALPEAAIAQAPLRPRDAARMLVVRGGTLEDRGVRDLPSLLEPGDVMVVNDTRVIPARLRARRGEARIEVMLNRAEGDGSWHALIRNARRLRVGDEIAIEGAELTARVLEKFEGGSARLDFGTDPARLMAALEQAGEIPLPPYIQREAGPGAEDRADYQTVFAARPGAVAAPTASLHFTPWLLAALEARGVKRATVTLHVGAGTFLPVREEDPRRHVMHHEWGELGAEAAAIINAARAEGRRILCCGTTALRLLETAARGVEDRHAPIPVFSGLTDIYILPGFPFRAADLLMTNFHLPKSTLLMLVSAFAGTRRMRRAYAHAVAEGYRFFSYGDASLLFREEADLTA

SEQ ID NO: 71609 - protein, 392 aa, Roseofilum reptotaenium
  misc_feature (1)..(392): tr|A0A1L9QRE3|A0A1L9QRE3_9CYAN S-adenosylmethionine:tRN A ribosyltransferase-isomerase OS=Roseofilum reptotaeni um AO1-A OX=1925591 GN=queA PE=3 SV=1
MDRERELRDDRDYDLDAYDYVLPEECIAQNPVTPRDSSRLLVVDSSAGCHHEVFRELPQWLRREDLLVMNDTRVIPARLYGYKSTGMEMEALLLERVERHVWLALVKPGRRLKPGAVVEFSAHSGEDLPPLKAKIRGTDEATGGRFLEFELSGDQELQDLLDDYGHVPFPPYVTDTQAEADQYQTVYAQAAGSVAAPTAGLHFTPRLLEELEDLGIERAMVTLHVGVGTFRPVEVKDIRTHEMHQEWLEVSGETWQKVRETQKRGGRVISVGTTSVRALEGAAHWWKDRGSVGAGSFNFGSSKRDLGEPALTSGPGAGFYGKTDLFIYPGYEWQVVEGLITNFHLPRSSLLMLVSALVGRSRLLQLYQEAIAEDYRFYSFGDAMLILPEARF

SEQ ID NO: 71610 - protein, 367 aa, Roseomonas aestuarii
  misc_feature (1)..(367): tr|A0A2U1V934|A0A2U1V934_9PROT S-adenosylmethionine:tRN A ribosyltransferase-isomerase OS=Roseomonas aestuarii OX=568898 GN=queA PE=3 SV=1
MTQPSTLPDRRDAGPKPELRAEDFDFALPEALIAQSPARPRDAARLLVAAPEGVRDAGVLELPDWLRPGDLMVVNDTRVIPARLRAGRGEARLEIMLNRAEAGGIWHALVRNAKKLRPGDILSIEGAPELAPRVVERQEGGAVLLDFGPDQGLLAAALERAGEIPLPPYIARPEGPRPEDREDYQPIFARQPGAVAAPTASLHFTPRLLAALAARGVAQVSLTLHVGAGTFLPIRAENPREHRLHAEWGEITEAAAAAINGTRAKGGRIVAIGTTALRLLESAVDEKGVIHPFRGLTDIFLLPGHVFRSADLLLTNFHLPKSSLFMLVSAFAGTARMRDAYAHAVAQGYRFYSYGDASLLFREDTAP

SEQ ID NO: 71611 - protein, 360 aa, Roseomonas cervicalis
  misc_feature (1)..(360): tr|D5RRV7|D5RRV7_9PROT S-adenosylmethionine:tRNA ribosy ltransferase-isomerase OS=Roseomonas cervicalis ATCC 49 957 OX=525371 GN=queA PE=3 SV=1
MTSTTPPALPELRAEDFDFALPEALIAQAPARPRDAARLLVAAPEGLRDQGVRDLPAWLRPGDLMVVNDTRVIPARLRARRGEARLEIMLNRAESGGMWHALVRNAKKLRPGDILTIEGAPELAPRVVERQEGGAALIDFGPDQGKLAAALEKAGEIPLPPYIARPDGPRPEDREDYQPIFAREPGAVAAPTASLHFTPGLLAALAERGVGQVSLTLHVGAGTFLPIRGDNPREHKLHAEWGHISEAAAASINETRARGGRIVAIGTTALRLLESAVDERGVVHPFRGLTDIFLLPGHVFRSADLLLTNFHLPKSSLFMLVSAFAGQARMRDAYAHAVAQGYRFYSYGDASLLFREDPTP

SEQ ID NO: 71612 - protein, 352 aa, Roseomonas deserti
  misc_feature (1)..(352): tr|A0A1V2GXV7|A0A1V2GXV7_9PROT S-adenosylmethionine:tRN A ribosyltransferase-isomerase OS=Roseomonas deserti OX =1817963 GN=queA PE=3 SV=1
MPELRAADFDFDLPEALIAQGPARPRDSARMLVVGADGPVDAGVASLPDWLRPGDLMVVNDTRVIPARLRARRGLAQLEIMLNRAESGGLWHALVRNAKKLRPGDLLDIEGAPELRPRVVERQEGGAVLLDFGPDQALLAAVLERAGEIPLPPYIARPDGPTAQDLDDYQPIFARQPGAVAAPTASLHFTPALLQALEARGVAQVALTLHVGAGTFLPIRGDNPREHKLHAEWGEISDSAAATINATRAKGGRIIAIGTTALRLLESSVDDQGIVHPFRGLTDIFLLPGHVFHSADLLLTNFHLPKSSLFMLVSAFAGQGRMRDAYAHAVAQGYRFYSYGDASLLFRENAAR

SEQ ID NO: 71613 - protein, 352 aa, Roseomonas gilardii
  misc_feature (1)..(352): tr|A0A1L7ADA6|A0A1L7ADA6_9PROT S-adenosylmethionine:tRN A ribosyltransferase-isomerase OS=Roseomonas gilardii O X=257708 GN=queA PE=3 SV=1
MSHSLPPLRTVDFDFTLPEASIAQSPAQPRDSARLLDVRPDGLADRHVSDLPGLLEPGDLLVVNDTRVIPARLHARRGEAAIELLLNRAEGGGVWHALARNARRLRPGDVLAIGGAPELAPRVVERQEGGAVLVDFGPDEAALLAALERAGEVPLPPYIQRPGGPVAADRADYQTVFADRPGAVAAPTASLHFTPRLLEALEARGIGRATVTLHVGAGTFLPVRGDDPREHRLHAEWGEITPEAAARINAARRVVAVGTTALRLLESAAREDGTIAPFRGLTELFLLPGHRFRSAPLLLTNFHLPKSTLFMLACAYAGTARVRAAYDHAIASGYRFYSYGDASLLRREDSAP

SEQ ID NO: 71614 - protein, 352 aa, Roseomonas gilardii
  misc_feature (1)..(352): tr|A0A379ND99|A0A379ND99_9PROT S-adenosylmethionine:tRN A ribosyltransferase-isomerase OS=Roseomonas gilardii s ubsp. rosea OX=243956 GN=queA PE=3 SV=1
MSHSLPPLRTVDFDFTLPEASIAQSPAQPRDSARLLDVRPDGLADRHVADLPGLLEPGDLLVVNDTRVIPARLHARRGEAAIELLLNRAEGGGVWHALARNVRRLRPGDVLAIDGAPELAPRVVERQEGGAVLVDFGPDEAALLAALERAGEVPLPPYIQRPGGPVAADRADYQTVFADRPGAVAAPTASLHFTPRLLAALEARGIGRATVTLHVGAGTFLPVRGDDPRAHRLHAEWGEITPGTAARINAARRVVAVGTTALRLLESAAREDGTIAPFRGLTELFLLPGHRFRSAPVLLTNFHLPKSTLFMLACAYAGTARVRAAYDHAIASGYRFYSYGDASLLRREDSAP

SEQ ID NO: 71615 - protein, 352 aa, Roseomonas mucosa
  misc_feature (1)..(352): tr|A0A1S8D8C2|A0A1S8D8C2_9PROT S-adenosylmethionine:tRN A ribosyltransferase-isomerase OS=Roseomonas mucosa OX= 207340 GN=queA PE=3 SV=1
MSHSLPPLRTVDFDFTLPEASIAQSPAQPRDSARLLDVRPDGLADRQVSDLPGLLEPGDLLVVNDTRVIPARLHARRGEAAIELLLNRSEGGGTWHALARNARRLRPGDVLAIDGAPELAPRVVERQEGGAVLVDFGSDEAALLAALERAGEVPLPPYIQRPGGPVAADRADYQTVFADRPGAVAAPTASLHFTPRLLAALEARGIGRATVTLHVGAGTFLPVRGDDPRAHKLHAEWGEIAPETAARINAARRVVAVGTTALRLLESAAREGGTIAPFHGLTELFLLPGHRFRSAPVLLTNFHLPKSTLFMLACAYAGTARVRAAYDHAIASGYRFYSYGDASLLRREDSAP

SEQ ID NO: 71616 - protein, 352 aa, Roseomonas mucosa
  misc_feature (1)..(352): tr|A0A379N2R7|A0A379N2R7_9PROT S-adenosylmethionine:tRN A ribosyltransferase-isomerase OS=Roseomonas mucosa OX= 207340 GN=queA PE=3 SV=1
MSHSLPPLRTVDFDFTLPEASIAQSPAQPRDSARLLDVRPDGLADRQVSDLPGLLEPGDLLVVNDTRVIPARLHARRGEAAIELLLNRSEGGGTWHALARNARRLRPGDVLAIDGAPELAPRVVERQEGGAVLVDFGPDEAALLAALERAGEVPLPPYIQRPGGPVAADRADYQTVFADRPGAVAAPTASLHFTPRLLAALEARGIGRATVTLHVGAGTFLPVRGDDPRAHKLHAEWGEIAPETAARINAARRVVAVGTTALRLLESAAREDGTIAPFRGLTELFLLPGHRFRSAPVLLTNFHLPKSTLFMLACAYAGTARVRAAYDHAIASGYRFYSYGDASLLRREDSAP

SEQ ID NO: 71617 - protein, 357 aa, Roseomonas nepalensis
  misc_feature (1)..(357): tr|A0A502FQN0|A0A502FQN0_9PROT S-adenosylmethionine:tRN A ribosyltransferase-isomerase OS=Roseomonas nepalensis OX=1854500 GN=queA PE=3 SV=1
MATASFAFDLPEGLIAQSPARPRDSARLLRVAPPGGEDPAEVADRVVRDLPGLLRPGDLMVVNDTRVIPARLRARRGEARVEIMLNRAEADGTWHALVRNARKLRPGDVLAIEGAPELAPRVVEPPQGGAVRLDFGPDPAALAAALERAGEIPLPPYIARPDGPRPEDREDYQPIFARTPGAVAAPTASLHFTPALLAALEVRGVGRATLTLHVGAGTFLPLREEDPRAGRLHAEWGEVTESAARAINEARARGGRVVAIGTTALRLLETAAREDGTLAPFRGLTDIFLLPGHRFRGADLLLTNFHLPRSTLFMLVCAFGGTDRMRAAYAHAIAAGYRFYSYGDACLIDRDDAEASR

SEQ ID NO: 71618 - protein, 361 aa, Roseomonas oryzae
  misc_feature (1)..(361): tr|A0A5B2TFK6|A0A5B2TFK6_9PROT S-adenosylmethionine:tRN A ribosyltransferase-isomerase OS=Roseomonas oryzae OX= 1608942 GN=queA PE=3 SV=1
MTQAANLPDLRAEDFDFALPEALIAQSPARPRDAARMLVASTDGPRDAGVRDLPDWLRPGDLMVVNDTCVIPARLRARRGEARVEIMLNRAEAGGQGGTVWHALVRNARKLRPGDILSVEGAPELSPRVVERQEGGAVLLDFGPDQGLLAAALERAGEIPLPPYIARPDGPRPEDRDDYQPIFARQPGAVAAPTASLHFTPALLEALAARGVGQVSLTLHVGAGTFLPIRAENPREHKLHAEWGEIAPAAAEAINAARAKGGRIVAIGTTALRLLESAVDDQGTIRPFQGLTDIFLLPGHVFHSADLLLTNFHLPKSSLFMLVSAFAGMARMRDAYAHAVAQNYRFYSYGDASLLFREDAA

SEQ ID NO: 71619 - protein, 358 aa, Roseomonas rhizosphaerae
  misc_feature (1)..(358): tr|A0A2C7AFP8|A0A2C7AFP8_9PROT S-adenosylmethionine:tRN A ribosyltransferase-isomerase OS=Roseomonas rhizosphae rae OX=1335062 GN=queA PE=3 SV=1
MTQPSPLPDLRAEDFDFALPEALIAQSPARPRDAARMLVAAPGGTQDAGVSDLPGWLRPGDVMVVNDTRVIPARLRARRGEARVEIMLNRAETGGIWHALVRGAKKLRPGDILSIEGAPELAPRVVERQEGGAALIDFGPDQGLLAAALEKAGEIPLPPYIARPGGPRPEDREDYQPIFARQPGAVAAPTASLHFTPALLEALAARGVGQVSLTLHVGAGTFLPIRADNPREHRLHSEWGEISPGAAAAINAARAKGGRIVAIGTTALRLLESAVDEKGIVHPFRGLTDIFLLPGHRFHSADVLLTNFHLPKSSLFMLVSAFSGTARMREAYAHAIAAGYRFYSYGDASLLFREDPAP

SEQ ID NO: 71620 - protein, 354 aa, Roseomonas rosea
  misc_feature (1)..(354): tr|A0A1M6LVX8|A0A1M6LVX8_9PROT S-adenosylmethionine:tRN A ribosyltransferase-isomerase OS=Roseomonas rosea OX=1 98092 GN=queA PE=3 SV=1
MPRPLSTNDFAFDLPEALIAQSPARPRDSARLLRIAEDRQDLTIRALPDLLRPGDLMVVNDTRVIPARLRARRGEAKIEIMLNRQEADGTWHALVRNARKLRAGDILSVEGASELAPRVVENPEGGAVRLDFGPDQAALAAALERAGEIPLPPYIARPEGPRPEDREDYQPIFARIPGAVAAPTASLHFTPELLAALEARGVARTTLTLHVGAGTFLPLRGEDPRAQRLHAEWGEVTEEAAADINETRARGGRVVAIGTTALRLLETATGEDNTTRPFRDLTDIFLLPGHRFHGADLLLTNFHLPKSTLFMLVCAFGGTDRMRAAYAHAVAAGYRFYSYGDACLIDRDDGEAGA

SEQ ID NO: 71621 - protein, 352 aa, Roseomonas sp.
  misc_feature (1)..(352): tr|A0A1Q2YVB7|A0A1Q2YVB7_9PROT S-adenosylmethionine:tRN A ribosyltransferase-isomerase OS=Roseomonas sp. TAS13 OX=1926319 GN=queA PE=3 SV=1
MSHSLPPLRTVDFDFTLPEASIAQSPAQPRDSARLLDVRPDGLADRQVSDLPGLLEPGDLLVVNDTRVIPARLHARRGEAAIELLLNRSEGGGTWHALARNARRLRPGDVLAIDGAPELAPRVVERQEGGAVLVDFGSDEAALLAALERAGEVPLPPYIQRPGGPVAADRADYQTVFADRPGAVAAPTASLHFTPRLLAALEARGIGRATVTLHVGAGTFLPVRGDDPRAHKLHAEWGEIAPETAARINAARRVVAVGTTALRLLESAAREDGTIAPFHGLTELFLLPGHRFRSAPVLLTNFHLPKSTLFMLACAYAGTARVRAAYDHAIASGYRFYSYGDASLLRREDSAP

SEQ ID NO: 71622 - protein, 364 aa, Roseomonas sp.
  misc_feature (1)..(364): tr|A0A317F6E0|A0A317F6E0_9PROT S-adenosylmethionine:tRN A ribosyltransferase-isomerase OS=Roseomonas sp. CQN31 OX=2184016 GN=queA PE=3 SV=1
MPEAPPPSRAEGAPLRTEEFDYDLPERLIAQAPARPRDSARLLVVRAEGLEDRGVLDLPALLDPGDLLVVNDTRVIPARLHGRRGDARVEIMLNRAEGGGLWQALVRNARRLRPGDEVAIEGAEGCVARVVEREGGTALLDFGPDQAALAVALEQAGEVPLPPYIHRKGGPRAEDAADYQTIFAKRPGAVAAPTASLHFTDRLLAALEARGVQRATVTLHVGAGTFLPVREDDPRRHHIHREWAEIGEDAAAAINAARAAGRRVVALGTTAMRVTETAAREDGTVAPFRGLTDLYILPGFRFRAVDALLTNFHLPKSTLLMLVSAFSGTRRMRAAYAHAIAREYRFFSYGDASLLFRCAQDLPA

SEQ ID NO: 71623 - protein, 360 aa, Roseomonas stagni
  misc_feature (1)..(360): tr|A0A1I4C8T9|A0A1I4C8T9_9PROT S-adenosylmethionine:tRN A ribosyltransferase-isomerase OS=Roseomonas stagni DSM 19981 OX=1123062 GN=queA PE=3 SV=1
MPDAPPFPTPLRTGDFDYDLPERLIAQAPARPRDSARLLVVGDGRLEDRGVLDLPAMLDPGDVLVVNDTRVIPARLHGRRGEARVEIMLNRAEGGGLWHALIRNARRLRPGDTVAIEGAEGCVARVVERDGGSALLDFGPDQAALAAALEQAGEVPLPPYIHRDGKPGAEDVADYQTIFAERPGAVAAPTASLHFTDQLLAALDARGIRRATVTLHVGAGTFLPVREDDPRAHHIHQEWCDVSPEAADTINQARAEGRRVVAVGTTALRTTESAAREDGTVAPFRGLTDLYILPGYRFRAVDALVTNFHLPKSTLLMLVSAFAGTRRMRAAYAHAVAQEYRFFSYGDGSLLFRCDQDSPA

SEQ ID NO: 71624 - protein, 341 aa, Roseospirillum parvum
  misc_feature (1)..(341): tr|A0A1G7WIN0|A0A1G7WIN0_9RHIZ S-adenosylmethionine:tRN A ribosyltransferase-isomerase OS=Roseospirillum parvum OX=83401 GN=queA PE=3 SV=1
MRTDLFDFTLPPEHIARRPASPRDAARLLVVPPEGLFADLTVADLPGQLAPGDLLVVNDTRVLPARLTGRRGTAGVEITLDQRRPDGTWRALAKGARKLKPGQRIDFADALSAQVLEKAEGGVVTLAFDRDGADLRAALEAVGHIPLPPYMGRPDDARDRDDYQTLFAAREGAVAAPTAGLHFTPRLIDALTAAGITQTSLTLHVGAGTFLPVKVDDTRDHQMHGEWGEITPHTADTINTTRAAGGRVVAVGTTALRLLESAARDDGTVAPFEGETDIFITPGHRFQAVDALLTNFHLPRSTLFMLVSAFMGLERMQSAYAHAIAENYRFYSYGDACLLLR

SEQ ID NO: 71625 - protein, 349 aa, Roseovarius aestuarii
  misc_feature (1)..(349): tr|A0A1X7BPA3|A0A1X7BPA3_9RHOB S-adenosylmethionine:tRN A ribosyltransferase-isomerase OS=Roseovarius aestuarii OX=475083 GN=queA PE=3 SV=1
MKLSDFDFDLPDGLIATRPVKPRSAARMLVAEGGHIADAHVHDLGRWLRPGDRLVLNDTKVIPARLTGTRRRSGPQGDSTARIEATLLDPGADGSWTALIKPLKKVREGEEIRFSADLSAILVAKADGRALLHFNLTSDDFDAALAQAGAMPLPPYIAAKRPADAQDKTDYQTVFARNPGAVAAPTASLHFDEALLQALTRQGISFTHVTLHVGAGTFLPVKVEDVTTHKMHAEWGEVSAQAAAEIAATKAAGGRVIPVGTTALRLIESAARDGQITPWQGETDIFIYPGFDFNVADALMTNFHLPRSTLMMLVSALMGQDRIRQIYAHAVAQEYRFFSYGDASLLIPG

SEQ ID NO: 71626 - protein, 349 aa, Roseovarius albus
  misc_feature (1)..(349): tr|A0A1X6ZC22|A0A1X6ZC22_9RHOB S-adenosylmethionine:tRN A ribosyltransferase-isomerase OS=Roseovarius albus OX= 1247867 GN=queA PE=3 SV=1
MKTSDFDFDLPEELIAVRPARPRRAARLLVAQGAQITDSTVDQLGDWLLPGDRLVLNDTKVIPARLQGVRSRMSPQGRTEARMEVTLLSPETDGTWRAMIKPLKKIREGEVIQFEAGLEAELTDKPDGQGVLRFNMTGDDFDAALTEIGSMPLPPYIAAKRAADEQDHEDYQTVFAENSGAVAAPTASLHFDEALLAELADKGVQFTHVTLHVGAGTFLPVKVEDVTTHKMHAEWGHVSAQAAEEIRQTKANGGRVIPVGTTALRLIESAARGREIEPWQGETDIFIYPGFTFQVADALMTNFHLPRSTLMMLVSALIGSEEIRQIYAHAIAQKYRFFSYGDSSLLIPT

SEQ ID NO: 71627 - protein, 355 aa, Roseovarius atlanticus
  misc_feature (1)..(355): tr|A0A0T5P079|A0A0T5P079_9RHOB S-adenosylmethionine:tRN A ribosyltransferase-isomerase OS=Roseovarius atlanticu s OX=1641875 GN=queA PE=3 SV=1
MKLSDFDFDLPEALIATRPAKPRPSARLLVAQGDRITDSRVYDLGQYLRPGDRLILNNTKVIPARLSGLRRRDGAQGETEARIEVTLLDATPEGDWRAMIKPLKKLRIGETVRFEAGLEAKLLAKEDGQGVLRFNLSGDDFDAALNAAGAMPLPPYIASKRAADDQDRDDYQTVFAKQTGAVAAPTASLHFDDALLAELAAQGIAFTEVTLHVGAGTFLPVKVEDVTSHRMHAEWGEVSKAAAAEIAATKAAGGRIIPVGTTALRLIESAARDGTIGPWRGETDIFIYPGFRFQVTDALMTNFHLPKSTLMMLVSALMGPNRIKDIYTHAIQNEYRFFSYGDSSLLVPDGGGRTK

SEQ ID NO: 71628 - protein, 362 aa, Roseovarius azorensis
  misc_feature (1)..(362): tr|A0A1H7M548|A0A1H7M548_9RHOB S-adenosylmethionine:tRN A ribosyltransferase-isomerase OS=Roseovarius azorensis OX=1287727 GN=queA PE=3 SV=1
MDLSDFDFDLPEALIATRPAKPRRAARLLVAEGDRITDAQVADLGRWLRPGDRLVLNDTRVIPARLSGLRHRRGAQGATAARIEVTLLEPGADGTWAALIKPLKKVAVGEEIVFSPVLSAVLEAREDGQGRLRFNLTGEDFDAALAEAGAMPLPPYIAARRAADAQDKVDYQTVWARVPGAVAAPTASLHFDEVLLADLAAMGVTFSHVTLHVGAGTFLPVKVEDVTTHRMHAEWGEVSARAAQEIAATRAAGGRIVPVGTTALRLIETAARATGEVVAWRGETDIFIYPGFDFRVTDALMTNFHLPKSTLMMLVSALMGRTRIGRIYQHAVAEGYRFFSYGDASLLIPGAKADRRGAGGPG

SEQ ID NO: 71629 - protein, 350 aa, Roseovarius gaetbuli
  misc_feature (1)..(350): tr|A0A1X6ZB15|A0A1X6ZB15_9RHOB S-adenosylmethionine:tRN A ribosyltransferase-isomerase OS=Roseovarius gaetbuli OX=1356575 GN=queA PE=3 SV=1
MKLSDFDFELPEALIATRPARPRTSARLLVANGDAITDTRVSALGDWLCAGDRLVLNDTKVIPARLSGERHRTGAQGATAARIEVTLLDPAADGSWSALLKPLKKISEGEVIVFSPDLSATLEAKLDGQGRLRFNLAGEDFDAALAEAGAMPLPPYIAARRPADAQDKTDYQTVWARHAGAVAAPTASLHFDAALLAELAAMGVTFSHVTLHVGAGTFLPVKVEDVTTHKMHAEWGEVSAEAAAEIAATRAASGRVIPVGTTALRLIETAARATGEIAPWQGETDIFIYPGFEFRVTDALMTNFHLPKSTLMMLVSALVGQDRLREIYRHAVTENYRFFSYGDASLLIPR

SEQ ID NO: 71630 - protein, 350 aa, Roseovarius halotolerans
  misc_feature (1)..(350): tr|A0A1X6YJ74|A0A1X6YJ74_9RHOB S-adenosylmethionine:tRN A ribosyltransferase-isomerase OS=Roseovarius halotoler ans OX=505353 GN=queA PE=3 SV=1
MKLSDFDFELPEDLIATRPARPRSSARLLVAEGAAIHDSCVRDLGDWLRPGDRLVLNDTAVIPARLSGARRRTGPEGETSARIEVTLLEPGREGDWAALVKPLKKLRVGEAVQFAAGLEAELLAKDEGQARLRFNLEGEAFDSALAEAGAMPLPPYIAARRAADEQDKTDYQTVWARAPGAVAAPTASLHFDEALLKDLHARGIAFSHVTLHVGAGTFLPVKVEDVTTHRMHAEWGEVSEKAAAEIAATKAAGGRVIPVGTTALRLIESAARESGAIAPWRGETDIFIYPGFDFRVSDALMTNFHLPRSTLLMLVSALMGQARIRAIYDHALEQRYRFFSYGDASLLIPG

SEQ ID NO: 71631 - protein, 349 aa, Roseovarius indicus
  misc_feature (1)..(349): tr|A0A0T5PA51|A0A0T5PA51_9RHOB S-adenosylmethionine:tRN A ribosyltransferase-isomerase OS=Roseovarius indicus O X=540747 GN=queA PE=3 SV=1
MKLSDFDFDLPERLIATRPARPRSSARLLVADGDAITDAKVADLGRWLRPGDRLVLNDTKVIPARLTGTRRREGATGETEARIEVTLLDPAPDGGWRAMVKPLKKLREGEVVRFGAGLEATCRAKEDGQAVLAFNLEGDEFDAALNQAGAMPLPPYIAARRAADEQDREDYQTVWARNTGAVAAPTASLHFDEALLTALADMGVTFTHVTLHVGAGTFLPVKVEDVTTHKMHAEWGEVSEAAAAEIAETKAAGHRVIPVGTTALRLIESAAQGGQITPWRGETEIFIYPGFKFRVTDALMTNFHLPRSTLMMLVSALMGQGRIRDIYEHAVAEEYRFFSYGDASLLIPG

SEQ ID NO: 71632 - protein, 355 aa, Roseovarius litoreus
  misc_feature (1)..(355): tr|A0A1M7CWZ2|A0A1M7CWZ2_9RHOB S-adenosylmethionine:tRN A ribosyltransferase-isomerase OS=Roseovarius litoreus OX=1155722 GN=queA PE=3 SV=1
MGERQVKLSDFDFDLPEDLIATRPARPRSSARLLVAQGDAIQDAIVRDLGDWLRPGDRLVLNDTAVIPARLSGVRRREGPEGATQAKIEVTLLEPGPEGDWSALVKPLKKVRDGEVIVFGAGLEAEVLARREGQGLLRFNLEGEAFDTALNAAGAMPLPPYIAARRAADAQDRTDYQTVWARHKGAVAAPTASLHFDAELLERLEAMGVTFSHVTLHVGAGTFLPVKVEDVTTHKMHAEWGRVSEAAAAEIAATKAAGGRVIPVGTTALRLIESAAQASGAIAPWEGETDIFIYPGFTFRVTDALITNFHLPKSTLMMLVSALMGQDRIRKIYDHAVENRYRFFSYGDASLLIPG

SEQ ID NO: 71633 - protein, 350 aa, Roseovarius lutimaris
  misc_feature (1)..(350): tr|A0A1I5CKT0|A0A1I5CKT0_9RHOB S-adenosylmethionine:tRN A ribosyltransferase-isomerase OS=Roseovarius lutimaris OX=1005928 GN=queA PE=3 SV=1
MKLSDFDFDLPEALIATRPARPRTSARLLVAHGDAITDTRVSALGDWLCPGDRLVLNDTKVIPARLSGKRHRLGAQGASAARIEVTLLEPGADGSWSALIKPLKKISVGETVVFSPDLSATLEAKEDGQGRLRFNLAGEDFDAALAEAGAMPLPPYIAARRPADSQDKTDYQTVWARHAGAVAAPTASLHFDEPLLAQLAGMGVTFSHVTLHVGAGTFLPVKVEDVTSHKMHAEWGEVSAGAAAEIAATRAAGGRVIPVGTTALRLIETAARATGEIAPWQGETDIFIYPGFDFRVTDALMTNFHLPKSTLMMLVSALVGQDRLRQIYAHAVAENYRFFSYGDASLLTPR

SEQ ID NO: 71634 - protein, 350 aa, Roseovarius marisflavi
  misc_feature (1)..(350): tr|A0A1M7BC88|A0A1M7BC88_9RHOB S-adenosylmethionine:tRN A ribosyltransferase-isomerase OS=Roseovarius marisflav i OX=1054996 GN=queA PE=3 SV=1
MKLSDFDFELPEALIATRPARPRTSARLLVANGDAITDTRVSALGDWLRAGDRLVLNDTKVIPARLGGLRHRAGAQGPSAARIEVTLLEPGADGSWSALIKPLKKISEGEVIVFSPDLSATLEAKEDGQGRLRFNLAGEDFDAALAEAGAMPLPPYIAARRPADAQDKTDYQTVWARHAGAVAAPTASLHFDDALLAELAGMGVTFSHVTLHVGAGTFLPVKVEDVTTHKMHAEWGEVSAEAAADIAATRAAGGRVIPVGTTALRLIETAARATGEIAPWQGETDIFIYPGFEFRVTDALMTNFHLPKSTLMMLVSALVGQDRLREIYRHAVTENYRFFSYGDASLLIPR

SEQ ID NO: 71635 - protein, 362 aa, Roseovarius mucosus
  misc_feature (1)..(362): tr|A0A0A0HJT4|A0A0A0HJT4_9RHOB S-adenosylmethionine:tRN A ribosyltransferase-isomerase OS=Roseovarius mucosus D SM 17069 OX=1288298 GN=queA PE=3 SV=1
MKLSDFDFDLPEALIATRPARPRRAARLLVAEGGAITDAGVADLGRWLRPGDRLVLNDTRVIPARLSGLRHRSGAQGDTAAKIEVTLLEPGAEGTWGALIKPLKKINEGEEIVFSDRLSAVLEAKDEGQGRLRFNLKGDDFDAVLAEAGAMPLPPYIAARRPADEQDKVDYQTVWARAPGAVAAPTASLHFDEALLAELAAMGVGFTHVTLHVGAGTFLPVKVEDVTTHRMHAEWGEVSAKAAAEIAATRATGGRIIPVGTTALRLIETAARATGEIAAWSGDTDIFIYPGFEFRVTDALMTNFHLPKSTLMMLVSALMGQDTIRHVYAHAVAERYRFFSYGDASLLIPMAKPDRRDAQATG

SEQ ID NO: 71636 - protein, 362 aa, Roseovarius mucosus
  misc_feature (1)..(362): tr|A0A1V0RKZ9|A0A1V0RKZ9_9RHOB S-adenosylmethionine:tRN A ribosyltransferase-isomerase OS=Roseovarius mucosus O X=215743 GN=queA PE=3 SV=1
MKLSDFDFDLPEALIATRPARPRRAARLLVAEGEGITDAGVADLGRWLRPGDRLVLNDTRVIPARLSGLRHRSGAQGDTAAKIEVTLLEPGADGSWGALIKPLKKVSEGEEIVFSERLSAVLLAKEEGQGRLRFNLVGDDFDAALAEAGAMPLPPYIAARRPADEQDKVDYQTVWARAPGAVAAPTASLHFDEALLAELAALGVGFSHVTLHVGAGTFLPVKVEDVTTHRMHAEWGEVSAKAAAEMAATRAAGGRIIPVGTTALRLIETAARATGEIAAWSGDTDIFIYPGFEFRVADALMTNFHLPKSTLMMLVSALMGQDTIRRIYAHAVAARYRFFSYGDASLLIPAAKADRRGAQGTE

SEQ ID NO: 71637 - protein, 350 aa, Roseovarius nanhaiticus
  misc_feature (1)..(350): tr|A0A1N7G648|A0A1N7G648_9RHOB S-adenosylmethionine:tRN A ribosyltransferase-isomerase OS=Roseovarius nanhaitic us OX=573024 GN=queA PE=3 SV=1
MQLSDFDYHLPEDLIAVRPVRPRSAARLLVASGDDLSDAHVGDLPEWLRPGDRLILNDTRVIPARLSGLRRRSGAQGDTEARIEVTLLEPRSDGAWSALIKPLKKLREGEVVTFSEQFSATLIAKEDGQGALEFNLTGDDFDAALAEAGAMPLPPYIAARRAADAADKDDYQTVWARHAGAVAAPTASLHFDAPLLDALGARGVAFTHVTLHVGAGTFLPVKVEDVTTHKMHAEWGEVTGKAAAEIAATRAAGGRIIPVGTTALRLIESAARATGAIQPWQGETDIFIYPGFEFRVTDALMTNFHLPKSTLMMLVSALMGQDAVRRIYAHAVDNRYRFFSYGDASLLIPR

SEQ ID NO: 71638 - protein, 348 aa, Roseovarius nubinhibens
  misc_feature (1)..(348): tr|A3SR54|A3SR54_ROSNI S-adenosylmethionine:tRNA ribosy ltransferase-isomerase OS=Roseovarius nubinhibens (stra in ATCC BAA-591 / DSM 15170 / ISM) OX=89187 GN=queA PE= 3 SV=1
MKLSDFDFDLPEELIATRPVRPRPAARLLVAEGAAIRDAHVRDLGQWLRPGDRLVLNDTKVIPARLSGLRHREGSEAGARIEVTLLEPDGQGQWGALIKPLKKLREGEVVAFAAGLSATLVAKSEGQGLLRFNLEGDDFDAALAEAGAMPLPPYIAAKRPADAQDHEDYQTVFARNKGAVAAPTASLHFDEALLAALRGQGVEMTHVTLHVGAGTFLPVKVEDVTTHKMHAEWGEVSEKAAAEIAATRAAGGRIIPVGTTALRLIETASRETGEIAPWQGETDIFIYPGFTFRATDALMTNFHLPKSTLMMLVSALMGKDRMARVYEHAIAEKYRFFSYGDASLLIPE

SEQ ID NO: 71639 - protein, 54 aa, Roseovarius nubinhibens
  misc_feature (1)..(54): tr|A0A348WDM2|A0A348WDM2_9RHOB S-adenosylmethionine:tRN A ribosyltransferase-isomerase (Fragment) OS=Roseovariu s nubinhibens OX=314263 GN=DCS45_12280 PE=3 SV=1
TDALMTNFHLPKSTLMMLVSALMGKDRMARVYEHAIAEKYRFFSYGDASLLIPE

SEQ ID NO: 71640 - protein, 350 aa, Roseovarius pacificus
  misc_feature (1)..(350): tr|A0A1M6XP88|A0A1M6XP88_9RHOB S-adenosylmethionine:tRN A ribosyltransferase-isomerase OS=Roseovarius pacificus OX=337701 GN=queA PE=3 SV=1
MKLSDFDFDLPEALIATRPARPRTSARLLVAEGDAITDAVVRDLGQWLRPGDRLILNDTAVIPARLSGARRRLGPEGETRAKIEVTLLEPGGDGTWTAMVKPLKKLREGEVVEFAAGLEAELLAREDGQARLRFNLEGAAFDAALAEAGAMPLPPYIAARRAADEQDKTDYQTVWARNPGAVAAPTASLHFDDALLAELREMGVAFSHVTLHVGAGTFLPVKVEDVTTHKMHAEWGEVSETAAAEIAATKAAGGRVIPVGTTALRLIESAARGTGQIAPWRGETDIFIYPGFEFRVTDALMTNFHLPRSTLMMLVSALMGPERIRAIYDHAVRGDYRFFSYGDASLLIPG

SEQ ID NO: 71641 - protein, 354 aa, Roseovarius sp.
  misc_feature (1)..(354): tr|A0A365TZE9|A0A365TZE9_9RHOB S-adenosylmethionine:tRN A ribosyltransferase-isomerase OS=Roseovarius sp. TE539 OX=2249812 GN=queA PE=3 SV=1
MKLSDFDFDLPERLIATRPVRPRSAARLLVAEGDMITDATVVDLGSWLRPGDRLILNDTKVIPARLSGERHRTGAAGKSVARMEVTLLEPGPDGDWRAMVKPLRKLHEGETVTFGAGLEATCVAKDHGQAILRFNLEGNDFDAALNAAGAMPLPPYIAARRAADAADQEDYQTVWARRAGAVAAPTASLHFDEALLADLAAQGIAFTHVTLHVGAGTFLPVQVEDVTTHRMHAEWGEVSATAAAEISATRAAGGRIIPVGTTALRLIETAARAAARANDGVTAWTGETDIFIYPGFDFRVTDALITNFHLPRSTLMMLVSALMGQGRVRRIYDHAIAREYRFFSYGDASLLIPP

SEQ ID NO: 71642 - protein, 356 aa, Roseovarius sp.
  misc_feature (1)..(356): tr|A0A246QTV8|A0A246QTV8_9RHOB S-adenosylmethionine:tRN A ribosyltransferase-isomerase OS=Roseovarius sp. 22II1 -1F6A OX=1317112 GN=queA PE=3 SV=1
MKLSDFDFDLPEDLIATRPARPRSSARLLVADGQVPGGPLRDAVVTDLPSFLRPGDRLILNNTRVIPARLSGLRHRDGAEGATAARIGITLLEPRGDGSWAALAKPAKKVRDGEDIVFAPGFSARVEGRAEGQVHLRFSVTGDDFDAALAQAGAMPLPPYIAAKRPADEADHTDYQTVFARHSGAVAAPTASLHFDQPLLERIAAMGVDFSEVTLHVGAGTFLPVKVDDVTTHRMHAEWGEVGAQAAAEINATRAAGGRIIPVGTTALRLIESAATPEGRMKPWDGETDIFIYPGYEFRIADGLMTNFHLPKSTLMMLVSALMGQARMREVYDHAIAERYRFFSYGDSSLLLPGGV

SEQ ID NO: 71643 - protein, 362 aa, Roseovarius tolerans
  misc_feature (1)..(362): tr|A0A0L6CWS1|A0A0L6CWS1_9RHOB S-adenosylmethionine:tRN A ribosyltransferase-isomerase OS=Roseovarius tolerans OX=74031 GN=queA PE=3 SV=1
MKLTDFDFDLPQTLIATRPARPRRSARLLVAQGEVIHDARVTDLGHWLRPGDRLVLNDTKVIPARLSGRRHRHGAPGEGAAKIEVTLLEPGADGTWSALIKPLRKVREGEDIVFSDALSAVLVAKDEGQGRLRFNLTGDDFDAALDAAGAMPLPPYIAAKRPADAQDREDYQTVWARNAGAVAAPTASLHFDEVVLDDLRARGVTFTHVTLHVGAGTFLPVKVEDVTSHKMHAEWGEVSAQAAAEIAETRAAGGRIIPVGTTALRLIETAARATGDIVPWQGDTDIFIYPGFEFRVTDALMTNFHLPKSTLMMLVSALMGPDEIRRIYAHAVAQGYRFFSYGDASLLIPAPNPDRRDTSATD

SEQ ID NO: 71644 - protein, 362 aa, Roseovarius tolerans
  misc_feature (1)..(362): tr|A0A1H7UVB8|A0A1H7UVB8_9RHOB S-adenosylmethionine:tRN A ribosyltransferase-isomerase OS=Roseovarius tolerans OX=74031 GN=queA PE=3 SV=1
MKLTDFDFDLPQTLIATRPARPRRSARLLVAQGEVIHDARVTDLGHLLQPGDRLVLNDTKVIPARLSGRRHRHGAPGEGAAKIEVTLLEPGADGTWSALIKPLRKVREGEDIVFSDALSAVLVAKGEGQGRLRFNLTGDDFDAALDAAGAMPLPPYIAAKRPADAQDREDYQTVWARNAGAVAAPTASLHFDEVVLDDLRARGVTFTHVTLHVGAGTFLPVKVEDVTSHKMHAEWGEVSAQAAAEIAETRAAGGRIIPVGTTALRLIETAARATGEIVPWQGDTDIFIYPGFEFRVTDALMTNFHLPKSTLMMLVSALMGQDEIRRIYAHAVAQGYRFFSYGDASLLIPAPNPDRRDTSATD

SEQ ID NO: 71645 - protein, 356 aa, Rouxiella badensis
  misc_feature (1)..(356): tr|A0A1X0WJE5|A0A1X0WJE5_9GAMM S-adenosylmethionine:tRN A ribosyltransferase-isomerase OS=Rouxiella badensis OX =1646377 GN=queA PE=3 SV=1
MRVADFTFELPESLIARYPQSQRSGCRLLSLDGPTGELTHGIFTDVLDKLNPGDLLVFNNTRVIPARVFGRKASGGKIEVLVERVLDSHRVLAHVRASKAPKPGAELLLGDAENIKATMVARHDTLFELEFNEDKDVFTLLDEIGHMPLPPYIDRPDEDADRELYQTVYSERLGAVAAPTAGLHFDRPLMDALKEKGVELAFVTLHVGAGTFQPVRVETIEKHVMHAEYAEVPQEVVDAVLACKARGNRVVAVGTTSVRSLESAANACKDGLIAPFYGDTSIFIFPGYEYQVIDVLITNFHLPESTLIMLVSAFAGYKNTINAYHQAVAEEYRFFSYGDAMFIHRNPLAPQEVVGE

SEQ ID NO: 71646 - protein, 356 aa, Rouxiella silvae
  misc_feature (1)..(356): tr|A0A1X0W6G5|A0A1X0W6G5_9GAMM S-adenosylmethionine:tRN A ribosyltransferase-isomerase OS=Rouxiella silvae OX=1 646373 GN=queA PE=3 SV=1
MRVADFTFELPESLIARYPQSQRSGCRLLSLDGPTGELTHGIFTDVLDKLNPGDLLVFNNTRVIPARVFGRKASGGKIEVLVERVLDSTRVLAHVRASKSPKAGAELLLGDAENIKATMVARHDTLFELEFNEDRDVFTLLDEIGHMPLPPYIDRPDEDADRELYQTVYSERLGAVAAPTAGLHFDQPLMDALKEKGIEFAFVTLHVGAGTFQPVRVDTIEEHIMHAEYAEVPQEVVDAVLACKARGNRVIAVGTTSVRSLESAAKASEDALIAPFFGDTSIFIYPGYEYQVIDVLITNFHLPESTLIMLVSAFAGYKNTLNAYHQAVAEEYRFFSYGDAMFINRNLLAPQEVVGQ

SEQ ID NO: 71647 - protein, 347 aa, Rubellimicrobium mesophilum
  misc_feature (1)..(347): tr|A0A017HMS7|A0A017HMS7_9RHOB S-adenosylmethionine:tRN A ribosyltransferase-isomerase OS=Rubellimicrobium meso philum DSM 19309 OX=442562 GN=queA PE=3 SV=1
MKLSDFDFDLPPDRIATRPARPRSSARLLVAGPSTIEDLRVSDLPEVLRPGDRLVLNDTKVIPARLTGTRRRGEAVARIEATLLSDRGEGLWTALLKPLRKVREGEAIDFGQGLSATFEGREGEEGLLRFTLSPEAFAVALAQAGRMPLPPYIEALRPPDEQDREDYQTVWATREGAVAAPTASLHFDEPLLDALRKRGIAFTHVTLHVGAGTFLPVKVDDIAEHKMHAEWGEVTEAAAEQIAATKREGGRVIPVGTTALRLIESAARGGAIAPWRGETDIFITPGFEFQVTDGLMTNFHLPRSTLMMLVSAVLGLDRIREVYDHAIAVGYRFFSYGDASLLLPKGR

SEQ ID NO: 71648 - protein, 347 aa, Rubellimicrobium roseum
  misc_feature (1)..(347): tr|A0A5C4N9U3|A0A5C4N9U3_9RHOB S-adenosylmethionine:tRN A ribosyltransferase-isomerase OS=Rubellimicrobium rose um OX=687525 GN=queA PE=3 SV=1
MKLSDFDFDLPDGLIATRPARPRSSARLLVAGPEAIDDLHVFDLPEVLRPGDRLVLNDTRVIPARLQGHRRRGEAEARIEATLLTDRGEGLWAALLKPLRKVKEGEVIDFGGGLSATFEGSEEGQGLLRFALSPDAFSEALAQAGRMPLPPYIEALRFPDAQDREDYQTVWARREGAVAAPTASLHFDEPLLARLREKGVEFTHVTLHVGAGTFLPVKVDDIREHRMHAEWGEVTEEAAAGISATRAAGGRVIPVGTTALRLIETAAREGAIRPWRGDTDIFITPGFPFRVADGLMTNFHLPKSTLMMLVSAFLGVERIRQVYAHAIAARYRFFSYGDASLLLPEGR

SEQ ID NO: 71649 - protein, 347 aa, Rubellimicrobium sp.
  misc_feature (1)..(347): tr|A0A5C4N2T0|A0A5C4N2T0_9RHOB S-adenosylmethionine:tRN A ribosyltransferase-isomerase OS=Rubellimicrobium sp. YIM 131921 OX=2585369 GN=queA PE=3 SV=1
MKLSDFDFDLPEELIATRPARPRSSARLLVAGPERIDDMHVSDLPRVLRPGDRLVLNDTKVIPARLTGTRRRGSAEARIEATLLSDRGEGLWSALLKPLRKVREGESIDFGEGLSATLESVEAGQGLLRFALSPDAFAEALARAGRMPLPPYIEALRAADHHDRDDYQTVWAARSGAVAAPTASLHFDEPLLKDLRACGVAFTHVTLHVGAGTFLPVKVDDIRDHRMHAEWGEVTEAAAQEIASTKDEGGRVIPVGTTALRLLESAVQAGTIGPWQGETDIFITPGFKFQVADGLMTNFHLPKSTLMMLVSALLGIERIRSVYAHAIERQYRFFSYGDASLLLPKGR

SEQ ID NO: 71650 - protein, 349 aa, Rubellimicrobium thermophilum
  misc_feature (1)..(349): tr|S9QMR1|S9QMR1_9RHOB S-adenosylmethionine:tRNA ribosy ltransferase-isomerase OS=Rubellimicrobium thermophilum DSM 16684 OX=1123069 GN=queA PE=3 SV=1
MKLSDFDFDLPDGLIATRPARPRSSARLLVATPDELLDRRVWDLPGLLRPGDLLVLNDTKVIPARLRGLRRRGEAAARIEATLLSDRGGGLWMALVRPLRKLREGEVIDFGEGLSATFEGVEEGQARLRFALSPDAFAEALARAGSMPLPPYIEALRPADEADREDYQTVWAAREGAVAAPTASLHFDADLLRSLEAAGIGFVHVTLHVGAGTFLPVKVDDIRDHRMHAEWGEVTEAAAAIIRAARAEGRRVIAVGTTAMRLLETAARAGRGEVVPWQGETDIFITPGFDFRACDGLMTNFHLPRSTLMMLVSAFLGIDRIREVYDHAIREGYRFFSYGDASLLLPGGR

SEQ ID NO: 71651 - protein, 364 aa, Rubidibacter lacunae
  misc_feature (1)..(364): tr|U5DE05|U5DE05_9CHRO S-adenosylmethionine:tRNA ribosy ltransferase-isomerase OS=Rubidibacter lacunae KORDI 51 -2 OX=582515 GN=queA PE=3 SV=1
MHDADRQLASYNYELPPEQIAQVPLTPRDSSRLLVLPSPTERVHAHFHTLPDWLQANDLLVLNDTRVLPARLYGRKSTGTMVEVLLLEQQGPEKWLALVKPGRRLPTGSAIAFNPPDAGLQATVVDRDESTGGRVLHFTVPDGRSFEEVLAQCGRVPLPPYVKSTAARPEQYQTVYAQRVGAIAAPTAGLHFTEDLLQRLGARGIQQARVTLHVGLGTFRPVETDDITAHAMHSEWLEVPAATVEQIERARSNGGRIIAVGTTVVRALEGAAAEGGQLVPFSGKTNLFIFPGYQPRVVDGLITNFHLPKSSLLMLVSAFIGRPRLLSLYEEAIAQGYRFYSFGDAMAILPAATLQESTPHDVVD

SEQ ID NO: 71652 - protein, 354 aa, Rubinisphaera brasiliensis
  misc_feature (1)..(354): tr|F0SPY5|F0SPY5_RUBBR S-adenosylmethionine:tRNA ribosy ltransferase-isomerase OS=Rubinisphaera brasiliensis (s train ATCC 49424 / DSM 5305 / JCM 21570 / NBRC 103401 / IFAM 1448) OX=756272 GN=queA PE=3 SV=1
MTDLNSIEAYDYHLPEELIAQHPVEPRDHSRLLVYRRADQSIVHRRFHNLPEYLRANDCLIWNQTRVVPARLYGRRAETGGKWEGLFLKLLADGDWEIIGQTRGKLKAGEFLEIPHPGSEDVLQLKLIERREGGCWIARPETNGEVSPWDLLDQFGSIPLPPYIQDGHASEADRERYQTVYAQTPGAVAAPTAGLHFTPELIERCQAAGVDCSSVTLHVGLGTFRPVSVDNLDAHQMHREWCEVTSETVGQLQRCYEAGGRRIAVGTTTVRTLETASRESGQLQPWDGESDLFIRPGYQFRSTDGLITNFHLPKSTLLIMLSAMVGREEILRIYEEAISEQYRFYSYGDAMLIL

SEQ ID NO: 71653 - protein, 355 aa, Rubinisphaera sp.
  misc_feature (1)..(355): tr|A0A2E9VW52|A0A2E9VW52_9PLAN S-adenosylmethionine:tRN A ribosyltransferase-isomerase OS=Rubinisphaera sp. OX= 2024857 GN=queA PE=3 SV=1
MVDLNLITSYAYDLPEELIAQSPAEKRDQSRLLVFNRKTGERTHAHFFNLLDYLQPSDCLVVNRTKVVPARLRGIRDQTGGKWEGLFLGLDSEQTWEIIGKTRGKLQPGETITVVNDEGSNRLQLEFIARKDEGRWQVRPVQSEDDTRTHWELLEAVGSVPLPPYIQHGHAQADDRERYQTVYANQPGAAAAPTAGLHFTPELLDQCREKGVTIAEVTLHVGLGTFRPIGVEKLDEHTMHAEWCEVQDETVQQIQHCRENNGRVVAVGTTTVRTLETASQSGTLQPWQGESTLFIRPGFKFHVVDALITNFHLPHSTLLVMLSAFTGYEEIMETYRIAVEERYRFFSYGDAMLIL

SEQ ID NO: 71654 - protein, 359 aa, Rubneribacter badeniensis
  misc_feature (1)..(359): tr|A0A2K2U7M1|A0A2K2U7M1_9ACTN S-adenosylmethionine:tRN A ribosyltransferase-isomerase OS=Rubneribacter badenie nsis OX=2070688 GN=queA PE=3 SV=1
MLTSDFDYDLPPELIAQEPAPDRDGCRLLVMDRATGALEDRVFRDIVDYLHPGDVLVANETRVMPARLIGKKRGTGGAAEVFLLRQHGTPTQNRSALWEVLVRPGKRLKPGSGAVVDFADAAGNTVLSAEVVDWAQNAQKGERVARLSTTLPSLDEALHAVGRTPLPPYIKDYAGDEELYQTVYSRRESSAAAPTAGLHFTPALIDRLREKGVGWETVELEVGLDTFRIVDEDDPERHVIHTEFYTVGQRTADAVNEARERGGRVVAVGTTSVRSLESAWDAEAGRLVPKDREATSLYILPGYEFHAVDALITNFHVPRSTLMMLVSAFSTRDNIMAAYAHAVAERYRMLSFGDAMLIG

SEQ ID NO: 71655 - protein, 359 aa, Rubricoccus marinus
  misc_feature (1)..(359): tr|A0A259TZZ2|A0A259TZZ2_9BACT S-adenosylmethionine:tRN A ribosyltransferase-isomerase OS=Rubricoccus marinus O X=716817 GN=queA PE=3 SV=1
MADALAPYDFDLPDALIAQRPAEQRDGSRMLVLHRTSGEIEDRHVTDLPEYLASGDALVFNDTRVMAARLLGHRPTGGKAELFLIERREDGLWRALAKPGRKLREGAEVWLGGESGDAGSGARGLRAEVVGVEDDGKRLVRFTRGGGPLAEAEEREALDEIGQLPLPPYIARPTDRADRERYQTIFARESGAVAAPTAGLHFTDTLLGRLEAGGVGRVHVTLHVGYGTFEPVKAEDLADHRVAAERIAVTPEASGALNRVRAAGGRIVAVGTTSTRTLETSADASGTFYPASGATDLTVTPGYTFTGVDALLTNFHLPKSSLLVLTSTFGGRENVMRAYRHAVAERYRFYSYGDCMLIL

SEQ ID NO: 71656 - protein, 363 aa, Rubricoccus marinus
  misc_feature (1)..(363): tr|A0A259U0A4|A0A259U0A4_9BACT S-adenosylmethionine:tRN A ribosyltransferase-isomerase OS=Rubricoccus marinus O X=716817 GN=queA PE=3 SV=1
MRLAPASNLLRHTAPTRLTDFDFDFPRELVAAYPAEPRDSTRLMVVDRAERTIEHKTMVDLPDYFGTGDVLVANDTQVFPARLRGYKDKTEAKVEVFLLRELNPEQRLWDTIVDPARKVRVGNKLVFQDGLEAEVLDNTTSRGRTLRFIFDGSPEALHAHIDRIGETPIPPYLRRPAEAADKVRYQTIFARNRGAVAAPTAGLHFTPELISALEAKGTAVTSVTLHKGLGSFRPVDVEDLSKHRMDAEKIVVTPEATEIVNAALTSNDRTVTACGLTVIRAMESSLSAERTLKAVEGWTDKFILEPYDFLITERLLCNFQRPRSTLLMMKAAFMGHDLLRAAYDEAVKEEYRLFSFGDAMLIL

SEQ ID NO: 71657 - protein, 365 aa, Rubrimonas cliftonensis
  misc_feature (1)..(365): tr|A0A1H3X3I1|A0A1H3X3I1_9RHOB S-adenosylmethionine:tRN A ribosyltransferase-isomerase OS=Rubrimonas cliftonens is OX=89524 GN=queA PE=3 SV=1
MRVSDFDFVLPESLIALRPARPRRAARLLAARGAAPGDPLDDRAVEDLPRLLAPGDLLVLNDTRVIPARLRGERRRETSDGSGVARIETTLAARAAPDVWRALARPARRLRPGDSLAFVPWEEDCGAGAPALSATILSLDGGEATLRFDRSGPDLDAAVAVIGAPPLPPYIESRRQPDARDRADYQTVFARRDGSVAAPTAALHFDAEVLAALKARGVLTASVTLHVGPGTFLPVRADNVLDHRMHAEWGEISPEAAAAINAARAAGGRVIAVGTTALRLLESAAEQDGRVAPWRGETDIFITPGYQLRAVDGLMTNFHLPRSTLFMLVCALMGAARMQEVYAHAIASGYRFYSYGDSSLLLPRG

SEQ ID NO: 71658 - protein, 362 aa, Rubripirellula obstinata
  misc_feature (1)..(362): tr|A0A5B1CC82|A0A5B1CC82_9PLAN S-adenosylmethionine:tRN A ribosyltransferase-isomerase OS=Rubripirellula obstin ata OX=406547 GN=queA PE=3 SV=1
MTESQANEIDQYDYDLPPELIAQSPMSNRADARLMLVDRSTGSIDHYHIRDLPELLSAGDTLVMNNSRVIPARLVGYRSETGGRWQGLFLRSDDETGLWEILTKTRGKLQAGETITVRDRDARDGMLLTVVTRTDDGKLLVKPSTPEDMEETFASPADWLHRFGRVPIPPYIRDGQMVDADVVDYQTVYAKSDGSVAAPTAGLHFTKSLLEKVRAAGVGTAEVTLHVGIGTFRPIATERLDEHQMHSEWGQIDEPTVQEITTRRTRGRTIAVGTTSVRVLESAAAAGGGVLKPWTGETNLFIQPGFKFNAIDGLLTNFHLPKSSLLVLISALAGRELALKAYRVAIENEYRFYSYGDAMLIV

SEQ ID NO: 71659 - protein, 326 aa, Rubritalea profundi
  misc_feature (1)..(326): tr|A0A2S7TYX6|A0A2S7TYX6_9BACT S-adenosylmethionine:tRN A ribosyltransferase-isomerase OS=Rubritalea profundi O X=1658618 GN=queA PE=3 SV=1
MSLRTDDFDFHLPEELIANRPLVDRVGSRMLVIHRDSGKIEHRQFSDIHEYFTPDDLLVLNNTKVIPARVFSNDKAIELVVTDRPSPQLWQCMVRPGKKMKPGRTVEVGDAIGTVIEILENGNRLIQWDKFVDIHQHGSLALPHYMGRDSDHADLDRYQTVFAEEEGAIAAPTAGLHFTPEVLSEIDHAFLTLHVGIGTFRPVKAELIEDHEMHSERYSVSHDTADRINQAKRVTAVGTTCTRVLESLGRESNTLGESKGETDIFIYPGFEFKVVDRLLTNFHLPKSTLIMLVSAFAGKKLTLKAYKEAVKNEYRFYSYGDCMLIL

SEQ ID NO: 71660 - protein, 325 aa, Rubritalea squalenifaciens
  misc_feature (1)..(325): tr|A0A1M6KRH7|A0A1M6KRH7_9BACT S-adenosylmethionine:tRN A ribosyltransferase-isomerase OS=Rubritalea squalenifa ciens DSM 18772 OX=1123071 GN=queA PE=3 SV=1
MLRTDDFDYHLPEELIASQPLENRIGSRMLVLHRDTQTIEHRQFSDLHEYFTPEDLLVLNNTKVIPARVFSNDGKIELVVVDRQSATQWTCMVRPGKKMKPGRTVEVGESTGTVLETLPDGNRIIEWDKPVDLDTYGKLALPHYMGRDAEPEDRDRYQTTFAKEEGAIAAPTAGLHFTPDYLEKFPHTFLTLHVGIGTFRPVMAEFITDHKMHAERYYLSKESAKTINKAKSVTAVGTTVTRVLESLGRKQNLLTEAEGETDIFINPGFEFKQVDRLLTNFHLPKSTLIMLVSAFAGRDFTLRAYKEAVENRYRFFSYGDCMLIL

SEQ ID NO: 71661 - protein, 360 aa, Rubrivirga marina
  misc_feature (1)..(360): tr|A0A271J0H0|A0A271J0H0_9BACT S-adenosylmethionine:tRN A ribosyltransferase-isomerase OS=Rubrivirga marina OX= 1196024 GN=queA PE=3 SV=1
MQVAHPSFRQHSLRLSDFDYEYPRELIAAYPAEPRDTARLMVVDRAEGTIEHRTVRDLPEYFNEGDVLVANDTMVFPARLRGIKENTGAKVEAFLLRELNPEHRLWDSIVDPARKVRVGNKLVFGDGLAAEVIDNTTSRGRTLRFMFDGTPDELYARIDAIGETPIPPYLRRPAEPADRVRYQTIFARKRGAVAAPSAGLHFTPGLLQSLTDQGCEVAYVTLHTGLGSFNPVEVEDLSKHRMDSEFFEVLPEAAETVNAALTHPERTVTACGTTVVRAVESSLSASKTLKAGRGWTDKFIYPVYSFHIPERLLTNFHRPKSTLLMTVAAFAGYDLLMEAYEEAVREEYRMFAFGDAMLVL

SEQ ID NO: 71662 - protein, 350 aa, Rubrivirga marina
  misc_feature (1)..(350): tr|A0A271J394|A0A271J394_9BACT S-adenosylmethionine:tRN A ribosyltransferase-isomerase OS=Rubrivirga marina OX= 1196024 GN=queA PE=3 SV=1
MPDSLAPYDFDLPDGLIAQRPAERRDASRMLVLHRGTGAVEDRQFADLGEFLDPGDALVFNDTRVVPARLVGRRPTGGRAELFLVERAEDGTWSALAKPGRKLTAGAEVLFDEHLGARVEAVEESGRRRVRLLRDGHPFETVEAEEVAIEQIGRMPLPPYVDREADAADRERYQTVFARKRGAIAAPTAGLHFTPGTVEALREQGVVTAEVTLHVGYGTFEPVRADDLREHRVAPERIEVSPATADALNGVRQSGGRVVAVGTTSTRALETSADDAGRFHPVAGPTDLTVTPGYRFRAVDALLTNFHLPKSSLLVLTATFGGLGPVMEAYRHAVREGYRFYSYGDCMLIV

SEQ ID NO: 71663 - protein, 360 aa, Rubrivirga sp.
  misc_feature (1)..(360): tr|A0A271ISR9|A0A271ISR9_9BACT S-adenosylmethionine:tRN A ribosyltransferase-isomerase OS=Rubrivirga sp. SAORIC 476 OX=1961794 GN=queA PE=3 SV=1
MQVAHHSFRQHALRLSDFGFEYPKGLVAAYPAEPRDSARLMVVDRASGTIEHRTVRDLPEYFGAGDVFVANDTMVFPARLRGIKENTGAKIEAFLLRELNSEHRLWDSIVDPARKVRVGNKLVFSDTLAAEVIDNTTSRGRTLRFMFDGSPEALYEAIDAIGETPIPPYLRRKAEPADRVRYQTLFARRRGAVAAPTAGLHFTPDLLQAMTDKGCEVANVTLHLGLGSFQPVEVEDLSKHRMDSEYFEVRPEAVERVNRAMADPDATVTACGTTVLRAMESTLSAAKTLKVGRGWTDKFIYPIHTFHIADRLLTNFHRPRSPRMMMVAAYMGYELLVEAYETAIREEYRLFSFGDAMLVL

SEQ ID NO: 71664 - protein, 349 aa, Rubrivirga sp.
  misc_feature (1)..(349): tr|A0A271JAV1|A0A271JAV1_9BACT S-adenosylmethionine:tRN A ribosyltransferase-isomerase OS=Rubrivirga sp. SAORIC 476 OX=1961794 GN=queA PE=3 SV=1
MPHALADYAFDLPDGLIAQRPAERRDGSRMLVLHRATGALEDARFADLGRYLEPGDALVFNDTRVVPARLVGKRPTGGRAELFLVEKAADGTWSALARPGRRLTAGGEVVFGDGLTAVIEGVEDSGRRRIRILRDGEPLDAAAEEAALEAIGRMPLPPYVDREADATDRERYQTVYARTPGAVAAPTAGLHFTPGTVDGLREAGVVTAEVTLHVGYGTFEPVRAEDLRDHRVAAERIEVSATTAATLNDVRAARGRIVAVGTTSTRALETAADAEGRFHPVSGPTDLTVTPGYRFRAIDGLLTNFHLPSSSLLVLTATFGGREAVMAAYRHAVREGYRFYSYGDCMLIL

SEQ ID NO: 71665 - protein, 344 aa, Rubrivivax benzoatilyticus
  misc_feature (1)..(344): tr|F3LMZ1|F3LMZ1_9BURK S-adenosylmethionine:tRNA ribosy ltransferase-isomerase OS=Rubrivivax benzoatilyticus JA 2 = ATCC BAA-35 OX=987059 GN=queA PE=3 SV=1
MTSYALSDFDFPLPPELIAQHPAPERSASRLLDGRGALPVDRVFRELPQLLAPGDLLVFNDTRVIKARLHGEKPTGGSVEALVERVLGGHEVLAHLRASKSPRPGTTVRFADAFDAEVLGRDGVDGSLFHLRLPDDPFVLLERHGHVPLPPYITHEDAAEDVERYQTVFAARPGAVAAPTASLHFDAGVLAALDARGVKRAAVTLHVGAGTFQPVRAENLDEHRMHRERWEVDAATVEAIRETRARGGRIVAAGTTTLRALESAAIGGALEAGAGDTDLFIRPGFEFRVVDLLVTNFHLPKSTLLMLVSAFTGFEHMHALYRHAVEARYRFFSYGDAMLLERRA

SEQ ID NO: 71666 - protein, 344 aa, Rubrivivax gelatinosus
  misc_feature (1)..(344): tr|A0A4R2MMM1|A0A4R2MMM1_RUBGE S-adenosylmethionine:tRN A ribosyltransferase-isomerase OS=Rubrivivax gelatinosu s OX=28068 GN=queA PE=3 SV=1
MTAYSLSDFDFPLPPELIAQHPAPERSASRLLDGRGALPVDRVFRELPQLLAPGDLLVFNDTRVIKARLHGEKPTGGSVEALVERVLGGHEVLAHLRASKSPRPGTTVRFADAFDAEVLGRDGVDGSLFHLRFPDDPFVLLERHGHVPLPPYITHEDAAEDVERYQTVFAARPGAVAAPTASLHFDAGVLAALDARGVKRAAVTLHVGAGTFQPVRAENLDEHRMHHERWEVDAATVEAIRETRARGGRIVAAGTTTLRALESAAIGGALEAGAGDTDLFIRPGFEFRVVDLLVTNFHLPKSTLLMLVSAFTGFEHMHALYRHAVEARYRFFSYGDAMLLERRA

SEQ ID NO: 71667 - protein, 344 aa, Rubrivivax gelatinosus
  misc_feature (1)..(344): tr|I0HKA7|I0HKA7_RUBGI S-adenosylmethionine:tRNA ribosy ltransferase-isomerase OS=Rubrivivax gelatinosus (strai n NBRC 100245 / IL144) OX=983917 GN=queA PE=3 SV=1
MTSYSLSDFDFPLPPELIAQHPAPERSASRLLDGRGALPVDRVFRELPQLLAPGDLLVFNDTRVIKARLHGEKPTGGSVEALVERVLGGHEVLAHLRASKSPRPGTTVRFADAFDAEVLGRDGVDGSLFHLRFPDDPFVLLERHGHVPLPPYITHEDAAEDVERYQTVFAARPGAVAAPTASLHFDAGVLAALDARGVKRAAVTLHVGAGTFQPVRAENLDEHRMHRERWEVDAATVEAIRETRARGGRIVAAGTTTLRALESAAIGGALEAGAGDTDLFIRPGFEFRVVDLLVTNFHLPKSTLLMLVSAFTGFEHMHALYRHAVEARYRFFSYGDAMLLERRA

SEQ ID NO: 71668 - protein, 365 aa, Rubrivivax sp.
  misc_feature (1)..(365): tr|A0A1E4IFF5|A0A1E4IFF5_9BURK S-adenosylmethionine:tRN A ribosyltransferase-isomerase OS=Rubrivivax sp. SCN 71 -131 OX=1660138 GN=queA PE=3 SV=1
MHEAPDYTLADFDFVLPPELIAQHPAAERSGARLLDGRGALPVDRLVRDLPALLQAGDLMVFNDTRVIKARLFGRKESGGAVEALVERILPGHEVQAHLRASKSPRPGSRVRFAEAFDAEVLGRAGPEGELFQLRFPHDPLALLQQHGHVPLPPYIRHADAPEDESRYQTVFAARPGAVAAPTAALHFDEPLLQQLAARGVRRTQVTLHVGAGTFQRVRVQRIAEHRMHREWFEVGADAVAAIEATRAAGARIVVVGTTALRALESAARGGSLRPATGETDIFITPGFAFRVADLLLTNFHLPRSTLLILVSAFAGFERIRELYRHAVASRYRFFSYGDAMLLQRRALHRPQDSEDDSACSSSNC

SEQ ID NO: 71669 - protein, 352 aa, Rubrivivax sp.
  misc_feature (1)..(352): tr|A0A520C4Q2|A0A520C4Q2_9BURK S-adenosylmethionine:tRN A ribosyltransferase-isomerase OS=Rubrivivax sp. OX=502 59 GN=queA PE=3 SV=1
MPELTVADFDFDLPPELIAQHPAPERSASRLLDATGNEPVDRVFRELPGLLSPGDLLVFNNTRVIKARLYGIKSTGGSVEALVERVLPGTREVWMHLRASKSPKPGGRIRFADAFDAEVLGRCGPDNGLFHLRFAGDPFALLEAHGHVPLPPYIAHADDADDERRYQTVFAKEPGAVAAPTAALHFDEALLASLAERGVGQAHVTLHVGAGTFQPVRVDRLAEHKMHSEWFEVPQSTVDAIAACHDRGGRVVAVGTTTLRALESAAVGGTLQAGARETDIFITPGFEFRVVDRLVTNFHLPKSTLMMLVSALAGHAQVMALYRHAIAQRYRFFSYGDAMLLDRVTTRQECVR

SEQ ID NO: 71670 - protein, 353 aa, Rubrobacter radiotolerans
  misc_feature (1)..(353): tr|A0A023X3I8|A0A023X3I8_9ACTN S-adenosylmethionine:tRN A ribosyltransferase-isomerase OS=Rubrobacter radiotole rans OX=42256 GN=queA PE=3 SV=1
MKTSDLDYELPEALIAQRPVSPRDASRLMVLDAASGEISHKVFRDLPTYLRSGDALVVNETAVIPARLEARRPGGGSVELLFLRERPEAGGWEALARLSKRLRPGMRLAVGEEDGEELEVLGSVGDGRWTLRVAGGADDVLRLLERHGRAPLPPYIQAGGEAGREVESRYTTVYARTPGSAAAPTAGFHFTEGTLEACRSAGADLARVTLHVGVGTFTPVRTENLTEHRMHAEFYSVPQSAARVVDGARRVVAVGTTVARTLESRAASGLDSGDSELFVYPGYRWRAVDALITNFHLPRSTLLAMVMSFGGEEFVREAYRVAVRERYRFYSFGDAMLILNGGRSSGSATGTAR

SEQ ID NO: 71671 - protein, 333 aa, Rubrobacter taiwanensis
  misc_feature (1)..(333): tr|A0A4R1BHP6|A0A4R1BHP6_9ACTN S-adenosylmethionine:tRN A ribosyltransferase-isomerase OS=Rubrobacter taiwanens is OX=185139 GN=queA PE=3 SV=1
MRISELDYHLPKDLIAQRPAEPRDSSRLMVVDAKNGKIEHRTFRDLPEYLHPGDAVVLNETRVLPARLFARKPTGGEVELLFLRDTGNGWEVLARPGRRLQEGMTLSANGRPLELARRLGEGKWLVRAENVPRLLEERGHMPLPPYIRPTPEAERSYQTVYARRPGSAAAPTAGFHFTRRTLEEVERAGAELVRVTLHVGTGTFLPVRTEKIEEHRMHAEYYSVPEAAAASIERAERVVAVGTTVARTLESWAQSGEREGETEIYIYPGYRWRAVDALITNFHLPRSTLLAMVMSFAGVELIREAYRVAVEERYRFYSFGDAMLLLGGGRSLP

SEQ ID NO: 71672 - protein, 334 aa, Rubrobacter xylanophilus
  misc_feature (1)..(334): tr|A0A510HJI6|A0A510HJI6_9ACTN S-adenosylmethionine:tRN A ribosyltransferase-isomerase OS=Rubrobacter xylanophi lus OX=49319 GN=queA PE=3 SV=1
MRTDELDYELPQELIAQRPAEPRDASRLMVVDVPSRKISHHVFRELPGFLHPGDVLVLNETKVIPARLFASRPGGGEVELLFLGERGGVWEALARPSRRLRPGMRLFAGEGEPLEVVKELGEGRWLVRGRDVAGLLGRAGRMPLPPYIEPTPEAEASYQTVYARTPGSAAAPTAGFHFTERVLRGVEESGARIARVVLHVGLGTFAPVRVERLEDHRMHREYYAVPEETARAVEEAERVVAVGTTVVRTLESWARSGVREGESDLFIYPGYEWRAVDALITNFHLPRSTLLALVMSFAGKELVREAYEVAVSERYRFYSFGDAMLLVGGGRSLR

SEQ ID NO: 71673 - protein, 334 aa, Rubrobacter xylanophilus
  misc_feature (1)..(334): sp|Q1AWD5|QUEA_RUBXD S-adenosylmethionine:tRNA ribosylt ransferase-isomerase OS=Rubrobacter xylanophilus (strai n DSM 9941 / NBRC 16129) OX=266117 GN=queA PE=3 SV=1
MRTDELDYELPQELIAQRPAEPRDASRLMVVDVPSRGISHHVFRELPRFLGPGDVLVLNETKVIPARLFASRPGGGEVELLFLGERGGAWEALARPSRRLRPGMPLSAGEGERLEVVEELGEGRWLVRGRDVPGLLERAGRMPLPPYIEPTPEAEASYQTVYARTPGSAAAPTAGFHFTGRVLRGVEEAGARIARVVLHVGLGTFAPVREERLEDHRMHREYYAVPEETARAVEEAERVVAVGTTVVRTLESWARSGVREGESELFIYPGYEWRAVDALITNFHLPRSTLLALVMSFAGRELVREAYEVAVRERYRFYSFGDAMLLLGGGRSLR

SEQ ID NO: 71674 - protein, 353 aa, Ruegeria arenilitoris
  misc_feature (1)..(353): tr|A0A238JX44|A0A238JX44_9RHOB S-adenosylmethionine:tRN A ribosyltransferase-isomerase OS=Ruegeria arenilitoris OX=1173585 GN=queA PE=3 SV=1
MYGAAMKLSDFDFDLPDDLIATRPASPRSSARLLVAQGDAISDDRVFNLPDWLRPGDRLVLNDTRVIPARLSGRRHRDSAQGPVSAAIEATLLEPRADGTWGALLKPLKKIRVGEEIVFSDDLSAVLEGVADGQAHLRFNLKGDDFDRALEQAGAMPLPPYIAAKRPADDRDKTDYQTVWARQAGAVAAPTASLHFDEPLLQALADRGVEFTHVTLHVGAGTFLPVKVEDVTTHKMHAEWGQVSPQAAAEVQATKASGGRVIPVGTTALRLIESAARDGSIQPWEGETDIFIYPGFQFQVTDALMTNFHLPKSTLLMLVSALMGRDRMLRVYDHAIKSGYRFFSYGDASLLIP

SEQ ID NO: 71675 - protein, 348 aa, Ruegeria atlantica
  misc_feature (1)..(348): tr|A0A0P1F0N6|A0A0P1F0N6_9RHOB S-adenosylmethionine:tRN A ribosyltransferase-isomerase OS=Ruegeria atlantica OX =81569 GN=queA PE=3 SV=1
MKLSDFDFHLPEDRIATRPASPRSSARLLVAEGDAISDAHVFDLTDWLQPGDRLVLNDTRVIPARLNGRRHRNSAQGPVSAAIEATLLDPQADGTWAALIKPLKKVKLGEDIQFSDQLSATLERVEDGQAYLRFNLSGDDFDAALEQAGAMPLPPYIAAKRPADEQDKTDYQTIWARNSGAVAAPTASLHFDEALMQALGARGVAVTHVTLHVGAGTFLPVKVEDVTTHKMHAEWGSVSAAATQEIRETKAAGGRVIPVGTTALRLIESASRSGQIEPWEGETDIFIYPGFEFHVTDALMTNFHLPKSTLLMLVSALMGQERMRKVYAHAIEQKYRFFSYGDASLLIP

SEQ ID NO: 71676 - protein, 348 aa, Ruegeria atlantica
  misc_feature (1)..(348): tr|A0A0P1E708|A0A0P1E708_9RHOB S-adenosylmethionine:tRN A ribosyltransferase-isomerase OS=Ruegeria atlantica OX =81569 GN=queA PE=3 SV=1
MKLSDFDFHLPEDRIATRPASPRSSARLLVADGDMISDAHVFDLPDWLRPGDRLVLNDTRVIPARLNGRRHRNSAQGPVSAAIEATLLDPQADGTWAALIKPLKKVKLGEDIQFSDQLSATLERVEDGQAYLQFNLSGDDFDAALEQVGAMPLPPYIAAKRPADEQDKTDYQTIWARNSGAVAAPTASLHFDEALMQALGARGVAVTHVTLHVGAGTFLPVKVEDVTTHKMHAEWGNVSAAAAQEIRETKAAGGRVIPVGTTALRLIESASRSGQIKPWEGETDIFIYPGFQFHVTDALMTNFHLPKSTLLMLVSALMGQERMRKVYAHAIEQKYRFFSYGDASLLIP

SEQ ID NO: 71677 - protein, 360 aa, Ruegeria conchae
  misc_feature (1)..(360): tr|A0A497ZRL7|A0A497ZRL7_9RHOB S-adenosylmethionine:tRN A ribosyltransferase-isomerase OS=Ruegeria conchae OX=9 81384 GN=queA PE=3 SV=1
MAESIGPMYGAAMKLSDFDFHLPEHLIATRPASPRSSARLLLAQQDTIRDQRVHELPDILLPGDRLVLNDTRVIPARLNGHRHRSSAQGPVSAAIEATLLDPQSDGCWAALIKPLKKVKPGEEIVFSDDLSAILDRVADGQAFLRFNLTGEDFDQALEQAGAMPLPPYIAAKRAADEQDKTDYQTVWARNSGAVAAPTASLHFDDALLQALSARGVEFTHVTLHVGAGTFLPVKVEDVATHKMHAEWGRVSAQAAADIAATKAAGGRIIPVGTTALRLIESAARSGQIEPWEGETDIFIYPGFQFHVTDALMTNFHLPKSTLLMLVSALMGQDRVKSIYDHAIADEYRFFSYGDASLLIP

SEQ ID NO: 71678 - protein, 377 aa, Ruegeria denitrificans
  misc_feature (1)..(377): tr|A0A0N7M8M3|A0A0N7M8M3_9RHOB S-adenosylmethionine:tRN A ribosyltransferase-isomerase OS=Ruegeria denitrifican s OX=1715692 GN=queA PE=3 SV=1
MNPKRRLDHHHPTGDQTVAESEKAGYGAAMKLSDFDFHLPEDLIATRPASPRSSARLLVANGDTVSNAHVFDLPDWLQPGDRLVLNDTRVIPARLNGRRHRDSAQGPVSAAIEATLLEPQADGAWAALIKPLKKVRLGEDIRFSDDLSATLERVEDGQAYLRFNLMGEDFDSALEQAGAMPLPPYIAAKRPADEQDKTDYQTIWARNSGAVAAPTASLHFDQVLMQALETRGVTISHVTLHVGAGTFLPVKVEDVTTHKMHAEWGKVSATAAEEIRATKAGGGRVIPVGTTALRLIESASRSGQIEPWEGDTDIFIYPGFEFHVTDALMTNFHLPKSTLLMLVSALMGQGRMRDVYAHAIEQKYRFFSYGDASLLIP

SEQ ID NO: 71679 - protein, 348 aa, Ruegeria faecimaris
  misc_feature (1)..(348): tr|A0A521APY8|A0A521APY8_9RHOB S-adenosylmethionine:tRN A ribosyltransferase-isomerase OS=Ruegeria faecimaris O X=686389 GN=queA PE=3 SV=1
MKLSDFDFHLPENLIATRPANPRSSARLLVAEGDAISDAHVFDLPDWLRPGDRLVLNDTRVIPARLTGRRHRDSAQGPVSASIEATLLDPQADGTWAALIKPLKKVKTGEVIRFSDQLSAELDRVADGQAFLRFNLTGQDFDAALEQAGAMPLPPYIAAKRPADAQDKTDYQTIWARNSGAVAAPTASLHFDEALMQALTASGVSVSYVTLHVGAGTFLPVKVEDVTTHKMHAEWGRVSAEAVSEIRETKAIGGRVIPVGTTALRLIESAARSGQIVPWEGDTDIFIYPGFQFYVTDALITNFHLPKSTLLMLVSALMGQDRMQEVYEHAIAQNYRFFSYGDGSLLIP

SEQ ID NO: 71680 - protein, 353 aa, Ruegeria halocynthiae
  misc_feature (1)..(353): tr|A0A1H2SDZ1|A0A1H2SDZ1_9RHOB S-adenosylmethionine:tRN A ribosyltransferase-isomerase OS=Ruegeria halocynthiae OX=985054 GN=queA PE=3 SV=1
MYGAAMKLSDFDFHLPEHLIATRPANPRPSARLLVAHGDSIQDHHVFDLPDMLRPGDRLVLNDTRVIPARLSGRRHRESAQGPVSAAIEATLLDPQSDSCWAALIKPLKKVRLGEEIVFSDDLSATLDRVADGQAYLRFNLTGEDFDRALEQAGAMPLPPYIAAKRAADEQDKTDYQTVWARNSGAVAAPTASLHFDDALLNALAERGVEFTHVTLHVGAGTFLPVKVDDVTTHRMHAEWGRVSAQAAAEIAATKAAGGRIIPVGTTALRLIESAARSGRIEPWEGETDIFIYPGFRFHVTDALMTNFHLPKSTLLMLVSALIGQDQVNAIYDHAIAGEYRFFSYGDASLLIP

SEQ ID NO: 71681 - protein, 348 aa, Ruegeria intermedia
  misc_feature (1)..(348): tr|A0A1M4UJX2|A0A1M4UJX2_9RHOB S-adenosylmethionine:tRN A ribosyltransferase-isomerase OS=Ruegeria intermedia O X=996115 GN=queA PE=3 SV=1
MKLSDFDFDLPEDLIATRPASPRSSARLLVARGDDLTDARVSDLPDWLRPGDRLVLNDTRVIPARLSGRRHRNSAQGPVSAAVEATLLDPQADGSWAALLKPLKKVRVGEEIVFSDDLSAVLDRVVDGQAHLRFNLTGEDFDRALEQAGAMPLPPYIAAKRPADERDKTDYQTVWARHSGAVAAPTASLHFDEALLRALAARGVNFTYVTLHVGAGTFLPVKVEDVTTHKMHAEWGRVSAQAAAEIAATKAAGGRVIPVGTTALRLIESAARGGQIEPWEGETDIFIYPGFEFHVTDALMTNFHLPRSTLLMLVSALMGKDRMLRIYDHAIASRYRFFSYGDASLLIP

SEQ ID NO: 71682 - protein, 348 aa, Ruegeria lacuscaerulensis
  misc_feature (1)..(348): tr|D0CYK3|D0CYK3_RUELI S-adenosylmethionine:tRNA ribosy ltransferase-isomerase OS=Ruegeria lacuscaerulensis (st rain DSM 11314 / KCTC 2953 / ITI-1157) OX=644107 GN=que A PE=3 SV=1
MKLSDFDFDLPEDLIATRPANPRTSARLLVAQGDDIADDRVFNLPDWLRPGDRLVLNDTRVIPARLSGRRHRNSAQGPVSAAIEATLLDPQADGTWAALLKPLKKVRVGEEIVFSGDLSAVLERVAEGQAYLRFNLTGEDFDRALEQAGAMPLPPYIAAKRPADERDKTDYQTVWARHSGAVAAPTASLHFDEALLKTLTERGVEFTHVTLHVGAGTFLPVKVEDVTTHKMHAEWGRVSPQAAAEIAATKAAGGRVIPVGTTALRLIESAARGGRIEPWEGETDIFIYPGFTFHVTDALMTNFHLPKSTLLMLVSALMGKDRMLRIYDHAIACRYRFFSYGDASLLIP

SEQ ID NO: 71683 - protein, 349 aa, Ruegeria litorea
  misc_feature (1)..(349): tr|A0A1Y5SN11|A0A1Y5SN11_9RHOB S-adenosylmethionine:tRN A ribosyltransferase-isomerase OS=Ruegeria litorea R37 OX=1200284 GN=queA PE=3 SV=1
MKLSEFDFDLPDGLIATRPAQPRTSARLLVAEGDAITDSVVRDLTGWLRPGDRLVLNDTRVIPARLSGRRHRDSAQGPVSAKIEVTLLDPAADGCWSALIKPLKKVKPGEVIVFSDDLSAELVGIEDGQGRLRFNLTGDDFDTALAQAGAMPLPPYIAAKRPADERDKTDYQTVWAKNSGAVAAPTASLHFDDSLLSQLHEMGVGFTYVTLHVGAGTFLPVKVEDVTTHKMHSEWGHVSPQAVTEIEATKAAGGRVIPVGTTALRLIESAAQTGRLKPWEGDTDIFIYPGFEFHVTDALMTNFHLPKSTLLMLVSALMGQERMKRVYDHAVQSEYRFFSYGDASLLIPA

SEQ ID NO: 71684 - protein, 349 aa, Ruegeria marina
  misc_feature (1)..(349): tr|A0A1G6XH19|A0A1G6XH19_9RHOB S-adenosylmethionine:tRN A ribosyltransferase-isomerase OS=Ruegeria marina OX=63 9004 GN=queA PE=3 SV=1
MKLSDFDFDLPEGLIATRPARPRSSARLLVAQGDTITDSIVSDLTEWLRPGDRLVLNDTRVIPARLSGSRIRQSAQGEVSARIEVTLLEPQPDGTWAALVKPLRKLLEGETITFSADLSAIVDRIAEGQAYLGFNLAGEDFDAALAEAGAMPLPPYIAAKRAADAQDKTDYQTVWARHSGAVAAPTASLHFDEPLLAALAAHGVSFSHVTLHVGAGTFLPVKVEDVTTHRMHAEWGRVSPEAAAEIAATKAAGGRVIPVGTTALRLIESAARGGAIAPWEGDTDIFIYPGFHFRVADGLMTNFHLPKSTLMMLVSALMGQERIRRIYAHAVDSGYRFFSYGDASLLFPG

SEQ ID NO: 71685 - protein, 348 aa, Ruegeria marisrubri
  misc_feature (1)..(348): tr|A0A0X3TYV1|A0A0X3TYV1_9RHOB S-adenosylmethionine:tRN A ribosyltransferase-isomerase OS=Ruegeria marisrubri O X=1685379 GN=queA PE=3 SV=1
MKLSDFDFDLPEDLIATRPASPRSSARLLVAQGDAITDATVIDLPDWLRPGDRLVLNDTRVIPARLSGRRHRQSAQGPVSAAIEATLLDPQADGTWAALLKPLKKVKTGEEIVFSDQLSATLERVEDGQAYLRFNLSGEDFDSALEAAGAMPLPPYIAAKRPADERDKTDYQTIWARHSGAVAAPTASLHFDEALLAKLAERGVAFTHVTLHVGAGTFLPVKVEDVTTHKMHAEWGRVSEQAAEEIRATRAAGGRVIPVGTTALRLIESAARGGEIEAWEGETDIFIYPGFEFHVTDALMTNFHLPKSTLLMLVSALMGQDRVRRIYAHAVAERYRFFSYGDASLLIP

SEQ ID NO: 71686 - protein, 349 aa, Ruegeria mediterranea
  misc_feature (1)..(349): tr|A0A2R8CAH6|A0A2R8CAH6_9RHOB S-adenosylmethionine:tRN A ribosyltransferase-isomerase OS=Ruegeria mediterranea M17 OX=1200281 GN=queA PE=3 SV=1
MKLSDFDFDLPETLIATRPAQPRTSARMLVAEGEVITDAVVRDLTDWLRPGDRLVLNDTRVIPARLSGRRHRDSAQGPVSAKIEVTLLDPAADGSWSALIKPLKKVKPGETIVFSDDLSAELTGVEDGQGRLQFNLSGDDFDAALAQAGAMPLPPYIAAKRPADEQDKTDYQTVWAKNAGAVAAPTASLHFDDDLLQALRDMGVGFTYVTLHVGAGTFLPVKVDDVTTHKMHSEWGRVSEQAVAEIEATKAAGGRVIPVGTTALRLIESAAQTGRLKPWDGDTDIFIYPGFDFHVTDALMTNFHLPKSTLLMLVSALMGQERMAQVYEHAVKSEYRFFSYGDASLLIPA

SEQ ID NO: 71687 - protein, 348 aa, Ruegeria meonggei
  misc_feature (1)..(348): tr|A0A1X6YA27|A0A1X6YA27_9RHOB S-adenosylmethionine:tRN A ribosyltransferase-isomerase OS=Ruegeria meonggei OX= 1446476 GN=queA PE=3 SV=1
MKLSDFDFHLPEDLIATRPASPRSSARLLAAKGDAIADAHVYDLPDWLRSGDRLVLNDTRVIPARLNGRRHRNSAQGPVSAAIEVTLLDPQADGTWAALIKPLKKVKLGEEIRFSDDLSATLDRVEDVQAHLRFNLTGEDFDAALEQAGAMPLPPYIAAKRPADEQDKFDYQTIWARYSGAVAAPTASLHFDAALMQALSARGITFSHVTLHVGAGTFLPVKVEDVTTHKMHAEWGRVSATAAEEIRATKAAGGRVIPVGTTALRLIESAARSGQIEPWEGETDIFIYPGFQFHVTDALMTNFHLPKSTLLMLVSALMGQDRMRDVYAHAIAQKYRFFSYGDASLLIP

SEQ ID NO: 71688 - protein, 349 aa, Ruegeria pomeroyi
  misc_feature (1)..(349): sp|Q5LRA3|QUEA_RUEPO S-adenosylmethionine:tRNA ribosylt ransferase-isomerase OS=Ruegeria pomeroyi (strain ATCC 700808 / DSM 15171 / DSS-3) OX=246200 GN=queA PE=3 SV=1
MKLSDFDFDLPDDLIATRPAQPRSSARLLVARGDAISDAVVRDLPDWLRPGDRLVLNDTRVIPARLSGTRQRQSAQGPVTARIEITLLEPRADGSWSALAKPLRKLREGETIIFSNDLSADVEAIEDGQALLRFNLTGPDFDAALAQAGAMPLPPYIAAKRAADEQDKTDYQTVWARHSGAVAAPTASLHFDDTLLAALAAHGVTFTHVTLHVGAGTFLPVKVEDVTTHKMHAEWGRVSAEAAAEIAATKAAGGRVIPVGTTALRLIESAARGGQIAPWEGDTDIFIYPGFDFRVADGLMTNFHLPKSTLLMLVSALMGQESIRKIYAHAVENRYRFFSYGDASLLLPG

SEQ ID NO: 71689 - protein, 348 aa, Ruegeria profundi
  misc_feature (1)..(348): tr|A0A0X3U2R7|A0A0X3U2R7_9RHOB S-adenosylmethionine:tRN A ribosyltransferase-isomerase OS=Ruegeria profundi OX= 1685378 GN=queA PE=3 SV=1
MKLSDFDFHLPEDLIATRPASPRSSARMLVASKDTLSDAHVFDLPGLLQPGDRLVLNDTRVIPARLNGRRHRDSAQGPVSAAIEATLLDPQADGTWGALIKPLKKVRLGEDIQFSDDLSATLERAEGGQAYLRFNLTGDDFDAALEQAGAMPLPPYIAAKRPADERDKTDYQTIWARNSGAVAAPTASLHFDEPLMQALAARGVELSHVTLHVGAGTFLPVKVEDVTTHKMHAEWGRVSAEAAEEIRATKEAGGRIIPVGTTALRLIESAGRSGRIEPWEGETDIFIYPGFKFHVADALMTNFHLPKSTLLMLVSALMGQDRMREVYAHAIEQEYRFFSYGDASLLIP

SEQ ID NO: 71690 - protein, 351 aa, Ruegeria sp.
  misc_feature (1)..(351): tr|A0A4R5VDT6|A0A4R5VDT6_9RHOB S-adenosylmethionine:tRN A ribosyltransferase-isomerase OS=Ruegeria sp. 318-1 OX =2547397 GN=queA PE=3 SV=1
MKLSDFDFDLPEDLIATRPAVPRSAARLLVSEGDAITDAHVRDLTDWLRPGDRLVLNDTRVIPARLSGERPRPGPQGETRARIEVTLLEPRADGTWAALLKPLKKIRVGEAIEFAAGLSATLEGVAEGQGHLRFNLAGEDFDSALAQAGAMPLPPYIAARRPADERDKTDYQTVWARTSGAVAAPTASLHFDDALLDRLRDMGVSFTYVTLHVGAGTFLPVKVEDVTTHRMHAEWGRVSAAAAAEIAATRAAGGRVIPVGTTALRLIETAARGGQIAAWEGETDIFIYPGFRFHVTDALMTNFHLPKSTLLMLVSALMGQDRIRRIYEHAVEAGYRFFSYGDASLLIPDRR

SEQ ID NO: 71691 - protein, 349 aa, Ruegeria sp.
  misc_feature (1)..(349): sp|Q1GHP0|QUEA_RUEST S-adenosylmethionine:tRNA ribosylt ransferase-isomerase OS=Ruegeria sp. (strain TM1040) OX =292414 GN=queA PE=3 SV=1
MKLGDFDFDLPEELIATRPAVPRSSARLLVAEQDRISDGRVTDLLDWLAPGDRLVLNDTRVIPARLSGQRHRNSAQGPVSARIEVTLLEPQADGSWAGLLKPLKKIKIGETLRFSDALSAELVDVVDGQGRLRFNLAGDDFDAALAEAGAMPLPPYIAAKRPADEQDKTDYQTVWARNSGAVAAPTASLHFDEPLLKALSEKGVTFTYVTLHVGAGTFLPVKVEDVTTHKMHAEWGQVTPEAAAEIAATKAAGNRVIPVGTTALRLIESAARESGAITPWEGETDIFIYPGFEFRVADALMTNFHLPKSTLMMLVSALMGQDRIRAIYAHAVKERYRFFSYGDASLLIP

SEQ ID NO: 71692 - protein, 410 aa, Rufibacter immobilis
  misc_feature (1)..(410): tr|A0A3M9MV62|A0A3M9MV62_9BACT S-adenosylmethionine:tRN A ribosyltransferase-isomerase OS=Rufibacter immobilis OX=1348778 GN=queA PE=3 SV=1
MPTTNPRQISIADFTYSLPEEKIAQYPLENRDQSKLLLYKNGRISDAQFKELPSLLPPQSLLVFNDTKVVQARLRFQKPTGGVIELFCLEPLDPVREVQQAMQQTYSVIWKCLVGNNKRWREGRLEMPLGPYPSDGSLWAERLAPAEEGFAIHFTWSPGNKTFAEILELAGMLPLPPYMNRDVQESDQERYQTVYASEAGAVAAPTAGLHFTPSVLQQLSAQGHQQGFVTLHVGAGTFKPVKSDLMEYHYMHGEQLSVSRAFLEQLLHHGTKPVIAVGTTSMRTLESLYWLGTGLSLGLLPQEGEELTVPQWFPYDVRTTLSVQEAIEALLQYLDTQRLTHLQATTRILIAPGYQFKICNGLVTNFHQPQSTLLLLVSALIGSTWQKVYKHALANNYRFLSYGDSSLLLP

SEQ ID NO: 71693 - protein, 348 aa, Rufibacter immobilis
  misc_feature (1)..(348): tr|A0A3M9MYF1|A0A3M9MYF1_9BACT S-adenosylmethionine:tRN A ribosyltransferase-isomerase OS=Rufibacter immobilis OX=1348778 GN=queA PE=3 SV=1
MKLSEFKFDLPNELMATHPAPNRDEARMMVIHRDSGKIEHKVFKDIISYFDDGDVMVTNNTKVFPARLYGNKEKTGAKIEVFLLRELDKRIHLWDVLVDPARKIRVGNKLYFGDSDLVAEVIDNTTSRGRTIKFLYDGPDEEFYKVVHSLGETPLPKYIKREPEPEDEERYQTVYAEVTGAVAAPTAGLHFTREVLKRLELKGVDVAPITLHVGLGTFRQVDVEDLTKHKMDSEQFFVTEETTKIVNKALDAKKRVCAIGTTTMRALESSVSANSRLKPNEGWTDKFIFPPYDFKIANSLITNFHMPESTLLMMAAAFGGYELIVEAYQTAIKEKYKFFSYGDVMLIL

SEQ ID NO: 71694 - protein, 410 aa, Rufibacter sp.
  misc_feature (1)..(410): tr|A0A0H4VQC0|A0A0H4VQC0_9BACT S-adenosylmethionine:tRN A ribosyltransferase-isomerase OS=Rufibacter sp. DG31D OX=1379910 GN=queA PE=3 SV=1
MSTYHPRQIAISDYNYSLPEEQIAQFPLEERDQSKLLLYRNGRISDARFTDLPSALPPQSLLVFNDTKVVQARLRFQKATGGTIELFCLEPLEPVREVQQAMQQTFSVVWKCLVGNNKRWREGRLEMPLGPYPEDGALWAERLAPAEEGFAIHFTWSPGNQTFAEVLERAGLLPLPPYMNRDAEESDQERYQTIYAAEAGAVAAPTAGLHFTPAVMQEIEARGHEQAFVTLHVGAGTFKPVKSDVMEHHYMHGEQLSVSREFIERLLHHGNRPVIAVGTTSMRTLESLYWLGAGIYLGLLPGEEEELSLPQWFPYDVRTTISVQEALEALLYYLNSHKLTHLQANTHILIAPGYQFKICSGLVTNFHQPQSTLLLLVSALIGPSWQKVYRHALANNYRFLSYGDSSLLLP

SEQ ID NO: 71695 - protein, 410 aa, Rufibacter sp.
  misc_feature (1)..(410): tr|A0A127B0S0|A0A127B0S0_9BACT S-adenosylmethionine:tRN A ribosyltransferase-isomerase OS=Rufibacter sp. DG15C OX=1379909 GN=queA PE=3 SV=1
MSASHPRQISIADYTYDLPEERIAQFPLEVRDQSRLLVYQQGRMADAHFTDLANALPPHSLLVFNNTKVVQARLRFQKVTGGIIELFCLEPLEPIREVQQAMQQTQSVVWKCLVGNNKRWREGRLEMPLGPNPEDGILFAERLAPAEEGYAIRFSWTPAERTFAEVLEIAGLLPLPPYMNRDAAPEDQNRYQTIYADAAGAVAAPTAGLHFTPRVLEQLNQKKHQAAFVTLHVGAGTFKPVKSEVMEHHYMHPEQLSVSRETVEQLLRHLGQPIIPVGTTSMRTLESLYWLGVGLSMGSLPTEDDQLLVPQWLPYDQRTSLSVQEALESILTYLNQQGLSHLQATTRILIAPGYQFKLCNGIITNFHQPNSTLLLLVAAMIGPSWQKVYRHALANNYRFLSYGDSSLLLP

SEQ ID NO: 71696 - protein, 410 aa, Rufibacter tibetensis
  misc_feature (1)..(410): tr|A0A0P0CP09|A0A0P0CP09_9BACT S-adenosylmethionine:tRN A ribosyltransferase-isomerase OS=Rufibacter tibetensis OX=512763 GN=queA PE=3 SV=1
MPNTHPSQISISDYTYTLPEEKIAQFPLENRDQSKLLLYKNGRITDGHFKDLPTALPANSLLVFNDTKVVQARLRFQKPTGGVIELFCLEPLEPMREVQQAMQQTYSVIWKCLVGNNKRWREGRLEMPLGPYPADGSLWAERLAPAEEGFAIHFTWSPGHKTFAEILELAGTLPLPPYMNRDAQESDQDRYQTVYASEAGAVAAPTAGLHFTPAVLEQISAKGHQKAFVTLHVGAGTFKPVKAELMEYHYMHGEQLSVSRAFLEQLLYHKSKPVIAVGTTSMRTLESLYWLGAGMSLGLLPVEGEDLFVPQWFPYDVRTTISVQEALEALLYHLDSHKLTHLHATTRILIAPGYQFKICTGLITNFHQPQSTLLLLVSALIGPSWQKVYKHALANNYRFLSYGDSSLLLP

SEQ ID NO: 71697 - protein, 348 aa, Rufibacter tibetensis
  misc_feature (1)..(348): tr|A0A0P0CQM3|A0A0P0CQM3_9BACT S-adenosylmethionine:tRN A ribosyltransferase-isomerase OS=Rufibacter tibetensis OX=512763 GN=queA PE=3 SV=1
MKLSEFKFDLPNDLMASHPAPNRDEARMMVIHRDSGKIEHKVFKDIIGYFDDGDVMVTNNTKVFPARLYGNKEKTGAKIEVFLLRELDKRIHLWDVLVDPARKIRVGNKLYFGDSDLVAEVIDNTTSRGRTIKFLYDGPDEEFYKVVHSLGETPLPKYIKREPEPEDEERYQTVYAEITGAVAAPTAGLHFTREVLKRLELKGVDVAPVTLHVGLGTFRQVDVEDLTKHKMDSEQFFVNETTAQIVNKALDSKKRVCAVGTTTMRALESSVSANSRLKPNEGWTDKFVFPPYDFKIANSLITNFHMPESTLLMMAAAFGGYELIMEAYNTAIKEKYKFFSYGDVMLIL

SEQ ID NO: 71698 - protein, 349 aa, Rugamonas rubra
  misc_feature (1)..(349): tr|A0A1I4PWB3|A0A1I4PWB3_9GAMM S-adenosylmethionine:tRN A ribosyltransferase-isomerase OS=Rugamonas rubra OX=75 8825 GN=queA PE=3 SV=1
MYSLSDFDFNLPPERIAQFPLPDRSASRLLHLDGDQLVDRQFADIVDQLQAGDLLVMNDTRVLKARFFGVKESGGKIEALVERVLDSRTVLAQVRASKSPPPGCKIRLADAFDVTVGARAGEFFTLHFDADVFELIEAHGRLPLPPYIEHTADSFDETRYQTVFNKVPGAVAAPTAGLHFDQALLAKLAAKGVQFAYVTLHVGAGTFQPVRAEVLAEHKMHTEWYTLPQATVDAVRAARAAGRDVVAVGTTSLRALESASQSGELVAGSADTALFITPGYLFKTVTRLITNFHLPKSTLLMLVSAFAGYAQIRAAYAHAIANEYRFFSYGDAMLLTTQARAPQKNSSNN

SEQ ID NO: 71699 - protein, 343 aa, Rugosibacter aromaticivorans
  misc_feature (1)..(343): tr|A0A0C5JNL5|A0A0C5JNL5_9RHOO S-adenosylmethionine:tRN A ribosyltransferase-isomerase OS=Rugosibacter aromatic ivorans OX=1565605 GN=queA PE=3 SV=1
MNALTLADFDYALPQRLIAQAPLSQRSASRLLNAGGKSLLDQRITDLPSLLKSGDLLVLNDSRVMHARLQGAKATGGQVEVLVERIVSGNEVLAQVRASKSLKTGSRLILEGLLDVEVLGREGEFYHLRLPGDALETIEAHGRLPLPPYIARAAVAPDETRYQTVYARETGSVAAPTAGLHFDEDLLAKVRAHGVAIVYVTLHVGAGTFQPVRTQTLAEHHMHTERYIISSATAEAIAATKARGGRVIAVGTTSLRALESAATDNGVKVGAGETAIFITPGFEFQVVDALLTNFHLPKSTLLMLVSAFAGVKEIRTAYRHAIEQGYRFFSYGDAMWLTRKTSP

SEQ ID NO: 71700 - protein, 343 aa, Rugosibacter sp.; identical to SEQ ID NO: 71699
  misc_feature (1)..(343): tr|A0A522Y4X9|A0A522Y4X9_9RHOO S-adenosylmethionine:tRN A ribosyltransferase-isomerase OS=Rugosibacter sp. OX=1 914450 GN=queA PE=3 SV=1

SEQ ID NO: 71701 - protein, 343 aa, Rugosibacter sp.
  misc_feature (1)..(343): tr|A0A521KC72|A0A521KC72_9RHOO S-adenosylmethionine:tRN A ribosyltransferase-isomerase OS=Rugosibacter sp. OX=1 914450 GN=queA PE=3 SV=1
MNPLTLADFDYALPQRLIAQAPLSQRSASRLLNAGGKTLLDQRISDLPSVLQPGDLLVMNDSRVMHARLQGIKATGGQVEVLVERIVSGNEVLAQVRASKSLKTGSRLILEGLLDVEVLGREGEFYHLRLPGDALETIEAHGRLPLPPYIARAVIAPDETRYQTVYARETGSVAAPTAGLHFDEDLLAKVRAQGVTIAYVTLHVGAGTFQPVRTQTLAEHHMHTERYAISPATAEAIAATKARGGRVIAVGTTSLRALESAATERDVKVGAGETAIFITPGFEFQVVDALLTNFHLPKSTLLMLVSAFAGVKEIRAAYRHAIEQGYRFFSYGDAMWLTRKPVP

SEQ ID NO: 71702 - protein, 342 aa, Ruminiclostridium cellobioparum
  misc_feature (1)..(342): tr|S0FTM6|S0FTM6_RUMCE S-adenosylmethionine:tRNA ribosy ltransferase-isomerase OS=Ruminiclostridium cellobiopar um subsp. termitidis CT1112 OX=1195236 GN=queA PE=3 SV= 1
MNLQEFDYYLPEELIAQHPLERRDMSRLMVLDRESGEIDHKLFKDITNYFAEGDCLVLNNTRVIPARLLGQKEGSGGKIEFVLLKRIAGDTWEVILRPGKKAKPGARFVFGSGELKAEILEVLEEGNRLVRFIYEGVFEEILDKVGIMPLPPYITEKLEDPERYQTVYAKYNGSAAAPTAGLHFTRELLESLRNKGVQIAYVMLHVGLGTFRPVKVDDITQHKMHSEYYSIGQEACDMINSAKKAGKKVVAVGTTSCRVLETVGGNNNGEMKACDGWTDIFIYPGYRFKIVDRLITNFHLPESTLIMLVSSLAGRENVLGAYAAAVKERYRFFSFGDAMFIK

SEQ ID NO: 71703 - protein, 340 aa, Ruminiclostridium cellulolyticum
  misc_feature (1)..(340): tr|B8I6L9|B8I6L9_RUMCH S-adenosylmethionine:tRNA ribosy ltransferase-isomerase OS=Ruminiclostridium cellulolyti cum (strain ATCC 35319 / DSM 5812 / JCM 6584 / H10) OX= 394503 GN=queA PE=3 SV=1
MNLHDFDYYLPEELIAQHPLEKRDMSRLMVLDKQTGEIEHKLFKDLFNYLDEGDCLVLNNTRVIPARLLGEKEGTGGKIEFVLLKRVEGDNWEVILRPGKKAKPGSKFVFGNGELKAEILEVLDEGNRLVRFIYDGVFEEILDRVGVMPLPPYITEKLDNPERYQTVYAKVNGSAAAPTAGLHFTKELLDSLVHKGVKIAYVMLHVGLGTFRPVKVDDITQHKMHSEYYSISQETCDIINVTREKGKKVVAVGTTSCRVLETIGKNGKIAPCDGWTDIFIYPGYEFKVVDRLITNFHLPESTLIMLVSSLAGRDNVLHAYSVAVEEKYRFFSFGDAMFIK

SEQ ID NO: 71704 - protein, 342 aa, Ruminiclostridium hungatei
  misc_feature (1)..(342): tr|A0A1V4SGZ9|A0A1V4SGZ9_RUMHU S-adenosylmethionine:tRN A ribosyltransferase-isomerase OS=Ruminiclostridium hun gatei OX=48256 GN=queA PE=3 SV=1
MDLKEFDYYLPEELIAQHPLQKRDLSRLLVLDRETGEIEHKSFMDIVNYLNEGDCLVLNNTRVIPARLLGEKEGSGGKIEFVLLKRIDGDTWEVILRPGKKAKPGARFVFGNGELKAEILQVLEEGNRLVRFIYEGVFEEILDKVGIMPLPPYITQKLEDPERYQTVYAKYNGSAAAPTAGLHFTRELLDTLEKKGVRLAYVMLHVGLGTFRPVKVDDITQHKMHSEFYSIDKEACDTINAAKASGKKVIAVGTTSCRVLETVGGGNNGILRAGEGWTDIFIYPGYEFKIVDRLITNFHLPESTLIMLVSSLAGREKVLNAYSVAVREKYRFFSFGDAMLIK

SEQ ID NO: 71705 - protein, 340 aa, Ruminiclostridium papyrosolvens
  misc_feature (1)..(340): tr|F1THA6|F1THA6_9FIRM S-adenosylmethionine:tRNA ribosy ltransferase-isomerase OS=Ruminiclostridium papyrosolve ns DSM 2782 OX=588581 GN=queA PE=3 SV=1
MDLHDFDYYLPEELIAQHPMEKRDMSRLMVLNKETGEIEHKLFTDIVNYLDEGDCLVLNNTRVIPARLLGEKEGTGGKIEFVLLKRVEGDKWEVILRPGKKAKPGSRFVFGNGELKAEILEVLDEGNRLVRFIYDGVFEEILDRVGIMPLPPYITEKLENPERYQTVYAKVNGSAAAPTAGLHFTKELLDSLTRKGVKIAYVMLHVGLGTFRPVKVDDITQHKMHSEYYSISQETCDIINDTRQKGKKVVAVGTTSCRVLETVGKSGRIAPCDGWTDIFIYPGYRFKVVDRLITNFHLPESTLIMLVSSLAGRDNVMHAYNVAVEEKYRFFSFGDAMFIK

SEQ ID NO: 71706 - protein, 340 aa, Ruminiclostridium papyrosolvens
  misc_feature (1)..(340): tr|U4R755|U4R755_9FIRM S-adenosylmethionine:tRNA ribosy ltransferase-isomerase OS=Ruminiclostridium papyrosolve ns C7 OX=1330534 GN=queA PE=3 SV=1
MNLHDFDYYLPEELIAQHPMEKRDMSRLMVLDKETGEIKHKLFKDIVNYLDEGDCLVLNNTRVIPARLLGEKEGTGGKIEFVLLKRVEGDTWEVILRPGKKAKPGSRFVFGNGELKAEILEVLEEGNRLVRFIYDGVFEEILDRVGIMPLPPYITEKLENPERYQTVYAKVNGSAAAPTAGLHFTKELLDSLEQKGVKIAYVMLHVGLGTFRPVKVDDITQHKMHSEYYSISQETCDIINDTRQKGKKVVAVGTTSCRVLETLGKSGSIAPCDGWTDIFIYPGYEFKVVNRLITNFHLPESTLIMLVSSLAGRDNVLHAYNVAVEEKYRFFSFGDAMFIK

SEQ ID NO: 71707 - protein, 341 aa, Ruminiclostridium sp.
  misc_feature (1)..(341): tr|A0A357AGL2|A0A357AGL2_9FIRM S-adenosylmethionine:tRN A ribosyltransferase-isomerase OS=Ruminiclostridium sp. OX=2053608 GN=queA PE=3 SV=1
MKLHDFWYDLPERLIAQNPLEKRDMSRLLVLDRKKDVLEHKHFSDLPGYLEPGDCLVINNTRVLPARLLGQKEGSGGKIEFVLLKRIEADIWEVILKPGRKAKPGSRFIFGDGLLKAEILEIAEEGNRIVKFFYDGVFEEILDKVGVMPLPPYIHATLQDKERYQTVYSKINGSAAAPTAGLHFTPELFDIIREKGVNIAELTLHVGLGTFRPVKTENILEHHMHKEYYTISPETCALINGTREQGKRVIAVGTTSVRVLETQTREDGRIYPGEGETDIFIYPGYSFRMVDALITNFHLPESTLIMLVSAFAGKDRILNAYQEAIALEYRFFSFGDAMLIL

SEQ ID NO: 71708 - protein, 340 aa, Ruminiclostridium sp.
  misc_feature (1)..(340): tr|A0A4U7JJY5|A0A4U7JJY5_9FIRM S-adenosylmethionine:tRN A ribosyltransferase-isomerase OS=Ruminiclostridium sp. MA18 OX=2488810 GN=queA PE=3 SV=1
MDLKEFDYYLPEELIAQHPMEKRDMSRLMVLDKASGQIEHRIFKDIVDYFREGDCLVLNNTRVIPARLLGEKEGSGGKIEFVLLKCIKENDWEVILRPGRKAKPGARFVFGNGELKAEILEVLEEGNRLVRFEYEGVFQEVLDRVGIMPLPPYITERLENPERYQTVYAKYNGSAAAPTAGLHFTEELLNTLQNKGVKIAFVMLHVGLGTFRPVKVEDITQHKMHSEYYSISQETCDIINAAKKAGNRVTAVGTTSSRVLETVGANGELHACEGWTDIFIYPGYKFKIVDRLITNFHLPESTLIMLVSALAGRENILKAYAEAVNEKYRFFSFGDAMFIK

SEQ ID NO: 71709 - protein, 340 aa, Ruminiclostridium sufflavum
  misc_feature (1)..(340): tr|A0A318XJ22|A0A318XJ22_9FIRM S-adenosylmethionine:tRN A ribosyltransferase-isomerase OS=Ruminiclostridium suf flavum DSM 19573 OX=1121337 GN=queA PE=3 SV=1
MDLKEFDYYLPEELIAQHPAEKRDMSRLLVLDKKTGQTEHKIFKDIVDYFNAGDCIVLNNTRVIPARLLGEKEGSGGKIEFVLLKCVKEDDWEVILRPGRKAKPGARFVFGNGELKAEIIEILNEGNRLVRFEYEGVFQEILDRVGVMPLPPYITEKPADPGRYQTVYAKHNGSAAAPTAGLHFTKELLEVLESKGIKIVYVMLHVGLGTFRPVKAEDISQHKMHSEYYSISQAACDTINSVRKAGNKVVAVGTTSSRVLETVGANGELHASEGWTDIFIYPGYKFKIVDRLITNFHLPESTLIMLVSALAGRESILNAYSEAVKERYSFFSFGDAMFIK

SEQ ID NO: 71710 - protein, 342 aa, Ruminococcaceae bacterium
  misc_feature (1)..(342): tr|A0A3D0XSC0|A0A3D0XSC0_9FIRM S-adenosylmethionine:tRN A ribosyltransferase-isomerase OS=Ruminococcaceae bacte rium OX=1898205 GN=queA PE=3 SV=1
MKKSDFYYDLPPERIAQEPLAQRDQSRLMTLERTTGKIGHQRFYELPDLLNPGDCLILNNSRVMPARLYGNKEKTGGRIEFLLLNEKKTDEWEVALKPGRIAKEGARFVFGDGSLKAEILQIIEDGNRIVRFEHNGDFFKLIEKLGEMPLPHYITHKLKDKERYQTVYSKKSGSAAAPTAGLHFTPELLEKLQAKGIKIGYVTLHVGMGTFRPVKTESIEDHIMHNEHYLLPKETAELIRETKKTGGRVIGVGTTSCRTLETVAHEHNGEICAAEGWTGIFIYPGYHFHVLDALITNFHLPESTLIMLVSAFAGREHVLNAYKEAIKENYRFYSFGDAMLLY

SEQ ID NO: 71711 - protein, 341 aa, Ruminococcaceae bacterium
  misc_feature (1)..(341): tr|A0A1G4V421|A0A1G4V421_9FIRM S-adenosylmethionine:tRN A ribosyltransferase-isomerase OS=Ruminococcaceae bacte rium P7 OX=1200751 GN=queA PE=3 SV=1
MKTSDFYYDLPKELIAQTPVEPRDSSRLLVLDRSTGEVTHRHFYDIIDYLNEGDLIVANDSRVLPARIYGVKDETGARVEFLLLKQISGNRWETLCKPGKKAREGARFSFGDGILRAEVVEVNDDGNRVVDFDCDENFFATLDKIGQMPLPPYITEELKDKERYQTVYSHELGSAAAPTAGLHFTDELMERIRQKGVNIAYVTLHVGLGTFRPVKVDDVTKHKMHSEHYEIPQETADLIRQTKENGGRVIAIGTTSCRTLESVATEYGEIRACDGFTDIFIYPGYQFKVLDGLVTNFHLPESTLIMLVSAFAGYDNVMNAYKIAVEERYRFFSFGDAMMIS

SEQ ID NO: 71712 - protein, 355 aa, Ruminococcus albus
  misc_feature (1)..(355): tr|E9S7J3|E9S7J3_RUMAL S-adenosylmethionine:tRNA ribosy ltransferase-isomerase OS=Ruminococcus albus 8 OX=24619 9 GN=queA PE=3 SV=1
MLDINDMKKSDFYYDLPQELIAQTPIEPRNASRMLCLDRYTGEVGHDHFYNLCDHLRKGDLLVLNDSRVLPARIYGETEDTHSFIEFLLVEQRGNLEWEILCRPGKKARVGRRFVFGGGLLRAEITEVLEDGNRIARFECDDSTNLFAALDEIGQMPLPPYITEKLKDKERYQTVYSNEIGSSAAPTAGLHFTKEQLADIEAMGVNIAYVTLHVGLGTFRPVKEDRVLDHKMHREHYELPARTAELINKTKSEGGRVIAVGTTSCRTLESVAALYGDIRPCDGFTEIFIYPGFEFKVLDGLITNFHLPESTLIMLVSAFAGYDNTMNAYKIAVEEKYRFFSFGDSMFIAPDANKK

SEQ ID NO: 71713 - protein, 354 aa, Ruminococcus albus
  misc_feature (1)..(354): tr|A0A1H7L8Y4|A0A1H7L8Y4_RUMAL S-adenosylmethionine:tRN A ribosyltransferase-isomerase OS=Ruminococcus albus OX =1264 GN=queA PE=3 SV=1
MLDLNNMKKSDFFYELPQELIAQTPIEPRNASRMLCLDRTTGEVGHDHFYNLCNHLKKGDLLVLNDSRVLPARIYGETEDTHSFIEFLLVEQRGNLEWEILCRPGKKARVGRRFVFGNGLLTAEITEVLEDGNRIAKFECSDSTNFFAALDEIGQMPLPPYITEKLKDKERYQTVYSNEIGSSAAPTAGLHFTKEQLADIEKMGVNIAYVTLHVGLGTFRPVKEDKVLDHKMHREHYELPQRTADLINKTKAEGGRVIAVGTTSCRTLESVAAFHGEIKPCDGFTEIFIYPGFEFKVLDGLITNFHLPESTLIMLVSAFAGYENTMNAYKIAVEEKYRFFSFGDSMFIANGANS

SEQ ID NO: 71714 - protein, 350 aa, Ruminococcus bicirculans
  misc_feature (1)..(350): tr|W0U883|W0U883_9FIRM S-adenosylmethionine:tRNA ribosy ltransferase-isomerase OS=Ruminococcus bicirculans OX=1 160721 GN=queA PE=3 SV=1
MLDINNMKRSDFYYDLPQELIAQTPVEPRNASRMMKINRQTGEVVHDHFYNLCNYLKKGDLLVLNDSKVLPARIYGEREDTGSFIEFLLVEQKENMVWEILCRPGKKAKIGTRFVFGGGKLKAEIIDVLEDGNRIARFECEENFFATLDEIGQMPLPPYITEKLKDKDRYQTVYAHELGSSAAPTAGLHFTEQQLEDLKAMGVNIAYVTLHVGLGTFRPVKEDKVLDHKMHREHYELSRETADMINETKKNGGRVIAVGTTSCRTLESVAAFNDGKIVPCDGYTEIFIYPGFEFKVLDGLVTNFHLPESTLIMLVSAFMGYENTMNAYKIAVEEKYRFFSFGDCMLIISE

SEQ ID NO: 71715 - protein, 341 aa, Ruminococcus bromii
  misc_feature (1)..(341): tr|A0A1G5B1M6|A0A1G5B1M6_9FIRM S-adenosylmethionine:tRN A ribosyltransferase-isomerase OS=Ruminococcus bromii O X=40518 GN=queA PE=3 SV=1
MKTSDFYYDLPKELIAQTPVEPRDSSRLLLLDRKSGEISHKHFRDVIDSLNEGDLLVCNDSRVLPARIYGTKAETGARVEFLLLKQISGNKWETLCKPGKKAREGAEFSFGDGILKGKVLEVKDDGNRVVDFDCDENFFATLDKIGQMPLPPYITEELKDKERYQTVYSHELGSAAAPTAGLHFTTELMDKIKAKGVNIAYVTLHVGLGTFRPVKVDDVTKHKMHSEHYEIPKETAELINKTKKNGGRVIAVGTTSCRTLESVATQYGEIKACDGFTDIFIYPGYKFKVLDGLITNFHLPESTLIMLVSAFAGYDKIMNAYKVAVQEKYRFFSFGDAMFIY

SEQ ID NO: 71716 - protein, 341 aa, Ruminococcus bromii
  misc_feature (1)..(341): tr|A0A413QBV8|A0A413QBV8_9FIRM S-adenosylmethionine:tRN A ribosyltransferase-isomerase OS=Ruminococcus bromii O X=40518 GN=queA PE=3 SV=1
MKTSDFYYDLPKELIAQTPLEPRDSSRLLVLDREKQTLEHKHFYDIIDYLNEGDLLVANDSRVLPARIYGIKDETGAKVEFLLLKQIANNRWETLCKPGKKAKVGTKFSFGNGILRATVVDVKDDGNRIVDFDCEENFFTTLDKIGQMPLPPYITAELKDKERYQTVYSHELGSAAAPTAGLHFTTELMDRIKAKGVKIAYVTLHVGLGTFRPVKVDDVTKHKMHSEHYEVPEETAKLINETKKNGGRVIAVGTTSCRTLESVAAMYGEIKPCEGFTDIFIYPGFEFKVLDGLITNFHLPESTLIMLVSAFAGYDFIMNAYKEAVKEKYRFFSFGDAMFIS

SEQ ID NO: 71717 - protein, 347 aa, Ruminococcus callidus
  misc_feature (1)..(347): tr|U2KX70|U2KX70_9FIRM S-adenosylmethionine:tRNA ribosy ltransferase-isomerase OS=Ruminococcus callidus ATCC 27 760 OX=411473 GN=queA PE=3 SV=1
MKKSDFYYDLPDELIAQTPVEPRDHSRLMQIDRNTGEIQHKHFYDLLEILQPGDLLVMNDSRVLPARLYGEKVDNGTFIEFLLLEQKGDKLWEIICRPGKKAKVGVKFSFGGGRLIGEVVEVKPDGNRIVQFTCEGNFYTALEEVGQMPLPPYIHEKLKDKERYQTVYSKELGSAAAPTAGLHFTKDMLKKLKEKGVNEAYVTLHVGLGTFRPVKEDDVLQHQMHSEHYHLPQETVDMIRETKANGGRVIAVGTTSCRTLEAVATAHNGELVAEDGYTDIFIYPGYSFKVLDGLITNFHLPESTLIMLISAFLGYEKTMHAYEIAVQEKYRFFSFGDAMCILPEKSE

SEQ ID NO: 71718 - protein, 341 aa, Ruminococcus champanellensis
  misc_feature (1)..(341): tr|D4LEM5|D4LEM5_RUMC1 S-adenosylmethionine:tRNA ribosy ltransferase-isomerase OS=Ruminococcus champanellensis (strain DSM 18848 / JCM 17042 / KCTC 15320 / 18P13) OX= 213810 GN=queA PE=3 SV=1
MKKSDFYYDLPEELIAQTPIEPRNQSRLMVIDRETGAVSHQHFYNLCDMLQEGDLLVLNDSRVIPARLYGEKIDNGTFIEFLLLEQKGDKLWELICRPGKKAKVGTRFSFGGGRLIGEVVEVKEDGNRLVQFTCEGNFFTALEDVGQMPLPPYIKAKLQDKERYQTVYSRELGSAAAPTAGLHFTKEMLQQLQDKGVRLAYVTLHVGLGTFRPVKEDDVLQHKMHSEHYAMSQETADLINQTKAAGGRVICVGTTSCRTVESIATFFGKIQACEGYTDIFIYPGYQFKVMDGLITNFHLPESTLIMLVSAFLGYDNTMRAYKTAVEEKYRFFSFGDACFIR

SEQ ID NO: 71719 - protein, 343 aa, Ruminococcus flavefaciens
  misc_feature (1)..(343): tr|A0A1K1PM85|A0A1K1PM85_RUMFL S-adenosylmethionine:tRN A ribosyltransferase-isomerase OS=Ruminococcus flavefac iens OX=1265 GN=queA PE=3 SV=1
MELLKSDFYYELPEELIAQTPIEPRNASRMMCVDRKTGAITHDHFYNLCEHLKEGDLLVMNDSRVIPARLYGEKIGNQTFIEFLLLEQKGDKRWEIICRPGKKAKVGTRFSFGGGRLVAEVVEVKDDGNRIVQFECEGNFFTALEDVGQMPLPPYIKEKLENRERYQTVYSKELGSAAAPTAGLHFTPEMLDDLRARGIKTAFVTLHVGLGTFRPVKEDNVLDHKMHSEHYYLPKETADLINETKKNGGRVIAVGTTTCRTLESVATFYGDISEHEGYTDIFIYPSYEFKCIDGLITNFHLPESTLIMLVSAFMGYDNTMNAYKTAVAERYRFFSFGDSMCIL

SEQ ID NO: 71720 - protein, 343 aa, Ruminococcus flavefaciens
  misc_feature (1)..(343): tr|W7UUQ2|W7UUQ2_RUMFL S-adenosylmethionine:tRNA ribosy ltransferase-isomerase OS=Ruminococcus flavefaciens 007 c OX=1341157 GN=queA PE=3 SV=1
MELLKSDFYYDLPEELIAQTPIEPRNASRMMCVDRRTGAVTHDHFYNLCDHLKEGDLLVMNDSRVIPARLYGEKIGNGTFIEFLLLEQKGDKLWEIICRPGKKAKVGTRFSFGGGRLTAEVVEVKDDGNRIVQFQCEGNFFTALEDVGQMPLPPYIKEKLENRERYQTVYSRELGSAAAPTAGLHFTPEMLDDLRSCGIKTAFVTLHVGLGTFRPVKEDNVLDHKMHSEHYFLPQETADLINETRKNGGRVIAVGTTTCRTLESVATFYNEISEHDGYTDIFIYPSYEFKCIDGLITNFHLPESTLIMLVSAFMGYENTMNAYKTAVQERYRFFSFGDSMCIL

SEQ ID NO: 71721 - protein, 341 aa, Ruminococcus gnavus
  misc_feature (1)..(341): tr|A0A2N5NXP6|A0A2N5NXP6_RUMGN S-adenosylmethionine:tRN A ribosyltransferase-isomerase OS=Ruminococcus gnavus O X=33038 GN=queA PE=3 SV=1
MKTSDFYYDLPEELIAQDPLEDRSGSRLLFLDKETGKTEHHIFRDVIDYLNPGDCLVINDTKVIPARLIGEKEGTGAKIEVLLLKRGENDVWETLVKPGKKAKPGTRISFGEGLLVGEVVDVVEEGNRLIHFEYKGIFEEILDQLGQMPLPPYITHQLEDRSRYNTVYAAHEGSAAAPTAGLHFTPKLLKEIQEKGVDIARVTLHVGLGTFRPVKVEDVTEHHMHSEFYMVDAEAAEKINKAKEHGGRVICVGTTSCRTIESAADENGRLKPCSGWTEIFIYPGYQFKILDGLITNFHLPESTLIMLVSALAGKEHVMAAYEEAVKERYRFFSFGDAMMIL

SEQ ID NO: 71722 - protein, 341 aa, Ruminococcus gnavus
  misc_feature (1)..(341): tr|A7B6Y9|A7B6Y9_RUMGV S-adenosylmethionine:tRNA ribosy ltransferase-isomerase OS=Ruminococcus gnavus (strain A TCC 29149 / VPI C7-9) OX=411470 GN=queA PE=3 SV=1
MKTSDFYYDLPEELIAQDPLEDRSGSRLLFLDKETGKTEHHIFRDVIDYLNPGDCLVINDTKVIPARLIGEKEGTGAKIEVLLLKRGENDVWETLVKPGKKAKPGTRISFGEGLLVGEVVDVVEEGNRLIHFEYKGIFEEILDQLGQMPLPPYITHQLEDRSRYNTVYAAHEGSAAAPTAGLHFTPKLLKEIQEKGVDIARVTLHVGLGTFRPVKVEDVTEHHMHSEFYMVDAEAAEKINKAKEHGGRVICVGTTSCRTIESAADENGRLKPCSGWTEIFIYPGYQFKILDGLITNFHLPESTLIMLVSALAGKEHVMAAYEEAVKERYRFFSFGDAMIIL

SEQ ID NO: 71723 - protein, 341 aa, Ruminococcus lactaris
  misc_feature (1)..(341): tr|A0A3E4LV77|A0A3E4LV77_9FIRM S-adenosylmethionine:tRN A ribosyltransferase-isomerase OS=Ruminococcus lactaris OX=46228 GN=queA PE=3 SV=1
MKTSDFYYDLPEELIAQDPLEDRSSSRLLVLDKKTGKTEHHVFREITDYLNSGDCLVLNDTKVIPARLIGVKEETGAKIEVLLLKRGADDVWETLVKPGKKARPGARISFGDGLLVGEVMEVVEEGNRLIHFEYDGIFEEILDQLGQMPLPPYITHQLQDKDRYNTVYAAHSGSAAAPTAGLHFTPELLKEIEEKGVDIARVTLHVGLGTFRPVKVDDVENHHMHSEFYMIDEEAAEKINRAKENGRKVICVGTTSCRTIESAADENGKLKACSGWTEIFIYPGYQFKVLDELITNFHLPESTLVMLVSALAGREHVLAAYEEAVKERYRFFSFGDAMMIL

SEQ ID NO: 71724 - protein, 342 aa, Ruminococcus lactaris
  misc_feature (1)..(342): tr|V8C3V6|V8C3V6_9FIRM S-adenosylmethionine:tRNA ribosy ltransferase-isomerase OS=Ruminococcus lactaris CC59_00 2D OX=1073376 GN=queA PE=3 SV=1
MKTSDFYYDLPEELIAQDPLEDRSSSRLLVLDKKTGKTEHHVFREITDYLNPGDCLVLNDTKVIPARLIGVKEETGAKIEVLLLKRGADDVWETLVKPGKKARPGARISFGDGLLVGEVMEVVEEGNRLIHFEYDGIFEEILDQLGQMPLPPYITHQLQDKDRYNTVYAAHSGSAAAPTAGLHFTPELLKEIEEKGVDIARVTLHVGLGTFRPVKVDDVENHHMHSEFYMIDEEAAEKINRAKENGRKVICVGTTSCRTIESAADENGKLKACSGWTEIFIYPGYQFKVLDELITNFHLPESTLVMLVSALAGREHVLAAYEEAVKERYRFFSFGDAMFIKD

SEQ ID NO: 71725 - protein, 341 aa, Ruminococcus obeum; identical to SEQ ID NO: 64239
  misc_feature (1)..(341): tr|R7DCA2|R7DCA2_9FIRM S-adenosylmethionine:tRNA ribosy ltransferase-isomerase OS=Ruminococcus obeum CAG:39 OX= 1263107 GN=queA PE=3 SV=1

SEQ ID NO: 71726 - protein, 341 aa, Ruminococcus sp.
  misc_feature (1)..(341): tr|A0A417LAX7|A0A417LAX7_9FIRM S-adenosylmethionine:tRN A ribosyltransferase-isomerase OS=Ruminococcus sp. TM09 -4 OX=2293244 GN=queA PE=3 SV=1
MKTSDFYYDLPQELIAQDPLEDRSSSRLMHLSLKDGSIEHRHFTDVLDYMEEGDCLVINDTKVIPARLYGHKEETGALIEILLLKRRENDIWECLVKPGKKARPGAKITFGNGILKGEIIDVVDEGNRLIQFHYEGIFEEILDQLGEMPLPPYITHKLKDKNRYQTVYAKNEGSAAAPTAGLHFTKELLEKVKEKGVNIAHVTLHVGLGTFRPVKVDDVESHHMHSEFYIVEEDQAKLINDTKKAGKRVIAVGTTSCRTLESATGEDGILKSGSGWTEIFIYPGYHFKMIDALITNFHLPESTLVMLVSALAGKENIMHAYETAVQEKYRFFSFGDAMIII

SEQ ID NO: 71727 - protein, 341 aa, Ruminococcus sp.
  misc_feature (1)..(341): tr|A0A374DN80|A0A374DN80_9FIRM S-adenosylmethionine:tRN A ribosyltransferase-isomerase OS=Ruminococcus sp. AM36 -18 OX=2293209 GN=queA PE=3 SV=1
MKTSDFYYDLPKELIAQTPLEPRDSSRLLVLDREKQTLEHKHFYDIIDYLNEGDLLVANDSRVLPARIYGIKDETGAKVEFLLLKQVANNRWETLCKPGKKARVGTKFSFGNGILRATVVDVKDDGNRIVDFDCEENFFTTLDKIGQMPLPPYITAELKDKERYQTVYSHELGSAAAPTAGLHFTTELMDRIKAKGVKIAYVTLHVGLGTFRPVKVDDVTKHKMHSEHYEVPEETAKLINETKKNGGRVIAVGTTSCRTLESVAAMYGEIKPCEGFTDIFIYPGFEFKVLDGLITNFHLPESTLIMLVSAFAGYDFIMNAYKEAVKEKYRFFSFGDAMFIS

SEQ ID NO: 71728 - protein, 349 aa, Rummeliibacillus sp.
  misc_feature (1)..(349): tr|A0A3N6AH31|A0A3N6AH31_9BACL S-adenosylmethionine:tRN A ribosyltransferase-isomerase OS=Rummeliibacillus sp. TYF005 OX=2058214 GN=queA PE=3 SV=1
MKLEDFDYYLPEELIAQTPLKDRASSRLMVLDRETGEVSHHHFRDILDELHEGDCLILNNTRVLPARLIGVKEETGAHIEVLLLKQTSDDQWETLVKPAKRVKVGTEITFGDGLLKATCTGELEHGGRMFKFDYEGIFIEILEKLGTMPLPPYIHEQLEDQERYQTVYSKELGSAAAPTAGLHFTEELLDQIRAKGVKVAFLTLHVGIGTFRPVSVENIEEHDMHAEFYNLSEETAKVINDTKANGGRVIAVGTTSTRTLETIAHRNDGQIVAESGWTTIFIYPGFEYQAIDGMVTNFHLPKSTLVMMISALAGRENVLNAYKIAVENKYRFFSFGDAMFIRPKAKKGN

SEQ ID NO: 71729 - protein, 349 aa, Rummeliibacillus stabekisii
  misc_feature (1)..(349): tr|A0A143HCM0|A0A143HCM0_9BACL S-adenosylmethionine:tRN A ribosyltransferase-isomerase OS=Rummeliibacillus stab ekisii OX=241244 GN=queA PE=3 SV=1
MKLEDFDYELPEELIAQVPLKDRTSSRLMVLDRETGEVSHHHFRDIVNELQEGDCLILNDTRVLPARLIGVKEETGAHIEVLLLKQTSDDEWETLVKPAKRVKVGTVLTFGEGLLKATCTGELAHGGRMFKFEYEGIFIEILEKLGTMPLPPYIHEKLEDQERYQTVYSKELGSAAAPTAGLHFTEELLEEIRQKGVKVAFLTLHVGIGTFRPVSVENIEEHDMHAEFYHLTEETASIIKETQANGGRVIAVGTTSTRTLETIAHRNNGNIVAESGWTTIFIYPGFEYLAVDGMVTNFHLPKSTLVMMISALAGRENVLNAYKIAVENKYRFFSFGDAMFIRPKRKKGN

SEQ ID NO: 71730 - protein, 359 aa, Rummeliibacillus stabekisii
  misc_feature (1)..(359): tr|A0A511BZL4|A0A511BZL4_9BACL S-adenosylmethionine:tRN A ribosyltransferase-isomerase OS=Rummeliibacillus stab ekisii OX=241244 GN=queA PE=3 SV=1
MKLEDFDYELPEELIAQVPLEDRTSSRLMVLDRETGEVSHHHFRDIVNELQEGDCLILNDTRVLPARLIGVKEETGAHIEVLLLKQTSDDEWETLVKPAKRVKVGTVLTFGEGLLKATCTGELAHGGRMFKFEYEGIFIEILEKLGTMPLPPYIHEKLEDQERYQTVYSKELGSAAAPTAGLHFTEELLEEIRQKGVKVAFLTLHVGIGTFRPVSVENIEEHDMHAEFYHLTEETASIIKETQANGGRVIAVGTTSTRTLETIAHRNNGNIVAESGWTTIFIYPGFEYLAVDGMVTNFHLPKSTLVMMISALAGRENVLNAYKTAVENKYRFFSFGDAMFIRPKRKKERKLNYVSSNSI

SEQ ID NO: 71731 - protein, 347 aa, Runella sp.
  misc_feature (1)..(347): tr|A0A3C0V0N1|A0A3C0V0N1_9BACT S-adenosylmethionine:tRN A ribosyltransferase-isomerase OS=Runella sp. OX=196088 1 GN=queA PE=3 SV=1
MKLSEFKFDLPQSLVALYPADRGDSRLMVVNRQTKKIEHKKFSEIIDYFSEGDVMVVNDTKVFPARLYGQKEKTGAKIEVFLLRELNREMRLWDVLVDPARKIRVGNKLYFGDSDLVAEVIDNTTSRGRTIRFLYDGNHDELMRAIDELGETPLPRDIKRKVEDADRERYQTIFAQHVGAVAAPTAGMHFTKVIQRRMEIKGINFAPITLHVGVGTFRQVDVEDLTKHKTDSENYAISEPSTAIINNALDNKKKVCAIGTTSLKALESSVSANNRVKPFVGWTDKFIFPPYDFKISNALLTNFHLPESILLMMTCAFGGHELIMEAYDIAIKEKYKFFSYGDAMLII

SEQ ID NO: 71732 - protein, 347 aa, Runella sp.
  misc_feature (1)..(347): tr|A0A344TKX0|A0A344TKX0_9BACT S-adenosylmethionine:tRN A ribosyltransferase-isomerase OS=Runella sp. HYN0085 O X=2259595 GN=queA PE=3 SV=1
MKLSEFKFDLPQSLIALYPADRGESRLMVVNRQTKKIEHKKFSEIIDYFEEGDAMVVNDTKVFPARLYGQKEKTGAKIEVFLLRELNREMRLWDVLVDPARKIRVGNKLYFGDSDLVAEVIDNTTSRGRTIRFLYDGNHDELMRAIDELGETPLPRDIKRKVEDADRERYQTIFAQHVGAVAAPTAGMHFTKVIQRRMEIKGINFTPITLHVGVGTFRQVDVEDLTKHKTDSENFAITEASANVINEALDKGKRVCAIGTTSLKALESSVSANNRVKPFEGWTDKFIFPPYDFKISNALLTNLHLPESILLMMTCAFGGHDLVMEAYEEAMKEKYKFFSYGDAMLII

SEQ ID NO: 71733 - protein, 342 aa, Ruthenibacterium lactatiformans
  misc_feature (1)..(342): tr|A0A0D8J326|A0A0D8J326_9FIRM S-adenosylmethionine:tRN A ribosyltransferase-isomerase OS=Ruthenibacterium lact atiformans OX=1550024 GN=queA PE=3 SV=1
MQKSDFYFDLPKELIAQEPCEPRDAARLLCLGRASGELRHAVFRDLPGLLQPGDLLVVNNSKVLPARLIGHKEGTGAVCELLLLRQVKGDVWECLAKPGKRLHAGTRIIFGDGTLTAVVRDTMEDGNKHAEFFYDTPTLYEKLDAFGKMPLPPYIQKQLDDQSQYQTVYAKELGSAAAPTAGLHFTPELMDTLRKEGVRFAEVTLHVGLGTFRPVKEDDILDHKMHSEWYSVSEETARLIRETKAAGRRVIAVGTTSCRTLEAVATKYGEVRACSGDTDIFIYPGYQYKAIDGLITNFHLPESTLIMLVSAFCGYENTMRAYRVAVEEKYRFFSFGDAMYIG

SEQ ID NO: 71734 - protein, 344 aa, Saccharibacillus sp.
  misc_feature (1)..(344): tr|A0A4Y6USP3|A0A4Y6USP3_9BACL S-adenosylmethionine:tRN A ribosyltransferase-isomerase OS=Saccharibacillus sp. ATSA2 OX=2583377 GN=queA PE=3 SV=1
MNVEDYDFELPERLIAQTPLAERSSSRLLTLDKRTGEMAHAHFYDILDMLHPGDTLILNDTRVMPARLHGIKPETGARIELLLLKNIEGDRWETLAKPGKKAKVGSVLRFGDELEAVVLEEGDMGARIIEFRYEGIFQEILDRLGEMPLPPYIKERLDDRERYQTVYAKHEGSAAAPTAGLHFTEELLDRLRAKGVEIGFVTLHVGLGTFRPVSVENVEEHVMHEEYYELSAETAELINRTRARGGRVISVGTTSTRTLESAARRTLDDQGRLGADSGWTQIFLYPGQDFKIVDALITNFHLPKSTLVMLVSALAGRDRVLAAYREAVEREYRFFSFGDAMFIY

SEQ ID NO: 71735 - protein, 344 aa, Saccharibacillus sp.
  misc_feature (1)..(344): tr|A0A254NJM3|A0A254NJM3_9BACL S-adenosylmethionine:tRN A ribosyltransferase-isomerase OS=Saccharibacillus sp. O23 OX=2009338 GN=queA PE=3 SV=1
MNVEDYDFELPERLIAQTPLAERTASRLLTLNKTTGETEHLHFYDIFDKLNPGDTLILNDTRVMPARLHGIKPETGARVELLLLKNIEGDRWETLAKPGKKIKTGAVLSFGDELEAVVLEEGDMGARIIEFRYEGIFQEILDRLGEMPLPPYIKERLDDRERYQTVYAKHEGSAAAPTAGLHFTEELLDKLRAKGVDIGFVTLHVGLGTFRPVSVENVEEHVMHEEYYELPAETAELINRTRERGGRVVSVGTTSTRTLESAARRTMDADGRLGADSGWTQIFLYPGEDFKVVDALITNFHLPKSTLVMLVSALAGREHVLSAYREAVEKEYRFFSFGDAMFIY

SEQ ID NO: 71736 - protein, 354 aa, Saccharibacter sp.
  misc_feature (1)..(354): tr|A0A060QBI0|A0A060QBI0_9PROT S-adenosylmethionine:tRN A ribosyltransferase-isomerase OS=Saccharibacter sp. AM 169 OX=1343158 GN=queA PE=3 SV=1
MTDDLSLFDFTLPRDHIATEPARPRDMAQLLHVVPPALAGTDDATLSLHRIRNLPELLKEGDLLVANDTEVIRAKMEARRGDAKIGITLDRILPEGQWHALARNSRKLRPGDRLHFEDDPVTADVLTNEGDGAVTLRFSVEGDEFDDFLERRAALALPPYIARPNGPTEADNSDYRTIFSRFRGAVAAPTAGLHFTEELLEALAARGIQKQTLTLHVGAGTFLPVRSTIAEHKMHAEWGHIDEETARLINETRANGGRVVAVGTTSLRLLESAADEQGIVHPWTGETSIFIRPGYRFRAVDALLTNFHLPRSTLFMLVCAFAGTETMRHAYHHAIAEGLRFYSYGDACLLERAP

SEQ ID NO: 71737 - protein, 409 aa, Saccharicrinis carchari
  misc_feature (1)..(409): tr|A0A521BDR4|A0A521BDR4_9BACT S-adenosylmethionine:tRN A ribosyltransferase-isomerase OS=Saccharicrinis carcha ri OX=1168039 GN=queA PE=3 SV=1
MLLQNKKMNTQDIKIEHYTYLLPEHRIAKYPLKERSDSKLLIYNKGIREDKFCNIPSLLPSKSLLLFNNTKVIQARVLFKKETGAQIEVFCLEPVQPADISMAFEAKTKSVWKCIVGNSKKWKDGKLYKNIAHAGKTIRLAISRKQTLEDAQVIEFEWDNNEVSFGEVLEAIGKTPIPPYLKRESEQLDTLRYQTIYSNYKGSVAAPTAGLHFTKEILNQLYDRGIKTGNVTLHVGAGTFKPVKSKSIGEHEMHTEHFFVDMETLNLILEYKGNITSTGTTTVRTLESLYWLGVKLLEGNKDLFINQWDAYQLPKHYSLTEAIGKLKAYLIDNDYSTLESYTGILIAPGYEFKVVDRLITNFHQPNSTLLLLVAAFTKGEAWKKIYEYALNNDFRFLSYGDSSLLYKGQ

SEQ ID NO: 71738 - protein, 349 aa, Saccharicrinis carchari
  misc_feature (1)..(349): tr|A0A521CHV7|A0A521CHV7_9BACT S-adenosylmethionine:tRN A ribosyltransferase-isomerase OS=Saccharicrinis carcha ri OX=1168039 GN=queA PE=3 SV=1
MKLSKFKYNLPEELIALHPSPNRDEARMMVLDRNTGKIDHKVFKDLVGYFNDQDVMIFNNTKVFPARLHGNKEKTGAEIEVFLLRELNKEQKLWDVLVDPARKIRIGNKLYFGENDEMVAEVIDNTTSRGRTLRFLYDGPYDEFKKTLFGLGETPLPKNINREVVPEDKERYQTIFAKHEGAVAAPTAGMHFSRELMKRLEILGVDFAEVTLHVGLGNFRSVDVEDLTKHKMDSEQIFITKEACNIINKGKENRQRICAVGTTVMRTIESSVSTYGHVKPFEGWTNKFIFPPYDFKVANSMVSNLHLPLSTLMMMTAAFAGYDHLMNAYEVAIKEKYRFGTYGDAMLII

SEQ ID NO: 71739 - protein, 349 aa, Saccharicrinis fermentans
  misc_feature (1)..(349): tr|W7YMA0|W7YMA0_9BACT S-adenosylmethionine:tRNA ribosy ltransferase-isomerase OS=Saccharicrinis fermentans DSM 9555 = JCM 21142 OX=869213 GN=queA PE=3 SV=1
MKLSKFKYNLPEELIALHPTHNRDEARMLVMDRKTGEIEHKVFKDLVTYFTDQDVMIFNNTKVFPARLYGNKEKTGAEIEVFLLRELNRDQKLWDVLVDPARKIRIGNKLYFGENDEMVAEVIDNTTSRGRTLRFLYDGPYDEFKKSLYGLGETPLPKIINRKVEPEDRERYQTIYAKHEGAVAAPTAGMHFSRELMKRLEIIGVNFAEITLHVGLGNFRSVDVEDLTKHKMDSEQIFITEEACDIINQGKERRQRICAVGTTVMRTIESSVSTFGHVKPFEGWTNKFIFPPYEFNVANCMVSNFHLPLSTLMMMAAAFGGYDNVMNAYEVAVKEKYRFGSYGDAMLII

SEQ ID NO: 71740 - protein, 409 aa, Saccharicrinis fermentans
  misc_feature (1)..(409): tr|W7YIC6|W7YIC6_9BACT S-adenosylmethionine:tRNA ribosy ltransferase-isomerase OS=Saccharicrinis fermentans DSM 9555 = JCM 21142 OX=869213 GN=queA PE=3 SV=1
MNTQAIRIEDYTYELPENKIAKYPLQNRSDSKLLVFNQNIREYSFNDISSLLPPNSLLLFNNTKVIQARLNFQKQTGANIEIFCLEPVEPSDIAMIFQAKEKATWKCIVGNSKKWKEGSLSRDIYVNGTEVHLSISREKNMEDTQLIQFCWNSKDVSFGDLLDAIGNIPIPPYLNRKSEAIDTFRYQTVYSNHKGSVAAPTAGLHFTDEILAQIRKNNIHTAPVTLHVGAGTFKPVKSALIGEHEMHIEHFFVDMPTLDLILKYEEDITSVGTTTVRTLESLYWLGVKLLENKNELYVNQWDAYHLPQHYNLQEAIGRLKQYLIDEKRNILESHTGILIAPGYDFKVVNRLITNFHQPNSTLLLLVSAFTKGDNWKRIYDYALTHDFRFLSYGDSSLLYRGEESTQSKY

SEQ ID NO: 71741 - protein, 350 aa, Saccharophagus degradans
  misc_feature (1)..(350): sp|Q21KW2|QUEA_SACD2 S-adenosylmethionine:tRNA ribosylt ransferase-isomerase OS=Saccharophagus degradans (strai n 2-40 / ATCC 43961 / DSM 17024) OX=203122 GN=queA PE=3 SV=1
MRRQDFSYELPDELIARRPTETRTGSRLLMLDGPSGELAHKQFPDLLNLVEEGDLMVFNNTRVIPARVFGQKASGGKLEILAERILDAHSILAHVRSSKAPKPGSIIILQDGTEVEMVARHEALFELRFPADTTALDVLENIGHMPLPPYIDREDEADDKERYQTVYGTQKGAVAAPTAGLHFDDVLLAKLKDKGVQQAFVTLHVGAGTFQPVRVDNIFEHHMHSEVMHVSQEVCDLIKATKAAGKRVIAVGTTSVRCLETAAQNGVVEPYQGDTDIFIYPGYQYKVVDALVTNFHLPESTLLMLVSAFAGYKHTMNAYQQAVAQCYRFFSYGDAMFITHNAEACKEEIK

SEQ ID NO: 71742 - protein, 348 aa, Saccharospirillum sp.
  misc_feature (1)..(348): tr|A0A2T6E3C9|A0A2T6E3C9_9GAMM S-adenosylmethionine:tRN A ribosyltransferase-isomerase OS=Saccharospirillum sp. MSK14-1 OX=1897632 GN=queA PE=3 SV=1
MDVRDFDFNLPDELIARQPAAERTGSRLLCLDGATGAIAHRQFPDLLDQLEPGDLLVFNNTRVIPARLFGQKASGGKIEVLIERMTGEQTALAHVRSSRSPKAGARLELEGGIELEVTGRDDNLFKLRCLNDTPLVELLEQHGHMPLPPYIDRADEASDRDRYQTVYAERRGAVAAPTAGLHFDEALLKKLADKGVNTAFVTLHVGAGTFQPVKADKVEDHHMHSEWIEVSDAVVEAVRETRARGGRVIAVGTTSVRSLESAAASGELQPFTGDTNIFIYPGYRFAVVDALVTNFHLPQSTLIMLISAFAGREAVMAAYQAAIDERYRFFSYGDAMFVSRQTLPEEPA

SEQ ID NO: 71743 - protein, 354 aa, Sagittula sp.
  misc_feature (1)..(354): tr|A0A2K8W600|A0A2K8W600_9RHOB S-adenosylmethionine:tRN A ribosyltransferase-isomerase OS=Sagittula sp. P11 OX= 2009329 GN=queA PE=3 SV=1
MKLSDFDFDLPERLIATRPARPRTSARLLVCDGGAISDATVADLPDWLRPGDRLVLNDTRVIPARLSGVRRRIGEAGETEAQIEVTLLEPHADGCWSALLKPLKKVRDGEVIRFSDDLEAVLMSRADGQAVLRFNLSAEDFDAALNAAGAMPLPPYIAARRPADAQDKEDYQTVWARNRGAVAAPTASLHFDEPLLQRIADMGVSFTHVTLHVGAGTFLPVKVEDVTTHRMHGEWGEVTPEAAAEIAETRAAGGRVIPVGTTALRLIETAARGGQIAPFRGVTDIFIYPGFTFHVTDALMTNFHLPKSTLLMLVSALMGQDCIREVYAHAVAEGYRFFSYGDASLLIPSRTGAP

SEQ ID NO: 71744 - protein, 354 aa, Sagittula stellata
  misc_feature (1)..(354): tr|A3JYK3|A3JYK3_9RHOB S-adenosylmethionine:tRNA ribosy ltransferase-isomerase OS=Sagittula stellata E-37 OX=38 8399 GN=queA PE=3 SV=1
MKLSDFDFELPERLIATRPARPRTAARLLVCDGGVISDATVAELPDWLRPGDRLVLNDTQVIPARLSGVRRRVGEAGETEAQIEVTLLEPRADGCWSALLKPLKKVRDGEIVRFSDDLEAMLMSRQDGQAILRFNLAAADFDAALNAAGAMPLPPYIAARRPADAQDKEDYQTVWARNRGAVAAPTASLHFDESLLKRIADMGVAFTHVTLHVGAGTFLPVKVEDVTTHRMHGEWGEVTPQAAAEIAATRAAGGRVIPVGTTALRLIESAAREGEIAPFHGVTDIFIYPGFSFNVTDALMTNFHLPKSTLLMLVSALMGQDCIREVYAHAVAEDYRFFSYGDASLLIPPGPRTS

SEQ ID NO: 71745 - protein, 351 aa, Salegentibacter agarivorans
  misc_feature (1)..(351): tr|A0A1I2KLI1|A0A1I2KLI1_9FLAO S-adenosylmethionine:tRN A ribosyltransferase-isomerase OS=Salegentibacter agari vorans OX=345907 GN=queA PE=3 SV=1
MGMKLSHFNFELPDELLAEYPSENRDEARLMVLNRKEQTIEHKQFKDILDYFEPEDVMVLNNTKVFPARLYGNKEKTGARIEVFLLRELNPETKLWDVLVDPARKIRIGNKLYFGDDESLVAEVIDNTTSRGRTLRFLYDGSYEDFRKKLKELGETPLPKYIKRNVEPEDQERYQTIYAKEEGAVAAPTAGLHFSKHLLKRLEIKGVDFAEVTLHVGLGTFSPVEVEDLSKHKMDSEEAFIEKKATQTINKAKLENRRVCAVGTTVMRVLESSVSSNHTLNEFGGWTNKFIFPPYDFSIANCMITNFHTPKSTLLMMISAFAGHDFMKRAYEEAVKEKYRFYTYGDAMLII

SEQ ID NO: 71746 - protein, 351 aa, Salegentibacter echinorum
  misc_feature (1)..(351): tr|A0A1M5GDV0|A0A1M5GDV0_9FLAO S-adenosylmethionine:tRN A ribosyltransferase-isomerase OS=Salegentibacter echin orum OX=1073325 GN=queA PE=3 SV=1
MGMKLSNFNFELPPELLAEYPSENRDEARLMVLNRKEQTIEHKQFKDILDYFEPEDVMVLNNTKVFPARLYGNKEKTGARIEVFLLRELNPETKLWDVLVDPARKIRIGNKLYFGEDESLVAEVIDNTTSRGRTLRFLYDGSYEDFRIKLKELGETPLPKYIKRDVQPEDQERYQTIYAKNEGAVAAPTAGLHFSKHLLKRLEIKGIDFAEVTLHVGLGTFSPVEVEDLSKHKMDSEEAFIEKRATETINKAQKENRKICAVGTTVMRVMESAVSSNHTLNEFSGWTNKFIFPPYDFSIANCMITNFHTPKSTLLMMISAFAGHDFMKRAYEEAVKEKYKFYTYGDAMLII

SEQ ID NO: 71747 - protein, 351 aa, Salegentibacter flavus
  misc_feature (1)..(351): tr|A0A1I4YWS6|A0A1I4YWS6_9FLAO S-adenosylmethionine:tRN A ribosyltransferase-isomerase OS=Salegentibacter flavu s OX=287099 GN=queA PE=3 SV=1
MGMKLSQFNFELPPELLAEYPAENRDEARLMVLNRKEQTIEHKQFKDILDYFDPEDVMVLNNTKVFPARLYGNKEKTGARIEVFLLRELNPETKLWDVLVDPARKIRIGNKLYFGEDESLVAEVIDNTTSRGRTLRFLYDGSYEDFRKKLQELGETPLPKYIKREVQPEDQERYQTIYAKEEGAVAAPTAGLHFSKHLLKRLEIKGVDFAEVTLHVGLGTFSPVEVEDLSKHKMDSEEAFITKKATDTINKAKLENRRVCAVGTTVMRVLESAVSSNQTLNEYGGWTNKFIFPPYDFSIANCMVTNFHTPKSTLLMMVSAFAGHDFMKKAYEEAVKEKYRFYTYGDAMLII

SEQ ID NO: 71748 - protein, 351 aa, Salegentibacter holothuriorum
  misc_feature (1)..(351): tr|A0A1T5DSJ3|A0A1T5DSJ3_9FLAO S-adenosylmethionine:tRN A ribosyltransferase-isomerase OS=Salegentibacter holot huriorum OX=241145 GN=queA PE=3 SV=1
MGMKLSHFNFELPDELLAEYPSENRDEARLMVLNRKEQTIEHKQFKDILDYFEPEDVMVLNNTKVFPARLYGNKEKTGARIEVFLLRELNPETKLWDVLVDPARKIRIGNKLYFGDDESLVAEVIDNTTSRGRTLRFLYDGSYEDFRKKLKELGETPLPKYIKRDVQPEDQERYQTIYAKEEGAVAAPTAGLHFSKHLLKRLEIKGVDFAEVTLHVGLGTFSPVEVEDLSKHKMDSEEAFIEKKATETINRAKRENRRVCAVGTTVMRVMESAVSSNHTLNEFGGWTNKFIFPPYDFSIANCMITNFHTPKSTLLMMISAFAGHDFMKRAYEEAVREKYRFYTYGDAMLII

SEQ ID NO: 71749 - protein, 349 aa, Salegentibacter mishustinae
  misc_feature (1)..(349): tr|A0A0Q9ZP60|A0A0Q9ZP60_9FLAO S-adenosylmethionine:tRN A ribosyltransferase-isomerase OS=Salegentibacter mishu stinae OX=270918 GN=queA PE=3 SV=1
MKLSHFNFELPDELLAEYPSENRDEARLMVLNRKEQTIEHKQFKDILDYFEPEDVMVLNNTKVFPARLYGNKEKTGARIEVFLLRELNPETKLWDVLVDPARKIRIGNKLYFGDDESLVAEVIDNTTSRGRTLRFLYDGSYEDFRKKLKELGETPLPKYIKRDVQPEDQERYQTIYAKEEGAVAAPTAGLHFSKHLLKRLEIKGVDFAEVTLHVGLGTFSPVEVEDLSKHKMDSEEAFIEKKATETINKAKLENRKVCAVGTTVMRVMESAVSSNHTLNEFSGWTNKFIFPPYDFSIANCMITNFHTPKSTLLMMISAFAGHDFMKRAYEEAVKEKYRFYTYGDAMLII

SEQ ID NO: 71750 - protein, 349 aa, Salegentibacter salarius
  misc_feature (1)..(349): tr|A0A2N0TRY5|A0A2N0TRY5_9FLAO S-adenosylmethionine:tRN A ribosyltransferase-isomerase OS=Salegentibacter salar ius OX=435906 GN=queA PE=3 SV=1
MKLSHFNFELPDELLAEYPSENRDEARLMVLNRKEQTIEHKQFKDILDYFEPEDVMVLNNTKVFPARLYGNKEKTGARIEVFLLRELNPETKLWDVLVDPARKIRIGNKLYFGDDESLVAEVIDNTTSRGRTLRFLYDGSYEDFRKKLKELGETPLPKYIKRDVQPEDQERYQTIYAKEEGAVAAPTAGLHFSKHLLKRLEIKGVDFAEVTLHVGLGTFSPVEVEDLSKHKMDSEEAFIERKATETINKAKRENRRVCAVGTTVMRVMESAVSSNHTLNEFSGWTNKFIFPPYDFSIANCMITNFHTPKSTLLMMISAFAGHDFMKRAYEEAVKEKYRFYTYGDAMLII

SEQ ID NO: 71751 - protein, 351 aa, Salegentibacter salegens
  misc_feature (1)..(351): tr|A0A1M7IG67|A0A1M7IG67_9FLAO S-adenosylmethionine:tRN A ribosyltransferase-isomerase OS=Salegentibacter saleg ens OX=143223 GN=queA PE=3 SV=1
MGMKLSHFNFELPDELLAEYPSENRDEARLMVLNRKEQTIEHKQFKDILDYFKPEDVMVLNNTKVFPARLYGNKEKTGARIEVFLLRELNPETKLWDVLVDPARKIRIGNKLYFGDDESLVAEVIDNTTSRGRTLRFLYDGSYEDFRKKLKDLGETPLPKYIKRDVEPEDQERYQTIYAKEEGAVAAPTAGLHFSKHLLKRLEIKGVDFAEVTLHVGLGTFSPVEVEDLSKHKMDSEEAFIEKKATQTINKAKLENRRVCAVGTTVMRVLESAVSSNHTLNEFGGWTNKFIFPPYDFSIANCMITNFHTPKSTLLMMISAFAGHDFMKRAYEEAVKEKYRFYTYGDAMLII

SEQ ID NO: 71752 - protein, 349 aa, Salegentibacter salinarum
  misc_feature (1)..(349): tr|A0A2N0TME7|A0A2N0TME7_9FLAO S-adenosylmethionine:tRN A ribosyltransferase-isomerase OS=Salegentibacter salin arum OX=447422 GN=queA PE=3 SV=1
MKLSHFNFELPDELLAEYPSENRDEARLMVLNRKEQTIEHKQFKDILDYFEPEDVMVLNNTKVFPARLYGNKEKTGARIEVFLLRELNPETKLWDVLVDPARKIRIGNKLYFGEDESLVAEVIDNTTSRGRTLRFLYDGSYEDFRKKLKDLGETPLPKYIKRNVEPEDQERYQTIYAKEEGAVAAPTAGLHFSKHLLKRLEIKGVDFAEVTLHVGLGTFSPVEVEDLSKHKMDSEEAFIERKATQTINRAKLENRRVCAVGTTVMRVLESAVSSNHTLNEFNGWTNKFIFPPYDFSIANCMITNFHTPKSTLLMMISAFAGHDFMKRAYEEAVKEKYRFYTYGDAMLII

SEQ ID NO: 71753 - protein, 351 aa, Salegentibacter sp.
  misc_feature (1)..(351): tr|A0A4R6G7C6|A0A4R6G7C6_9FLAO S-adenosylmethionine:tRN A ribosyltransferase-isomerase OS=Salegentibacter sp. 2 4 OX=2183986 GN=queA PE=3 SV=1
MGMKLSHFNFELPDELLAEYPSENRDEARLMVLNRKEQTIEHKQFKDILDYFEPEDVMVLNNTKVFPARLFGNKEKTGARIEVFLLRELNPETKLWDVLVDPARKIRIGNKLYFGDDESLVAEVIDNTTSRGRTLRFLYDGSYEDFRKKLKELGETPLPKYIKRDVEPEDQERYQTIYAKEEGAVAAPTAGLHFSKHLLKRLEIKGIDFAEVTLHVGLGTFSPVEVEDLSKHKMDSEEAFIERKATQTINKAKLENRRVCAVGTTVMRVLESAVSSNHTLNEFGGWTNKFIFPPYDFSIANCMITNFHTPKSTLLMMISAFAGHDFMKRAYEEAVKEKYRFYTYGDAMLII

SEQ ID NO: 71754 - protein, 349 aa, Salegentibacter sp.
  misc_feature (1)..(349): tr|A0A1L6R808|A0A1L6R808_9FLAO S-adenosylmethionine:tRN A ribosyltransferase-isomerase OS=Salegentibacter sp. T 436 OX=1729720 GN=queA PE=3 SV=1
MKLSHFNFELPDELLAEYPSENRDEARLMVLNRKEQTIEHKQFKDILDYFEPEDVMVLNNTKVFPARLYGNKEKTGARIEVFLLRELNPETKLWDVLVDPARKIRIGNKLYFGDDESLVAEVIDNTTSRGRTLRFLYDGSYEDFRKKLKELGETPLPKYIKRNVEPEDQERYQTIYAKEEGAVAAPTAGLHFSKHLLKRLEIKGVDFAEVTLHVGLGTFSPVEVEDLSKHKMDSEEAFIEKKATQTINKAKLENRRVCAVGTTVMRVLESSVSSNHTLNEFGGWTNKFIFPPYDFSIANCMITNFHTPKSTLLMMISAFAGHDFMKRAYEEAVKEKYRFYTYGDAMLII

SEQ ID NO: 71755 - protein, 349 aa, Salibacterium halotolerans
  misc_feature (1)..(349): tr|A0A1I5UF40|A0A1I5UF40_9BACI S-adenosylmethionine:tRN A ribosyltransferase-isomerase OS=Salibacterium halotol erans OX=1884432 GN=queA PE=3 SV=1
MNVEDFNFSLPEELIAQTPLEKRDASRLMVLDPKAEKTHHDSFRSILDYLDAGDCLVLNDTRVLPARLFGEKETGGRVEVLLLKQEEQDVWETLIKPAKRVKPGTVLYFGGTKLKAECLDTMEHGGRLLRFSYDGVFLEILEELGEMPLPPYIKEKLDDQERYQTVFAREEGSAAAPTAGLHFTDNLLAEAKHKGVHVTTITLHVGLGTFRPVEAETVEDHHMHAEFYQISEGTALLLNETRENGGKIAAVGTTSARTLETAADGNGRFEKISGWTDIFIYPGYTFRGIDALLTNFHLPKSTLVMMVSALAGREFLMQAYQEAVGHRYRFFSFGDAMFIMKGSQHRWQQ

SEQ ID NO: 71756 - protein, 349 aa, Salibacterium qingdaonense
  misc_feature (1)..(349): tr|A0A1I4JCP3|A0A1I4JCP3_9BACI S-adenosylmethionine:tRN A ribosyltransferase-isomerase OS=Salibacterium qingdao nense OX=266892 GN=queA PE=3 SV=1
MNVEDFNFSLPEELIAQTPLEKRDASRMMVLDPEAGKTHHDSFRSILDYLDAGDCLVLNDTRVLPARLFGEKETGGRVEVLLLKQEEQDVWETLIKPAKRVKPGTVLYFGGTKLKAECLDTLDHGGRLLRFSYDGVFLEILEELGEMPLPPYIKEKLEDQERYQTVFAREEGSAAAPTAGLHFTQELLGEAKNKGVHVTTITLHVGLGTFRPVEAETVEDHHMHAEFYQISEGTALLLNETRENGGKIVAAGTTSARTLETAADENGRFEKVSGWTDIFIYPGYTFRGMDALLTNFHLPKSTLVMMVSALAGREFLMDAYQEAVRQRYRFFSFGDAMFIMKGSQHRWQQ

SEQ ID NO: 71757 - protein, 347 aa, Salilacibacter sp.
  misc_feature (1)..(347): tr|A0A514LLS6|A0A514LLS6_9ACTN S-adenosylmethionine:tRN A ribosyltransferase-isomerase OS=Salilacibacter sp. NK C3-5 OX=2502791 GN=queA PE=3 SV=1
MKMDAFDFELPESLIAQRPLPNRDAARMLVLDRESGDIDHQRFSDIGSFFQAGDCLVLNDTRVLPARLFGEKKETGANVEVLLLNEGNADEWETLVKPAKKVKVGTEIIFGDGRLTAVCIGLNEHGGRLLRFHYNGFFMEILDALGTMPLPPYITEQLEEPERYQTVYANKQGSAAAPTAGLHFTEERLDELRAIGVEICYITLHVGLGTFRPVSVERVEDHEMHAEHYEVSAETAVTLNEAKKAGREIIACGTTSARTLETIMHTYGEFKKTSGWTDIFIYPGFDFRGVDGLITNFHLPKSTLIMLVSAFAGKEAIMRAYREAIAEQYRFFSFGDAMYIRKGAISV

SEQ ID NO: 71758 - protein, 344 aa, Salimicrobium flavidum
  misc_feature (1)..(344): tr|A0A1N7IHU6|A0A1N7IHU6_9BACI S-adenosylmethionine:tRN A ribosyltransferase-isomerase OS=Salimicrobium flavidu m OX=570947 GN=queA PE=3 SV=1
MTTDINQYDFDLPEELIAQTPLKDRASSRMMVLKTGEEKIEHRTFTDIKEYIQAGDCLVLNDTKVLPARLYGMKEDTGGKVEVLLLHQHEGDVWEVLMKPAKKVKEGTVLSFGDGSLKAVCTKEMEHGGRLVEFSYEGIFLEVLDALGEMPLPPYITEQLEDRDRYQTVYAKEEGSAAAPTAGLHFTENLLQELEDSGVNLVYLTLHVGLGTFRPVSVENVEEHDMHAEFYTLDEEAAERLNKAKEEQGRIISIGTTSTRTLETIYREHGRFTADSGWTDIFIYPPQQVKSIDGLVTNFHLPKSTLIMLVSAIAGRDFILEAYRRAVTEKYRFFSFGDAMLILK

SEQ ID NO: 71759 - protein, 344 aa, Salimicrobium halophilum
  misc_feature (1)..(344): tr|A0A1G8PMN3|A0A1G8PMN3_9BACI S-adenosylmethionine:tRN A ribosyltransferase-isomerase OS=Salimicrobium halophi lum OX=86666 GN=queA PE=3 SV=1
MTMDINHYDFDLPEELIAQTPLKNRDASRLMVMDTKKREIEHRVFSDIREYIHPGDCLVLNDTKVLPARLYGVKEETGGKVEVLLLHQHEGDTWEVLMKPAKKVKEGTVLTFGDGRLKAVCTKELEHGGRLVEFSYEGIFLEVLESLGEMPLPPYITEQLEDRDRYQTVYAKEEGSAAAPTAGLHFTEDLMQELQDNGVELIYLTLHVGLGTFRPVSVDNVEDHDMHAEFYTLSEESADRLNKVKEKGGRIISVGTTSTRTLETIYRGNDRFVAERGWTDIFIYPPQEVESIDGLITNFHLPKSTLIMLVSAIAGRDFILEAYNRAVTERYRFFSFGDAMLILK

SEQ ID NO: 71760 - protein, 344 aa, Salimicrobium jeotgali
  misc_feature (1)..(344): tr|K2H961|K2H961_9BACI S-adenosylmethionine:tRNA ribosy ltransferase-isomerase OS=Salimicrobium jeotgali OX=123 0341 GN=queA PE=3 SV=1
MTTDINEYDFELPEELIAQTPLKDRDSSRLMVLNTEAEKIEHRVFSDVKDYLHPGDCLVLNDTKVLPARLYGVKEDTGGKVEVLLLHQREGDEWEVLMKPAKKVKEGTELTFGDGRLKAVCTKELEHGGRIVEFSYEGIFLEVLDSLGEMPLPPYITEQLEDRDRYQTVYAKEEGSAAAPTAGLHFTERLFRELEESGVELVYLTLHVGLGTFRPVSVENVEEHDMHAEFYTLGEDSAGTLNRIRENGGRIISVGTTSTRTLETIYREHQRFVAQSGWTDIFIYPPHQVESIDGLVTNFHLPKSTLIMLVSAIAGREFILEAYRRAVTKRYRFFSFGDAMLILK

SEQ ID NO: 71761 - protein, 344 aa, Salimicrobium salexigens
  misc_feature (1)..(344): tr|A0A1N7JPA1|A0A1N7JPA1_9BACI S-adenosylmethionine:tRN A ribosyltransferase-isomerase OS=Salimicrobium salexig ens OX=908941 GN=queA PE=3 SV=1
MTTDINEYDFELPEELIAQTPLKDRDSSRLMVLNTEAEEIEHRVFSDVKDYLHPGDCLVLNDTKVLPARLYGVKEDTGGKVEVLLLHQREGDEWEVLMKPAQKVKEGTELTFGDGRLKAVCTKELEHGGRIVEFSYEGIFLEVLDSLGEMPLPPYITEQLEDRDRYQTVYAKEEGSAAAPTAGLHFTEKLLRELEESGVELVYLTLHVGLGTFRPVSVENVEEHDMHAEFYTLGEESAGTLNRIKENGGRIISVGTTSTRTLETIYREHQRFVGESGWTDIFIYPPHQVESIDGLVTNFHLPKSTLIMLVSAIAGRDFILEAYRRAVTEKYRFFSFGDAMLILK

SEQ ID NO: 71762 - protein, 344 aa, Salimicrobium sp.
  misc_feature (1)..(344): tr|A0A2A3AAS1|A0A2A3AAS1_9BACI S-adenosylmethionine:tRN A ribosyltransferase-isomerase OS=Salimicrobium sp. WN0 24 OX=2029857 GN=queA PE=3 SV=1
MTTDINEYDFELPEELIAQTPLKDRDSSRLMVLNTEAEKIEHRVFSDVKDYLHPGDCLVLNDTKVLPARLYGVKEDTGGKVEVLLLHQREGDEWEVLMKPAKKVKEGTELTFGDGRLKAVCTKELEHGGRIVEFSYEGIFLEVLDSLGEMPLPPYITEQLEDRDRYQTVYAKEEGSAAAPTAGLHFTERLLRELEESGVELVYLTLHVGLGTFRPVSVENVEEHDMHAEFYTLGEDSAGTLNRIRENGGRIISVGTTSTRTLETIYREHQRFVAQSGWTDIFIYPPHQVESIDGLVTNFHLPKSTLIMLVSAIAGREFILEAYRRAVTKRYRFFSFGDAMLILK

SEQ ID NO: 71763 - protein, 373 aa, Salinarimonadaceae bacterium
  misc_feature (1)..(373): tr|A0A0P7Y3X7|A0A0P7Y3X7_9RHIZ S-adenosylmethionine:tRN A ribosyltransferase-isomerase OS=Salinarimonadaceae ba cterium HL-109 OX=1653334 GN=queA PE=3 SV=1
MRVDEFDFELPEDRIALRPVEPRDAARMLVVRPGTTPELSDAQVRDLPDLLAPGDVLVLNDTRVIPARLYAKRVRGEIVAGVEIMLHKREGAARWRAFARPAKKLQPGDRLVFGSESAGPVCEAGRLEATIAGKAEGGDVAIDFDLAGPALDEAIAVIGELPLPPYIAGKRAADARDRADYQTIYAREEGAVAAPTAGLHFTDDLFARLNACGIARHFVTLHVGAGTFLPVKVEDTRDHRMHAETGFVSRETADALNAARAAGGRIVAVGTTSLRLLESAATEDGTIAPFAGDTDIFITPGYRFRAVDALMTNFHLPKSTLMMLVSALSGLDTMRRAYHHAVEAGYRFYSFGDSSLLFRDAAGQDGMKDDVDG

SEQ ID NO: 71764 - protein, 359 aa, Salinarimonas sp.
  misc_feature (1)..(359): tr|A0A5B2V9K0|A0A5B2V9K0_9RHIZ S-adenosylmethionine:tRN A ribosyltransferase-isomerase OS=Salinarimonas sp. BN1 40002 OX=1638099 GN=queA PE=3 SV=1
MRVDLFDFHLPEDRIALRPASPRDAARMLVVRPGEGLEDRTVRDLPDLLDPHDVLVLNDTKVIPARLYGLRARGEATARVEIMLHKREGLDRWRAFARPAKRLQPGDRIRFGEDAESTACELVRLDAEVEERGEGGEVLLRFALQGPYLDEAIVRLGELPLPPYIQAKRGGADERDRADYQTIYARDEGAVAAPTAGLHFTDELFARLDARGIARHFVTLHVGAGTFLPVKAEDTAEHRMHAEWGTIPARVADALNAARARGGRIVAVGTTSMRLLESAAAEDGTIQPFSGDTDIFITPGYRFRAVDALMTNFHLPRSTLFMLVSAFSGLETMRAAYDHAITGGYRFYSYGDSSLLFRA

SEQ ID NO: 71765 - protein, 342 aa, Salinibacillus kushneri
  misc_feature (1)..(342): tr|A0A1I0G975|A0A1I0G975_9BACI S-adenosylmethionine:tRN A ribosyltransferase-isomerase OS=Salinibacillus kushne ri OX=237682 GN=queA PE=3 SV=1
MKVEDFDFDLPESLIAQTPLENRSESRLMVLNREKQRMSHRYFYNIVEYLNPGDCLVLNNTKVLPARLFGVKQDTGAKIEILLLHQVGGDKWEVLLKPAKKVKEGTRIEFGNGLMTCICQEKKEHGGAIVEFHYDGIFYEQLDKLGEMPLPPYIKEQLDDRDRYQTVYAKEKGSAAAPTAGLHFTKELLDEIQNLGVHMAYVTLHVGLGTFRPVNVDDIENHEMHAEFYHMDEETAELLNDVKAKGNRIITVGTTSTRTLETIARDQDGDFKAQSGWTDIFIYPPYQFRAVDALITNFHLPKSTLIMMISAFAGREFVLNAYREAVQKKYRFFSFGDAMFIE

SEQ ID NO: 71766 - protein, 349 aa, Salinibacter ruber
  misc_feature (1)..(349): tr|D5H9S0|D5H9S0_SALRM S-adenosylmethionine:tRNA ribosy ltransferase-isomerase OS=Salinibacter ruber (strain M8 ) OX=761659 GN=queA PE=3 SV=1
MKRSEFSYDVPEELVAEYPADPPDSSRMMVLDRESHDINHDKHFHDLPEYFSEGDVLVVNDTKVYPARLYGQKKKTGADIQVFLLRELNPESRLWDVVVDPARKIRIGNKLYFDDDLIAEVIDNTTSRGRTIRFSFDDVNEALYQKIRDIGETPLPPYIDREVEEEDRDRYQTIFAENRGAVAAPKSTLHFTEDVLERLKEKGVHVVPITLHIGRGKSKPVDVEDLSKHRTDSEEYDIPEETAEAVNRALASDENTVTACGTTVARALESSLSADETVKPDHSWTDLFVYPEYEFKIVERMITNFHRPESMLMMMGAAFAGYDFLFEAYEEAFEEEYRLFAFGDAIFIK

SEQ ID NO: 71767 - protein, 349 aa, Salinibacter ruber; identical to SEQ ID NO: 71766
  misc_feature (1)..(349): tr|Q2S209|Q2S209_SALRD S-adenosylmethionine:tRNA ribosy ltransferase-isomerase OS=Salinibacter ruber (strain DS M 13855 / M31) OX=309807 GN=queA PE=3 SV=1

SEQ ID NO: 71768 - protein, 348 aa, Salinibacter sp.
  misc_feature (1)..(348): tr|A0A2P6BXK0|A0A2P6BXK0_9BACT S-adenosylmethionine:tRN A ribosyltransferase-isomerase OS=Salinibacter sp. 10B OX=1923971 GN=queA PE=3 SV=1
MKRSEFSYEYPEELIAEYPADPRDSCRMMVVDREQQEVDHEQFKNLPDYFTEGDVLVVNNTKVYPARLYGQKKKTGADIEVFLLRELNPESRLWDVMVDPARKIRIGNKLEFDDDLTAEVIDNTTSRGRTIRFSFDYTNEELYAKIRELGETPLPPYIDREVEEEDRQRYQTIFAKHRGAVAAPTAGLHFTEELVDRLEEKGVQVMPITLHVGRGTFRPVDVEDLTKHRMDSEEFIIPQETADAVNRALLSEENTVTACGTTVVRALESSLSADEMLKADHSWTDLFVYPEYDFKITERMITNFHRPESTLYMMASAFMGYDFAFEVYDKAFEEEYRLFSFGDAMLIE

SEQ ID NO: 71769 - protein, 349 aa, Salinicoccus alkaliphilus
  misc_feature (1)..(349): tr|A0A1M7BSN2|A0A1M7BSN2_9STAP S-adenosylmethionine:tRN A ribosyltransferase-isomerase OS=Salinicoccus alkaliph ilus DSM 16010 OX=1123231 GN=queA PE=3 SV=1
MKLEEFDFELPEALIAQTPLKDRAASRLLALNKNDGTIEDHTFSEVVRYFNEGDVLVLNDTKVLPARLYGVKQDTGAKIEMLLLTPLEDGYEVLIRPAKKVKAGTKVVFGNGELIAECTATFDEGIRHVKLHHEGILENVLDVLGEMPLPPYIKERLEDKDRYQTVFARESGSAAAPTAGLHFTEELLAEIEASGVKIVYITLHVGLGTFRPVSAETIEDHKMHSEYYLISRETADILNEAKSAGNRIISVGTTSTRTLETVMRDHGAFKEASGFTDIFIYPGFSYKAVDTLITNFHLPKSSLVMLVSAFSSRGMILDAYAHAVDEKYRFFSFGDAMIIHGGENDGDTL

SEQ ID NO: 71770 - protein, 344 aa, Salinicoccus halodurans
  misc_feature (1)..(344): tr|A0A0F7HKZ2|A0A0F7HKZ2_9STAP S-adenosylmethionine:tRN A ribosyltransferase-isomerase OS=Salinicoccus halodura ns OX=407035 GN=queA PE=3 SV=1
MKLDEFDFDLPEALIAQTPLSDRSGSRLLALDKTGGTIEDRHFTDIIDYLDAGDTLVLNDTRVLPARLYGVKAETGAKIEMLMLKPIENGYEVLIKPAKRVKPGTKIVFGGGLLKAVCTDTFDEGIRHVELMYDGVLENVLDELGEMPLPPYIKETLDDKERYQTVYARHSGSAAAPTAGLHFTEALLKEIEDKGINIATITLHVGLGTFRPVSADEIEDHKMHSEFYIMNEETADLLNKTRQNGRKIISVGTTSTRTLETIMRDYGEFRAASGFTDIFIYPGFEYRAVDALITNFHLPKSSLMMLVSAFANRDMIMETYRHAVDEKYRFFSFGDAMIIYEGDY

SEQ ID NO: 71771 - protein, 351 aa, Salinicoccus kekensis
  misc_feature (1)..(351): tr|A0A285UDI0|A0A285UDI0_9STAP S-adenosylmethionine:tRN A ribosyltransferase-isomerase OS=Salinicoccus kekensis OX=714307 GN=queA PE=3 SV=1
MILKLEEFDFELPEKLIAQTPLEDRTASRLLALNKDDGTIEDRTFSDIIKYFDKGDVLVLNDTKVLPARLYGVKEDTGAKIEMLLLTPLEGGYEVLIRPARKVKEGTKIVFGNGELIAECTATFDEGIRHMKLHHEGILENVLDALGEMPLPPYIKERLEDKDRYQTVYAKETGSAAAPTAGLHFTDELLDEIEASGVKIVYITLHVGLGTFRPVSAETIEDHKMHSEYYLITGETADILNEAKSAGKRIISVGTTSTRTLETVMRDHGAFKAASGFTDIFIYPGFRYQAVDTLITNFHLPKSSLVMLVSAFSSREKILDAYQHAVEKGYRFFSFGDAMIIHGGKKDGNTL

SEQ ID NO: 71772 - protein, 349 aa, Salinicoccus qingdaonensis
  misc_feature (1)..(349): tr|A0A1G9AI49|A0A1G9AI49_9STAP S-adenosylmethionine:tRN A ribosyltransferase-isomerase OS=Salinicoccus qingdaon ensis OX=576118 GN=queA PE=3 SV=1
MKLEEFDFDLPEELIAQTPLKDRSSSRLLALDKTDGQIEDTTFNDILKYFKEGDVLVLNDTKVLPARLYGVKEDTGAKIEMLLLTPVENGYEVLIRPAKKVKTGTRVVFGNGELIAECTGIFDEGIRHMKLHHEGILENVLDELGEMPLPPYIKETLEDKDRYQTVYAKETGSAAAPTAGLHFTNELLDEISSAGVKIVTITLHVGLGTFRPVSAETIEDHKMHSEYYMMSADAAEVLNAAKENGRNIISVGTTSTRTLETIMGKYDTFKASSGFTDIFIYPGFEYKAVDVLITNFHLPKSSLVMLVSAFSSREMILNAYQHAVNNQYRFFSFGDAMIIHGGADDGHSL

SEQ ID NO: 71773 - protein, 344 aa, Salinicoccus roseus
  misc_feature (1)..(344): tr|A0A3N4T7U7|A0A3N4T7U7_9STAP S-adenosylmethionine:tRN A ribosyltransferase-isomerase OS=Salinicoccus roseus O X=45670 GN=queA PE=3 SV=1
MKLEEFDFELPESLIAQTPLKDRAQSRLLGLNKADGTVSDGKFEDIVKYLNPGDALVLNDTKVLPARLFGVKRETGAKVEMLLLKPIEGGYEVLIRPARKVKKGTEIDFGDGLLKAVCTGTFDEGIRHVSLHHEGLLENVLDELGEMPLPPYIKETLEDKDRYQTVYAKNTGSAAAPTAGLHFTEALLERIRAQGVHIAYITLHVGLGTFRPVSAENIEDHKMHSEFYIMNRETADVLNEVRENGGKVVSVGTTSTRTLETIMRDHGRFEEASGFTDIFIYPGFQYRAVDALITNFHLPKSSLMMLVSAFSDKDAIMKAYQHAIDEKYRFFSFGDAMIIYEDEE

SEQ ID NO: 71774 - protein, 344 aa, Salinicoccus roseus
  misc_feature (1)..(344): tr|A0A265E9G9|A0A265E9G9_9STAP S-adenosylmethionine:tRN A ribosyltransferase-isomerase OS=Salinicoccus roseus O X=45670 GN=queA PE=3 SV=1
MKLEEFDFELPESLIAQTPLKDRAQSRLLGLNKADGTVSDGKFEDIVKYLNPGDALVLNDTKVLPARLFGVKRETGAKVEMLLLKPIAGGYEVLIRPARKVKEGTEIDFGDGLLKAVCTGTFDEGIRHVSLHHEGLLENVLDELGEMPLPPYIKETLEDKDRYQTVYAKNTGSAAAPTAGLHFTEALLERIRAQGVHIAYITLHVGLGTFRPVSAENIEDHKMHSEFYIMNRETADVLNGVRENGGKVVSVGTTSTRTLETIMRDHDRFEEASGFTDIFIYPGFQYRAVDALITNFHLPKSSLMMLVSAFSDKNTIMKAYQHAIDEKYRFFSFGDAMIIYEDEE

SEQ ID NO: 71775 - protein, 344 aa, Salinicoccus sediminis
  misc_feature (1)..(344): tr|A0A0M2SMD9|A0A0M2SMD9_9STAP S-adenosylmethionine:tRN A ribosyltransferase-isomerase OS=Salinicoccus sedimini s OX=1432562 GN=queA PE=3 SV=1
MKLDEFDFDLPESLIAQTPLSDRSGSRLLALDKTDGSIEDRHFTDITDYLEAGDTLVLNDTRVLPARLYGVKAKTGAKIEMLMLKPIENGYEVLIKPAKRVKPGTEIVFGEGLLRAVCTDVFDEGIRHVELIYDGVLETVLDALGEMPLPPYIKETLDDKERYQTVYAKNSGSAAAPTAGLHFTEALLEEIEAEGINIATITLHVGLGTFRPVSADDIEDHKMHSEFYIMNEETADLLNKTRESGKKIISVGTTSTRTLETIMRDHGVFTAASGFTDIFIYPGFDYRAIDALITNFHLPKSSLMMLVSAFSGRDMIMGAYRHAVEAEYRFFSFGDAMIIYEGDK

SEQ ID NO: 71776 - protein, 344 aa, Salinicoccus sp.
  misc_feature (1)..(344): tr|A0A558AYI5|A0A558AYI5_9STAP S-adenosylmethionine:tRN A ribosyltransferase-isomerase OS=Salinicoccus sp. CT19 OX=2493691 GN=queA PE=3 SV=1
MKLEEFDFDLPESLIAQTPLLKRAESRLLALDKRTGSVSDTKFENITAYLNPGDALVLNDTKVLPARLFGVKKDTGAKIEMLLLKPIEGGYEVLIRPAKRVKPGTEIDFGDGLLTAVCTDTFAEGIRHVSLHHDGLLENVLDELGEMPLPPYIKETLDDKDRYQTVYAKHAGSAAAPTAGLHFTEALLDEIRHKGVHISYITLHVGLGTFRPVSVDDIEEHKMHSEFYIMTDETASTLNAVKENGGKVVSVGTTSTRTLETIMRDHGQFVEASGFTDIFIYPGFKYKAVDALITNFHLPKSSLMMLVSAFSDRETIMNAYRHAIDEEYRFFSFGDAMIIYEDEE

SEQ ID NO: 71777 - protein, 345 aa, Salinicola socius
  misc_feature (1)..(345): tr|A0A1Q8STU3|A0A1Q8STU3_9GAMM S-adenosylmethionine:tRN A ribosyltransferase-isomerase OS=Salinicola socius OX= 404433 GN=queA PE=3 SV=1
MQRADFHFDLPDELIARYPSEQRTDCRLLCVDGESGALEHARFPDLLARLDPGDVVVFNDTRVIPARLFGQKASGGKVEMLLERPLDAHRGLAHLRASKSPKPGTELIFEGDIRAVVEGRQDALFELRFLGETPLIALLERHGHMPLPPYITREDELADRERYQTVYARREGAVAAPTAGLHFDESMMEALRAKGVETAFVTLHVGAGTFQPVRVDDIREHHMHSEWLEVDESVCERVNRAHAAGNKVVAVGTTSVRCLETASQSGNGELTPYRGETDIFIYPGYRWRCVDALVTNFHLPESTLLMLVSSFAGYDAVMRAYREAVAEQYRFFSYGDAMYLTRQPD

SEQ ID NO: 71778 - protein, 345 aa, Salinicola sp.
  misc_feature (1)..(345): tr|A0A1S2DIW0|A0A1S2DIW0_9GAMM S-adenosylmethionine:tRN A ribosyltransferase-isomerase OS=Salinicola sp. MIT100 3 OX=1882734 GN=queA PE=3 SV=1
MQRADFHFDLPDELIARYPSEQRTDCRLLCVDGESGALEHARFPDLLSRLEPGDVVVFNDTRVIPARLFGQKASGGKVEMLLERPLDAHRGLAHLRSSKSPKPGTELIFEGDIHAVVEGRRDALFELRFLGETPLIALLEQHGHMPLPPYITREDELTDRERYQTVYARREGAVAAPTAGLHFDETMMEALRAKGVETAFVTLHVGAGTFQPVRVDDIREHHMHSEWLEVDESVCEQVNRAHAAGNKVVAVGTTSVRCLETASQSESGELVPYRGETDIFIYPGYRWRCVDALVTNFHLPESTLLMLVSSFAGYETVMRAYQEAVAEQYRFFSYGDAMFLTRQPN

SEQ ID NO: 71779 - protein, 345 aa, Salinicola sp.
  misc_feature (1)..(345): tr|A0A1Q8SZD9|A0A1Q8SZD9_9GAMM S-adenosylmethionine:tRN A ribosyltransferase-isomerase OS=Salinicola sp. MH3R3- 1 OX=1928762 GN=queA PE=3 SV=1
MQRADFHFDLPDELIARYPSEQRTDCRLLCVDGESRALEHARFPDLMAKLGPGDVVVFNDTRVIPARLFGQKASGGKVEMLLERPLDSHRGLAHLRSSKSPKPGTELIFEGDIHAVVEGRQDALFELRFLGETPLIALLEQHGHMPLPPYITREDELADRERYQTVYARREGAVAAPTAGLHFDEAMMEALRAKGIETAFVTLHVGAGTFQPVRVDDIREHHMHSEWLEVEESVCEQVNRAHAAGNKVVAVGTTSVRCLETASQNDSGELTPYRGETDIFIYPGYRWRCVDALVTNFHLPESTLLMLVSSFAGYDAVMRAYQEAVTKEYRFFSYGDAMYLTRRPS

SEQ ID NO: 71780 - protein, 345 aa, Salinihabitans flavidus
  misc_feature (1)..(345): tr|A0A1H8QBH2|A0A1H8QBH2_9RHOB S-adenosylmethionine:tRN A ribosyltransferase-isomerase OS=Salinihabitans flavid us OX=569882 GN=queA PE=3 SV=1
MKLSDFEFDLPERLIATRPASPRTAARLLVAQGDAITDARVRNLPGWLRAGDRLILNDTKVIPARLTGRRQRAGAQARIEVTLLEPQAVAGRWRALLKPLRKVREGEVITFSDNLSATLVAREDGQGLLEFSLSGADFDAALAEAGAMPLPPYIAARRPADERDKTDYQTVFARHSGAVAAPTASLHFDEALLQQIAAMGVGLTHVTLHVGAGTFLPVKVEDVRAHRMHAEWGRVSAEAAAQIAATRRAGGRIIPVGTTALRLIESAAAGGEIAPWDGETDIFIYPGYEFRVTDALMTNFHLPGSTLMMLVSALMGTQRIHRIYDHAIAEEYRFFSYGDASLLIR

SEQ ID NO: 71781 - protein, 351 aa, Salinimicrobium catena
  misc_feature (1)..(351): tr|A0A1H5P275|A0A1H5P275_9FLAO S-adenosylmethionine:tRN A ribosyltransferase-isomerase OS=Salinimicrobium caten a OX=390640 GN=queA PE=3 SV=1
MGMKLSHFNFDLPPELLAEYPSEHRDEARLMVLNRKDQTIEHRQFKDLIDYFEPHDVMVLNNTKVFPARLFGNKEKTGARIEVFLLRELNAETRLWDVLVDPARKIRIGNKLYFGEDESLVAEVIDNTTSRGRTLRFLYDGSYEEFRNKLTELGETPLPKYIKREVQPEDQERYQTIYAKQEGAVAAPTAGLHFSKHLLKRLEIKGIDFAEVTLHVGLGTFSPVEVEDLSKHKMDSEEAFIEKPAVETINKAINEKRKVCAVGTTVMRSLESSVSSNKTLNEFSGWTNKFIFPPYDFSIANCMITNFHTPKSTLLMMVSAFAGHDFMKKAYEEAVKEKYKFYTYGDAMLIL

SEQ ID NO: 71782 - protein, 351 aa, Salinimicrobium sediminis
  misc_feature (1)..(351): tr|A0A285X328|A0A285X328_9FLAO S-adenosylmethionine:tRN A ribosyltransferase-isomerase OS=Salinimicrobium sedim inis OX=1343891 GN=queA PE=3 SV=1
MGMKLSHFNFDLPPELLAEYPSENRDEARLMVLNRKDQTIEHKQFKDLIDYFEPNDVMVLNNTKVFPARLFGNKEKTGARIEVFLLRELNAETRLWDVLVDPARKIRIGNKLYFGEDESLVAEVIDNTTSRGRTLRFLYDGSYEEFRDKLTELGETPLPKYIKREVQPEDKERYQTIYAKSEGAVAAPTAGLHFSKHLLKRLEIKGIDFAEVTLHVGLGTFSPVEVEDLSKHKMDSEEAFIEKKAVDTINKAISEKRKVCAVGTTVMRSLESSVSSNRTLNEFSGWTNKFIFPPYDFSIANCMITNFHTPKSTLLMMVSAFAGHDFMKKAYAEAVKEKYKFYTYGDAMLIL

SEQ ID NO: 71783 - protein, 344 aa, Salinimonas sediminis
  misc_feature (1)..(344): tr|A0A346NP41|A0A346NP41_9ALTE S-adenosylmethionine:tRN A ribosyltransferase-isomerase OS=Salinimonas sediminis OX=2303538 GN=queA PE=3 SV=1
MKLSEFNFSLPEKLIAKYPTQQRSASRLMHLHGPTGTVSHRMFTDMLELVDEGDLLIFNNTRVIPARLKGKKATGGQVEVLVERILPDDTVLAHVRASKAPKPGAGLVLEEHVNVTVIGRQDALFHLQFEHDQSVLNLLEAYGHMPLPPYIDRPDETSDKERYQTVYNQKPGAVAAPTAGLHFDDAILTALRNKGVTLGFVTLHVGAGTFQPVRVDNILEHQMHAEYAEVDEAVVEAVLRTKAAGKRVIAVGTTSVRSIESAAKAAEQELIAPFFADTDIFIYPGFNFKVIDAMFTNFHLPESTLMMLISAFAGRDNVMNAYQQAIDNDYRFFSYGDSMFIEKA

SEQ ID NO: 71784 - protein, 344 aa, Salinimonas sp.
  misc_feature (1)..(344): tr|A0A5B7YBS9|A0A5B7YBS9_9ALTE S-adenosylmethionine:tRN A ribosyltransferase-isomerase OS=Salinimonas sp. KX18D 6 OX=2572577 GN=queA PE=3 SV=1
MKLSDFNFSLPEHLIAKYPTEQRSASRLMHLNGTDGEVKHRMFADMLELVEEGDLLIFNNTRVIPARLKGKKPTGGQVEVLVERILDNNCVLAHVRASKAPKPDTQLILEDAVNVTVTGRQDALFLLRFDHDESVLALLEKYGHMPLPPYIDRPDESSDKERYQTVYNQKPGAVAAPTAGLHFDDAILQRLADKGVQTGFVTLHVGAGTFQPVRVDNILEHQMHAEYAEVPEDVVEQVRQTKAKGKRVIAVGTTSVRSLESAAKAAGDEIIAPFFDDTDIFIYPGFNFKVVDAMFTNFHLPESTLMMLISAFARRDNVMNAYAQAIDREYRFFSYGDSMFIEKA

SEQ ID NO: 71785 - protein, 344 aa, Saliniradius amylolyticus
  misc_feature (1)..(344): tr|A0A2S2E567|A0A2S2E567_9ALTE S-adenosylmethionine:tRN A ribosyltransferase-isomerase OS=Saliniradius amylolyt icus OX=2183582 GN=queA PE=3 SV=1
MKVSDFHFELPDHLIARYPSAERTASRLLTLDGCTGQFQHRRFNDILELLNPGDLLVFNNTRVIPARLLGQKASGGKVEVLVERILDDHLVLAHVRANKSPKPGTKLVVGNDLELEITGRRQALFEVQFPKHEPVLTQLEEHGHMPLPPYIDRPDEDSDKERYQTVYGEKPGAVAAPTAGLHFDETILQKLTDKGVNQAFVTLHVGAGTFQPVRVENIHDHIMHSEYAEVPQEVVDAIQATKAAGNKVVAVGTTSVRSLESAAQASKDALIAPFYDDTSIFIYPGYDFQVVDAMVTNFHLPESTLMMLVSAFSGREHIMNAYAEAVAEEYRFFSYGDAMFLTRQ

SEQ ID NO: 71786 - protein, 443 aa, Salinisphaera halophila
  misc_feature (1)..(443): tr|A0A423Q2Q4|A0A423Q2Q4_9GAMM S-adenosylmethionine:tRN A ribosyltransferase-isomerase OS=Salinisphaera halophi la YIM 95161 OX=1051139 GN=queA PE=3 SV=1
MEADAGRGGRATGPGLIDLQPARRYSPHGTDVDADAAALGTRPASLSVGPSRPRIVGTGSITRPARPPCANQARAAAALAAAGAGRQNPRQPPTEPVLMDKRDFDYDLPEQRIAQRPPARRSASRLLHLDREGGRADRAITDLVDLLEPGDLLVFNDTRVLAARLYGQKASGGRVEVMLERVLDSVRISAKIRANKPPRADTRIAIGDFMLQVTARRGELYTLTLEAGTVAALLDAHGHVPLPPYIRRADTPADLERYQTLWARHEGAVAAPTAGLHFDTPLLEALAARGVAFGYATLHVGSGTYQRLREGDVRSQRLHAERVAVDDALCALIGRTRAAGRRVVAVGTTVVRSLESAARQPGTEGRIAPFSGETALFIKPGDPFHVVDAVLTNFHEPQSSLLMLVAAFAGRERVLEAYAHAVNAEYRFLSYGDAMFIERTAAG

SEQ ID NO: 71787 - protein, 340 aa, Salinisphaera hydrothermalis
  misc_feature (1)..(340): tr|A0A084IM58|A0A084IM58_SALHC S-adenosylmethionine:tRN A ribosyltransferase-isomerase OS=Salinisphaera hydroth ermalis (strain C41B8) OX=1304275 GN=queA PE=3 SV=1
MDKRDFDYVLPEASIAQAPLAERRASRLLALDRQSGAVDDRRVVDLPALLDPHDLLVFNDTRVLAARMHGHKATGGAVEVMLERILDSRRLTAKIRANKPPRAEAEIRIGDYRLSVAARHGELYTLALDGDASVHDLLDAHGHMPLPPYIRRPDEITDRERYQTVWARHDGAVAAPTAGLHFDEVLLDALAARGVNFGYVTLHVGSGTYQRLREGDVRQQTLHAERLQVDALLCEQAAAARAAGGRVIAVGTTAVRSLETAARANGDQLGPYQGETQLFLKPGDTFHAVDAIFTNFHEPQSSLLMLISAFAGRDNVLAAYAHAVEAGYRFLSYGDAMLIR

SEQ ID NO: 71788 - protein, 342 aa, Salinisphaera japonica
  misc_feature (1)..(342): tr|A0A423PMP3|A0A423PMP3_9GAMM S-adenosylmethionine:tRN A ribosyltransferase-isomerase OS=Salinisphaera japonic a YTM-1 OX=1209778 GN=queA PE=3 SV=1
MVMDKTDFDYALPEARIAQAPLAERRASRMLCVDRTSGALADRRIVDLLDLLEAGDLLVFNDTRVLAARLYGHKTTGGAVEIMLERILAAERISAKIRANKPPRPGTRIIIGGFTLEVTARHGELYHLAIADAASLDALLGAHGHMPLPPYIRRDDQASDRTRYQTVWARHDGAVAAPTAGLHFDETLLAGLAERGVAFGYVTLHVGSGTYQRLREGDLAGQRLHAERVFVDADVCDAVARTKAAGGRVIAVGTTAIRSLETAARAGGGPMVPYADETELFIKPGDPFHVVDGVITNFHEPQSSLLMLIAAFAGRESVLAAYAHAIACEYRFLSYGDAMFIR

SEQ ID NO: 71789 - protein, 345 aa, Salinisphaera orenii
  misc_feature (1)..(345): tr|A0A423PKA5|A0A423PKA5_9GAMM S-adenosylmethionine:tRN A ribosyltransferase-isomerase OS=Salinisphaera orenii MK-B5 OX=856730 GN=queA PE=3 SV=1
MDKRDFDYDLPEHRIAQRPPARRSASRLLHLDREGERADRAITDLVDLLEPGDLLVFNDTRVLAARLYGQKASGGRVEVMLERVLDSVRISAKIRANKPPRADTRIAIGDFMLQVTARRGELYTLTLETGTVAALLDTHGHVPLPPYIRRADTPADLERYQTLWARHEGAVAAPTAGLHFDTPLLEALAARGVAFGYATLHVGSGTYQRLREGDVRSQRLHAERVAVDDALCALIERTRAAGRRVVAVGTTVVRSLESAARQPGTEGRIAPFSGETALFIKPGDPFHVVDAVLTNFHEPQSSLLMLVAAFAGRERVLEAYAHAVNAEYRFLSYGDAMFIERTAAG

SEQ ID NO: 71790 - protein, 342 aa, Salinisphaera shabanensis
  misc_feature (1)..(342): tr|U2FRR8|U2FRR8_9GAMM S-adenosylmethionine:tRNA ribosy ltransferase-isomerase OS=Salinisphaera shabanensis E1L 3A OX=1033802 GN=queA PE=3 SV=1
MDKHDFDYDLPAEAIAQQPLAERSASKLLTLDRHTGALVDGRITELVERLAPGDLVVFNDTRVLAARLFGHKASGGAVEVMLERILDSRRISAKIRANKPPRAGTVIEIGETTLEVEAREGELYTLMQTGGDSITTMLDVHGHVPLPPYIRREDTTADRSRYQTVWARHDGAVAAPTAGLHFDEALLGTLAQRGVEFGYATLHVGSGTYQRLREGDLAGQRLHAERVHVPAVLCEQVEAAKTRGSRVIAVGTTVVRSLESAARQPDTNGRIAPFEGETALFLKPGDDFHVVDAMVTNFHEPQSSLLMLVSAFAGREHVFAAYEHAKRSGYRFLSYGDAMFIG

SEQ ID NO: 71791 - protein, 342 aa, Salinisphaera sp.
  misc_feature (1)..(342): tr|A0A2E0IVL4|A0A2E0IVL4_9GAMM S-adenosylmethionine:tRN A ribosyltransferase-isomerase OS=Salinisphaera sp. OX= 1914330 GN=queA PE=3 SV=1
MNKHDFDYDLPADSIAQQPLARRSASRLLTLARDDGHLIDGAITDLPDRLAQGDLLVFNDTRVLAARLFGHKHSGGAVEVMLERILDSQRISAKIRANKPPKPGAGIVIGDTTLEVAAREGELYTLAHVAGDSIATMIEAHGHVPLPPYIRREDTAGDRARYQTVWARHDGAVAAPTAGLHFDDALLTALADKGVDFGYVTLHVGSGTYQRLREGDLADQRLHAERVHVDERLCAQVAATRARGGRVVAVGTTVVRSLESAARQPQAEGRLQPFAGETALFIKPGDPFHVVDAMLTNFHEPQSSLLMLVSAFASREAVLNAYEHAKTGGYRFLSYGDAMFIG

SEQ ID NO: 71792 - protein, 341 aa, Salinisphaera sp.
  misc_feature (1)..(341): tr|A0A2Z3J2N4|A0A2Z3J2N4_9GAMM S-adenosylmethionine:tRN A ribosyltransferase-isomerase OS=Salinisphaera sp. LB1 OX=2183911 GN=queA PE=3 SV=1
MDKHDFDYILPEASIAQAPLAERRASRLLRLDRRDGTWADRRVVDLPELLGRNDLLVFNDTRVLAARMHGRKATGGAVEVMLERILDSARLTAKIRANKPPRIDAEIIIGATRLTVAARHGELYTLVLADPASSVHDLLDAHGHMPLPPYIRRPDEIADRERYQTVWARHDGAVAAPTAGLHFDAVLLDALAGRGVDFGTVTLHVGSGTYQRLREGDVRAQRLHAERLQVGQALCDQAAAARAAGGRVIAVGTTAVRSLETAARAHNGRLGPYAGETQLFLKPGDDFHAVDAIFTNFHEPQSSLLMLVSAFAGRDNVLAAYAHAVEAGYRFLSYGDAMFIA

SEQ ID NO: 71793 - protein, 339 aa, Salinisphaeraceae bacterium
  misc_feature (1)..(339): tr|A0A2D4SAK4|A0A2D4SAK4_9GAMM S-adenosylmethionine:tRN A ribosyltransferase-isomerase OS=Salinisphaeraceae bac terium OX=2026789 GN=queA PE=3 SV=1
MRLEDFDYPLPPEAIAQQPLPVRSDSRMLHLDRAGERLDDRRVRALPACLAPGDLLVLNDTRVLAARLFGRKNTGGAVEIFLERILDSRRLSAKLRASRTPRAGGRLYVGEFALQVESRNDELFILHCDRDISDLLDAHGHVPLPPYIQRPDAETDVERYQTVWARHAGAVAAPTAGLHFDQPLLDALRQRGVATAQVTLHVGSGTYQRVRQSDIEQHRLHHERLIVGDSLCRAINETRQRGGRVVAVGTTVVRSLETAARHAATGEIEPYAGETDLFIRPGFDFRVVDAMVTNFHEPQSTLLMLVSAFAGRQRVLDAYAHALRQGYRFLSYGDAMLLT

SEQ ID NO: 71794 - protein, 375 aa, Salinispira pacifica
  misc_feature (1)..(375): tr|V5WJ57|V5WJ57_9SPIO S-adenosylmethionine:tRNA ribosy ltransferase-isomerase OS=Salinispira pacifica OX=13077 61 GN=queA PE=3 SV=1
MKTKDFYFDLPEELVAQHPSETRGGSRLLVYDRKNEYRSQNTSHGAEDRVTHDMVSRLADHIPRDTLMVFNNTRVRKARVYATSDTGSRVEFLFLAPMISGNPEGSTAHIGTGFSSLPQDQPSDTWQVMVSKTKRQKPGRSYEFPADLKGEIIATEESLRIIRLDRQIDESYFSREGHVPLPPYIEREDDSSDDRRYQTVYASREGSVAAPTAGLHITQSILEALDARGIRRCEITLHVGLGTFLPVRSESILDHNMHSEEYEVSQESAELITRHKQAGAPVLAVGTTSVRTLESAWNAEQMKLPAGRNSTDIFIYPGYKFQVVDMLMTNFHTPESTLLMLVSAFAGKDEILRVYREAVDEKYRFFSYGDAMLIR

SEQ ID NO: 71795 - protein, 350 aa, Salinivibrio kushneri
  misc_feature (1)..(350): tr|A0A4P8H5E6|A0A4P8H5E6_9GAMM S-adenosylmethionine:tRN A ribosyltransferase-isomerase OS=Salinivibrio kushneri OX=1908198 GN=queA PE=3 SV=1
MQLSDFHFELPDELIARYPQPDRSASRLLSLDGTSGEVVHRQFKDILELVEPGDLMVFNNTRVIPARVYGRKASGGKIEVLVERVLDEQRFLAHVRASKAPKPGAELFLGDEGQVAAQMVARHDALFEIQLNSDKGVVDTLNDIGHMPLPPYIDRPDEDSDKERYQTVYGEKPGAVAAPTAGLHFDDAVMAALKEKGVNIAFVTLHVGAGTFQPVRVDNIEEHTMHAEYAEVPQEVVDAVNQTRAQGKRVIAVGTTSVRSLESAAQAAKQKGEPLSPFFNDTQIFIYPGYEWQLVDVLVTNFHLPESTLIMLVSAFAGYQHTMAAYRAAVEARYRFFSYGDAMFITRQHN

SEQ ID NO: 71796 - protein, 350 aa, Salinivibrio kushneri
  misc_feature (1)..(350): tr|A0A1V3GIC4|A0A1V3GIC4_9GAMM S-adenosylmethionine:tRN A ribosyltransferase-isomerase OS=Salinivibrio kushneri OX=1908198 GN=queA PE=3 SV=1
MQLSDFHFELPDELIARYPQPDRSASRLLSLDGTSGEVVHRQFKDILELVEPGDLMVFNNTRVIPARVYGRKASGGKIEVLVERVLDEQRFLAHVRASKAPKPGAELFLGDEGQVAAQMVARHDALFEIQLNSDKGVVDTLNEIGHMPLPPYIDRPDEDSDKERYQTVYGEKPGAVAAPTAGLHFDDAVMAALKEKGVNIAFVTLHVGAGTFQPVRVDNIEEHTMHAEYAEVPQEVVDAVNQTRAQGKRVIAVGTTSVRSLESAAQEAKQKGEPLSPFFNDTQIFIYPGYEWQLVDVLVTNFHLPESTLIMLVSAFAGYQHTMAAYRAAVEARYRFFSYGDAMFITRQHN

SEQ ID NO: 71797 - protein, 350 aa, Salinivibrio sharmensis
  misc_feature (1)..(350): tr|A0A1V3H3D7|A0A1V3H3D7_9GAMM S-adenosylmethionine:tRN A ribosyltransferase-isomerase OS=Salinivibrio sharmens is OX=390883 GN=queA PE=3 SV=1
MQLSDFHFELPDELIARYPQPDRSASRLLSLDGTSGDVVHRQFKDILDLVEPGDLMVFNNTRVIPARVYGRKASGGKIEVLVERVLDEQRFLAHVRASKAPKPGAELFLGDEGQVAAQMVARHDALFEIQLNSDKGVVDTLNDIGHMPLPPYIDRPDEESDKERYQTVYNQKPGAVAAPTAGLHFDDAIMAALKEKGVNIAFVTLHVGAGTFQPVRVDNIEEHTMHAEYAEVPQEVVDAVNQTRAQGKRVIAVGTTSVRSLESAAQAAKQKGEPLSPFFNDTQIFIYPGYEWQLVDVLVTNFHLPESTLIMLVSAFAGYQHTMAAYRAAVEERYRFFSYGDAMFITRQHN

SEQ ID NO: 71798 - protein, 359 aa, Salinivibrio sp.
  misc_feature (1)..(359): tr|A0A1V3HY18|A0A1V3HY18_9GAMM S-adenosylmethionine:tRN A ribosyltransferase-isomerase OS=Salinivibrio sp. IB87 2 OX=1766123 GN=queA PE=3 SV=1
MQLSDFHFELPDELIARYPQPDRSASRLLSLDGTSGEVVHRQFKDILELVEPGDLMVFNNTRVIPARVYGRKASGGKIEVLVERVLDERRFLAHVRASKAPKPGAELFLGDDGQIPAEMVARHDALFEIQLNGDKGVVDTLNDIGHMPLPPYIDRPDEESDKERYQTVYNQKPGAVAAPTAGLHFDDAIMAALKEKGVNIAFVTLHVGAGTFQPVRVDNIEEHVMHAEYAEVPQEVVDAVNHTRAQGKRVIAVGTTSVRSLESAAQAAKQNGEPLAPFFNDTQIFIYPGYQWQLVDVLVTNFHLPESTLIMLVSSFAGYEHTMAAYRTAVEERYRFFSYGDAMFITRQQDADSSTTTRD

SEQ ID NO: 71799 - protein, 350 aa, Salinivibrio sp.
  misc_feature (1)..(350): tr|A0A1V3GST9|A0A1V3GST9_9GAMM S-adenosylmethionine:tRN A ribosyltransferase-isomerase OS=Salinivibrio sp. ML29 0 OX=1909468 GN=queA PE=3 SV=1
MQLSDFHFELPDELIARYPQPDRSASRLLSLDGTSGEVVHRQFKDILDLVEPGDLMVFNNTRVIPARVYGRKASGGKIEVLVERVLDERRFLAHVRASKAPKPGAELFLGDDGQVPAKMVARHDALFEIQLHDDKGVVDTLNDIGHMPLPPYIDRPDEESDKERYQTVYNQKPGAVAAPTAGLHFDDAIMAALKEKGVNIAFVTLHVGAGTFQPVRVDNIEEHTMHAEYAEVPQEVVDAVNQTRARGKRVIAVGTTSVRSLESAAQAAKQKGEPLSPFFNDTQIFIYPGYEWQLVDVLVTNFHLPESTLIMLVSAFAGYQHTMAAYRAAVEERYRFFSYGDAMFITRQHH

SEQ ID NO: 71800 - protein, 349 aa, Salinivirga cyanobacteriivorans
  misc_feature (1)..(349): tr|A0A0S2HZU3|A0A0S2HZU3_9BACT S-adenosylmethionine:tRN A ribosyltransferase-isomerase OS=Salinivirga cyanobact eriivorans OX=1307839 GN=queA_1 PE=3 SV=1
MKLSQFNYKLPEELIALHPAHNRDESRLMVVHRDSGKIEHKEFKDVLNYFKEDDAMIFNNTKVFPARLYGNKEKTGAKIEVFLLRELNRDQRLWDVLVDPARKIRIGNKLYFGENNSLVAEVIDNTTSRGRTLRFLFDGPYEEFKKTLYAHGETPLPKFIKREVKEEDRDRYQTIYAKHEGAVAAPTAGMHFSRELMKRLEILGVNFGFITLHVGLGNFRTVEVEDLTKHKMDSEQILITEDAANIVNSARERKSSICAVGTTVMRTLESSVSTNGMVKPYDGWTNKFIFPPYEFSVADSMISNFHLPLSTLLMMVSAFGGYDLIKDAYQTAIKEKYRFGTYGDAMLIL

SEQ ID NO: 71801 - protein, 419 aa, Salinivirga cyanobacteriivorans
  misc_feature (1)..(419): tr|A0A0S2I528|A0A0S2I528_9BACT S-adenosylmethionine:tRN A ribosyltransferase-isomerase OS=Salinivirga cyanobact eriivorans OX=1307839 GN=queA_2 PE=3 SV=1
MLIFVAQNFHKSKYFVLNSEQMKDIDINKYNYELPSERIAKYPLKKRDASKLLVYNKGAIEDHIFSELPELLPRDTRMFFNNTKVLYARLPFEKITGAQIEIFCLEPHDPADYSMNLTTRKRCQWKCLVGNLKKWKSGVLKLKGHDKIGLEASMIEKTPEHVVVEFTWKTDFSFAEILEEAGNVPIPPYLNRAAEEEDKSTYQTTYSKIDGSVAAPTAGLHFTPEVFQQLKAQHIPLHEVTLHVSAGTFRPVDHDNVRRHQMHEEYIHVDRATIASLIDNKNNVLAVGTTTVRTLESLYWIGVQILNNKPNQEHFFNVEQWEPYKEVGSSTTQEALKAILEYMDRFRLDYITGNTRIIIVPGYEHRVVDLLLTNFHQPKSTLLLLLASFIGDEWQKMYQHALNNNYRFLSYGDSCLIKL

SEQ ID NO: 71802 - protein, 349 aa, Salinivirgaceae bacterium
  misc_feature (1)..(349): tr|A0A2N6A128|A0A2N6A128_9BACT S-adenosylmethionine:tRN A ribosyltransferase-isomerase OS=Salinivirgaceae bacte rium OX=2053305 GN=queA PE=3 SV=1
MKLSQFNYKLPEELIALDPSDNRDESRLMVIDRESGKIEHKVFKDVLGYFKEDDVMVFNNTKVFPARLYGNKEKTGAKIEVFLLRELNRDQRLWDVLVDPARKIRIGNKLYFGENNSLVAEVIDNTTSRGRTLRFLFDGPYEEFKKTLYAHGETPLPKFIKRDVKTEDKERYQTIFAKHEGAVAAPTAGMHFSRELMKRLEILGVHFGFVTLHVGLGNFRTVEVEDLTKHKMDSEKIIIDDKATEIINSARERKSKICAVGTTVMRTLESSVSTNGMVKPFDGWTNKFIFPPYEFSVAQSMISNFHLPLSTLLMMVSAYGGYDLTMEAYQVAIKEKYRFGTYGDAMMII

SEQ ID NO: 71803 - protein, 187 aa, Salinivirgaceae bacterium
  misc_feature (1)..(187): tr|A0A2N5ZMJ9|A0A2N5ZMJ9_9BACT S-adenosylmethionine:tRN A ribosyltransferase-isomerase (Fragment) OS=Salinivirg aceae bacterium OX=2053305 GN=C0599_10090 PE=3 SV=1
NRSIDWHEVTLHVGAGTFRPVDKEDVREHRMHQEFITVKRDAIVNLLNNLDHIIAVGTTTVRTLESLYWIGAQILKKMPDHEVFFHVEQWEPYKNEILPEPRASLEALLQYLDMYNIDHIIGNTEIIIVPGYKHQIVKGLITNFHQPKSTLLLLLASFVGDDWKRMYNHALDNGYRFLSYGDSCLIL

SEQ ID NO: 71804 - protein, 342 aa, Salipaludibacillus aurantiacus
  misc_feature (1)..(342): tr|A0A1H9RKC2|A0A1H9RKC2_9BACI S-adenosylmethionine:tRN A ribosyltransferase-isomerase OS=Salipaludibacillus au rantiacus OX=1601833 GN=queA PE=3 SV=1
MDVSQFDYDLPEELIAQTPLKDRIGSKLLIMDKIDGNINHGRFPDLLNYLEKGDTLVLNNTKVIPARLFGVKKETGAKIELLLLKEEENHTWEALVKPAKRVREGTVIDFGNGLLTGVCKEEMKEGRRKITFHFNGIFHEILDQLGEMPLPPYIQEQLEEKDRYQTVYAEHRGSAAAPTAGLHFTTDLLEEVQRKGVKIAYVTLHVGLGTFRPVSVDTVEDHTMHAEYYEIGDETAELLNKTKTNGGRIIAVGTTSARTLETIARDNEGDFKRSSGWTDIFIFPGYQFKAIDGLLTNFHLPKSTLVMLVSAFAGKDNILAAYKEAVERRYRFFSFGDAMLLI

SEQ ID NO: 71805 - protein, 347 aa, Salipaludibacillus aurantiacus
  misc_feature (1)..(347): tr|A0A1H9Q978|A0A1H9Q978_9BACI S-adenosylmethionine:tRN A ribosyltransferase-isomerase OS=Salipaludibacillus au rantiacus OX=1601833 GN=SAMN05518684_10298 PE=3 SV=1
MNTVMPPAFTVPERLNASSPPEARGLRRDFVKMMVLSRQSGSWIDTSFSQLPGFLREGDLLVLNNSRTIPAVFKADIERNGFICKRNQEVRLARRLSEKVWEVLVPELNLQKNDQMHFSSRLSAEVINFKPELPFTVVEFSAASARLFEELYSTGEPVRYEYIHHPWSLDYYQTVYANVPGSVEMPSAGRAFSWELLQKLQAAGIRTAFLQLHTGLSYLLDDRWHQHPSHNKEHYSIPAATLSAVKQTKKDGGRVVPVGTTVVRALETAARRKSNLSSISGWTDLYINEATPLRVADGLITGFHEPEASHLDMLSAFLNRNQLITAYQHALKKGYLWHEFGDINFII

SEQ ID NO: 71806 - protein, 342 aa, Salipaludibacillus keqinensis
  misc_feature (1)..(342): tr|A0A323TX31|A0A323TX31_9BACI S-adenosylmethionine:tRN A ribosyltransferase-isomerase OS=Salipaludibacillus ke qinensis OX=2045207 GN=queA PE=3 SV=1
MDVSQFDYELPEELIAQTPLKNRDSSKLLVMDRHSGEIQHKQFPALLEYLKSGDTLVLNNTKVIPARLFGMKKETGAKIELLLLKENGNHTWEALVKPAKRIKVGTEIDFGEGLLTGVCEEELAEGRRKIKFSFSGIFHEILDQLGEMPLPPYIQEQLEEKDRYQTVYAEHRGSAAAPTAGLHFTEDMLKEVTNRGIRLAYVTLHVGLGTFRPVAVENVQEHTMHSEYYQLDEITAKLLNETKRQGGRIVAVGTTSARTLETIARDHHGQFVSASGWTDIFIYPGYTFRAIDGLLTNFHLPKSTLVMLVSAFAGKEAILSAYKEAVSKKYRFFSFGDAMLLI

SEQ ID NO: 71807 - protein, 342 aa, Salipaludibacillus neizhouensis
  misc_feature (1)..(342): tr|A0A3A9K7N9|A0A3A9K7N9_9BACI S-adenosylmethionine:tRN A ribosyltransferase-isomerase OS=Salipaludibacillus ne izhouensis OX=885475 GN=queA PE=3 SV=1
MDLSQFDYNLPEELIAQTPLKNREASKLLVLDKNTGICEHHHFYDLLSFLKQGDTLVLNNTKVIPARLFGIKDETGAKIELLLLKEKEDHIWEALVKPAKRVKVGTVIDFGEGLLTGRCMEELPEGRRMIQFEFKGIFHEILDQLGEMPLPPYIQEQLEEKDRYQTVYAEHKGSAAAPTAGLHFTKNMLENLQEAGIKIAYITLHVGLGTFRPVSVDNIDDHQMHSEFYQMNEESANILNESKKNKERIFAIGTTSARTLETITRDHHGEFKASSGWTDIFIYPGFNFQAIDGLLTNFHLPKSTLVMLVSALAGRERILHAYEEAIKNNYRFFSFGDAMLIC

SEQ ID NO: 71808 - protein, 349 aa, Salipiger aestuarii
  misc_feature (1)..(349): tr|A0A327XUD4|A0A327XUD4_9RHOB S-adenosylmethionine:tRN A ribosyltransferase-isomerase OS=Salipiger aestuarii O X=568098 GN=queA PE=3 SV=1
MQLSDFDFDLPEDRIATRPAVPRSSARLLVATGDAITDGVVTDLVDWLRPGDRLVLNDTRVIPARLTGWRERDSAQGQTRARIEITLLEPRADGSWAALVKPLKRLRDGETVVFSDGLSARMTGREDGQGLFRFNLAGPDFDAALEAAGAMPLPPYIAAKRQADARDKSDYQTVWADRTGAVAAPTASLHFDTALLDALSARGVDFTRVTLHVGAGTFLPVKVDDVTTHKMHGEWGEVTPRAADEIAATQAAGGRIIPVGTTALRLIETAARDTGAIAPWRGVTDIFIYPGFEFRVTDALMTNFHLPRSTLMMLVSALVGRDRVMRIYDHAIARGYRFFSYGDASLLIP

SEQ ID NO: 71809 - protein, 349 aa, Salipiger bermudensis
  misc_feature (1)..(349): tr|Q0FP83|Q0FP83_SALBH S-adenosylmethionine:tRNA ribosy ltransferase-isomerase OS=Salipiger bermudensis (strain DSM 26914 / JCM 13377 / KCTC 12554 / HTCC2601) OX=3142 65 GN=queA PE=3 SV=1
MHLSDFDFDLPDELIATRPANPRSSARLLVAEGDTITDAVVRDLTQWLRPGDRLVLNDTKVIPARLSGARTRESAQGVTQAQIEITLLEPRPGGLWAALVKPLKKLREGETVVFSEALSATLEAREDGQGLLRFNLEGEDFDAALAEAGAMPLPPYIAAKRAADAQDKTDYQTVWAERTGAVAAPTASLHFDAGLLAALEAHGVAFTKVTLHVGAGTFLPVKVDDVTTHKMHGEWGEVSESAAAEIAATKAAGGRVIPVGTTALRLLETAARDSGAIAAWQGVTDIFIYPGFAFRVTDALMTNFHLPKSTLMMLVSALMGRERMMGIYEHAISERYRFFSYGDSSLLIP

SEQ ID NO: 71810 - protein, 349 aa, Salipiger marinus
  misc_feature (1)..(349): tr|A0A1G8RA18|A0A1G8RA18_9RHOB S-adenosylmethionine:tRN A ribosyltransferase-isomerase OS=Salipiger marinus OX= 555512 GN=queA PE=3 SV=1
MLLSDFDFPLPEDLIATRPASPRSAARLLVAEGACLTDAVVRDLPDWLRPGDRLVLNDTRVIPARLSGLRHRHGAQGDTAAQIELTLLEPRPGGLWAALVKPLKKLREGETVVLSDELSATLAGREDGQGLFRFNLTGEDFDAALARAGAMPLPPYIAAKRPADEQDKTDYQTVWARHSGAVAAPTASLHFDAPLLAALEAHGVSFTHVTLHVGAGTFLPVKVEDVTTHRMHGEWGEVTAPAAAEIAATKAAGGRVIPVGTTALRLIETAARDSGQVVPWQGVTDIFIYPGFTFRAADALMTNFHLPKSTLMMLVAAFMGKARIDRVYAHALAERYRFFSYGDASLLIP

SEQ ID NO: 71811 - protein, 349 aa, Salipiger mucosus
  misc_feature (1)..(349): tr|S9S4B1|S9S4B1_9RHOB S-adenosylmethionine:tRNA ribosy ltransferase-isomerase OS=Salipiger mucosus DSM 16094 O X=1123237 GN=queA PE=3 SV=1
MKLSDFDFDLPEDLIATRPARPRSSARLLVAEGDAVTDAVVRDLADWLRPGDRLVLNDTRVIPARLSGTRRRAGAQGESEAKIEVTLLEPRADGLWSALVKPLKKLREGETVTFSPALSATLEAREEGQGLLRFNLTGEDFDAALAEAGAMPLPPYIAARRAADAQDRDDYQTVWARNAGAVAAPTASLHFDEPLLAALRDHGVDFTHVTLHVGAGTFLPVKVEDVTTHKMHGEWGEVSESAAAEIADTKARGGRVIPVGTTALRLIETAARESGAIAPWRGTTEIFIYPGFEFRVADALMTNFHLPKSTLLMLVSALMGRERMLRIYAHAVAERYRFFSYGDASLLIP

SEQ ID NO: 71812 - protein, 349 aa, Salipiger profundus
  misc_feature (1)..(349): tr|A0A1U7DBT9|A0A1U7DBT9_9RHOB S-adenosylmethionine:tRN A ribosyltransferase-isomerase OS=Salipiger profundus O X=1229727 GN=queA PE=3 SV=1
MKLSDFDFDLPEDLIATRPASPRSSARLLVADGDRIQDAIVRDLTDWLRPGDRLVLNDTRVIPARLSGTRTRDGAQGTTQAQIELTLLEPRADGCWAALVKPLKKLREGETVVFSDRLSAVLEAREEGQGLFRFNLAGEDFDAALAEAGAMPLPPYIAAKRAADARDKEDYQTVWAERSGAVAAPTASLHFDAPLLAALEAQGVTFSKVTLHVGAGTFLPVKVDDVTAHKMHGEWGEVTDTAAAEIAATKAAGGRVIPVGTTALRLIETAARETGTIAPWQGVTDIFIYPGFAFRVTDALMTNFHLPKSTLMMLVSALMGRERMMRVYAHAIAERYRFFSYGDASLLIP

SEQ ID NO: 71813 - protein, 349 aa, Salipiger sp.
  misc_feature (1)..(349): tr|A0A4Q3YY49|A0A4Q3YY49_9RHOB S-adenosylmethionine:tRN A ribosyltransferase-isomerase OS=Salipiger sp. IMCC341 02 OX=2510647 GN=queA PE=3 SV=1
MKLSDFDFDLPDDRIALRPARPRTSAKLLVATPDEIRDAHVRDLVDLLQPGDRLVLNDTKVIPARLTGTRTRTGAAGTTSARIEVTLLSPTPEGWQALVKPLKKVRDGEVIAFKAGLRARVLGRAEGQAHLAFDTQGADFDAALDRAGQMPLPPYIAALRPADAADRDDYQTAWARATGAVAAPTASLHFDAKLLQALAAKGVETTFVTLHVGAGTFLPVKVDDIADHRMHAEWGEVTPEAAAQIAATKAAGGRVIPVGTTALRLIETAARAGEIGPWTGETDIFITPGFTFHVADALMTNFHLPKSTLMMLVSAFIGVERIRQIYDHAIANDYRFFSYGDASLLLPRG

SEQ ID NO: 71814 - protein, 349 aa, Salipiger thiooxidans
  misc_feature (1)..(349): tr|A0A1G7DMN1|A0A1G7DMN1_9RHOB S-adenosylmethionine:tRN A ribosyltransferase-isomerase OS=Salipiger thiooxidans OX=282683 GN=queA PE=3 SV=1
MKLSDFDFDLPEALIATRPANPRSSARLLVADGDRLTDAVVRDLTQWLRPGDRLVLNDTKVIPARLSGTRERDGAQGLTRAQIEVTLLEPRADGCWAALVKPLKKLREGETVVFSDALSAVLESREEGQGLLRFNLVGEDFDAALAEAGAMPLPPYIAARRAADAQDKQDYQTVWAERNGAVAAPTASLHFDEPLLESLRAHGVAFTKVTLHVGAGTFLPVKVEDVTTHRMHGEWGEVSDSAAAEIAATKAAGGRVIPVGTTALRLLETAARDTGAIAPWQGVTDIFIYPGFTFRVTDALMTNFHLPKSTLMMLVSALMGQERMKRIYDHAITERYRFFSYGDSSLLIP

SEQ ID NO: 71815 - protein, 349 aa, Salisediminibacterium haloalkalitolerans
  misc_feature (1)..(349): tr|A0A1H9VD23|A0A1H9VD23_9BACI S-adenosylmethionine:tRN A ribosyltransferase-isomerase OS=Salisediminibacterium haloalkalitolerans OX=1464123 GN=queA PE=3 SV=1
MDVSYFDYELPEELIAQTPLKDRSSSRLLVMDKDSGQTDHRVFHELDEFLQPGDRLVLNNTKVLPARLFGVKEETKAKTEVLLLNEESDHTWEVLVKPAKKIKVGTRVSFGGGLLTGECTDILPEGRRKIRFEFEGIFQEILDRLGEMPLPPYIQETLDEQDRYQTVYAKHRGSAAAPTAGLHFTEEMLKQLEEKGVGISYVTLHVGLGTFRPVAVDTVEAHTMHAEFYEVSEETAKALNATANGEGRIVAVGTTSARTLETIVRDYGKFQAASGWTDIFIYPGFTFRAVDSLLTNFHLPKSTLMMLVSAFAGRDAIMNAYREAVDHRYRFFSFGDAMFLTDGLAEGYQ

SEQ ID NO: 71816 - protein, 343 aa, Saliterribacillus persicus
  misc_feature (1)..(343): tr|A0A368XEQ2|A0A368XEQ2_9BACI S-adenosylmethionine:tRN A ribosyltransferase-isomerase OS=Saliterribacillus per sicus OX=930114 GN=queA PE=3 SV=1
MNIEDFDFELPEELIAQTPLIDRTASKMMVLHAAENTISHERFYNISNYLKPGDCLVLNDTKVLPARLYGSKTDTNAKVEVLLLTQEQDDNWEVLVKPAKKVKIGTTITFGDNKLTATCIKELEHGGRILRFSYSGIFYEVLDELGEMPLPPYIKEQLPDKDRYQTVFAKEQGSAAAPTAGLHFTEELLDEIKSKGVEIAFITLHVGLGTFRPVSVETIEDHHMHAEFYRMTKETADQLNQVKKKGGRVISVGTTSTRTLETIARDHHGEFKNCSGWTDIFIYPPYTFKAIDGLITNFHLPKSTLIMLISAFAGREFILNAYQEAVKEKYRFFSFGDAMLIFK

SEQ ID NO: 71817 - protein, 354 aa, Salmonella abony
  misc_feature (1)..(354): tr|A0A5I1FIH3|A0A5I1FIH3_SALAB tRNA preQ1(34) S-adenosy lmethionine ribosyltransferase-isomerase QueA OS=Salmon ella abony OX=29482 GN=queA PE=4 SV=1
MRVTDFSFELPESLIAHYPQPERSRCRLLSLEGPTGALTHGTFTDLLDKLNPGDLLVFNNTRVIPARLFGRKASGGKIEVLVERMLDDKRILAHIRASKAPKPGTELLLGDDESIHATMTARHGALFEVEFNDPRPVLDILNAIGHMPLPPYIDRPDEDADRELYQTVYSKKPGAVAAPTAGLHFDEPLLAALREKGVEMAFVTLHVGAGTFQPVRVDTIEDHIMHSEYAEVPQEVVDAVLAAKARGNRVIAVGTTSVRSLESAAQAAKSDLIEPFFGDTQIFIYPGYQYKVIDALITNFHLPESTLIMLVSAFAGYQHTMNAYKTAVEQKYRFFSYGDAMFITYNPQAISERP

SEQ ID NO: 71818 - protein, 354 aa, Salmonella abony
  misc_feature (1)..(354): tr|A0A5J0DY62|A0A5J0DY62_SALAB tRNA preQ1(34) S-adenosy lmethionine ribosyltransferase-isomerase QueA OS=Salmon ella abony OX=29482 GN=queA PE=4 SV=1
MRVTDFSFELPESLIAHYPQPERSRCRLLSLEGPTGALTHGTFTDLLDKLNPGDLLVFNNTRVIPARLFGRKASGGKIEVLVERMLDDKRILAHIRASKAPKPGTELLLGDDESIHATMTARHGALFEVEFNDPRPVLDILNAIGHMPLPPYIDRPDEDADRELYQTVYSEKPGAVAAPTAGLHFDEPLLAALREKGVEMAFVTLHVGAGTFQPVRVDTIEDHIMHSEYAEVPQEVVDAVLAAKARGNRVIAVGTTSVRSLESAAQAAKSDLIEPFFGDTQIFIYPGYQYKVIDALITNFHLPESTLIMLVSAFAGYQHTMNAYKTAVEQKYRFFSYGDAMFITYNPQAIFERP

SEQ ID NO: 71819 - protein, 359 aa, Salmonella agona
  misc_feature (1)..(359): tr|B5F5Y7|B5F5Y7_SALA4 S-adenosylmethionine:tRNA ribosy ltransferase-isomerase OS=Salmonella agona (strain SL48 3) OX=454166 GN=SeAg_B1621 PE=3 SV=1
MLTEKYDFRITDQMTIPLRPHWIANDSYREKCKMLVLNRSKGEIHKVDFSKVTDYIKEGDVICFNDSTIINHMFICKTRRNRLIKVVLEGFLPNNRVIISGLLKERLNANDVFSLVDNPEISIKVEQKFSEESQYRAVVENHEALICYLASHGERLDEYVDSSLFYKYPDAYRSVFSKKYGSLEIPSAGIHFTWDLIQRIKDKGGLISFITLHVASTEMLSNRKIQTKCVEEVTINEEYYEVPQATADIINTAKQNGGRIFAVGTTVTRCLESAYSREHNCLKASSGWTALYIHPGYQLKVVDCLLTNLHQPKTTHMVLTGQFAGVDLLMKAYASEDIQSCQFDMFGDCMLIIQDEGQG

SEQ ID NO: 71820 - protein, 354 aa, Salmonella agona
  misc_feature (1)..(354): sp|B5EWT8|QUEA_SALA4 S-adenosylmethionine:tRNA ribosylt ransferase-isomerase OS=Salmonella agona (strain SL483) OX=454166 GN=queA PE=3 SV=1
MRVTDFSFELPESLIAHYPQPERSRCRLLSLEGPTGALTHGTFTDLLDKLNPGDLLVFNNTRVIPARLFGRKASGGKIEVLVERMLDDKRILAHIRASKAPKPGTELLLGDDESIHATMTARHGALFEVEFNDPRPVLDILNAIGHMPLPPYIDRPDEDADRELYQTVYSEKPGAVAAPTAGLHFDEPLLAALREKGVEMAFVTLHVGAGTFQPVRVDTIEDHIMHSEYAEVPQEVVDAVLAAKARGNRVIAVGTTSVRSLESAAQAAKRDLIEPFFGDTQIFIYPGYQYKVIDALITNFHLPESTLIMLVSAFAGYQHTMNAYKTAVEQKYRFFSYGDAMFITYNPQAISERP

SEQ ID NO: 71821 - protein, 359 aa, Salmonella anatum
  misc_feature (1)..(359): tr|A0A3Y5SE67|A0A3Y5SE67_SALAN S-adenosylmethionine:tRN A ribosyltransferase-isomerase OS=Salmonella anatum OX= 58712 GN=ZD17_08270 PE=3 SV=1
MLTEKYDFRITDQMTIPLRPHWIANDSYREKCKMLVLNRSKGEIHKVDFSKVTDYIKEGDVICFNDSTIINHMFICKTRQNRLIKIVLEGFLPNNRVIISGLLKERLNANDVFYLVDNPEISIKIEQKFSEESQYRAVVENHEALICYLASHGERLDEYVDSSLFYKYPDAYRSVFSKKYGSLEIPSAGIHFTWDLIQKIKDKGGLISFITLHVASTEMLSNRKIQTKCVEEVTINEEYYEVPQATADIINTAKQNGGRIFAVGTTVTRCLESAYSREHNCLKASSGWTELYIHPGYQLKVVDCLLTNLHQPKTTHMVLTGHFAGVDLLMKAYASEDIQSCQFDMFGDCMLIIQDEGQG

SEQ ID NO: 71822 - protein, 359 aa, Salmonella anatum
  misc_feature (1)..(359): tr|A0A2T8MGA6|A0A2T8MGA6_SALAN S-adenosylmethionine:tRN A ribosyltransferase-isomerase OS=Salmonella anatum OX= 58712 GN=AA325_03560 PE=3 SV=1
MLTEKYDFRITDQMTIPLRPHWIANDSYREKCKMLVLNRSKGEIHKVDFSKVTDYIKEGDVICFNDSTIINHMFICKTRRNRLIKIVLEGFLPNNRVIISGLLKERLNANDVFYLVDNPEISIKVEQKFSEESQYRAVVENHESLICYLASHGERLDEYVDSSLFYKYPDAYRSVFSKKYGSLEIPSAGIHFTWDLIQRIKDKGGLISFITLHVASTEMLSNRKIQTKCVEEVTINEEYYEVPQATADIINTAKQNGGRIFAVGTTVTRCLESAYSREHNCLKASSGWTALYIHPGYQLKVVDCLLTNLHQPKTTHMVLTGQFAGVDLLMKAYASEDIQSCQFDMFGDCMLIIQDEGQG

SEQ ID NO: 71823 - protein, 356 aa, Salmonella arizonae
  misc_feature (1)..(356): sp|A9MM58|QUEA_SALAR S-adenosylmethionine:tRNA ribosylt ransferase-isomerase OS=Salmonella arizonae (strain ATC C BAA-731 / CDC346-86 / RSK2980) OX=41514 GN=queA PE=3 SV=1
MRVTDFSFELPESLIAHYPQPERSRCRLLSLEGPTGALTHGTFTDLLDKLNPGDVLVFNNTRVIPARLFGRKASGGKIEVLVERMLDDKRILAHIRASKAPKPGTELLLGDDENIHATMTARHGALFEVEFNDERPVLDILNAIGHMPLPPYIDRPDEDADRELYQTVYSEKPGAVAAPTAGLHFDKPLLAALREKGIEMAFVTLHVGAGTFQPVRVDTIEDHIMHSEYAEVPQEVVDAVLAAKARGNRVIAVGTTSVRSLESAAQAAKSDLIEPFFGDTQIFIYPGYQYKVIDALVTNFHLPESTLIMLVSAFAGYEHTMNAYKAAVEQKYRFFSYGDAMFITYNPQAIFERVGE

SEQ ID NO: 71824 - protein, 354 aa, Salmonella berta
  misc_feature (1)..(354): tr|A0A3V6R428|A0A3V6R428_SALBE S-adenosylmethionine:tRN A ribosyltransferase-isomerase OS=Salmonella berta OX=2 8142 GN=queA PE=3 SV=1
MRVTDFSFELPESLIAHYPQPERSRCRLLSLEGPTGALTHGTFTDLLDKLNPGDLLVFNNTRVIPARLFGRKASGGKIEVLVERMLDDKRILAHIRASKAPKPGTELLLGDDESIHATMTARHGALFEVEFNDPRPVLDILNAIGHMPLPPYIDRPDEDADRELYQTVYSEKPGAVAAPTAGLHFDEPLLAALREKGIEMAFVTLHVGAGTFQPVRVDTIEDHIMHSEYAEVPQEVVDAVLAAKARGNRVIAVGTTSVRSLESAAQAAKNDLIEPFFGDTQIFIYPGYQYKVIDALITNFHLPESTLIMLVSAFAGYQHTMNAYKTAVEQKYRFFSYGDAMFITYNPQAISERP

SEQ ID NO: 71825 - protein, 354 aa, Salmonella berta
  misc_feature (1)..(354): tr|A0A3U8PAG3|A0A3U8PAG3_SALBE S-adenosylmethionine:tRN A ribosyltransferase-isomerase OS=Salmonella berta OX=2 8142 GN=queA PE=3 SV=1
MRVTDFSFELPESLIAHYPQPERSRCRLLSLEGPTGALTHGTFTDLLDKLNPGDLLVFNNTRVIPARLFGRKASGGKIEVLVERMLDDKRILAHIRASKAPKPGTELLLGDDESIHATMTARHGALFEVEFNDPRPVLDILNAIGHMPLPPYIDRPDEDADRELYQTVYSEKPGAVAAPTAGLHFDEPLLAALREKGVEMAFVTLHVGAGTFQPVRVDTIEDHIMHSEYAEVPQEVVDAVLAAKARGNRVIAVGTTSVRSLESAAQAAKSDLMEPFFGDTQIFIYPGYQYKVIDALITNFHLPESTLIMLVSAFAGYQHTMNAYKTAVEQKYRFFSYGDAMFITYNPQAISERP

SEQ ID NO: 71826 - protein, 354 aa, Salmonella blockley
  misc_feature (1)..(354): tr|A0A5H8H6L4|A0A5H8H6L4_SALBL tRNA preQ1(34) S-adenosy lmethionine ribosyltransferase-isomerase QueA OS=Salmon ella blockley OX=57741 GN=queA PE=4 SV=1
MRVTDFSFELPESLIAHYPQPERSRCRLLSLEGPTGALTHGTFTDLLDKLNPGDLLVFNNTRVIPARLFGRKASGGKIEVLVERMLDDKRILAHIRASKAPKPGTELLLGDDESIHATMTARHGALFEVEFNDPRPVLDILNAIGHMPLPPYIDRPDEDADRELYQTVYSEKPGAVAAPTAGLHFDEPLLAALREKGVEMAFVTLHVGAGTFQPVRVDTIEDHIMHSEYAEVPQEVVDAVLAAKARGNRVIAVGTTSVRSLESAAQAAKSDLIEPFFGDTQIFIYPGYQYKVIDALITNFHLPESTLIMLVSAFAGYQHTMNAYKTAVEQKYRFFSYGDAMFITYNPQAISERP

SEQ ID NO: 71827 - protein, 354 aa, Salmonella bongori
  misc_feature (1)..(354): tr|A0A0K0H7Z3|A0A0K0H7Z3_SALBC S-adenosylmethionine:tRN A ribosyltransferase-isomerase OS=Salmonella bongori (s train ATCC 43975 / DSM 13772 / NCTC 12419) OX=218493 GN =queA PE=3 SV=1
MRVTDFSFELPESLIAHYPQPERSRCRLLSLDGPTGALTHGTFTDLLDKLNPGDLLVFNNTRVIPARLFGRKASGGKIEVLVERMLDDKHVLAHIRASKAPKPGTELLLGDEENIHATMIARHGALFEVEFNDERPVLDILNAIGHMPLPPYIARPDEDADRELYQTVYSEKPGAVAAPTAGLHFDEPLLARLRDKGIEMAFVTLHVGAGTFQPVRVETIEDHIMHSEYAEVPQDVVDAVLAAKARGNRVIAVGTTSVRSLESAAQAAKDTLIAPFFGDTQIFIYPGYQYKVIDALVTNFHLPESTLIMLVSAFAGYKHTMHAYHEAVKAEYRFFSYGDAMFITYNPQAITEVP

SEQ ID NO: 71828 - protein, 354 aa, Salmonella bongori; identical to SEQ ID NO: 71827
  misc_feature (1)..(354): tr|A0A5I6N141|A0A5I6N141_SALBN tRNA preQ1(34) S-adenosy lmethionine ribosyltransferase-isomerase QueA OS=Salmon ella bongori CFSAN000510 OX=1299282 GN=queA PE=4 SV=1

SEQ ID NO: 71829 - protein, 354 aa, Salmonella choleraesuis
  misc_feature (1)..(354): sp|Q57SF9|QUEA_SALCH S-adenosylmethionine:tRNA ribosylt ransferase-isomerase OS=Salmonella choleraesuis (strain SC-B67) OX=321314 GN=queA PE=3 SV=1
MRVTDFSFELPESLIAHYPQPERSRCRLLSLEGPTGALTHGTFTDLLDKLNPGDLLVFNNTRVIPARLFGRKASGGKIEVLVERMLDDKRILAHIRASKAPKPGTELLLGDDESIHATMTARHGALFEVEFNDPRPVLDILNAIGHMPLPQYIDRPDEDADRELYQTVYSEKPGAVAAPTAGLHFDEPLLAALREKGVEMAFVTLHVGAGTFQPVRVDTIEDHIMHSEYAEVPQEVVDAVLAAKARGNRVIAVGTTSVRSLESAAQAAKSDLIEPFFGDTQIFIYPGYQYKVIDALITNFHLPESTLIMLVSAFAGYQHTMNAYKTAVEQKYRFFSYGDAMFITYNPQAISERP

SEQ ID NO: 71830 - protein, 357 aa, Salmonella derby
  misc_feature (1)..(357): tr|A0A4Z8T6A0|A0A4Z8T6A0_SALDE S-adenosylmethionine:tRN A ribosyltransferase-isomerase OS=Salmonella derby OX=2 8144 GN=FG671_001140 PE=3 SV=1
MLTEKYDFRITDQMTIPLRPHWIANDSYREKCKMLVLNRSKGEIHKVDFSKVTDYIKEGDVICFNDSTIINHMFICKTRQNRLIKIVLEGFLPNNRVIISGLLKERLNANDVFSLIDNPEISIKIEQRFSEESQYRAVVENHEALICYLASHGERLDEYVDSSLFYKYPDAYRSVFSKKYGSLEIPSAGIHFTWDLIQRIKDKGGLISFITLHVASTEMLSNRKIQTKCVEEVTINEEYYEVPQATADIINTAKQNGGRIFAVGTTVTRCLESAYSREHNCLKASSGWTALYIHPGYQLKVVDCLLTNLHQPKTTHMVLTGQFAGVDLLMKAYASEDIQSCQFDMFGDCMLIIQDVG

SEQ ID NO: 71831 - protein, 354 aa, Salmonella derby
  misc_feature (1)..(354): tr|A0A3V6WDY7|A0A3V6WDY7_SALDE S-adenosylmethionine:tRN A ribosyltransferase-isomerase OS=Salmonella derby OX=2 8144 GN=queA PE=3 SV=1
MRVTDFSFELPESLIAHYPQPERSRCRLLSLEGPTGALTHGTFTDLLDKLNPGDLLVFNNTRVIPARLFGRKASGGKIEVLVERMLDDKRILAHIRASKAPKPGTELLLGDDESIHATMTARHGALFEVEFNDPRPVLDILNAIGHMPLPPYIDRPDEDADRELYQTVYSEKPGAVAAPTAGLHFDEPLLAALREKGVEMAFVTLHVGAGTFQPVRVDTIEDHIMHSEYAEVPQEVVDAVLAAKARRNRVIAVGTTSVRSLESAAQAAKSDLIEPFFGDTQIFIYPGYQYKVIDALITNFHLPESTLIMLVSAFAGYQHTMNAYKTAVEQKYRFFSYGDAMFITYNPQAISERP

SEQ ID NO: 71832 - protein, 359 aa, Salmonella diarizonae
  misc_feature (1)..(359): tr|A0A3R0B6Y2|A0A3R0B6Y2_SALDZ S-adenosylmethionine:tRN A ribosyltransferase-isomerase OS=Salmonella diarizonae OX=59204 GN=EL06_22900 PE=3 SV=1
MLTEKYNFRIVDTMTIPLRPHWISNDAYREKCKMLVLNRSKEEFHKVDFIKIIDYIKEGDVVCFNDSTIINHMFICKTKCNILVKIILEGFLPENRVIISGLLKEKFDGGDVLYLVDNTNVSIVIEQEFSEENQYQAVVENHDALIYYLVSHGERLDEYVDSSFFYKYPDAYRSVFSKKYGSLEIPSAGIHFTWDLIQKIKDKGGLIAFITLHVASAEILTNRKIQTKCVEDVTINEEYYDVPQATADAINTAKKNGGRIFAVGTTVTRCLESAYSREHNCLKASSGWTALYIHPGYQLKVVDCLLTNLHQPKTTHMVLTGQFAGVDLLMKAYASEEIQSCQFDMFGDCMLIIQDEGQG

SEQ ID NO: 71833 - protein, 354 aa, Salmonella diarizonae
  misc_feature (1)..(354): tr|A0A2I5HJR3|A0A2I5HJR3_SALDZ S-adenosylmethionine:tRN A ribosyltransferase-isomerase OS=Salmonella diarizonae OX=59204 GN=queA PE=3 SV=1
MRVTDFSFELPESLIAHYPQPERSRCRLLSLEGPTGALTHGTFTDLLDKLNPGDLLVFNNTRVIPARLFGRKASGGKIEVLVERMLDDKRILAHIRASKAPKPGTELLLGDDESIHATMTARHGALFEVEFNDQRPVLDILNAIGHMPLPPYIDRPDEDADRELYQTVYSEKPGAVAAPTAGLHFDEPLLAALREKGIEMAFVTLHVGAGTFQPVRVDTIEDHIMHSEYAEVPQEVVDAVLAAKARGKRVIAVGTTSVRSLESAAQAAKSDLIEPFFGDTQIFIYPGYQYKVIDALVTNFHLPESTLIMLVSAFAGYEHTMNAYKAAVEQKYRFFSYGDAMFITYNPQAIFERP

SEQ ID NO: 71834 - protein, 354 aa, Salmonella dublin; identical to SEQ ID NO: 71824
  misc_feature (1)..(354): tr|A0A3T3IJQ5|A0A3T3IJQ5_SALDU S-adenosylmethionine:tRN A ribosyltransferase-isomerase OS=Salmonella dublin OX= 98360 GN=queA PE=3 SV=1

SEQ ID NO: 71835 - protein, 354 aa, Salmonella dublin; identical to SEQ ID NO: 71824
  misc_feature (1)..(354): sp|B5FKQ9|QUEA_SALDC S-adenosylmethionine:tRNA ribosylt ransferase-isomerase OS=Salmonella dublin (strain CT_02 021853) OX=439851 GN=queA PE=3 SV=1

SEQ ID NO: 71836 - protein, 287 aa, Salmonella enterica
  misc_feature (1)..(287): tr|A0A5F1JM90|A0A5F1JM90_SALET S-adenosylmethionine:tRN A ribosyltransferase-isomerase (Fragment) OS=Salmonella enterica subsp. enterica serovar Wilhelmsburg OX=19601 26 GN=C9E92_15730 PE=3 SV=1
MFICKTRQNRLIKIVLEGFLPNNRVIISGLLKERLNANDVFYLVDNPEISIKIEQRFSEESQYRAVVENHEALICYLASHGERLDEYVDSSLFYKYPDAYRSVFSKKYGSLEIPSAGIHFTWDLIQKIKDKGGLISFITLHVASTEMLSNRKIQTKCVEEVTINEEYYEVPQATADIINTAKQNGGRIFAVGTTVTRCLESAYSREHNCLKASSGWTALYIHPGYQLKVVDCLLTNLHQPKTTHMVLTGQFAGVDLLMKAYASEDIQSCQFDMFGDCMLIIQDEGQG

SEQ ID NO: 71837 - protein, 359 aa, Salmonella enterica
  misc_feature (1)..(359): tr|A0A402MNG6|A0A402MNG6_SALET S-adenosylmethionine:tRN A ribosyltransferase-isomerase OS=Salmonella enterica s ubsp. enterica serovar Braenderup str. CFSAN001740 OX=1 299119 GN=AIK92_02665 PE=3 SV=1
MLTEKYDFRITDQMTIPLRPHWIANDSYREKCKMLVLNRSKGEIHKVDFSKVTDYIKEGDVICFNDSTIINHMFICKTRRNRLIKIVLEGFLPNNRVIISGLLKERLNANDVFYLVDNPEISIKIEQRFSEDSQYRAVVENHEALICYLASHGERLDEYVDSSLFYKYPDAYRSVFSKKYGSLEIPSAGIHFTWDLIQRIKDKGGLISFITLHVASTEMLSNRKIQTKCVEEVTINEEYYEVPQATADIINTAKQNGGRIFAVGTTVTRCLESAYSREHNCLKASSGWTALYIHPGYQLKVVDCLLTNLHQPKTTHMVLTGQFAGVDLLIKAYTSEHIQSCQFDMFGDCMLIIQDEGQG

SEQ ID NO: 71838 - protein, 354 aa, Salmonella enteritidis
  misc_feature (1)..(354): tr|A0A403FIM3|A0A403FIM3_SALEN S-adenosylmethionine:tRN A ribosyltransferase-isomerase OS=Salmonella enteritidi s OX=149539 GN=queA PE=3 SV=1
MRVTDFSFELPESLIAHYPQPERSRCRLLSLEGPTGALTHGTFTDLLDKLNPGDLLVFNNTRVIPARLFGRKASGGKIEVLVERMLDDKRILAHIRASKAPKPGTELLLGDDESIHATMTARHGALFEVEFNDQRPVLDILNAIGHMPLPPYIDRPDEDADRELYQTVYSEKPGAVAAPTAGLHFDEPLLAALREKGIEMAFVTLHVGAGTFQPVRVDTIEDHIMHSEYAEVPQEVVDAVLAAKARGNRVIAVGTTSVRSLESAAQAAKSDLIEPFFGDTQIFIYPGYQYKVIDALVTNFHLPESTLIMLVSAFAGYEHTMNAYKAAVEQKYRFFSYGDAMFITYNPQAIFERP

SEQ ID NO: 71839 - protein, 354 aa, Salmonella enteritidis; identical to SEQ ID NO: 71824
  misc_feature (1)..(354): sp|B5QTF3|QUEA_SALEP S-adenosylmethionine:tRNA ribosylt ransferase-isomerase OS=Salmonella enteritidis PT4 (str ain P125109) OX=550537 GN=queA PE=3 SV=1

SEQ ID NO: 71840 - protein, 354 aa, Salmonella gallinarum
  misc_feature (1)..(354): tr|A0A3V9NJ79|A0A3V9NJ79_SALGL S-adenosylmethionine:tRN A ribosyltransferase-isomerase OS=Salmonella gallinarum OX=594 GN=queA PE=3 SV=1
MRVTDFSFELPESLIAHYPQPERSRCRLLSLEGPTGALTHGTFTDLLDKLNPGDLLVFNNTRVIPARLFGRKASGGKIEVLVERMLDDKRILAHIRASKAPKPGTELLLGDDESIHATMTARHGALFEVEFNDPRPVLDILNAIGHMPLPPYIDRPDEDADRELYQTVYSEKPGAVAAPTAGLHFDEPLLAALREKGIEMAFVTLHVGAGTFQPVRVDTIEDHIMHSEYAEVPQEVVDAVLAAKARGNRVIAVGTTSVRSLESAAQAAKNDLIEPLFGDTQIFIYPGYQYKVIDALITNFHLPESTLIMLVSAFAGYQHTMNAYKTAVEQKYRFFSYGDAMFITYNPQAISERP

SEQ ID NO: 71841 - protein, 354 aa, Salmonella gallinarum; identical to SEQ ID NO: 71840
  misc_feature (1)..(354): sp|B5R6Q6|QUEA_SALG2 S-adenosylmethionine:tRNA ribosylt ransferase-isomerase OS=Salmonella gallinarum (strain 2 87/91 / NCTC 13346) OX=550538 GN=queA PE=3 SV=1

SEQ ID NO: 71842 - protein, 359 aa, Salmonella hadar
  misc_feature (1)..(359): tr|A0A3V2VYM3|A0A3V2VYM3_SALHA S-adenosylmethionine:tRN A ribosyltransferase-isomerase OS=Salmonella hadar OX=1 49385 GN=D7N39_08900 PE=3 SV=1
MLTEKYDFRITDQMTIPLRPHWIANDSYREKCKMLVLNRSKGEIHKVDFSKLTDYIKEGDVICFNDSTIINHMFICKTRQNRLIKIVLEGFLPNNRVIISGLLKERLNANDVFYLVDNPEISIKIEQRFSEESQYRAVVENHEALIFYLASHGERLDEYVDSSLFYKYPDAYRSVFSKKYGSLEIPSAGIHFTWDLIQRIKDKGGLISFITLHVASTEMLSNRKIQTKCVEEVTINEEYYEVPQATADIINTAKQNGGRIFAVGTTVTRCLESAYSREHNCLKASSGWTALYIHPGYQLKVVDCLLTNLHQPKTTHMVLTGQFAGVDLLIKAYTSEHIQSCQFDMFGDCMLIIQDEGQG

SEQ ID NO: 71843 - protein, 354 aa, Salmonella hadar
  misc_feature (1)..(354): tr|A0A3V2W4Q6|A0A3V2W4Q6_SALHA S-adenosylmethionine:tRN A ribosyltransferase-isomerase OS=Salmonella hadar OX=1 49385 GN=queA PE=3 SV=1
MRVTDFSFELPESLIAHYPQPERSRCRLLSLEGPTGALTHGTFTDLLDKLNPGDLLVFNNTRVIPARLFGRKASGGKIEVLVERMLDDKRILAHIRASKAPKPGTELLLGDDESIHATMTARHGALFEVEFNDPRPVLDILNAIGHMPLPPYIDRPDEDADRELYQTVYSEKPGAVAAPTAGLHFDEPLLAALREKGIEMAFVTLHVGAGTFQPVRVDTIEDHIMHSEYAEVPQEVVDAVLAAKVRGNRVIAVGTTSVRSLESAAQAAKSDLIEPFFGDTQIFIYPGYQYKVIDALITNFHLPESTLIMLVSAFAGYQHTMNAYKTAVEQKYRFFSYGDAMFITYNPQAIFERP

SEQ ID NO: 71844 - protein, 354 aa, Salmonella heidelberg; identical to SEQ ID NO: 71826
  misc_feature (1)..(354): sp|B4T8P4|QUEA_SALHS S-adenosylmethionine:tRNA ribosylt ransferase-isomerase OS=Salmonella heidelberg (strain S L476) OX=454169 GN=queA PE=3 SV=1

SEQ ID NO: 71845 - protein, 357 aa, Salmonella houtenae
  misc_feature (1)..(357): tr|A0A1J6Z9X7|A0A1J6Z9X7_SALHO S-adenosylmethionine:tRN A ribosyltransferase-isomerase OS=Salmonella houtenae O X=59205 GN=RK55_018655 PE=3 SV=1
MLTEKYNFRISDTMAIPLRPNWISNNAYREKCKMLILNRSNGDFHKVDFSKIIDYIKKGDVVCFNDSTIINNMFICKTKRNRLIKIILEGFLPENGVIISGLLKENFDAHEVLYLADNFDVSFVIGQKFSEKYQYQAVVENHDALISYLVSHGERLDEYVDSSLFYKYPDAYRSVFSKKYGSLEIPSAGIRFTWELIKKIKDKGGLIAFITLHVASTEILSNRKIQTRCVEDFTINKEYYDVSQAAADTINTAKKNGGRIFAIGTTVARCLESAYSGTHSFVKASSGWTALYIHPGYQLKVVDCLLTNLHQPKTTHMVLTGQFAGVDLLMKAYTSKDIQSCQFDMFGDCMLIIRTTD

SEQ ID NO: 71846 - protein, 357 aa, Salmonella houtenae
  misc_feature (1)..(357): tr|A0A3Y1WXT8|A0A3Y1WXT8_SALHO S-adenosylmethionine:tRN A ribosyltransferase-isomerase OS=Salmonella houtenae O X=59205 GN=queA_1 PE=3 SV=1
MLTEKYNFRISDTMAIPLRPNWISNNAYREKCKMLILNRSNGDFHKVDFSKIIDYIKKGDVVCFNDSSMINNMFICKTKRNRLIKIILEGFLPENGVIISGLLKENFDAHEVLYLADNFDVSFVIGQKFSEKYQYQAVVGNHDALISYLVSHGERLDEYVDSSLFYKYPDAYRSVFSKKYGSLEIPSAGIRFTWELIKKIKDKGGLIAFITLHVASTEILSNRKIQTRCVEDFTINKEYYDVSQAAAYTINTAKKNGGRVFAIGTTVARCLESAYSGTHSFVKASSGWTALYIHPGYQLKVVDCLLTNLHQPKTTHMVLTGQFAGVDLLMKAYTSKDIQSCQFDMFGDCMLIIRTTD

SEQ ID NO: 71847 - protein, 357 aa, Salmonella infantis
  misc_feature (1)..(357): tr|A0A5F1JA36|A0A5F1JA36_SALIN S-adenosylmethionine:tRN A ribosyltransferase-isomerase OS=Salmonella infantis O X=595 GN=C9E95_15390 PE=3 SV=1
MLTEKYDFRITDQMTIPLRPHWIANDSYREKCKMLVLNRSKGEIHKVDFSKLTDYIKEGDVICFNDSTIINHMFICKTRQNRLIKIVLEGFLPNNRVIISGLLKERLNANDVFYLVDNPEISIKIEQKFSEESQYRAVVENHEALICYLASHGERLDEYVDSSLFYKYPDAYRSVFSKKYGSLEIPSAGIHFTWDLIQKIKDKGGLISFITLHVASTEMLSNRKIQTKCVEEVTINEEYYEVPQATADIINTAKQNGGRIFAVGTTVTRCLESAYSREHNCLKASSGWTALYIHPGYQLKVVDCLLTNLHQPKTTHMVLTGQFAGVDLLMKAYASEDIQSCQFDMFGDCMLIIQDEG

SEQ ID NO: 71848 - protein, 354 aa, Salmonella infantis; identical to SEQ ID NO: 71829
  misc_feature (1)..(354): tr|A0A3W0HM41|A0A3W0HM41_SALIN S-adenosylmethionine:tRN A ribosyltransferase-isomerase OS=Salmonella infantis O X=595 GN=queA PE=3 SV=1

SEQ ID NO: 71849 - protein, 292 aa, Salmonella montevideo
  misc_feature (1)..(292): tr|A0A3V6Q7H9|A0A3V6Q7H9_SALMO S-adenosylmethionine:tRN A ribosyltransferase-isomerase (Fragment) OS=Salmonella montevideo OX=115981 GN=CVB19_02000 PE=3 SV=1
MLTEKYDFRITDQMTIPLRPHWIANDSYREKCKMLVLNRSKGEIHKVDFSKVTDYIKEGDVICFNDSTIINHMFICKTRQNRLIKIVLEGFLPNNRVIISGLLKERLNANDVFYLVDNPEISIKIEQKFSEESQYRAVVENHEALICYLASHGERLDEYVDSSLFYKYPDAYRSVFSKKYGSLEIPSAGIHFTWDLIQKIKDKGGLISFITLHVASTEMLSNRKIQTKCVEEVTINEEYYEVPQATADIINTAKQNGGRIFAVGTTVTRCLESAYSREHNCLKASSGWTELY

SEQ ID NO: 71850 - protein, 359 aa, Salmonella montevideo
  misc_feature (1)..(359): tr|A0A3V3HD24|A0A3V3HD24_SALMO S-adenosylmethionine:tRN A ribosyltransferase-isomerase OS=Salmonella montevideo OX=115981 GN=CM22_02695 PE=3 SV=1
MLTEKYDFRITDQMTIPLRPHWIANDSYREKCKMLVLNRSKGEIHKVDFSKVTDYIKEGDVICFNDSTIINHMFICKTRQNRLIKIVLEGFLPNNRVIISGLLKERLNANDVFYLVDNPEISIKIEQKFSEESQYRAVVENHEALICYLASHGERLDEYVDSSLFYKYPDAYRSVFSKKYGSLEIPSAGIHFTWDLIQKIKDKGGLISFITLHVASTEMLSNRKIQTKCVEEVTINEEYYEVPQATADIINTAKQNGGRIFAVGTTVTRCLESAYSREHNCLKASSGWTELYIHPGYQLKVVDCLLTNLHQPKTTHMVLTGQFAGVDLLMKAYASEDIQSCQFDMFGDCMLIIQDEGQG

SEQ ID NO: 71851 - protein, 354 aa, Salmonella moscow; identical to SEQ ID NO: 71824
  misc_feature (1)..(354): tr|A0A5H7LFJ9|A0A5H7LFJ9_SALMC tRNA preQ1(34) S-adenosy lmethionine ribosyltransferase-isomerase QueA OS=Salmon ella moscow OX=28146 GN=queA PE=4 SV=1

SEQ ID NO: 71852 - protein, 354 aa, Salmonella muenchen; identical to SEQ ID NO: 71826
  misc_feature (1)..(354): tr|A0A3T3ET79|A0A3T3ET79_SALMU S-adenosylmethionine:tRN A ribosyltransferase-isomerase OS=Salmonella muenchen O X=596 GN=queA PE=3 SV=1

SEQ ID NO: 71853 - protein, 359 aa, Salmonella muenchen
  misc_feature (1)..(359): tr|A0A3T3ELM7|A0A3T3ELM7_SALMU S-adenosylmethionine:tRN A ribosyltransferase-isomerase OS=Salmonella muenchen O X=596 GN=DCV92_02960 PE=3 SV=1
MLTEKYDFRITDQMTIPLRPHWIANDSYREKCKMLVLNRSKGEIHKVDFSKLTDYIKEGDVICFNDSTIINHMFICKTRQNRLIKIVLEGFLPNNRVIISGLLKERLNANDVFYLVDNPEISIKIEQRFSEESQYRAVVENHEALICYLASHGERLDEYVDSSLFYKYPDAYRSVFSKKYGSLEIPSAGIHFTWDLIQRIKDKGGLISFITLHVASTEMLSNRKIQTKCVEEVTINEEYYEVPQATADIINTAKQNGGRIFAVGTTVTRCLESAYSREHNCLKASSGWTALYIHPGYQLKVVDCLLTNLHQPKTTHMVLTGQFAGVDLLMKAYASEDIQSCQFDMFGDCMLIIQDEGQG

SEQ ID NO: 71854 - protein, 354 aa, Salmonella muenster; identical to SEQ ID NO: 71826
  misc_feature (1)..(354): tr|A0A5I4XC92|A0A5I4XC92_SALMS tRNA preQ1(34) S-adenosy lmethionine ribosyltransferase-isomerase QueA OS=Salmon ella muenster OX=82689 GN=queA PE=3 SV=1

SEQ ID NO: 71855 - protein, 162 aa, Salmonella newport
  misc_feature (1)..(162): tr|A0A3V9X6S1|A0A3V9X6S1_SALNE S-adenosylmethionine:tRN A ribosyltransferase-isomerase (Fragment) OS=Salmonella newport OX=108619 GN=queA PE=3 SV=1
LREKGVEMAFVTLHVGAGTFQPVRVDTIEDHIMHSEYAEVPQEVVDAVLAAKARGNRVIAVGTTSVRSLESAAQAAKSDLIEPFFGDTQIFIYPGYQYKVIDALITNFHLPESTLIMLVSAFAGYQHTMNAYKTAVEQKYRFFSYGDAMFITYNPQAISERP

SEQ ID NO: 71856 - protein, 354 aa, Salmonella newport
  misc_feature (1)..(354): sp|B4SWP5|QUEA_SALNS S-adenosylmethionine:tRNA ribosylt ransferase-isomerase OS=Salmonella newport (strain SL25 4) OX=423368 GN=queA PE=3 SV=1
MRVTDFSFELPESLIAHYPQPERSRCRLLSLEGPTGALTHGTFTDLLDKLNPGDLLVFNNTRVIPARLFGRKASGGKIEVLVERMLDDKRILAHIRASKAPKPGTELLLGDDESIHATMTARHGALFEVEFNDPRPVLDILNAIGHMPLPPYIDRPDEDADRELYQTVYSEKPGAVAAPTAGLHFDEPLLAALREKGVEMAFVTLHVGAGTFQPVRVDTIEDHIMHSEYAEVPQEVVDAVLVAKVRGNRVIAVGTTSVRSLESAAQAAKSDLIEPFFGDTQIFIYPGYQYKVIDALITNFHLPESTLIMLVSAFAGYQHTMNAYKTAVEQKYRFFSYGDAMFITYNPQAIFERP

SEQ ID NO: 71857 - protein, 354 aa, Salmonella oranienberg
  misc_feature (1)..(354): tr|A0A5I4Q340|A0A5I4Q340_SALON tRNA preQ1(34) S-adenosy lmethionine ribosyltransferase-isomerase QueA OS=Salmon ella oranienberg OX=28147 GN=queA PE=4 SV=1
MRVTDFSFELPESLIAHYPQPERSRCRLLSLEGPTGALTHGTFTDLLDKLNPGDLLVFNNTRVIPARLFGRKASGGKIEVLVERMLDDKRILAHIRASKAPKSGTELLLGDDESIHATMTARHGALFEVEFNDPRPVLDILNAIGHMPLPPYIDRPDEDADRELYQTVYSEKPGAVAAPTAGLHFDEPLLAALREKGVEMAFVTLHVGAGTFQPVRVDTIEDHIMHSEYAEVPQEVVDAVLAAKARGNRVIAVGTTSVRSLESAAQAAKSDLIEPFFGDTQIFIYPGYQYKVIDALITNFHLPESTLIMLVSAFAGYQHIMNAYKTAVEQKYRFFSYGDAMFITYNPQAIFERP

SEQ ID NO: 71858 - protein, 359 aa, Salmonella oranienberg
  misc_feature (1)..(359): tr|A0A4S3DYP6|A0A4S3DYP6_SALON S-adenosylmethionine:tRN A ribosyltransferase-isomerase OS=Salmonella oranienber g OX=28147 GN=AHW54_02540 PE=3 SV=1
MLTEKYDFRITDQMTIPLRPHWIANDSYREKCKMLVLNRSKGEIHKVDFSKLTDYIKEGDVICFNDSTIINHMFICKTRQNRLIKIVLEGFLPNNRVIISGLLKERLNANDVFYLVDNPGISIKIEQKFSEESQYRAVVENHEALICYLASHGERLDEYVDSSLFYKYPDAYRSVFSKKYGSLEIPSAGIHFTWDLIQRIKDKGGLISFITLHVASTEMLSNRKIQTKCVEEVTINEEYYEVSQATADIINTAKQNGGRIFAVGTTVTRCLESAYSREHNCLKASSGWTALYIHPGYQLKVVDCLLTNLHQPKTTHMVLTGQFAGVDLLMKAYASEDIQSCQFDMFGDCMLIIQDEGQG

SEQ ID NO: 71859 - protein, 297 aa, Salmonella paratyphi
  misc_feature (1)..(297): tr|A0A0H2WNW5|A0A0H2WNW5_SALPA S-adenosylmethionine:tRN A ribosyltransferase-isomerase OS=Salmonella paratyphi A (strain ATCC 9150 / SARB42) OX=295319 GN=SPA1315 PE=3 SV=1
MLTEKYDFRITDQMTIPLRPHWIANDSYREKCKMLVLNRSKGEIHKVDFSKVTDYIKEGDVICFNDSTIINYMFICKTRRNRLIKIVLEGFLPNNRVIISGLLKERLNANDVFYLVDNPEISIKVEQKFSEESQYRAVVENHDALICYLASHGERLDEYVDSSLFYKYPDAYRSVFSKKYGSLDVDKGNFSITTYYPPEPPLKHLLNPFRKNDIPQAPEFTIGMLIASARAGRWLYELIHAWGLLSVLHHHGAHNVYYVKCTRTIKRHVKAAGFVHVKKLLAHKFDPFPAVTLREFC

SEQ ID NO: 71860 - protein, 354 aa, Salmonella paratyphi
  misc_feature (1)..(354): sp|B5BDC9|QUEA_SALPK S-adenosylmethionine:tRNA ribosylt ransferase-isomerase OS=Salmonella paratyphi A (strain AKU_12601) OX=554290 GN=queA PE=3 SV=1
MRVTDFSFELPESLIAHYPQPERSRCRLLSLEGPTGALTHGTFTDLLDKLNPGDLLVFNNTRVIPARLFGRKASGGKIEVLVERMLDDKRILAHIRASKAPKPGTELLLGDDESIHATMTARHGALFEVEFNDPRPVLDILNAIGHMPLPPYIDRPDEDADRELYQTVYSEKPGAVAAPTAGLHFDEPLLAALREKGVEMAFVTLHVGAGTFQPVRVDTIEDHIMHSEYAEVPQEVVDAVLAAKARGNRVIAVGTTSVRSLESAAQAAKSDLIEPFFGDTQIFIYPGYQYKVIDALITNFHLPESTLIMLVSAFAGYQHTMNAYKTAVEQKYRFFSYGDAMFITYNPRAISERP

SEQ ID NO: 71861 - protein, 354 aa, Salmonella potsdam; identical to SEQ ID NO: 71826
  misc_feature (1)..(354): tr|A0A5I2XEE8|A0A5I2XEE8_SALPO tRNA preQ1(34) S-adenosy lmethionine ribosyltransferase-isomerase QueA OS=Salmon ella potsdam OX=597 GN=queA PE=4 SV=1

SEQ ID NO: 71862 - protein, 354 aa, Salmonella rubislaw; identical to SEQ ID NO: 71826
  misc_feature (1)..(354): tr|A0A5I6URQ7|A0A5I6URQ7_SALRU tRNA preQ1(34) S-adenosy lmethionine ribosyltransferase-isomerase QueA OS=Salmon ella rubislaw OX=598 GN=queA PE=4 SV=1

SEQ ID NO: 71863 - protein, 354 aa, Salmonella rubislaw
  misc_feature (1)..(354): tr|A0A3V7IKQ3|A0A3V7IKQ3_SALRU S-adenosylmethionine:tRN A ribosyltransferase-isomerase OS=Salmonella rubislaw O X=598 GN=queA PE=3 SV=1
MRVTDFSFELPESLIAHYPQPERSRCRLLSLEGPTGALTHGTFTDLLDKLNPGDLLVFNNTRVIPARLFGRKASGGKIEVLVERMLDDKRILAHIRASKAPKPGTELLLGDDESIHATMTARHGALFEVEFNDPRPVLDILNAIGHMPLPPYIDRPDEDADRELYQTVYSEKPGAVAAPTAGLHFDEPLLAALREKGVEMAFVTLHVGAGTFQPVRVDTIEDHIMHSEYAEVPQEVVDAVLAAKVRGNRVIAVGTTSVRSLESAAQAAKSDLIEPFFGDTQIFIYPGYQYKVIDALITNFHLPESTLIMLVSAFAGYQHTMNAYKTAVEQKYRFFSYGDAMFITYNPQAISERP

SEQ ID NO: 71864 - protein, 359 aa, Salmonella schwarzengrund
  misc_feature (1)..(359): tr|A0A0N1QZC1|A0A0N1QZC1_SALSV S-adenosylmethionine:tRN A ribosyltransferase-isomerase OS=Salmonella schwarzeng rund (strain CVM19633) OX=439843 GN=SeSA_A1653 PE=3 SV= 1
MLTEKYNFRITDQMTIPLRPHWIANDSYREKCKMLVLNRSKGEIHKVDFSKVTDYIKEGDVICFNDSTIINHMFICKTRRNRLIKIVLEGFLPNNRVIISGLLKERLNANDVFYLVDNPGISIKIEQKFSEESQYRAVVENHEALICYLASHGERLDEYVDSSLFYKYPDAYRSVFSKKYGSLEIPSAGIHFTWDLIQRIKDKGGLISFITLHVASTEMLSNRKIQTKCVEEVTINEEYYEVSQATADIINTAKQNGGRIFAVGTTVTRCLESAYSREHNCLKASSGWTALYIHPGYQLKVVDCLLTNLHQPKTTHMVLTGQFAGVDLLMKAYASEDIQSCQFDMFGDCMLIIQDEGQG

SEQ ID NO: 71865 - protein, 354 aa, Salmonella schwarzengrund
  misc_feature (1)..(354): sp|B4TZH8|QUEA_SALSV S-adenosylmethionine:tRNA ribosylt ransferase-isomerase OS=Salmonella schwarzengrund (stra in CVM19633) OX=439843 GN=queA PE=3 SV=1
MRVTDFSFELPESLIAHYPQPERSRCRLLSLEGPTGALTHGTFTDLLDKLNPGDLLVFNNTRVIPARLFGRKASGGKIEVLVERMLDDKRILAHIRASKAPKPGTELLLGDDESIHATMTARHGALFEVEFNDPRPVLDILNAIGHMPLPPYIDRPDEDADRELYQTVYSEKPGAVAAPTAGLHFDEPLLAALREKGIEMAFVTLHVGAGTFQPVRVDTIEDHIMHSEYAEVPQEVVDAVLAAKARGNRVIAVGTTSVRSLESAAQAAKSDLIEPFFGDTQIFIYPGYQYKVIDALITNFHLPESTLIMLVSAFAGYQHTMNAYKTAVEQKYRFFSYGDAMFITYNPQAIFERP

SEQ ID NO: 71866 - protein, 359 aa, Salmonella senftenberg
  misc_feature (1)..(359): tr|A0A3V2HW02|A0A3V2HW02_SALSE S-adenosylmethionine:tRN A ribosyltransferase-isomerase OS=Salmonella senftenber g OX=28150 GN=NL78_02275 PE=3 SV=1
MLTEKYDFRITDQMTIPLRPHWIANDLYREKCKMLVLNRSKGEIHKVDFSKVTDYIKEGDVICFNDSTIINHMFICKTRQNRLIKIVLEGFLPNNRVIISGLLKERLNANDVFSLIDNPEISIKIEQRFSEESQYRAVVENHEALICYLASHGERLDEYVDSSLFYKYPDAYRSVFSKKYGSLEIPSAGIHFTWDLIQRIKDKGGLISFITLHVASTEMLSNRKIQTKCVEEVTINEEYYEVPQATADIINTAKQNGGRIFAVGTTVTRCLESAYSREHNCLKASSGWTALYIHPGYQLKVVDCLLTNLHQPKTTHMVLTGQFAGVDLLMKAYASEDIQSCQFDMFGDCMLIIQDEGQG

SEQ ID NO: 71867 - protein, 359 aa, Salmonella senftenberg
  misc_feature (1)..(359): tr|A0A3Y5ZBH3|A0A3Y5ZBH3_SALSE S-adenosylmethionine:tRN A ribosyltransferase-isomerase OS=Salmonella senftenber g OX=28150 GN=AC863_00390 PE=3 SV=1
MLTEKYDFRITDQMTIPLRPHWIANDSYREKCKMLVLNRSKGEIHKVDFSKLTDYIKEGDVICFNDSTIINHMFICKTRQNRLIKIVLEGFLPNNRVIISGLLKERLNANDVFYLVDNPEISIKVEQKFSEESQYRAVVENHETLICYLASHGERLDEYVDSSLFYKYPDAYRSVFSKKYGSLEIPSAGIHFTWDLIQRIKDKGGLISFITLHVASTEMLSNRKIQTKCVEEVTINEEYYEVPQATADIINTAKQNGGRIFAVGTTVTRCLESAYSREHNCLKASSGWTALYIHPGYQLKVVDCLLTNLHQPKTTHMVLTGQFAGVDLLMKAYASEDIQSCQFDMFGDCMLIIQDEGQG

SEQ ID NO: 71868 - protein, 354 aa, Salmonella sp.; identical to SEQ ID NO: 71826
  misc_feature (1)..(354): tr|A0A509CJ01|A0A509CJ01_9ENTR S-adenosylmethionine:tRN A ribosyltransferase-isomerase OS=Salmonella sp. NCTC 6 947 OX=2583581 GN=queA_2 PE=3 SV=1

SEQ ID NO: 71869 - protein, 356 aa, Salmonella sp.; identical to SEQ ID NO: 65353
  misc_feature (1)..(356): tr|A0A1F2K4H2|A0A1F2K4H2_9ENTR S-adenosylmethionine:tRN A ribosyltransferase-isomerase OS=Salmonella sp. HMSC13 B08 OX=1581094 GN=queA PE=3 SV=1

SEQ ID NO: 71870 - protein, 354 aa, Salmonella thompson
  misc_feature (1)..(354): tr|A0A3Y9ZK64|A0A3Y9ZK64_SALTH tRNA preQ1(34) S-adenosy lmethionine ribosyltransferase-isomerase QueA OS=Salmon ella thompson OX=600 GN=queA PE=3 SV=1
MRVTDFSFELPESLIAHYPQPERSRCRLLSLEGPTGALTHGTFTDLLDKLNPGDLLVFNNTRVIPARLFGRKASGGKIEVLVERMLDDKRILAHIRASKAPKPGTELLLGDDESIHATMTARHGALFEVEFNDPRPVLDILNAIGHMPLPPYIDRPDEDADRELYQTVYSEKPGAVAAPTAGLHFDEPLLAALREKGVEMAFVTLHVGAGTFQPVRVDTIEDHIMHSEYAEVPQEVVDAVLAAKVRGNRVIAVGTTSVRSLESAAQAAKSDLIEPFFGDTQIFIYPGYQYKVIDALITNFHLPESTLIMLVSAFAGYQHTMNAYKTAVEQKYRFFSYGDAMFITYNPQAIFERP

SEQ ID NO: 71871 - protein, 354 aa, Salmonella thompson; identical to SEQ ID NO: 71826
  misc_feature (1)..(354): tr|A0A3V3G284|A0A3V3G284_SALTH S-adenosylmethionine:tRN A ribosyltransferase-isomerase OS=Salmonella thompson O X=600 GN=queA PE=3 SV=1

SEQ ID NO: 71872 - protein, 354 aa, Salmonella typhi
  misc_feature (1)..(354): sp|Q8Z8Y1|QUEA_SALTI S-adenosylmethionine:tRNA ribosylt ransferase-isomerase OS=Salmonella typhi OX=90370 GN=qu eA PE=3 SV=1
MRVTDFSFELPESLIAHYPQPERSRCRLLSLEGPTGALTHGTFTDLLDKLNPGDLLVFNNTRVIPARLFGRKASGGKIEVLVERMLDDKRILAHIRASKAPKPGTELLLGDDESIHATMTARHGALFEVEFNDPRPVLDILNAIGHMPLPPYIDRPDEDADRELYQTVYSEKPGAVAAPTAGLHFDEPLLAALREKGVEMAFVTLHVGAGTFQPVRVDTIEDHIMHSEYAEVPQEVVDAVLAAKARGNRVIAVGTTSVRSLESAAQAAKSDLIEPFFGDTQIFIYPGYQYKVIDALITNFHLPESTLIMLVSAFAGYQHTMNAYKTAVEQKYRFFSYGDAMFITCNPQAISERP

SEQ ID NO: 71873 - protein, 354 aa, Salmonella typhi; identical to SEQ ID NO: 71872
  misc_feature (1)..(354): tr|A0A4U8MWK0|A0A4U8MWK0_SALTI S-adenosylmethionine:tRN A ribosyltransferase-isomerase OS=Salmonella typhi OX=9 0370 GN=queA PE=3 SV=1

SEQ ID NO: 71874 - protein, 354 aa, Salmonella typhimurium; identical to SEQ ID NO: 71826
  misc_feature (1)..(354): sp|Q8ZRD9|QUEA_SALTY S-adenosylmethionine:tRNA ribosylt ransferase-isomerase OS=Salmonella typhimurium (strain LT2 / SGSC1412 / ATCC 700720) OX=99287 GN=queA PE=3 SV= 1

SEQ ID NO: 71875 - protein, 354 aa, Salmonella typhimurium; identical to SEQ ID NO: 71826
  misc_feature (1)..(354): tr|A0A3Z2EZS4|A0A3Z2EZS4_SALTU S-adenosylmethionine:tRN A ribosyltransferase-isomerase OS=Salmonella typhimuriu m (strain ATCC 68169 / UK-1) OX=990282 GN=queA PE=3 SV= 1

SEQ ID NO: 71876 - protein, 359 aa, Salmonella virchow; identical to SEQ ID NO: 71853
  misc_feature (1)..(359): tr|A0A3V4B4Y5|A0A3V4B4Y5_SALVI S-adenosylmethionine:tRN A ribosyltransferase-isomerase OS=Salmonella virchow OX =48409 GN=A6P03_06310 PE=3 SV=1

SEQ ID NO: 71877 - protein, 354 aa, Salmonella virchow
  misc_feature (1)..(354): tr|A0A5I7PEV3|A0A5I7PEV3_SALVI tRNA preQ1(34) S-adenosy lmethionine ribosyltransferase-isomerase QueA OS=Salmon ella virchow OX=48409 GN=queA PE=4 SV=1
MRVTDFSFELPESLIAHYPQPERSRCRLLSLEGPTGALTHGTFTDLLDKLNPGDLLVFNNTRVIPARLFGRKASGGKIEVLVERMLDDKRILAHIRASKAPKPGTELLLGDDESIHATMTARHGALFEVEFNDPRPVLDILNAIGHMPLPPYIDRPDEDADRELYQTVYSEKPGAVAAPTAGLHFDEPLLAALREKGIEMAFVTLHVGAGTFQPVRVDTIEDHIMHSEYAEVPQEVVDAVLAAKVRGNRVIAVGTTSVRSLESAAQAAKSDLIEPFFGDTQIFIYLGYQYKVIDALITNFHLPESTLIMLVSAFAGYQHTMNAYKTAVEQKYRFFSYGDAMFITYNPQAIFERP

SEQ ID NO: 71878 - protein, 350 aa, Salsuginibacillus halophilus
  misc_feature (1)..(350): tr|A0A2P8HFX6|A0A2P8HFX6_9BACI S-adenosylmethionine:tRN A ribosyltransferase-isomerase OS=Salsuginibacillus hal ophilus OX=517424 GN=queA PE=3 SV=1
MNVDAFDFELPEELIAQKPLQDRDASRLMVLDPSTGEMNHESFLDILKYINPGDALVINDTRVLPARLYGEKDTGAHVEILLLKQIEGDRWETLVKPARRIKPGAKLSFGDGRLTAECVDTLDHGGRVLEFSYEGIFYEVLEALGEMPLPPYITETLDDQERYQTVFAKHRGSAAAPTAGLHFTEEMLKQAEAKGVHLASITLHVGLGTFRPVSAEQVEEHVMHAEFYQMTAGTAELLEEVKAAGGRVIAVGTTSARTLETVACDNGGAFREASGWTDIFIYPGYVFHGIDGLMTNFHLPKSSLLMLVSALAGRENILSAYAEAVRRQYRFFSFGDAMLILEGSQHQWQQ

SEQ ID NO: 71879 - protein, 355 aa, Samsonia erythrinae
  misc_feature (1)..(355): tr|A0A4R3VTD4|A0A4R3VTD4_9GAMM S-adenosylmethionine:tRN A ribosyltransferase-isomerase OS=Samsonia erythrinae O X=160434 GN=queA PE=3 SV=1
MRVADFSFELPDSLIAHYPQTERSGCRLLTLEGSTGNLTHGVFTDLLEKLNPGDLLVFNNTRVIPARLFGRKASGGKLEVLVERVLDEHRVLAHVRASKAPKPGTELLLGDDESVKATMAARHDALFELHFDDSRDVLSILNDIGHMPLPPYIDRPDEDADRELYQTVYSRRPGAVAAPTAGLHFDEPMLAALREKGIEMAFVTLHVGAGTFQPVRVETIEDHIMHAEYAEVPQDVVDSVLACKARGNRVIAVGTTSVRSLESAAQASQDALIAPFFGDTRIFIYPGYHYRIIDALVTNFHLPESTLIMLVSAFAGYRNTMSAYREAVAQQYRFFSYGDAMFITRNPAAEQENVG

SEQ ID NO: 71880 - protein, 338 aa, Sandaracinaceae bacterium
  misc_feature (1)..(338): tr|A0A520R7D1|A0A520R7D1_9DELT S-adenosylmethionine:tRN A ribosyltransferase-isomerase OS=Sandaracinaceae bacte rium OX=2510337 GN=EVA89_00910 PE=3 SV=1
MIAAAEPRADLRAQRLMHLDVSRGALTDGRIANLPELVREGDVWVLNDAATLPASLAGRAAGRDVELRLLGERLDGTWRAVLFGEGSWRDDTDGRPAPPRLSVGDRIVLGGSLGASITEVDASAPRLISVRFEPGGDAFWRALYTLGRPVQYSYLARELSLSEVQTAYAGRPWAVELPSAGRPLAPSSLLALRRRGAEVVTLTHAAGLSATGDAALDARLPLPERYDIPAQTAEAVSRARRDGRRVVAVGTSVTRALEGAFLSHSRVPAGPGETGLVLGPHTPLNVVDALLTGAHDPQSSHYQLLRAFAPDALLERAVRRSRELGYLGHELGDSWLIA

SEQ ID NO: 71881 - protein, 355 aa, Sandaracinaceae bacterium
  misc_feature (1)..(355): tr|A0A520QP65|A0A520QP65_9DELT S-adenosylmethionine:tRN A ribosyltransferase-isomerase OS=Sandaracinaceae bacte rium OX=2510337 GN=queA PE=3 SV=1
METDELDYELPESLIAQRPAEDRDAARLLLVRRGDGAPVHHHVRDLPSLLRPALFVVNDTRVIPARLFGRKESGGKVELLLVQRHGLPGIEETWMAMGRASKPIRAGAHIQVDGGLRVLVEEKLEGGRLRLRLTSDRPVAEVLEAVGHVPLPPYVRRDDEDSDRERYQTVFAREDGAVAAPTAGLHFTERLLTALEAAGHQRVAVTLHVGPGTFRPVSAARLEDHDMHEERYVVPQATVEAIAAAKRDGRPVVAVGTTVVRTLESAARPDGSVAAGPGETALLIQPPYAFRVVDALMTNFHLPRSTLLALVMAFGGVEPLRAAYAEAVAARYRFFSYGDAMLIAGEDALTHEGHA

SEQ ID NO: 71882 - protein, 336 aa, Sandaracinobacter sp.
  misc_feature (1)..(336): tr|A0A501XSW4|A0A501XSW4_9SPHN S-adenosylmethionine:tRN A ribosyltransferase-isomerase OS=Sandaracinobacter sp. PAMC 28131 OX=1715348 GN=queA PE=3 SV=1
MRVADFDFNLPEDRIALRPAAPRDSARLLRVSPQGLSDHIVRDLPTLLSPGDVLVTNDTRVIPAQLSGRKGDASIDVTLHMRLGPYEWLSFVRNSRRLKPGDRVTFGLDLDGIVLSKGEGGEIHWRFESSEPLEVALERAGQMPLPPYIARKRGIDEADARDYQTIFARHNGAVAAPTAALHFTPELLAALDARGITRETVTLHVGAGTFLPVKADDTADHRMHSEWGHVPADVSARLKVAKAEGRRIIPVGTTSLRLLESSALEPFTGTTDIFITPGYRFRAIDGLMTNFHLPKSTLFMLVSALMGLERMQAAYAHAIQQGYRFYSYGDSSLLLP

SEQ ID NO: 71883 - protein, 352 aa, Sandaracinus amylolyticus
  misc_feature (1)..(352): tr|A0A0F6WAI3|A0A0F6WAI3_9DELT S-adenosylmethionine:tRN A ribosyltransferase-isomerase OS=Sandaracinus amylolyt icus OX=927083 GN=DB32_008670 PE=3 SV=1
MKPATEAARARRDGRLLVVDASGRIAHHPRGALPEVLRGARGDRGGDLLVVNDSGTLPASLRGTHLRTGASIEVRLAARLTLDAREIRAWRAIVLGEGDWRARTEDRPAPPALRPGDRLALGTTLRAEIADLDGHPRLVLLTFEGTARDVWEGIAREGAPVQYSHLRAPLALWDAQTAIAGPPVSVEPPSAGFVLDHAMLDRLVARGVEIAMLTHAAGLSSSGDAKLDARFPLPEPYTIPDATARAIRRARREGRRVVALGTTVVRALESAAAYDGEVHAGPGIATLRLGPERPPRVVDAIVSGMHEPGTSHHALLEGFAPRARLLDAAREAEERGYLAHEFGDACLVERAA

SEQ ID NO: 71884 - protein, 347 aa, Sandaracinus amylolyticus
  misc_feature (1)..(347): tr|A0A0F6SG20|A0A0F6SG20_9DELT S-adenosylmethionine:tRN A ribosyltransferase-isomerase OS=Sandaracinus amylolyt icus OX=927083 GN=queA PE=3 SV=1
MDARELDFDLPEDLIAQTPPAERDAARLLVLSCDTGAIEHRRVLDLPELLAPSLLVVNDTRVLPARLFATKPTGGRVEILLLERTSAPGTRESWNAIARGTKSLRAGMRLSIASGFDAEVIALHEGGELDVALSASPSVRDALAAHGHVPLPPYIRRADDASDLERYQTVFAKDEGSVAAPTAGLHFSDRLLAALDAAGHRIARVTLHVGPGTFAPLRTETLDEHVMHEERWEIADETARAIAEARAEGRPVVAIGTTVVRTLESACDEHGIVRAGAGRTRIFIRPPYPFRAIDALFTNFHLPRSTLLALVMAFAGIEPTRRAYREAVDQRYRFFSYGDAMLIRGKK

SEQ ID NO: 71885 - protein, 346 aa, Sandaracinus sp.
  misc_feature (1)..(346): tr|A0A2D9T1A7|A0A2D9T1A7_9DELT S-adenosylmethionine:tRN A ribosyltransferase-isomerase OS=Sandaracinus sp. OX=2 024858 GN=queA PE=3 SV=1
MRLEELDYELPDELIAQRPPTDRDGARLLVVDAERGHRHATIRDLPELLEPALWVVNDTRVIPARLHGHKPTGGAVELLLIEPLADDAGDELWRCMGRSSKPIKVGLAVTLAEGFVGHVEAKHEDGTLDVRFEHGGDFDGLLEEHGQMPLPPYVQRPADAADRERYQTIFADRPGAIAAPTAGLHFTDALVAALRERGHELAPVTLHVGPGTFRPVQVEELDEHPMHEERYEVPASTAAAIDAARSEGRAVVAVGTTVARTLESAAIGDGRVQVGPGRTRLFIKPPYEAKVVDHLLTNFHLPRSTLLALVMALGGEDTLRAAYAEAVRARYRFFSYGDAMLIRGRR

SEQ ID NO: 71886 - protein, 403 aa, Sandaracinus sp.
  misc_feature (1)..(403): tr|A0A2E0TDM9|A0A2E0TDM9_9DELT S-adenosylmethionine:tRN A ribosyltransferase-isomerase OS=Sandaracinus sp. OX=2 024858 GN=queA PE=3 SV=1
MARGIADGSRGAPLAPPPGLRYLRSEPRRPPARLSFPDSSVRLAVKTDDLDYELPDELIAQAPLERRDGARLLVVDAAHDAPGALRDARITDLPELLPPSLIVVNDTRVMPARLFGKKPTGGAVELLLIERLSAPGDTARERWHAMGRASKGLKPGTTVTLGEAGALEAEVLAKRDDGTLEVALSAAGGSVADAIEAAGEMPLPPYIRRDAEASDRERYQTIFAREPGAVAAPTAGLHFSPTLVEAMEAAGHRFARVTLHVGPGTFRPVKHDDLDAHPMHEERYAVSEATAAAIAAARDEGRPILAVGTTVVRTLESAAIAGRRVRAGSGRTDLFIKPPYRAKVVDHVLTNFHLPRSTLLALVMALAGVETTRRAYAHAVATAYRFFSYGDAMLLRGVSEASR

SEQ ID NO: 71887 - protein, 346 aa, Sandarakinorhabdus cyanobacteriorum
  misc_feature (1)..(346): tr|A0A255Y959|A0A255Y959_9SPHN S-adenosylmethionine:tRN A ribosyltransferase-isomerase OS=Sandarakinorhabdus cy anobacteriorum OX=1981098 GN=queA PE=3 SV=1
MLVDDFDFHLPEERIALRPANPRDSARLLTVTGRDVGTLGDFSFLDLPGRLRRGDVLVVNDTRVIPAQLHALKGQAHIGVTLHKRETADQWWSFVKNARRLKPGDRVEFGPGLAGEVLDKADEGGVLWRFSALPGETLEQALERVGQMPLPPYIARRRGTDAQDAADYQTLHAAKDGAVAAPTAGLHFTPRLWEALAAAGITRETVTLHVGAGTFLPVKADKVEDHKMHAEWGSIDAATAARLNSARAAGGRIISVGTTSLRLLESCVSETGEIREFTGDTSIFIYPGYRLKAIDGLITNFHLPRSTLFMLVSALMGLDVMRKTYAHAIEKEYRFYSYGDGSLLLP

SEQ ID NO: 71888 - protein, 340 aa, Sandarakinorhabdus sp.
  misc_feature (1)..(340): tr|A0A552UHU4|A0A552UHU4_9SPHN S-adenosylmethionine:tRN A ribosyltransferase-isomerase OS=Sandarakinorhabdus sp . LB1R16 OX=2593303 GN=queA PE=3 SV=1
MRVADFDFELPPDRIALRPAEPRDSARLLEVTPHALSDLGIADLPGRLRRGDVLVFNDTRVIPAQLSGTRGQARIGVTLHKREGVWRWWAFVRNARRLAVGDTVDFGHGLSGKVLEKADDGAILWEFAASVPFEIALAAAGVMPLPPYIASKRPADDRDAADYQTMFAREAGAVAAPTAGLHFTPALLAALDAAGIARETVTLHVGAGTFLPVKAEDTDDHAMHAEWGSLDAATAARLQAVRASGGRVIAVGTTSLRVLESAGLDAWSGDTRIFITPGYRFRAVHGLLTNFHLPRSTLFMLVSAMMGLDTMRAAYAHAVAHEYRFYSYGDACLLLPDTQA

SEQ ID NO: 71889 - protein, 404 aa, Sanguibacteroides justesenii
  misc_feature (1)..(404): tr|A0A0C3R5F4|A0A0C3R5F4_9PORP S-adenosylmethionine:tRN A ribosyltransferase-isomerase OS=Sanguibacteroides jus tesenii OX=1547597 GN=BA92_07575 PE=3 SV=1
MLEELKGIRIEEYTYDLPDERIAKFPLENRDASKLLIYEGGKIRERRFYEVPDMLNAGQTLIFNNTKVIYARILFQKVTGAAIEVFCLEPYLPADYVRNFAAVKSCEWKCMVGNLKKWKEGTIVCPYHWEGIEGQLRATRMKQEGNDMIVRFDWDSPISFSEVLEHCGKIPIPPYLNRDSEEDDKIRYQTVYSKNEGSVAAPTAGLHFSLSVLDRLRAKGTMMGELTLHVGAGTFKPVKSETIGEHAMHTEHIVVQRELVEHLYECPDHIIAVGTTSVRSLESLYWMGVKRLEGDNDFNLLEQWEAYTLPRHYSLREAMASLLQWYKERDAEMLKAQTTIIIVPGYRFRVISAMFTNFHQPQSTLLLLVAAAIGEDWKKIYRYALEHDFRFLSYGDSSFLKIKK

SEQ ID NO: 71890 - protein, 349 aa, Sanguibacteroides justesenii
  misc_feature (1)..(349): tr|A0A0C3R215|A0A0C3R215_9PORP S-adenosylmethionine:tRN A ribosyltransferase-isomerase OS=Sanguibacteroides jus tesenii OX=1547597 GN=queA PE=3 SV=1
MKLSKFKYKLPTELIALHPMQNRDESRLMVLDRKTGKIEHKVFKDVIDYFEEKDVFVFNDTKVFPARLYGNKEKTGAEIEVFLLRELNRDLRIWDVLVDPARKIRIGNKLYFGEDDSMVAEVIDNTTSRGRTLRFLFDGEYDEFKKELYALGETPLPRFITRKVEPEDAVRYQTIFAKKEGAVAAPTAGMHFSRELMKRMEIKGIDFAYITLHVGLGNFREVDVEDLTKHKMDSEQIIVGSETVKIVNDAKDEKHKVCAVGTTVVRTLESCVTTKGRLTEFDGWTNKFIFPPYDFSVPDAFVSNFHLPYSTLLMMVAAFGGYDFVMEAYNQAVKEKYRFGTYGDAMLIL

SEQ ID NO: 71891 - protein, 349 aa, Sapientia aquatica
  misc_feature (1)..(349): tr|A0A4R5W2C4|A0A4R5W2C4_9BURK S-adenosylmethionine:tRN A ribosyltransferase-isomerase OS=Sapientia aquatica OX =1549640 GN=queA PE=3 SV=1
MSPTSYSLSDFNFDLPPELIAQTPLPERSASRLLQVDGAQLHDRHFSDLVDQLHAGDVLVFNDTRVLKARFFGVKNTGGKVEVLVERVLFNDPDQRSVLAQIRASKSPAQGSTIRLADAFEVEVGERQGEFYVLNFPSDVFDLLEQFGSLPLPPYIEHSADEFDENRYQTVYSKVPGAVAAPTAGLHFDEAILEKCRAKGIQFAYVTLHVGAGTFQPVRHEDLSQHDMHSEWYNMPEATVAAIQTARANGRDVIAVGTTSLRALESASQSGQLLAGNADTRLFITPGYQFKTVTRLVTNFHLPKSTLLMLVSAFAGYNHIRAAYQHAIAQRYRFFSYGDAMLLTNKFYE

SEQ ID NO: 71892 - protein, 352 aa, Saprospira grandis
  misc_feature (1)..(352): tr|H6L4G1|H6L4G1_SAPGL S-adenosylmethionine:tRNA ribosy ltransferase-isomerase OS=Saprospira grandis (strain Le win) OX=984262 GN=queA PE=3 SV=1
MKLSQFNFDLPQELIAQYPVENRDESRLMVVHRDSGKIEHRQFRDIIEYFDDGDVFIMNNTKVFPARLYGQKEKTGAKIEVFLLRELNEEQKLWDVLVDPARKIRVGNKLYFNDEDGVELLVAEVVDNTTSRGRTIRFLYDGPNEEFRAQLYKLGQTPLPKYIKRDLEELDTERYQTIYAKEVGAVAAPTAGLHMSHEVMKRLELKGVEFAELTLHVGLGTFRNIEVEDLSKHKMDAEYFKISQPVCDTVNEAIKQGKRRCALGTTSMRSIESSVSAHSLLKPAEGWTNRFIYPPYDFSIADCMITNFHLPKSSLVIMICAFGGYDLMMEAYRQAVEQKYRFYSYGDAMLIL

SEQ ID NO: 71893 - protein, 352 aa, Saprospira grandis
  misc_feature (1)..(352): tr|J0PAT6|J0PAT6_9BACT S-adenosylmethionine:tRNA ribosy ltransferase-isomerase OS=Saprospira grandis DSM 2844 O X=694433 GN=queA PE=3 SV=1
MKLSQFNFDLPQELIAQYPVENRDESRLMVVHRDSGKIEHRQFRDIIEYFDDGDVFIMNNTKVFPARLYGQKEKTGAKIEVFLLRELNEEQKLWDVLVDPARKIRVGNKLYFNDEDGVELLVAEVVDNTTSRGRTIRFLYDGPNEEFRAQLYKLGQTPLPKYIKRDLEELDTERYQTIYAKEVGAVAAPTAGLHMSHEVMKRLELKGVEFAELTLHVGLGTFRNIEVEDLSKHKMDAEYFKISQPVCDTVNEAIKQDKRRCALGTTSMRSIESSVSAHSLLKPAEGWTNRFIYPPYDFSIADCMITNFHLPKSSLVIMICAFGGYDLMMEAYRQAVEQKYRFYSYGDAMLIL

SEQ ID NO: 71894 - protein, 354 aa, Saprospiraceae bacterium
  misc_feature (1)..(354): tr|A0A521VB86|A0A521VB86_9BACT S-adenosylmethionine:tRN A ribosyltransferase-isomerase OS=Saprospiraceae bacter ium OX=2202734 GN=queA PE=3 SV=1
MRSKLSQFNYDFDEKLIAQYPAAHRDESRMMVLHRDTGKIEHKIFKDILEYFSSDDVMIFNNTKVFPARMYGKKEKTGAKIEVFLLRELNSDQKLWDVLVDPARKIRVGNKLYFMDAKGNEILVAEVVDNTTSRGRTIRFLFDGPDEEFRKGLYTLGTTPLPKYIDRNVEKMDFDRYQTVYAKVLGAVAAPTAGLHFSEGLMKRMEIKGINFAEVTLHIGLGTFRTIDVEDLSKHKMDAEYFRVPQAAVDVVNKGKAGNQRICAVGTTSMRATESAVSAGNLLKAAEGWTNLFIFPPYDFHIANAMVTNFHLPKSSLLIMVSAFGGKDLVREAYAEAIKEKYRFFSYGDAMLIL

SEQ ID NO: 71895 - protein, 354 aa, Saprospirales bacterium
  misc_feature (1)..(354): tr|A0A2E4ICR9|A0A2E4ICR9_9BACT S-adenosylmethionine:tRN A ribosyltransferase-isomerase OS=Saprospirales bacteri um OX=2026790 GN=queA PE=3 SV=1
MRTKLSQFKFELPEELIAQYPADVRDESRLMVVHRDTGKIEHKLFKDLIDYFEEDDALIFNNTKVFPARMYGMKEKTGAKIEVFLLRELNKEAMLWDVLVDPARKIRVGNKLYFNDEEGNNILVAEVVDNTTSRGRTIRFFFDGTDEEFRATLRKLGSTPLPKYIDREVEAIDDERYQTVYAKEVGAVAAPTAGLHFSKELMKKLEIKGVEFAEVTLHVGLGTFRSIDVEDLSKHKMDAEYYKINQKAADIVNKAKDSRKRVCAVGTTSMRTIESSVGATRHLKASEGWTNKFIFPPYEFDIPNCMITNFHLPKTSLVIMISAFAGHDLAMEAYAEAIKEKYRFFSYGDAMLIL

SEQ ID NO: 71896 - protein, 396 aa, Saprospirales bacterium
  misc_feature (1)..(396): tr|A0A3B9AHI6|A0A3B9AHI6_9BACT S-adenosylmethionine:tRN A ribosyltransferase-isomerase OS=Saprospirales bacteri um OX=2026790 GN=queA PE=3 SV=1
MLSISDYHYDLPDARIARYPLAERDASKLLEWRDGVIVHHVFRDLPELLTGNETLFFNNTKVIPARMYFRKPTGGLIEVFLLEPVVPHLVELAMRSTQAVEYRCMVGNLKRWAEGSTLERSLGDTTLRVTLLDKASMYVRFEWDDARMPVAKIIELAGEIPIPPYLNRDAEALDAQRYQTVYSKKEGAVAAPTAGLHFTPAVLERLAAKGIGLEELTLHVSAGTFNPVKAENALEHPMHSEQIVLRRQTLEKLVASEKIVAVGTTSMRTLESVYWFGVQLLQNPDAAFDIGQQTAIKPYHGTLPDRSTALKAVLDCFQRRGLEELYGSTQIYLVPGCQFHVCDALITNFHQPGSTLMLLVAAFTGGNYWRKIYQAALDGDYRFLSYGDSSLLWRGV

SEQ ID NO: 71897 - protein, 345 aa, Unknown
  misc_feature (1)..(345): tr|A0A2A5YF62|A0A2A5YF62_9PROT S-adenosylmethionine:tRN A ribosyltransferase-isomerase OS=SAR116 cluster bacter ium MED-G04 OX=1986233 GN=queA PE=3 SV=1
MKLSDFDYDLPPEAVASHPAEPRDAARLLDLRRDTLVDRIVSDLPDLLGQGDLMVVNNTRVIPARLEGRRGEAGISVTLHQRIAPDTWRCFAKPARKLRLGDQVEFSSILTAEVTALGEDGERTLTFTLAGDKLDQAIEAHGSMPLPPYIPRPDGPTRDDSASYQTIYARHKGAVAAPTAGLHFTPELMQRIRDKGVNMAEVTLHVGAGTFLPVKTDDVRDHRMHHEWGEITAPVAEAINRTRDEGGRIIAVGTTTLRILEACWKENGCIQEWQAETDLFIIPGFRFGVIDLLMTNFHLPKSTLMMLVSAFAGKGAIDQAYAHALKTGYRFFSYGDACLMERRDD

SEQ ID NO: 71898 - protein, 363 aa, Unknown
  misc_feature (1)..(363): tr|G5ZVJ8|G5ZVJ8_9PROT S-adenosylmethionine:tRNA ribosy ltransferase-isomerase OS=SAR116 cluster alpha proteoba cterium HIMB100 OX=909943 GN=queA PE=3 SV=1
MTEHPSLLADFDYHLPEELIAQEPARPREAARLLDATGPALSDHIIADLPRLLRAGDLLVVNNTSVLPAALIGQRGAGRARINLHRRLSADTWLAFAKPAKKCPPGTEITFADGFSAVVTDRADGGEVTLRFSVAGEALDACLHQHGQMPLPPYIRRPDGAGEADKHDYQTMFATHAGAVAAPTAGLHFTDGLRDQLLAAGVKFAEVTLHVGAGTFLPVKVDKISDHKMHTEWGSLSTETVQAIQNTKASGGRVIAVGTTCLRILEAAFSHHGHLAPFTGETDIFITPGYQFGVIDMLLTNFHLPKSTLLMLVSAFSGYDFIKSAYAHAFVSGYRFFSYGDACLLACRNQLAADNIQMREGDG

SEQ ID NO: 71899 - protein, 362 aa, Unknown
  misc_feature (1)..(362): tr|A0A2N0LWG7|A0A2N0LWG7_9CHLR S-adenosylmethionine:tRN A ribosyltransferase-isomerase OS=SAR202 cluster bacter ium Io17-Chloro-G8 OX=1926617 GN=queA PE=3 SV=1
MRTSDFDYDLPSELIAQSPVEPRDSSRLLVMHRDTGALEHRHFPDLLEYLLPGDVMVFNQSRVIPARLYGHRADTGSKVEFLLLRRYADATWQAMARPGRRLRAGVVVEIDNLPLFPKGGAEGGFSVEVIAAHDDGLKTVRLSSEEGIERFGHTPLPPYIKETLSDPERYQTVYSRRPGSVAAPTAGLHFTDDLLQKVRDLGVETVFVTLHVGLDTFRPVEEDDPTEHQIHTEYYQIDEQAAEALNQANAEGRRIIAVGTTSVRVLEQAALDLEQRGQTELSATDGEAILFILPGHPFRLVNAMVTNFHLPRSSLLMLVSAFVEHGQGPSTGSGRAEVLAAYTAATERGYRFYSFGDAMLIA

SEQ ID NO: 71900 - protein, 381 aa, Unknown
  misc_feature (1)..(381): tr|A0A2N0KMA2|A0A2N0KMA2_9CHLR S-adenosylmethionine:tRN A ribosyltransferase-isomerase OS=SAR202 cluster bacter ium Casp-Chloro-G2 OX=1926604 GN=queA PE=3 SV=1
MRTSDFDYHLPPELIAQSPIEPRDSSRILVMRRDSGALEHRQFPDVLEYLRPGDVMVFNQSRVIPARLYGRRADTGSKVEFLLLRRNADGDWTAMARPGRRLRPGVVVDIERSPHSPFTEEGTEGGFQVRILEARDDGLKTIRLSSEEGIESFGVTPLPPYIKAVLDDPERYQTVYSRLPGSVAAPTAGLHFTDGLLEKVRAMGVESVFVTLHVGLDTFKPVDEDDPTEHKIHTERYQIDGQAAQTLNRAKAEGRRIIAVGTTSVRVLEQAGQDMERNGQTALSETEGEASIFILPGHRFRMVDAMITNFHLPRSSLLMLVSAFVEHGRAGDGPSTGPHDASGRLSTSSRSSGRDGVLAAYREAIGKGYRFYSFGDAMFIA

SEQ ID NO: 71901 - protein, 350 aa, Unknown
  misc_feature (1)..(350): tr|A0A432GJ66|A0A432GJ66_9DELT S-adenosylmethionine:tRN A ribosyltransferase-isomerase OS=SAR324 cluster bacter ium OX=2024889 GN=queA PE=3 SV=1
MPSHDWKLSSYDYKLPQSLIAQHPAPKRDQSRMLFLERKSGKISNRNFTEIVSLLPESSCLVINNTKVLPARIPGKRQSGGKIEALLIEENNNGDWSAIVRKAGRIKQGERLEFCDGKLLAKAKERLEEGEWLLEFEETERLKERLEDVGLPPLPPYIERRNASDLQNTKDRERYQTCFATEPGAIAAPTAGLHFTPEILTEIGNRGIDILEVTLHVGLGTFSSIDQEDIRKHKMHAEFFSISSQTLRQLQVYQNNNKQMINVGTTSVRVLETLVRQNFQESSGWTDIFIYPPCKFTMTDGLLTNFHLPKSTLMLLVSAFCGRECLLSSYQHAVAEKYRFFSYGDCMLIL

SEQ ID NO: 71902 - protein, 348 aa, Unknown
  misc_feature (1)..(348): tr|A0A2A4TB98|A0A2A4TB98_9DELT S-adenosylmethionine:tRN A ribosyltransferase-isomerase OS=SAR324 cluster bacter ium OX=2024889 GN=queA PE=3 SV=1
MNYSISDYTYELPDRLIAQKPASPRDSSRMLVLNKESQEDLHQAFRELPDFLEENSILVVNNSRVIPARLPGQRETGGAIEALLVQEEALGIWKCKVKNAARIKPGERLAFCQGAIQARLVKKLPDGTCLLQFQDATNLYPALEQHGFAPLPPYIRKARQEEGLRTEDLTTYQTIFAQEYGAVAAPTAGLHFSPQVMDRIREKGIEVLEVTLHVGLGTFEPIRVDDVRQHQMHEERYEISKEVAERITQAKRTGQKVIAVGTTSARTLEAAWQEDHLVSGMGSTDIFIYPPYQFQVVDQLLTNFHLPESTLLMLVSALAGKERMMAAYQGAVEQDYRFYSYGDCMLIQ

SEQ ID NO: 71903 - protein, 339 aa, Unknown
  misc_feature (1)..(339): tr|J4V190|J4V190_9GAMM S-adenosylmethionine:tRNA ribosy ltransferase-isomerase OS=SAR86 cluster bacterium SAR86 B OX=1123867 GN=queA PE=3 SV=1
MKTEEFNYYLPEELIANYPLEDRSASRLMVYENQLEHKNFFEVKNYFKEGDILVLNETSVIPARLYGKKQTGGMIEIFLERILEGNKILVQIGSSRSPKVDSTLIVNDKELRVEGRQGAFYILKLDNEPLDFFNSYGHVPLPPYIKRPDEEIDKSRYATIYENKELQDSVAAPTAGLHFTAELLEAIKNKGVEVLKVNLSVGAGTFQPVKAEDIKDHKIHSEYAHVTSEVVNKILQAKAKGKKVTAVGTTVTRALESAFHKRTPGDFKGYTELYITPGFSFQAVDRLITNFHLPKSSLLMLVAAFVGMKEMKDLYNHAVENQYRFLSYGDAMMINKKNV

SEQ ID NO: 71904 - protein, 349 aa, Unknown
  misc_feature (1)..(349): tr|A0A2A4X277|A0A2A4X277_9GAMM S-adenosylmethionine:tRN A ribosyltransferase-isomerase OS=SAR86 cluster bacteri um OX=2030880 GN=queA PE=3 SV=1
MQISDFQYDLPEELIANYPAEKRSASRLLCLDASTGKLLHRRFGQLLDFLKPEDLLVFNNTRVIPARLFAQKESGGKVEILIERMLDGNRVMAQLRASKSPKPGTRLVFNADNRSIPGAVVEGRENEFFLLSFDADVDVPALLVREGHMPLPPYIRRSDEELDVERYQTIYAEKEGAVAAPTAGLHFDEDLFAALLAKGVDTAYLTLHVGAGTFQPIRVDNVLEHKMHKELVDVDEKVCQQVAACKERGGRVIAVGTTTVRSLESAAKDSPLAPFHGETDIFIYPGYDFQVVDAMVTNFHLSESTLLMLVSAFSEKDMLLGAYNEAVAQKYRFYSYGDAMFIHHSGDRT

SEQ ID NO: 71905 - protein, 348 aa, Unknown
  misc_feature (1)..(348): tr|A0A0R2W9E7|A0A0R2W9E7_9GAMM S-adenosylmethionine:tRN A ribosyltransferase-isomerase OS=SAR92 bacterium BACL1 6 MAG-120619-bin48 OX=1655625 GN=queA PE=3 SV=1
MRRDLFQFDLPDELIAKQPAAQRQGSRLLYLDSQKSDLRHQQFADLLGHIAPGDLMVFNNTKVIPARLFGQKSSGGKIEVLVERVLSQYGVLAHIRASKSPKAGTQLLFDGGHRAEMVARADDLFELNFAAPVLEVLEQIGHMPLPPYIDRADTETDKSRYQTVYAQQLGAVAAPTAGLHFDERMLAAIKAKGAQIAFVTLHVGAGTFQPVRAENIVDHKMHSEWLQVSDEVCEQVLATKAAGGRVIAVGTTSVRCLETAARSGQIMPFEGDTNIFIYPGYRFNVADALLTNFHLSESTLLMLVSAFSGYGPIMSAYREAVAERYRFFSYGDTMFLRHNPNAAKDIPE

SEQ ID NO: 71906 - protein, 348 aa, Unknown
  misc_feature (1)..(348): tr|A0A0R2U411|A0A0R2U411_9GAMM S-adenosylmethionine:tRN A ribosyltransferase-isomerase OS=SAR92 bacterium BACL2 6 MAG-121220-bin70 OX=1655626 GN=queA PE=3 SV=1
MRRDHFQFELPNELIARQPAVQRQGSRMLFLDSAENNLQHQQFSDFLSHVESGDLVVFNNTKVIAARLYGQKATGGKVEVLVERLVDAYSVLAHVRASKSPKPGNQIVFSEGFSAEMTGRDDDLFALTFNKPVLDVLDAIGHMPLPPYIDRSDTNEDKTRYQTVYADQLGAVAAPTAGLHFDEKMLEDIQTKGASIAFVTLHVGAGTFQPVRVDNIIDHKMHSEWLLVSLEVCDQVIKTKTNGGRVIAVGTTSVRCLETAARSGQIAPFEGDTNIFIYPGYRFNVVDGLLTNFHLSESTLLMLVSAFSGYHSIMAAYREAVSERYRFFSYGDAMFLLRNPNAEQEVPE

SEQ ID NO: 71907 - protein, 348 aa, Unknown
  misc_feature (1)..(348): tr|A0A520MD51|A0A520MD51_9GAMM S-adenosylmethionine:tRN A ribosyltransferase-isomerase OS=SAR92 clade bacterium OX=2315479 GN=queA PE=3 SV=1
MRRDHFQFELPNELIARQPAEQRQGSRLLFLDGANNHLEHEQFGDFLTHIESGDLIVFNNTKVIPARLYGQKQSGGKIEVLVERLVSSHSVQAHVRASKAPKPDTQIVFAKDFGAQVTGRADDLFELTFNRPVLEVLECIGHMPLPPYIDREDTEADKSRYQTVYADQLGAVAAPTAGLHFDERMLADIEAKGAKVAFVTLHVGAGTFQPVRVDNISDHQMHSEWLQVSEAVTDQVLQTKANGGRVIAVGTTSVRCLETAAQNGQIAPFEGDTNIFIYPGYRFNVVDGLLTNFHLSESTLLMLVSAFAGHKPIMAAYQEAVSERYRFFSYGDAMFLLHNPNANQDIPQ

SEQ ID NO: 71908 - protein, 347 aa, Unknown
  misc_feature (1)..(347): tr|A0A520LKU8|A0A520LKU8_9GAMM S-adenosylmethionine:tRN A ribosyltransferase-isomerase OS=SAR92 clade bacterium OX=2315479 GN=queA PE=3 SV=1
MKLDLFDYSLPQKLIAKFPLTERSSSSMLVMDELGNISHRMFTDLLDFLNKGDLLVFNNTRVISARLLGKKDTGGAIELLIERVVKDKVAYALLKSNKKIKLGSRINFVGGHYATVLERKQKLFLISFSSNVSKIIEDIGELPLPPYIDREPIQLDSERYQTVYASESGAIASPTAGLHFDESMLRELQNKGINHCFVTLHVGSGTFKPVKEENILDHDMHAEWISIGNDACDLILATKKNEGRIVAVGTTSLRAIETIGNKNEFKPYEGDTNIFIYPGYEFTLVDMLITNFHLPKSTLLMLVCAFSGYKEIMAAYKEAIDNDYRFFSYGDAMLLNRNSNARFNIPS

SEQ ID NO: 71909 - protein, 364 aa, Sarcina sp.
  misc_feature (1)..(364): tr|A0A1G9G9R8|A0A1G9G9R8_9CLOT S-adenosylmethionine:tRN A ribosyltransferase-isomerase OS=Sarcina sp. DSM 11001 OX=1798184 GN=queA PE=3 SV=1
MNTTQTPSPAVPVGHRTADYYFELPQELIAQDPLEDRSSSRLLVMDRNTGEVTHGTFRDILRYLHPGDALILNDTKVIPARLLGEREGTGASIEILLLKRMEKDVWECLVRPGKKLRPGARAVFGDGSLKAEILEVVEGGNRLVRFEFEGIFEEVLDRLGEMPLPPYITHKLKDRGRYQTVYARYEGSAAAPTAGLHFTPELLDEVRALGVQTGFVTLHVGLGTFRPVKVDDVEQHTMHTEWYNVPEETADLINRTHQAGGRVICVGTTSCRTVESAADENGIVHAGSDDTSIFIYPGYHFKTMDGLITNFHLPESTLIMLVSAFAGREHVLKAYEEAVRERYRFFSFGDAMFIADHTKIETVS

SEQ ID NO: 71910 - protein, 310 aa, Sarcina sp.
  misc_feature (1)..(310): tr|A0A3C0ZXK7|A0A3C0ZXK7_9CLOT S-adenosylmethionine:tRN A ribosyltransferase-isomerase (Fragment) OS=Sarcina sp . OX=2053610 GN=DCP64_13940 PE=3 SV=1
MNTTQTPSPAVPVGHRTADYYFDLPQELIAQDPLEDRSSSRLLVMDRNTGEVTHGTFRDILRYLHPGDALILNDTKVIPARLLGEREGTGASIEILLLKRMEKDVWECLVRPGKKLRPGARAVFGDGSLKAEILEVVEGGNRLVRFEFEGIFEEVLDRLGEMPLPPYITHKLKDRGRYQTVYARYEGSAAAPTAGLHFTPELLDEVRALGVQTGFVTLHVGLGTFRPVKVDDVEQHTMHTEWYNVPEETADLINRTHQAGGRVICVGTTSCRTVESAADENGIVHAGSDDTSIFIYPGYHFKTMDGLITN

SEQ ID NO: 71911 - protein, 346 aa, Schlegelella thermodepolymerans
  misc_feature (1)..(346): tr|A0A4R2MM55|A0A4R2MM55_9BURK S-adenosylmethionine:tRN A ribosyltransferase-isomerase OS=Schlegelella thermode polymerans OX=215580 GN=queA PE=3 SV=1
MQRTYTLSDFDFALPAELIAQHPAPQRSASRLLDATGDAPADRVFRDLPQRLAPGDLLVFNDTRVIKARLYGTKATGGSVEALVERILPGHEVLAHLRASKSPRPGTVVRFAGAFDAEVLGRGGPDGGLFHLRFPDDPLVLLERHGHVPLPPYITHADTDEDERRYQTVFADKPGAVAAPTAALHFDDAVLQGLAQRGVRTANVTLHVGAGTFQPVRTENLAEHRMHTEWFEVPAATVQAIEATHATGGRVVSVGTTTLRALESAARGGALRAGCAETDIFITPGFEFRVVDLLITNFHLPKSTLMMLVSAFAGYERVMALYRHAIAQRYRFFSYGDAMVLDRRPA

SEQ ID NO: 71912 - protein, 346 aa, Schlegelella thermodepolymerans
  misc_feature (1)..(346): tr|A0A2S5T803|A0A2S5T803_9BURK S-adenosylmethionine:tRN A ribosyltransferase-isomerase OS=Schlegelella thermode polymerans OX=215580 GN=queA PE=3 SV=1
MQRTYTLSDFDFALPAELIAQHPAPQRSASRLLDATGDAPADRVFRDLPQRLAPGDLLVFNDTRVIKARLYGAKATGGSVEALVERILPGHEVLAHLRASKSPRPGTVVRFAGTFDAEVLGRGGPDGGLFHLRFPDDPLVLLERHGHVPLPPYITHADTDEDERRYQTVFADKPGAVAAPTAALHFDDAVLQGLAQRGVRTANVTLHVGAGTFQPVRTENLAEHRMHTEWFEVPAATVQAIEATHATGGRVVSVGTTTLRALESAARGGALRAGCAETDIFITPGFEFRVVDLLITNFHLPKSTLMMLVSAFAGYERVMALYRHAIAQRYRFFSYGDAMLLDRRPA

SEQ ID NO: 71913 - protein, 351 aa, Schleiferia sp.
  misc_feature (1)..(351): tr|A0A401XP21|A0A401XP21_9FLAO S-adenosylmethionine:tRN A ribosyltransferase-isomerase OS=Schleiferia sp. LA OX =2173829 GN=queA_2 PE=3 SV=1
MKFKLSNFNYKLPKELIANRPVPHRDESRLMVVHRDTGKIEHRIFKDILDYFEEKDLFVLNNTKVFKARLYGYKEKTGARIEVFLLRELNAETRLWDVLVDPARKIRIGNKIYFGEDENLVAEVIDNTTSRGRSIRFLFDGTYEEFRKKLVDLGHMPIPKYLQREADEEDEERYQTIYAKVEGAVAAPVSGLHFSKQLLKRMEIKGVETTEITMHVGLGTFKPVEVEDLSKHKMDSEQVWIYPEAAKKINEALDQNRKVVSIGTTTLRALESSLTTENRIIPFNGWISKFIYPPYTFRLPLKLVTNFHAPMSTILMLKSAFMGHELMMEAYHTAIKENYRFLSYGDAMLIL

SEQ ID NO: 71914 - protein, 406 aa, Schleiferia sp.
  misc_feature (1)..(406): tr|A0A401XNR1|A0A401XNR1_9FLAO S-adenosylmethionine:tRN A ribosyltransferase-isomerase OS=Schleiferia sp. LA OX =2173829 GN=queA_1 PE=3 SV=1
MSLIPEIRISDFDYELPAERIAAYPLEERDQSKLLVYKDGMITDAVFNQLSEFLPDGASMYFNQSKVVFTRLFFKIHDSDEKHVEIFCLEPADGLELASALTSKNSVVMKCMVGRAKRWKDQELTMRIPHSRGDIMLYAEKAGRQNDVFLVHFTWSADITFAEILELAGHVPLPPYIKREDEAIDRSRYQTIYARREGSVAAPTAGLHFTERVFESLRKKDVALNFLTLHVGAGTFAPVKSEYIAQHQMHGEYIEITRELLESLLQRKQRIAVGTTSLRTLESIYYLGVRTMLEGDLSIHDLDQWCGFTYPKDIAFEQSIEQLLKVFDLHKIDSGIKLKTHLIIAPGYQIRSVDALVTNFHQPSSTLLLLVSAVTGGEWCKIYDHALAHGYRFLSYGDSSLLFVKK

SEQ ID NO: 71915 - protein, 351 aa, Schleiferia thermophila
  misc_feature (1)..(351): tr|A0A085L4U3|A0A085L4U3_9FLAO S-adenosylmethionine:tRN A ribosyltransferase-isomerase OS=Schleiferia thermophi la str. Yellowstone OX=1453500 GN=queA PE=3 SV=1
MKYKLSHFNYKLPKELIAIRPLPHRDDSRLMVVHKDSGKIEHKTFKDVLDYFEEKDLFVFNNSKVFKARLYGYKEKTGARIEVFLLRELNAETRLWDVLVDPARKIRIGNKIYFGEDESMVAEVIDNTTSRGRSIRFIFDGTYEEFRKKLVELGHMPIPKYLQREADKEDEERYQTIYAKVEGAVAAPVSGLHFSKQILKKMEIKGIESTEITMHVGLGTFKPVEVEDLSKHKMDSEQVWIYPESARKINQALDENRKVVSVGTTTLRALESSLTTENRIIPFEGWISKFIYPPYKFRLPLKLITNFHAPMSTILMLKSAYMGYELMMEAYNEAIKEKYRFLSYGDAMLIL

SEQ ID NO: 71916 - protein, 351 aa, Schleiferia thermophila; identical to SEQ ID NO: 71915
  misc_feature (1)..(351): tr|A0A369AAU7|A0A369AAU7_9FLAO S-adenosylmethionine:tRN A ribosyltransferase-isomerase OS=Schleiferia thermophi la OX=884107 GN=queA PE=3 SV=1

SEQ ID NO: 71917 - protein, 345 aa, Schwartzia succinivorans
  misc_feature (1)..(345): tr|A0A1M4UMY9|A0A1M4UMY9_9FIRM S-adenosylmethionine:tRN A ribosyltransferase-isomerase OS=Schwartzia succinivor ans DSM 10502 OX=1123243 GN=queA PE=3 SV=1
MLLSDFDYDLPEERIAQTPVEPRNSSRLMVLDPVEKTIEHQHFYDLKKYLEPGDTLIFNDTRVMPARLIGHREPTGGRVEVFLLRRISGDTWETLVQPGKKARPGTTVKFSDELSCEVMDNTDFGGRIVKFSYEGIFEEVLDRLGETPLPPYIHEKLQDKERYQTVYNREEGSAAAPTAGLHFTKEQMEDLKEYGVNLGFLTLHVGLGTFRPVKTDTIEEHQMHREYYSISDETADLVMRTKAAGHRVIAVGTTSIRTLESAATAKGQIAGKSDSTDIFIYPGYDFKIVDAIITNFHLPKSTLIMLISAFAGREFVLDAYKTAVDEKYRFFSFGDAMFIKRPPKK

SEQ ID NO: 71918 - protein, 342 aa, Scopulibacillus darangshiensis
  misc_feature (1)..(342): tr|A0A4R2NHX8|A0A4R2NHX8_9BACL S-adenosylmethionine:tRN A ribosyltransferase-isomerase OS=Scopulibacillus daran gshiensis OX=442528 GN=EV207_1463 PE=3 SV=1
METELIDFHLPAELEAAKPAERRGLRRDHVNLMVLDRETGDTVDDIFFHLDRYLNPGDLIVLNNSRTIPAVLHAQKAGVANRVEIRLAQRKDSSRWEALIRDSSVNVGDHYVFSNSLKAEVIDTDPEKPLATLKFSKEGTPLLNDIYELGEPVRYEYILEPWGLDNYQTVFASVPGSVEMPSAGRAFTWELLNKLKDKGAGIAYLQLHTGLTYMLDDKWHQHPSENLEYYEIPAATAKAVNETKRRGGKVIAVGTTVVRALETVASKFGYLKADKGWSDLFIHKDFPLQISDGLVTGFHEPKTTHLALLSAFIDSDKLTKSYQRAIQKGYLWHEFGDINLIL

SEQ ID NO: 71919 - protein, 345 aa, Scopulibacillus darangshiensis
  misc_feature (1)..(345): tr|A0A4R2PCU3|A0A4R2PCU3_9BACL S-adenosylmethionine:tRN A ribosyltransferase-isomerase OS=Scopulibacillus daran gshiensis OX=442528 GN=queA PE=3 SV=1
MDVSMFDFDLPEELIAQTPLKERTASRLMVLSPENGTVQHRHFTDLTQYLNPGDCLVLNDTKVLPARLLGVKEDTGAKIEVLLLKQTVGDEWECLVKPAKRIKVGSTVVFGEGQLQAECTGVKDEGRRMMIFRYQGIFHEVLDELGKMPLPPYIKEQLEDQDRYQTVFAKNRGSAAAPTAGLHFTDELLDALKAKGVTVAFITLHVGLGTFRPVKAEKIEEHSMHAEFYQMTKGTAELLNRTKEEGGRVIAVGTTVIRTLETIAAKSNGRLTEASGWTDIFIYPGYKYKAIDGMITNFHLPKSTLIMLVSAFAGRDFLLSAYKQAVEEKYRFFSFGDAMLITERI

SEQ ID NO: 71920 - protein, 349 aa, Scytonema hofmannii
  misc_feature (1)..(349): tr|A0A139WV92|A0A139WV92_9CYAN S-adenosylmethionine:tRN A ribosyltransferase-isomerase OS=Scytonema hofmannii P CC 7110 OX=128403 GN=WA1_42295 PE=3 SV=1
MATPFTFTLPIELLAQEPPERRGLGRDRVRLMAIDRINNKVEHTRFDRLSEFLRPGDLLVFNSSRTLPACLNGCEMPRGDCMEVRLAQHLPDDSWLALLFCQRGDPFSCGLRSGMKIDFEQGLTGTVYERDVNIPRLWKLRFSKSGTELMDLLYRLGRPVRYEYVSAPWELDYYQTVYAKEPGSAEMPSAGRAFTWKLLLDLKRQGVNTAYIVLHTGLSSYMDDALDAQHPASEEEYLISESAAQKINQTHFNGGRVIAVGTTVVRALESVADETGKVKAKHGYTRLHITANHRLKTVNGLLTGMHEPEASHLDLLTAFLSADKIRDSYEEAVQKQYLWHEFGDLNLIV

SEQ ID NO: 71921 - protein, 410 aa, Scytonema hofmannii
  misc_feature (1)..(410): tr|A0A139WYA7|A0A139WYA7_9CYAN S-adenosylmethionine:tRN A ribosyltransferase-isomerase OS=Scytonema hofmannii P CC 7110 OX=128403 GN=queA PE=3 SV=1
MQEPSTRNNYDSVSNANKEDTELDTCLAGYDYELPQELIAQNPVVPRDNSRLLVVNPNAGLEAATLHYIFRDLPDLLQSGDLLIMNNTRVIPARLYGYKQTGAEIEVLLLEERQHNCWLALVKPGKRFKPGAKIVFEPRLGGDRALGIGHWGLGIGNNKDFSQVSSPQSSVPSPQLTATVLETDEATGGRLLQFDLPEGISLVQLLEVFGEVPLPPYITASDAKSEQYQTVYAEHPGAVAAPTAGLHFTPELLDRLQQRGIDRAFVTLHVGVGTFRPVDVEDIKTHKMHEEWIEVPSATVEKIRLTQASGGRIIAVGTTVVRALEGAASQGELKPFCGKTDIFIYPGYKWRVVNGLITNFHLPRSSLLMLVSALIGRQRLLSVYQEAVASRYRFFSFGDAMLILPQGSRE

SEQ ID NO: 71922 - protein, 348 aa, Scytonema millei
  misc_feature (1)..(348): tr|A0A1D2P506|A0A1D2P506_9CYAN S-adenosylmethionine:tRN A ribosyltransferase-isomerase OS=Scytonema millei VB51 1283 OX=1245923 GN=QH73_014060 PE=3 SV=1
MLTKPFTFKLPAELSAKEPPERRGIARDQVRLMVINRNDYQVEHTYFNSIGEFLRPGDLLVFNTSRTLPASLDGCEITKGQCMEIRLAQHLPDDSWLALPLCQQQPTCSLQTGIDIDFGHGLTATVENRDTHIPQLWKIRFSKSRTELIDTLYRLGRPIRYEYVSAPWDLDYYQTVYAKEPGSAEMPSAGRAFTWKLLFDLKRRGIETAHIVLHTGLSSYMDDELDAQHLASEEEYYISEAAAQKINHTHKQGGRVIAVGTTVVRALESVADAKGNVQPQHGYTRLRVTAEHKLKTVDGLLTGLHEPEASHLDLLTAFLPAHQIKQAYEDAVQRGYLWHEFGDLNLIL

SEQ ID NO: 71923 - protein, 248 aa, Scytonema millei
  misc_feature (1)..(248): tr|A0A1D2PEG1|A0A1D2PEG1_9CYAN S-adenosylmethionine:tRN A ribosyltransferase-isomerase (Fragment) OS=Scytonema millei VB511283 OX=1245923 GN=QH73_020645 PE=3 SV=1
TTPPPYHFLTATVLETDEATGGRLLQFDLPEGMSLVQLLDVFGEVPLPPYITASDAQNEQYQTVYARNPGAVAAPTAGLHFTTELLQRLRDRGIHQAFVTLHVGVGTFRPVEVEDVKTHKMHEEWIEVPSSTVEQIRATQASGGRIIAVGTTVVRALEGAAAKGELQPFCGKTDLFIYPGYKWRVVQGLITNFHLPRSSLLMLVSALISRQRLLNIYQEAIASRYRFYSFGDAMLILPEARNNEKLTH

SEQ ID NO: 71924 - protein, 396 aa, Scytonema sp.
  misc_feature (1)..(396): tr|A0A1Z4IQW1|A0A1Z4IQW1_9CYAN S-adenosylmethionine:tRN A ribosyltransferase-isomerase OS=Scytonema sp. HK-05 O X=1137095 GN=queA PE=3 SV=1
MQQQRAKSNLNTIFSHKKEDVEFEISLSGYDYELPQELIAQNPVVPRDSSKLLVVNSPTTGTDAAPLHHIFRDLPELLYPGDLLVMNNTKVMAARLYGRKSTGAEIEVLLLEERQHNCWLALVKPGKRFKAGAKILFEPRGVGGDEGEKGTTSSSSPPDLTATVLETDEATGGRLLQFDLPDGMSLVELLDVFGEVPLPPYITASDAQNEQYQTVYAKTPGAVAAPTAGLHFTTELLERLRDRGIHQAFVTLHVGVGTFRPVEVEDIKTHKMHEEWIEVPSSTVEQIRATQASGGRIIAVGTTVVRALEGAAAKGELQPFCGKTNLFIYPGYQWRVVEGLITNFHLPRSSLLMLVSALIGRQRLLKIYQEAIASRYRFYSFGDAMLILPEATSVGK

SEQ ID NO: 71925 - protein, 392 aa, Scytonema sp.
  misc_feature (1)..(392): tr|A0A1Z4Q948|A0A1Z4Q948_9CYAN S-adenosylmethionine:tRN A ribosyltransferase-isomerase OS=Scytonema sp. NIES-40 73 OX=2005464 GN=queA PE=3 SV=1
MQQQRTKSNLNTKSSHKKEDVEFESCVSGYDYELPQELIAQNPVVPRDSSKLLVVNSFSTGTQTPPLHRIFRDLPELLHPGDLLVMNNTKVMPARLYGRKSTGAEIEVLLLEERQHNCWLGLVKPGKRFKAGAKIIFEARGVGENKGGTSSSSSPPLLTATVLETDEATGGRLLQFDLPDGMSLVQLLDVFGEVPLPPYITASDAQNEQYQTVYAKTPGAVAAPTAGLHFTTELLERLRDRGIHQAFVTLHVGVGTFRPVEVEDIKTHKMHEEWIEVPSSTVEQIRATQASGGRIIAVGTTVVRALEGAAAKGELQPFCGKTDLFIYPGYQWRVVEGLITNFHLPRSSLLMLVSALIGRERLLNIYQEAIASRYRFYSFGDAMLILPEARNK

SEQ ID NO: 71926 - protein, 388 aa, Scytonema tolypothrichoides
  misc_feature (1)..(388): tr|A0A0C2QC28|A0A0C2QC28_9CYAN S-adenosylmethionine:tRN A ribosyltransferase-isomerase OS=Scytonema tolypothric hoides VB-61278 OX=1233231 GN=queA PE=3 SV=1
MQQQSAKTNFNPISSPDKEDLELDSSLTGYDYELPQELIAQNPVVPRDHSKLLVVNSLNTDIKQDIVHCIFRNLPEQLKSGDLLVMNNTKVYPARLYGRKSTGAEIEVLLLEERQHNCWLALVKPGKRFTRGAKIIFEARANSSSSPSSLTATVLETDEATGGRLLQFDLPEGVSLVQLLDVFGEVPLPPYITASDAQSEQYQTVYAKVPGAVAAPTAGLHFTPELLQRLGDRGIHQAFITLHVGVGTFRPVEVENVKTHKMHEEWISVPSSTVEQIRATQASGGRIIAVGTTVARALEGAAAKGELQPFCGKTDLFIYPGYQWRVVEGLITNFHLPRSSLLMLVSALIGRKRLLNIYQQAISSQYRFYSFGDAMLILPEATTVNSEQ

SEQ ID NO: 71927 - protein, 339 aa, Sebaldella termitidis
  misc_feature (1)..(339): tr|D1ALF5|D1ALF5_SEBTE S-adenosylmethionine:tRNA ribosy ltransferase-isomerase OS=Sebaldella termitidis (strain ATCC 33386 / NCTC 11300) OX=526218 GN=queA PE=3 SV=1
MKLSDFDFDLPDNLIAQSAMEPRDHSKLMVLEKNKQVIEHKKFYNISDYLKKGDVLVVNRTRVIPARLFGKKDTGSILECFLLKRIDLNTWEVLLKPAKKLKIGQKLVFLEGKLEAVLKEVKDDGNRILEFIYEGNFEEILDELGEMPLPPYITEQLKDKNRYQTVYAKEGESVAAPTAGLHFTNELLEKLKDSGVELTEIYLDVGLGTFRPVQTENILEHKMHHEKYHIPEESAEIINRAKREGRRIIAVGTTTVRTLESSNNGAEVISGDGETDIFIYGDYKFKIVDALITNFHLPKSTLLMLISAFAGKNFIFTAYETAIQEKYRFYSFGDAMFIY

SEQ ID NO: 71928 - protein, 363 aa, Unknown
  misc_feature (1)..(363): tr|J7GT28|J7GT28_9ENTR S-adenosylmethionine:tRNA ribosy ltransferase-isomerase OS=secondary endosymbiont of Het eropsylla cubana OX=134287 GN=queA PE=3 SV=1
MHVTDFSFEVPDNLIARYPQAKRSSCRLLCLDGLGGTIIHQTFNDLVEKLTEGDLLIFNNTKVIPARLYGRKVTGGKIEVLIEKIFDNHRTLAHIRSSKAPKPGSKLLLGDDYSISATMISRYNSLFELHINDNRDIMTLLNDFGHTPLPPYINRLSEIADHELYQTVYAKHPGSVAAPTAGLHFDENLLALLNAKGIKIEFITLHIGAATFQPIRVNLIENHQMHSEYIEVSQNVVDAVNTCKTRGKRVIAVGTTSVRSLESAAAAAAKIGKTNLIPFYGDTSIFIYPGYQFRIVDVIITNFHLPESTLIMLVAAFAGYRHTLTAYREAVTKMYRFFSYGDAMFIVRNPEAHQEQISELLID

SEQ ID NO: 71929 - protein, 348 aa, Unknown
  misc_feature (1)..(348): tr|J3Z3S8|J3Z3S8_9ENTR S-adenosylmethionine:tRNA ribosy ltransferase-isomerase OS=secondary endosymbiont of Cte narytaina eucalypti OX=1199245 GN=queA PE=3 SV=1
MRTADFSFTLPKNLIARYPRAQRSACRLLSLDAKTGTLVHGVFTDLLDKLACGDLLVFNNTRVIPARLFGNKVSGGKIEVLVERVLDNQRVLAHIRASRASKTGTVLLLGDDDRIPVTIVARHESFFELRCNSPDNFLTLLNDHGHIPLPPYIDRPDNNVDRELYQTVYAETPGAVAAPTAGLHFDEPLLSALRLKGVEMTCITLHIGSGTYQPVRVDQIEQHQMHAEYAEVPQEVVDAVLACKSRGNRVVAVGTTSVRSLESAAVGGGGRLEPFFGDTRIFIYPGYYFLVIDAIITNFHLPESTLIMLVAAFAGYKHTLQGYRVAVEKAYRFFSYGDAMFITKHPAQ

SEQ ID NO: 71930 - protein, 348 aa, Sedimentibacter saalensis
  misc_feature (1)..(348): tr|A0A562JA80|A0A562JA80_9FIRM S-adenosylmethionine:tRN A ribosyltransferase-isomerase OS=Sedimentibacter saale nsis OX=130788 GN=queA PE=3 SV=1
MIENEKNFKTSDFYYHLPEELIAQTPIKERDHSRLLVLDKKTGAVEHKHFYDVIDYLNAGDCLVINETKVLPARLYGTRKDTGAVIELLLLKRIDDKCWETLVKPGKKAKEGTEIVFKENLLTGIITEVQEDGNRIIKFQYEGIFEEILDQLGEMPLPPYIHEKLEDKNRYQTIYAKNPGSAAAPTAGLHFNDELLKKVEEKGIKIARLTLHVGLGTFRPVKAEFISEHKMHSEYYELTQTEADKINSAKIGGFKVFSVGTTSTRTLETIGDENGLVRAQSGWTDIFIFPGYEYKVVDCLITNFHLPESTLVMLVSALAGKENIMNAYNEAVQEKYRFFSFGDAMLIK

SEQ ID NO: 71931 - protein, 353 aa, Sedimentibacter sp.
  misc_feature (1)..(353): tr|A0A252CMD8|A0A252CMD8_9FIRM S-adenosylmethionine:tRN A ribosyltransferase-isomerase OS=Sedimentibacter sp. S X930 OX=1955060 GN=queA PE=3 SV=1
MIQKNKRGILSMRTSDFDFYLPEELIAQTPLLDRSSSRLLSLDSKTGEITDKHFTDMVEELQEGDALVLNNTRVLPARLHGVKPDTGGHIEVLLLNNIQGDEWETLVKPGKRVKVGTVISFGDGRLTAEVTQSLDHGGRILNFKYDGVFLEILESLGEMPLPPYIKETLDDQERYQTVYAKEVGSAAAPTAGLHFTAELLEEVANKGVKIVYLTLHVGLGTFRPVSVDDIASHEMHSEFYQLTEEAAQALNEVRSNGGKIVAVGTTSVRTLETIGTKFDGEIKADSGWTKIFISPGYSFKVVQGIITNFHLPKSTLVMLVSAFAGRDSVLSAYEHAVKEKYRFFSFGDAMFIK

SEQ ID NO: 71932 - protein, 343 aa, Sedimenticola selenatireducens
  misc_feature (1)..(343): tr|A0A2N6CRA9|A0A2N6CRA9_9GAMM S-adenosylmethionine:tRN A ribosyltransferase-isomerase OS=Sedimenticola selenat ireducens OX=191960 GN=queA PE=3 SV=1
MQRSDFHYDLPDELIAQFPTGNRQDSRLLHLPCGGEGPVDRLFADLPSLLNPGDLLVFNDTRVMRARLFGTKATGGKVELLIERVLEPRRGLAHIRASKSPRAGSRILLEGGNVLEVQGRQEDLFVIAACDADLHELMCQTGHMPLPPYISREDQALDEERYQTVYSQREGAVAAPTAGLHFDQAMLARLDAMGVERAFVTLHVGAGTFRPVRVDRLEEHVMHSEYAEVSPEVCDQVRAARARGARVVAVGTTSVRSLESASREGEIQPFYGDTRLFITPGYRFHSVDALLTNFHLPESTLLMLVAAFSGYERIMAAYQHAVVQRYRFFSYGDAMFLERADWA

SEQ ID NO: 71933 - protein, 343 aa, Sedimenticola selenatireducens
  misc_feature (1)..(343): tr|A0A557RTW6|A0A557RTW6_9GAMM S-adenosylmethionine:tRN A ribosyltransferase-isomerase OS=Sedimenticola selenat ireducens OX=191960 GN=queA PE=3 SV=1
MQTSDFHYELPDELIAQFPTRNRQDSRLLHLPAGAQEAVDRQFTDLPGLLNPGDLLVFNDTRVMRARLYGQKESGGRVELLIERVLQPEQGLAHIKASKSPKPGSRILLDGGGLLEVLDRADDLFLVAAVESDLPSLMAQSGHIPLPPYISRDDEALDVERYQTVYSRREGAVAAPTAGLHFGTEMLSLLEAMGIEQAHVTLHVGAGTFRPVRVDRLEDHVMHSEYVEVSAGVCEQVRATRARGGRVIAVGTTSVRSLEAASQEGEIKPFYGDTRLFITPGYAFHSVDAMVTNFHLPESTLLMLVAAFSGYDRIMAAYRHAVERRYRFFSYGDAMFLERIGKV

SEQ ID NO: 71934 - protein, 341 aa, Sedimenticola sp.
  misc_feature (1)..(341): tr|A0A2N6GC42|A0A2N6GC42_9GAMM S-adenosylmethionine:tRN A ribosyltransferase-isomerase OS=Sedimenticola sp. OX= 1940285 GN=queA PE=3 SV=1
MRRQDFHYILPDELIAQFPSERRGDSRLLCLDGDSGEMQDRHFSDLTALLNPGDLLVFNDTQVMAARVFGYKQSGGRVELLIERVLSPNQGLAHIRASKSPKPGTRIIIEDSVIVEVVGRQDDLFEIASPDISLMELMEKFGHMPLPPYITREDGKLDESRYQTVYAERPGAVAAPTAGLHFDQQMLDRLAEMGVRQARVTLHVGAGTFQPVRVDNLDEHLMHSEYVEVSEETCSLVQRTREAGGRIVAVGTTSVRSLESASQSGRLQPFFGDTRLFIRPGYLFKSVDALITNFHLPESTLLMLVSAFSGYQQIMAAYRHAVEQKYRFFSYGDAMFLTRRP

SEQ ID NO: 71935 - protein, 343 aa, Sedimenticola thiotaurini
  misc_feature (1)..(343): tr|A0A0F7JXK5|A0A0F7JXK5_9GAMM S-adenosylmethionine:tRN A ribosyltransferase-isomerase OS=Sedimenticola thiotau rini OX=1543721 GN=queA PE=3 SV=1
MQRSDFHYDLPEELIAQFPTGNRRDSRLLHLPAGDASPMDRLFVDLPSLLNPGDLLVFNDTRVMRARLFGAKESGGKVELLIERVLEPNRGLAHIRASKSPRAGSRILLEGGGVLEILGRQDDLFIISSGDVELPDLMRQAGHIPLPPYISRADQAIDEERYQTVYSRQEGAVAAPTAGLHFDQAMLARLDAMGIQRACVTLHVGAGTFRPVRVDRLEDHVMHSEYAEVSEAVCNQVRATRERGGRVVAVGTTSVRSLESASRNGAIEPFRGDTRLFITPGYRFRSVDALLTNFHLPESTLLMLVAAFSGYERIMAAYRHAVDQRYRFFSYGDAMFLERPEDS

SEQ ID NO: 71936 - protein, 343 aa, Sedimenticola thiotaurini
  misc_feature (1)..(343): tr|A0A558D8L4|A0A558D8L4_9GAMM S-adenosylmethionine:tRN A ribosyltransferase-isomerase OS=Sedimenticola thiotau rini OX=1543721 GN=queA PE=3 SV=1
MQTSDFHYELPDELIAQFPTRNRQDSRLLHLPAGVQEAVDRQFTDLPSLLNPGDLLVFNDTRVMRARLYGRKESGGRVELLIERVLEPERGLAHIKASKSPKPGNLILLDGGGVLEVLGREDDLFLVAAVELDLPSLMAQSGHIPLPPYIERDDEALDVERYQTVYSRREGAVAAPTAGLHFDQAMLTRLDDLGVEQAHVTLHVGAGTFRPVRVDRLEEHVMHSEYVEVSEAVCEQVRATRTRGGRVIAVGTTSVRSLESASQEGEINPFYGDTRLFITPGYKFRSVDAMVTNFHLPESTLLMLVSAFSGYERIMAAYRHAVEQRYRFFSYGDAMLLERVGQA

SEQ ID NO: 71937 - protein, 349 aa, Sedimentisphaera cyanobacteriorum
  misc_feature (1)..(349): tr|A0A1Q2HSU7|A0A1Q2HSU7_9BACT S-adenosylmethionine:tRN A ribosyltransferase-isomerase OS=Sedimentisphaera cyan obacteriorum OX=1940790 GN=queA PE=3 SV=1
MKTKDLEYYLPEELIAQKPADARSSSRLLVLDKQNGTLDDRLFSDIGDYLRVGDCLVLNDTKVLSARFFAKRETGASLEGLYLGQAGENAWHIMLRNARKVKPGEKILLLNRDKEVYMKALACHRMGDGSWFIEPETDRPAEEVLDNIGYAPLPPYISRPGGGENPEMDRKRYQTVFAKKEGAVAAPTAGLHFTEQILSSLEKKGVHTSRVTLHVGAGTFKPVTASELSNHEIHSEKYNLSKDAAEKINAAKENGGRIIAVGTTSVRTLETAAAGGKLEACSGETRLFIVPGVKFNIVDAMITNFHLPRSTLLALVGAFAGMDKIMTAYKHAVEKRYRFFSYGDAMLIY

SEQ ID NO: 71938 - protein, 349 aa, Sedimentisphaera salicampi
  misc_feature (1)..(349): tr|A0A1W6LMX9|A0A1W6LMX9_9BACT S-adenosylmethionine:tRN A ribosyltransferase-isomerase OS=Sedimentisphaera sali campi OX=1941349 GN=queA PE=3 SV=1
MKTKDLEYYLPEELIAQRPADARSSSRLLVLDKRNGTLDDRLFSDIGDYLRPEDCLVLNDTKVLSARFFAKRETGASLEGLYLGQAGENAWHIMLRNARKVKPGEKILLLDRDKEVYMKALACHRMGDGSWFIEPETDRPAEEVLEKIGYAPLPPYISRPGGGDNPEMDRKRYQTVFAKKEGAVAAPTAGLHFTEQMLSSLEEKGIQMARVTLHVGAGTFKPVTASDLSRHEIHSEKYTVSEEAAEKINTAKENGGRIIAVGTTSVRTLETAAAGGKLEACSGETRLFIVPGVKFNIVDAMITNFHLPRSTLLALVGAFAGMDKIMTAYKHAVEKRYRFFSYGDAMFIY

SEQ ID NO: 71939 - protein, 348 aa, Sedimentitalea nanhaiensis
  misc_feature (1)..(348): tr|A0A1I7BCB7|A0A1I7BCB7_9RHOB S-adenosylmethionine:tRN A ribosyltransferase-isomerase OS=Sedimentitalea nanhai ensis OX=999627 GN=queA PE=3 SV=1
MKLSDFDFDLPDDRIATRPAVPRSAARLLVACGDELSDAHVRDLPDWLRAGDRLVLNDTRVIPARLSGHRLRSGAQGTTRARIEVTLLEPRPEGVWTALIKPLKKLKIGETVTFQAGLNAELKHIENGQGVLKFNCVGDEFDAALNLAGAMPLPPYIAAKRPADMRDMTDYQTVFARHSGAVAAPTASLHFDDALMHGLREKGIDFTYVTLHVGAGTFLPVKVEDVTSHRMHAEWGRVDAGAAAEIAATKAAGGRIVPVGTTALRLIETAAKDGSIKAWEGETDIFIYPGFQFQVTDALMTNFHLPKSTLMMLVSALMGQDRIALIYDHALNKGYRFFSYGDASLLVP

SEQ ID NO: 71940 - protein, 348 aa, Sedimentitalea sp.
  misc_feature (1)..(348): tr|A0A3T0N3H1|A0A3T0N3H1_9RHOB S-adenosylmethionine:tRN A ribosyltransferase-isomerase OS=Sedimentitalea sp. W4 3 OX=2483033 GN=queA PE=3 SV=1
MKLSDFDFDLPDDLIATRPASPRSSARLLVANGDVLHDGTVTDLVNWLQPGDRLVLNDTKVIPARLSGLRHRNSAQGAVAAKIEVTLLEPCADGCWSALLKPLKKIKIGEDVVFGDGFSATLEAIKDGQGQLRFNLAGDDFDAALALAGAMPLPPYIAAKRPADAQDKQDYQTVWARNSGAVAAPTASLHFDEALLAGLAAKGVAFTHVTLHVGAGTFLPVKVEDVTTHKMHAEWGRVSDQAAAEIAATKAAGGRVIPVGTTALRLIESAARGGEIASWEGETDIFIYPGFTFHVADALMTNFHLPKSTLLMLVSALIGQQRVRAIYDHAVTAEYRFFSYGDASLLIP

SEQ ID NO: 71941 - protein, 342 aa, Sediminibacillus albus
  misc_feature (1)..(342): tr|A0A1G9CIW3|A0A1G9CIW3_9BACI S-adenosylmethionine:tRN A ribosyltransferase-isomerase OS=Sediminibacillus albu s OX=407036 GN=queA PE=3 SV=1
MDINDFDFDLPEELIAQTPLQDRTASRLLVLDRDKQTITHHHFADISAFLQPGDCLVLNDTKVLPARLYGSKQDTGGKVEVLLLHQQDKDEWEVLAKPAKKIKKGTVITFGEGQLTATCIEVKEHGGRVVRFDYQGIFLEVLEQLGEMPLPPYIKEQLPDRDRYQTVYAKEEGSAAAPTAGLHFTKDLLDILKNNGVEIAFITLHVGLGTFRPVSVDSIEDHDMHAEFYHMTEATANQLNRIKADGGRIISVGTTSTRTLETITRDNQGVFQQASGWTDIFIYPPYHFTAIDGLITNFHLPKSTLIMLVSALAGKEFTLKAYQEAIDNRYRFFSFGDAMLIL

SEQ ID NO: 71942 - protein, 342 aa, Sediminibacillus halophilus
  misc_feature (1)..(342): tr|A0A1G9XSU7|A0A1G9XSU7_9BACI S-adenosylmethionine:tRN A ribosyltransferase-isomerase OS=Sediminibacillus halo philus OX=482461 GN=queA PE=3 SV=1
MDINDFDFDLPEELIAQTPLEDRTASRLLVMDREKQTISHQHFSDVIDYLSPGDCLVLNDTKVLPARLYGSKQDTGGKIEVLLLHQQQQDEWEVLAKPAKKVKEGTVITFGDGQLRAVCTGVKEHGGRVVRFEYDGIFLEVLEQLGEMPLPPYIKEQLPDKDRYQTVYAKEEGSAAAPTAGLHFTEQLLERIKEKGVELAFVTLHVGLGTFRPVSVDSIEEHDMHSEFYHMSEETANQLNRIKAAGGKIISVGTTSTRTLETITRDNDGKFTQASGWTDIFIYPPYQFTAIDGLITNFHLPKSTLIMLVSALAGKDFILKAYREAVDHRYRFFSFGDAMLIV

SEQ ID NO: 71943 - protein, 409 aa, Sediminibacterium ginsengisoli
  misc_feature (1)..(409): tr|A0A1T4N2J9|A0A1T4N2J9_9BACT S-adenosylmethionine:tRN A ribosyltransferase-isomerase OS=Sediminibacterium gin sengisoli OX=413434 GN=SAMN04488132_10455 PE=3 SV=1
MHPSHLSIADYTYELPDHHIAAYPVAKRDNSKLLVYKKGVIRESRYAHLAEEIPAGSLLVFNNTKVVEARLLFQKETGGQIEIFCLEPHEQYPDITTAMLQKNRVLWKCLVGGAKKWKDVLLRKEIPSDTGPAVLTARKAEQRTDHYIIEFEWDNNASFAEILHLAGLVPLPPYMNRAAEDTDKERYQTVYAKHDGSVAAPTAGLHFTPELLASLAAKNISSGFVTLHVGAGTFKPVKAPTMETHEMHTEFMEIDRKLVQQLITHISGTIIAVGTTSLRTMESLYWLGVKLIQQPEIPFSELYITQWEAYENKTAPISTTEALEALLSWMDRHSIERLPARTQIIIAPGYRFRVARALITNFHQPQSTLLLLVAAITGNEWRTIYQYALEHDFRFLSYGDGSLLWMNED

SEQ ID NO: 71944 - protein, 349 aa, Sediminibacterium ginsengisoli
  misc_feature (1)..(349): tr|A0A1T4QE01|A0A1T4QE01_9BACT S-adenosylmethionine:tRN A ribosyltransferase-isomerase OS=Sediminibacterium gin sengisoli OX=413434 GN=queA PE=3 SV=1
MKLSQFKFDLPLNLIAQNPTKKREDSRMMVVDRKTGSMENKHFRDILEYFDDKDVFAVNNTKVFPARMYGRKEKTGAKIEVFLLRELNKPNRLWDVIVDPARKIRVGNKLYFGDNEELVAEVIDNTTSRGRTIRFLWDDDDESFKKMLEFLGETPLPKYIKRKPDEEDKERYQTVYAKYEGAVAAPTAGLHFSKELIKRCEIQGIRFAEVTLHTGLGTFRPIEVEDLSKHKMDAEYYQITEEACRIVNKAKETGHRICSIGTTTMRAMESSFTAQRMLKPSEGWTNHFIHPPYNFNVADSLVTNFHLPKTSLLIMTCAFAGYDLAMEAYKKAIKDKYRFFSYGDALLII

SEQ ID NO: 71945 - protein, 349 aa, Sediminibacterium goheungense
  misc_feature (1)..(349): tr|A0A4R6ISE7|A0A4R6ISE7_9BACT S-adenosylmethionine:tRN A ribosyltransferase-isomerase OS=Sediminibacterium goh eungense OX=1086393 GN=queA PE=3 SV=1
MKLSQFKFDLPLNLIAQNPTKRREDSRLMVVDRKSGHMENKHFRDILEYYDDKDVFVVNNTKVFPARMYGRKEKTGAKIEVFLLRELNKPNRLWDVIVDPARKIRVGNKLYFGDNEELVAEVIDNTTSRGRTIRFLWDDDDESFKKMLEFLGETPLPKYIKRKPDEEDKERYQTVYAKHEGAVAAPTAGLHFSKELIKRCEILGIRFAEVTLHTGLGTFRPIEVEDLSKHKMDAEYYAISEEACKIVNKAKEGGHRICSIGTTTMRAMESSFTAQKLLKPSEGWTNHFIHPPYNFNVADSLVTNFHLPKTSLLIMTCAFAGYDLAMEAYKKAIKDKYRFFSYGDALLII

SEQ ID NO: 71946 - protein, 409 aa, Sediminibacterium goheungense
  misc_feature (1)..(409): tr|A0A4R6IX33|A0A4R6IX33_9BACT S-adenosylmethionine:tRN A ribosyltransferase-isomerase OS=Sediminibacterium goh eungense OX=1086393 GN=queA PE=3 SV=1
MHPKDLSILDFTYELPDEKIARYPLEERDQSKLLIYQNKKISSSTYHELPSLLPPKTLLVFNNTKVVEARLYFQKASGSTIEIFCLEPDDRYADITTAMLQKDQVYWKCMIGGAKKWKENAISLSFTYKNQTVILTAEKKEQKNDHYIISFHWTVPDISFAEVLHAAGNLPLPPYMNREAETNDLERYQTVYAKHDGSVAAPTAGLHFTTTLLSRLEAADIHTSFVTLHVGAGTFKPVKAEVMQDHAMHAEFIDVGIDTIELLKNSISNPIIAVGTTSLRTLESLYWLGILILRVKNISPNELTIDQWLPYETDERTDTVTALDALLNWMKSNGLSRLITKTSIIIAPGYRFRIISGLITNFHQPQSTLLLLVAAITGNDWKDIYHYALTQEFRFLSYGDGSLLWCKKE

SEQ ID NO: 71947 - protein, 443 aa, Sediminibacterium sp.
  misc_feature (1)..(443): tr|A0A2M8JYY7|A0A2M8JYY7_9BACT S-adenosylmethionine:tRN A ribosyltransferase-isomerase OS=Sediminibacterium sp. FEMGT703S OX=2080766 GN=queA PE=3 SV=1
MKHPSLLHIEDFNYELPNEKIAKYPLEQRDQSKLLIWGAGQEMGDSEQIQTDFTPIRENIYANIADELPSGSLLVFNNTKVVEARLLFQKPTGGLVELFCLEPADHYGDITSAMLQKGSVQWKCLVGGAKKWKDGALELIIEEGLDQSANKPALKVFANKLEALPDCFLIQFSWELAELSFAEVLHIAGDIPLPPYLNRATEEADKERYQTIYAKHDGSVAAPTAGLHFTEQVFERLNEKNIPKAYITLHVGAGTFKPVKAEQMKDHEMHAEFIDVSFEAIEQLIAHIEKGIIAVGTTSLRTLESLYWIGVKTIKNPAIGTSDLQVMQWEPYTSDGDGNENKNSQKNIPKEYTAKEALQSLLTWMQRNKAERIITKTQIIIAPGYDFKIIRALVTNFHQPQSTLLLLISAIVGDNWKKIYEFALANEYRFLSYGDGSILYVRD

SEQ ID NO: 71948 - protein, 349 aa, Sediminibacterium sp.
  misc_feature (1)..(349): tr|A0A2M8JRX3|A0A2M8JRX3_9BACT S-adenosylmethionine:tRN A ribosyltransferase-isomerase OS=Sediminibacterium sp. FEMGT703S OX=2080766 GN=queA PE=3 SV=1
MKLSQFKFDLPLNLIAQNPTKRREDSRLMVVDRKSGHMENRYFKDILDYYDDKDVFVVNNTKVFPARMYGRKEKTGAKIEVFLLRELNKPNRLWDVIVDPARKIRVGNKLYFGDNEELVAEVIDNTTSRGRTIRFLWDDDDASFKKMLEFLGETPLPKYIKRKPDEEDKERYQTVYAKHEGAVAAPTAGLHFSKELIKRCEIQGIRFAEVTLHTGLGTFRPIEVEDLSKHKMDAEYYQIDEQACAIVNKAKESGKRICSIGTTTMRAMESSFTAQKLLKPSEGWTNHFIHPPYTFNVADSLVTNFHLPKTSLLIMTCAFAGYDLAIEAYKKAIKDKYRFFSYGDALLIV

SEQ ID NO: 71949 - protein, 349 aa, Sediminicola luteus
  misc_feature (1)..(349): tr|A0A2A4G4J5|A0A2A4G4J5_9FLAO S-adenosylmethionine:tRN A ribosyltransferase-isomerase OS=Sediminicola luteus O X=319238 GN=queA PE=3 SV=1
MKLSNFNFELPENLLAEYPAENRDESKLMVIHRETGKIEHKLFKDLIDYFDEGDVMVLNNTKVFPARLYGNKEKTGAKIEVFLLRELNQEQRLWDVLVDPARKIRIGNKLYFGEDESLVAEVIDNTTSRGRTLRFLYDGSYTDFRRKLRELGQTPLPKYIKRDVEPEDEERYQTIYAKHEGAVAAPTAGLHFSKHLLKRLEIKGIDFAELTLHVGLGTFNPVEVEDLSKHKMDSEELVIDERATDVVNNAKKEKRRVCAVGTTVMRGLESAVSSERTLNTHEGWTNKFIFPPYDFSIANCMVTNFHLPKSTLLMMISAFMGHDLMKRAYKEAVLEQYKFYSYGDAMLII

SEQ ID NO: 71950 - protein, 349 aa, Sediminicola sp.
  misc_feature (1)..(349): tr|A0A0S1S8H6|A0A0S1S8H6_9FLAO S-adenosylmethionine:tRN A ribosyltransferase-isomerase OS=Sediminicola sp. YIK1 3 OX=1453352 GN=queA PE=3 SV=1
MKLSHFNFELPNELLAEYPSENRDESKLMVVHRETGKIEHKMFKDLINYFDEDDVMVLNNTKVFPARLYGNKEKTGARIEVFLLRELNEEQRLWDVLVDPARKIRIGNKLYFGEDESLVAEVIDNTTSRGRTLRFLYDGSYTDFRRKLRELGETPLPKYIKRDVEPEDEQRYQTIYAKHEGAVAAPTAGLHFSKHLLKRLEIKGIKFAEVTLHVGLGTFNPVEVEDLSKHKMDSEELIIDEKCTEIVNNAKKNKRRVCAIGTTAMRGLESAVSSNHTLNTFDGWTNKFVFPPYEFSIATAMVTNFHLPKSTLLMMVSAFMGHDLMKKAYKEAIMEGYKFYSYGDAMLII

SEQ ID NO: 71951 - protein, 346 aa, Sediminispirochaeta smaragdinae
  misc_feature (1)..(346): tr|E1R1J9|E1R1J9_SEDSS S-adenosylmethionine:tRNA ribosy ltransferase-isomerase OS=Sediminispirochaeta smaragdin ae (strain DSM 11293 / JCM 15392 / SEBR 4228) OX=573413 GN=queA PE=3 SV=1
MKTSDFSFDLPEELIAQTPSEKRGASRMLVVDRKSGTFRHLHTSDFPEIVEDDVLLVVNDSKVRKARLFGSSETGGKVEFLLLHPDSQDHCLWTAMVSKAKKQRPGKRFLFPQGIEGIIEAINGDSTGPYRRVRFSIPVDDAYLEVNGHIPLPPYIRREDTELDEERYQTVYARHPGSVAAPTAGLHFTEETFTALKKRSIPVARLTLHVGLGTFLPVRSEEITDHEMHRERYEISQDVADTINRAKYDGRKIVAVGTTSVRTLESAWDTEEGCIRTGSAETRLFIYPGYTFKVVDRLFTNFHTPKSTLLMLVSAFAGKELIDAAYAEALKERYRFFSYGDAMYIQ

SEQ ID NO: 71952 - protein, 348 aa, Sediminitomix flava
  misc_feature (1)..(348): tr|A0A316A152|A0A316A152_9BACT S-adenosylmethionine:tRN A ribosyltransferase-isomerase OS=Sediminitomix flava O X=379075 GN=queA PE=3 SV=1
MKLSAFKFDLPEKLVAQYPAETRDEARMMVLHKDTGEIEHKLFKDIIQYFDEGDVFVVNDTKVFPARLYGNKEKTGAKIEVFLLRELNKESHLWDVLVDPARKIRVGNKLYFGDGELVAEVIDNTTSRGRTIRFLFDGDDAEFYKIIDDLGETPLPKDIERAAEPEDRDRYQTIFADRKGAVAAPTAGLHFTPQVMKRLEILGVDVAPITLHVGLGAFREVDVEDLTKHKMDSENFEVRQPTVDVVNNALTNKKKVIAIGTTTMRALETSVSANDLLKPNAGWTDKFIFPPYDFKITKGLLTNFHKPMSTLLMMSAAFGGYENVMAAYEEAKKEEYRFLTYGDCMLII

SEQ ID NO: 71953 - protein, 405 aa, Sediminitomix flava
  misc_feature (1)..(405): tr|A0A315Z7C0|A0A315Z7C0_9BACT S-adenosylmethionine:tRN A ribosyltransferase-isomerase OS=Sediminitomix flava O X=379075 GN=queA PE=3 SV=1
MKLTKIALSDYHYDLPADRIAKYPKEKRDESKLLVYREGEISNTVFKEIPTLIPDNHQFFFNNTKVLPARLYFKKETGAIIEIFLFNPVAPTAVISEAMLVKGEATWSTTVGNFKKWKDGQVLETMLNVNGQDVLLAAHIEDREKKLIRFEWSDKALPFVDIISSAGETPLPPYLKRKATEKDKTTYQTVFSKNDGAVAAPTAGLHFSEEVVQNLKGKSIPINELTLHVSAGTFKPIEVENAIDHDMHYEQVIVTKANLEALISGKKNIAVGTTSLRTLESLYWYGVKVMKEGENAPFDIKKLEPYNYEESELPTREESFKSILDLMIKLDKEELAGVTSIFVFPGYKFRVIDALVTNFHLPETTLVLLIAAFIGEDWRKVYEHAMDNDFQFLSYGDSSILFPKQ

SEQ ID NO: 71954 - protein, 349 aa, Segetibacter aerophilus
  misc_feature (1)..(349): tr|A0A512BAP3|A0A512BAP3_9BACT S-adenosylmethionine:tRN A ribosyltransferase-isomerase OS=Segetibacter aerophil us OX=670293 GN=queA_1 PE=3 SV=1
MKLSKFIFDLPLNLIAQNPTKKREDSRMMVVHRKTGQLEDLHFRDILNYFDDKDVFVVNNTKVFPARMYGRKEKTGAVVEVFLLRELNAANRLWDVIVDPARKIRVGNKLYFGDNDELVAEVIDNTTSRGRTIKFLWDGAEDDFKKQLEALGETPLPKYIKRKPDEEDRERYQTVYAKHEGAVAAPTAGFHFSKELIKRCEIKGIRFAEVTLHSGLGTFRPLEVEDLHKHKMDAEFYQIDEFACKIVNKAKEDGRRICSIGTTTMRALESSYTSQQLLKPSEGWTNNFIHPPYDFNVANAMVTNFHLPKSSLFILTCAFGGYDLITEAYKKAIKDKYKFSTYGDAMLVL

SEQ ID NO: 71955 - protein, 440 aa, Segetibacter aerophilus
  misc_feature (1)..(440): tr|A0A512BE89|A0A512BE89_9BACT S-adenosylmethionine:tRN A ribosyltransferase-isomerase OS=Segetibacter aerophil us OX=670293 GN=queA_2 PE=3 SV=1
MGIREAGTNEFVQKIREINKPLFLKILATMHPKHLSITEFSYDLDPERIAKYPLEERDASKLLVYKSGTVTTSTYKQVAEFLPEETLLIFNNTKVVEARLLFQKPTGGVIEIFCLEPGDQYKDITSAMLQKGKASWKCLVGGASKWKHGMKLQKQVNENGVNFILEASIAGRLPDCFIIDLSWKPEEVSFAEILHIAGFIPLPPYLHRSAEEDDKNRYQTIYAKQDGSVAAPTAGLHFTDEVFERLAAKNIRHDFVTLHVGAGTFKPVKAETMDEHEMHAEFIEVAAEAVERLINYVDKTVVAVGTTSLRTIESLYWMGVKVLHEPAIEVDDIVISQWDPYELEHFGIEVKDALKALFYWMIKKGLNKIITKTQILIAPGYQLKIAKGIITNFHQPQSTLLLLVAAIVGEEWKRIYQYAMDNDFRFLSYGDGCLLWNDSK

SEQ ID NO: 71956 - protein, 345 aa, Seinonella peptonophila
  misc_feature (1)..(345): tr|A0A1M4TRK8|A0A1M4TRK8_9BACL S-adenosylmethionine:tRN A ribosyltransferase-isomerase OS=Seinonella peptonophi la OX=112248 GN=queA PE=3 SV=1
MDIAEFDFHLPKELIAQKPISERSQSRLLVLNRETGEREHTIFAQLPHYLREGDLLVLNNTRVRPARLIGIKQETGAKIELLLLQPLGEDRWEALVKPARRVKKGTVIQFGNGELVAIAEQESKVDGGRLFRLEYDPQRSIEELFEELGKVPLPPYIHEELNDPERYQTVYSYEVGSAAAPTAGLHFTHVLLDQCNQKGVDVAFLTLHVGLGTFRPVSVSKIEEHKMHAEFFQISQQTLEKIKRTKKRGGRVIAVGTTAVRTLETIGMQIDHVKGDQSGWTDIFIYPGYQFQIVDGMITNFHLPKSTLLMLVSAFCSRERILTAYQEAIDRRYRFFSFGDAMFIY

SEQ ID NO: 71957 - protein, 341 aa, Selenihalanaerobacter shriftii
  misc_feature (1)..(341): tr|A0A1T4MYF5|A0A1T4MYF5_9FIRM S-adenosylmethionine:tRN A ribosyltransferase-isomerase OS=Selenihalanaerobacter shriftii OX=142842 GN=queA PE=3 SV=1
MKVSEFDYNLPEELIAQEPADPRDESRLMVLNRENGNTEEKIFKEIVELIEPGDTIILNDTKVIPARLYGVKEETGGKVEFLLLNEVELDTWEVLVRPGRKVKIGTRVVFGDSDLVAEVKDRTDFGGRVVTFEYDGVFAEILDKLGEMPLPPYITKELENREQYQTVYAKKRGAAAAPTAGLHFTEEVLDALKEKGVNIAYITLHVGLGTFRPVRAETIKDHDMHAEYYEVSDKTAEIINQTKDQDQRVIAVGTTVTRTLETVSNAKGYVQSDKGWTDIFIYPGYEFKVVDALLTNFHLPESTLVMLVSAFCGRENTLAAYRKAVEEEYRFYSFGDAMLII

SEQ ID NO: 71958 - protein, 341 aa, Seleniivibrio woodruffii
  misc_feature (1)..(341): tr|A0A4R1K5L4|A0A4R1K5L4_9BACT S-adenosylmethionine:tRN A ribosyltransferase-isomerase OS=Seleniivibrio woodruf fii OX=1078050 GN=queA PE=3 SV=1
MQTTSKTPVSAYDFHLPEELIAQSPAADRGTSRLLRITRSDGGIKDGTFTDIVGLIDDSCFLVVNSTRVMKARLYGRKPTGGMVEILVLEKLEDNFCLCLTKGNVKTGTILNFPDASAVIEQMREDGTRLIRFSEEPSDVMNRHGHIPLPPYIRREDTQDDASRYQTVYSADEASVAAPTAGLHFTQEILDRLKAKGVQILELSLNIGIGTFRPVKADYLEDHDMHTEKYFISADTAAEINRLKAGGKKLVAVGTTAVRALESASAGGQVRAGYGETDLFIKPGYSFRVIDRLITNFHLPKSTLLVLVTMFAGYDLTMQAYAHAVENGYRFFSYGDAMFIE

SEQ ID NO: 71959 - protein, 335 aa, Selenomonadales bacterium
  misc_feature (1)..(335): tr|A0A316QFY1|A0A316QFY1_9FIRM S-adenosylmethionine:tRN A ribosyltransferase-isomerase OS=Selenomonadales bacte rium OX=2137878 GN=queA PE=3 SV=1
MFDYELPKEFIAQTPAEPRDHSKLLVYERQTDAVRHRHFYNLPEYLRAGDVLVINETRVLPARLMGRRETGGVIELLLLNRREKDIWETLARPGRRIRPGDRLVFSEGLSADVLESLEDGGRLVRFNYDGVFEEILDALGQMPLPPYITERLENKERYQTVYSKETGSSAAPTAGLHFTPELLNKIREMGVKIVPVLLHVGLGTFRPVKVRDVAEHKMHSEYYSLSPQAADAINKAKASGGRIISVGTTSTRVLETVCGEDGVIRARTGWTDIFIYPGYKFKCVDCLITNFHLPQSTLLMLVSAFCSREKILEIYEEAKKEDYRFFSFGDAMLII

SEQ ID NO: 71960 - protein, 346 aa, Selenomonas artemidis
  misc_feature (1)..(346): tr|E7MZG2|E7MZG2_9FIRM S-adenosylmethionine:tRNA ribosy ltransferase-isomerase OS=Selenomonas artemidis F0399 O X=749551 GN=queA PE=3 SV=1
MDISDFDYDLPEERIAQTPLEPRDASRLMVLDPAEQTIEHRHFYELDVLLQPGDVLIFNDTRVIPARLIGARDKTGAKVEVLLLRQIDRDRWEALVKPGKKARIGDRIRFGEELSCGIISHTDFGGRIVKFIYQGIFEEILDRLGEMPLPPYIREKLSDADRYQTIYSRERGSAAAPTAGLHFTEELLVRLKEKGVIFGFVTLHVGLGTFRPVQEQTIENHVMHREYYAIPEETAQIIRRAKAEGRRIVAVGTTSIRTLESAAGETGEIRPTSGWTDIFIYPGYRFKVVDAIITNFHLPKSTLIMLISAFAGRSFILNAYKQAVDEGYRFFSFGDAMLIQGRKKAT

SEQ ID NO: 71961 - protein, 343 aa, Selenomonas flueggei
  misc_feature (1)..(343): tr|C4V2G6|C4V2G6_9FIRM S-adenosylmethionine:tRNA ribosy ltransferase-isomerase OS=Selenomonas flueggei ATCC 435 31 OX=638302 GN=queA PE=3 SV=1
MNISDFDYFLPEEQIAQVPADPRDSSRMMVLSPKTQSIEHRHFYQLDEYLTDGDVLIFNDTRVIPARLIGVRQPTGGKAEVFLLRQLERDRWEVLVKPGKKMRVGSVITFGHELSCEVLAYTDFGGRIVKFSYEGIFEEILDRLGTMPLPPYIHETLEDPERYQTIYSREKGSAAAPTAGLHFTESLMDRLRKKGVHLGFVTLHVGLGTFRPVQVDEIEDHVMHSEFYSIPTETADLIRMAKQEGRRVVAVGTTSIRTLESAAVDHGMIEEKRGQTNIFIYPGYQFKIVDAVITNFHLPKSTLIMLVSAFAGREFTLQAYRTAVEENYRFFSFGDAMLIQSRA

SEQ ID NO: 71962 - protein, 343 aa, Selenomonas infelix
  misc_feature (1)..(343): tr|G5GMP4|G5GMP4_9FIRM S-adenosylmethionine:tRNA ribosy ltransferase-isomerase OS=Selenomonas infelix ATCC 4353 2 OX=679201 GN=queA PE=3 SV=1
MDISDFDYDLPEARIAQTPLEPRDSARLMVLHPKEHTIEHRHFYELGDFLRNGDVLIFNDTRVIPARLIGARSQTGGKVEVFLLRQIDKDQWEVLVKPGKKARVGSVIQFGDELSCEIIADTDFGGRIVRFIYHGIFEEILDRLGSMPLPPYIHEKLEDRERYQTIYSRVKGSAAAPTAGLHFTKNLMERLHEQGIQFGFITLHVGLGTFRPVHVDVIEDHVMHREFYSVPTETAELIQRAKLEGRRVVAVGTTSIRTLEASAASTGHIEAGSGWTDIFIYPGYEFKVVDAVITNFHLPKSTLIMLISAFAGRTFTLEAYRTAVKEQYRFFSFGDAMFISSKS

SEQ ID NO: 71963 - protein, 343 aa, Selenomonas noxia
  misc_feature (1)..(343): tr|D4S8L5|D4S8L5_9FIRM S-adenosylmethionine:tRNA ribosy ltransferase-isomerase OS=Selenomonas noxia ATCC 43541 OX=585503 GN=queA PE=3 SV=1
MDISDFDYDLPQEQIAQVPAEPRDSSRLMVLNPKERTIQHHYFYQLEDFLKKGDVLIFNDTRVIPARLIGEREHTGGKVEIFLLHQMDKNHWEVLVKPGKKARIGTVISFGEELSCEIIDRTDFGGRIVRFIYNGVFEEILDRLGTMPLPPYIHETLEDRERYQTVYNRVKGSAAAPTAGLHFTEALMERLREKGVQFGFITLHVGLGTFRPVHVDVVEDHVMHREFYSIPPETAELVQTAKKEGRRVISVGTTSIRTLEAAVASAGIIAAGSGWTDIFIYPGYQFKVVDAVITNFHLPKSTLIMLVSAFAGRDFTLEAYRTAVEERYRFFSFGDAMMIQMRA

SEQ ID NO: 71964 - protein, 336 aa, Selenomonas noxia
  misc_feature (1)..(336): tr|G5H1C9|G5H1C9_9FIRM S-adenosylmethionine:tRNA ribosy ltransferase-isomerase OS=Selenomonas noxia F0398 OX=70 2437 GN=queA PE=3 SV=1
MDISDFDYDLPQEQIAQVPAEPRDSSRLMVLNPKERTIQHHYFYQLEDFLKKGDVLIFNDTRVIPARLIGEREHTGGKVEIFLLHQMDKNHWEVLVKPGKKARIGTVISFGEELSCEIINRTDFGGRIVRFIYNGVFEEILDRLGTMPLPPYIHETLEDRERYQTVYNRVKGSAAAPTAGLHFTEALMERLREKGVQFGFITLHVGLGTFRPVHVDVVEDHVMHREFYSIPPETAELVQTAKKEGRRVISVGTTSIRTLEAAVASAGIIAAGSGWTDIFIYPGYQFKVVDAVITNFHLPKSTLIMLVSAFAGRDFTLEAYRTAVEERYRFFLLEMP

SEQ ID NO: 71965 - protein, 364 aa, Selenomonas ruminantium
  misc_feature (1)..(364): tr|A0A1H0V401|A0A1H0V401_SELRU S-adenosylmethionine:tRN A ribosyltransferase-isomerase OS=Selenomonas ruminanti um OX=971 GN=queA PE=3 SV=1
MLLLSDFDYELPEERIAQVPIEPRNASRLMVLDPVEKTMEHRHFYDLKEYVEPGDTLIFNDTRVMPARLIGHRDQTGGKVEVFLLRRIDATHWETLVKPGKKARAGYKINFSDELSCTVVDNTDFGGRVVEFQYDGIFEEILDRLGETPLPPYIHEKLEDKERYQTVYNREEGSAAAPTAGLHFTKEQMQELKDMGVNLGFVTLHVGLGTFRPVNVEDIQKHDMHKEFYHVPEETAKLIMDTKKAGHRVIAVGTTSIRTLESAADGMGEISAKSGWTQIFIYPGYDFKIVDAIITNFHLPKSTLIMLISAFAGREFVLDAYKTAVEMKYRFFSFGDAMMLKVKQPREERDAELQALEEAHLSAE

SEQ ID NO: 71966 - protein, 366 aa, Selenomonas ruminantium
  misc_feature (1)..(366): tr|A0A1M6V8J1|A0A1M6V8J1_SELRU S-adenosylmethionine:tRN A ribosyltransferase-isomerase OS=Selenomonas ruminanti um OX=971 GN=queA PE=3 SV=1
MLLLSDFDYELPEERIAQVPVEPRNSSRLMVLDPVEKTMEHRHFYDLKEYVEPGDTLIFNDTRVMPARLIGHRDQTGGKVEVFLLRRIDSNHWETLVKPGKKARPGHKINFSDELSCVVTDHTDFGGRIVEFQYEGIFEEILDRLGETPLPPYIHEKLEDKERYQTVYNREQGSAAAPTAGLHFTKEQMQELKDMGVNLGFVTLHVGLGTFRPVNVEDIQKHDMHKEFYNVPEETAKLIMETKKAGHRVIAVGTTSIRTLESAADGVGEISAKSGWTQIFIYPGYDFKIVDAIITNFHLPKSTLIMLISAFAGREFVLEAYKKAVEMKYRFFSFGDAMFLKAKQPLAERTEELKALEESHQSAVTE

SEQ ID NO: 71967 - protein, 342 aa, Selenomonas sp.
  misc_feature (1)..(342): tr|L1N6J8|L1N6J8_9FIRM S-adenosylmethionine:tRNA ribosy ltransferase-isomerase OS=Selenomonas sp. oral taxon 13 8 str. F0429 OX=1127695 GN=queA PE=3 SV=1
MDISDFDYDLPEERIAQLPVEPRDSSRLMVLDPSNHTIEHRRFFQLGDFLKQGDLLIFNDTRVIPARLIGARDTGGKVEVFLLRQIDRDQWEVLVKPGKKMRIGSVVHFGEELSCEIIAHTDFGGRIVRFIYEGIFEEILDRLGNMPLPPYIHEKLEDRERYQTIYSRVKGSAAAPTAGLHFTELLMAELRRKGIQFGFITLHVGLGTFRPVHVDTIEDHVMHSEFYSVPTDTAELIRSAKKDGRRVVAVGTTSIRTLEAAASSTGTVEAGSGWTNIFIYPGYEFKVVDAVITNFHLPKSTLIMLISAFAGRAFTLEAYRTAVAEEYRFFSFGDAMLIQSRQ

SEQ ID NO: 71968 - protein, 345 aa, Selenomonas sp.
  misc_feature (1)..(345): tr|A0A3D0X2L0|A0A3D0X2L0_9FIRM S-adenosylmethionine:tRN A ribosyltransferase-isomerase OS=Selenomonas sp. OX=20 53611 GN=queA PE=3 SV=1
MLLNDFDYELPEELIAQTPIEPRNASRLMVLDPVEKSISHRHFYDLKEFLSPGDALIFNDTRVMPARLIGRREPTGAKVEIFLLRRIDGNRWETLAKPGKKAQQGTVIRFSDELSCRILDRTDFGGRIVEFSFEGIFEEILDRLGETPLPPYIHEKLEDSERYQTVYSREQGSAAAPTAGLHFTKEQMKELEESGIGLGFVTLHVGLGTFRPVQTETIEEHVMHREYYELPEKTVELIRRTKAAGHRVIAVGTTSIRTLESAADGKNEISAKSGWTDIFIYPGYEFKIVDAIITNFHLPKSTLIMLISAFAGREFVLEAYRKAVEERYRFFSFGDAMMITGPVRQ

SEQ ID NO: 71969 - protein, 343 aa, Selenomonas sputigena
  misc_feature (1)..(343): tr|C9LW37|C9LW37_SELS3 S-adenosylmethionine:tRNA ribosy ltransferase-isomerase OS=Selenomonas sputigena (strain ATCC 35185 / DSM 20758 / VPI D19B-28) OX=546271 GN=que A PE=3 SV=1
MLLKDFDYELPEERIAQKPIEPRNASRLMVLDPVAKTIEHRHFYDLGEFLAPGDALILNDTRVLPARLYGRREPTGAHIEVFLLRRLDKDSWETLVRPGKKAQVGQVIRFSDELCAEVMAHTDFGGRIVKFRYEGVFEEILDRLGETPLPPYIHERLEDKERYQTVYCREEGSAAAPTAGLHFTREQLAELKAQGVHIGFVTLHVGLGTFRPVNVEKIEEHKMHSEYYQLPEETAELIRRTKAAGGRVIAVGTTSIRTLESAAEAQGVISAKSGWTDIFIYPGYRFKIVDALVTNFHLPKSTLLMLISAFAGREFVLHAYEEAVREKYRFFSFGDAMFLRKRG

SEQ ID NO: 71970 - protein, 341 aa, Sellimonas intestinalis
  misc_feature (1)..(341): tr|A0A3E3K2D7|A0A3E3K2D7_9FIRM S-adenosylmethionine:tRN A ribosyltransferase-isomerase OS=Sellimonas intestinal is OX=1653434 GN=queA PE=3 SV=1
MKKEDFYFKLPEELIAQDPLEDRSASRLLVLDKESGKIEHRMFRDIKAYLKPGDCLVINDTKVIPARLIGSKIGTDAKIEILLLKRKENDIWETLVKPGKKAKPGTKISFGEGLLIGEVIDVVEEGNRLIQFSYQGIFEEILDQLGQMPLPPYITHQLEDKNRYQTVYAKHSGSAAAPTAGLHFTPELLKEIKESGVDIAHVTLHVGLGTFRPVKVENIQEHHMHSEFYHIEASEAEKINRAKRGGHRIICVGTTSCRTIESAAKPDGTLSECSGWTEIFIYPGYQFKVLDCLLTNFHLPESTLIMLVSALAGREHVLHAYEEAVKEQYRFFSFGDAMLIV

SEQ ID NO: 71971 - protein, 380 aa, Senegalimassilia anaerobia
  misc_feature (1)..(380): tr|A0A369L3Y8|A0A369L3Y8_9ACTN S-adenosylmethionine:tRN A ribosyltransferase-isomerase OS=Senegalimassilia anae robia OX=1473216 GN=queA PE=3 SV=1
MKTSDFDYDLPQELIAQEPAAVRDACRMLVMDRETGAIEDRIFRDIIDYLEPGDLLVANETRVLPARLLGAKRGTGGQSEVFLLRQLVGSKAQPYADVPQIPGQPVPGENQQAIWEVLVRPGKRLKPGSGAVVDFTDGEGNVALSAEIVDWAEGAQRGERVARLTTTYPSLDEALHAVGHTPLPPYIKHYAGDEELYQTVYSRRESSAAAPTAGLHFTPELIERLREKGIDWETVELEVGLDTFRIVDEEDPLAHKMHTEFYTVPQKTVDAINRTHANGGRVVAVGTTSVRSLESAWDPSADDGAGAITARDRDATSLYLLPGSTFHVVDALVTNFHVPRSTLMMLVSAFSTRENIMNAYQHAIEERYRMLSFGDAMFIR

SEQ ID NO: 71972 - protein, 380 aa, Senegalimassilia sp.
  misc_feature (1)..(380): tr|A0A4Q2K4J3|A0A4Q2K4J3_9ACTN S-adenosylmethionine:tRN A ribosyltransferase-isomerase OS=Senegalimassilia sp. KGMB04484 OX=2509433 GN=queA PE=3 SV=1
MKTSDFDYDLPQELIAQEPAAVRDACRMLVMNRQTGALEDRIFRDIIDYLNPGDLLVANETRVMPARLLGAKRGTGGQSEVFLLRQLMGEKATKYADVPHIAGQPAPGENQQAIWEVLVRPGKRLKPGSGAVVDFTDAEGNVALSAEIIDWAEGAQRGERVARLTTTHPSLDQALHAVGHTPLPPYIKHYAGDEELYQTVYSRRESSAAAPTAGLHFTPELIERVKAKGIDWETVELEVGLDTFRIVDEEDPLAHKMHTEFYTVPQKTVDAINRTHAAGGRVIAVGTTSVRSLESAWDPAANDGQGAITPRNRDATSLYLLPGSQFHVVDALITNFHVPRSTLMMLVSAFSSRENVMNAYQHAISERYRMLSFGDAMFIK

SEQ ID NO: 71973 - protein, 349 aa, Seonamhaeicola algicola
  misc_feature (1)..(349): tr|A0A5C7AM19|A0A5C7AM19_9FLAO S-adenosylmethionine:tRN A ribosyltransferase-isomerase OS=Seonamhaeicola algico la OX=1719036 GN=queA PE=3 SV=1
MKLSNFGFDLPNELLAEYPSENRDESRLMVLNRKEQTIEHKLFKDVIDYFNEDDVLILNNTKVFPARLYGNKEKTGARIEVFLLRELNEEQRLWDVLVDPARKIRIGNKLYFGDDDTLVAEVIDNTTSRGRTLRFLYDGSYTEFRRKLKELGETPLPKYIKRDVQPEDEDRYQTIYAKNEGAVAAPTAGLHFSKHLLKRLEIKGVNFAEVTLHVGLGTFNPVEVEDLSKHKMDSEEITIETPAVNTVNTAIQNKKRVCAVGTTAMRTIESSVSSSGMLNEMQGWTNKFIFPPYDFSIANSMITNFHTPKSTLLMMVSAFAGHDFVMHAYEEAVKEKYRFYSYGDAMLII

SEQ ID NO: 71974 - protein, 349 aa, Seonamhaeicola aphaedonensis
  misc_feature (1)..(349): tr|A0A3D9HMZ5|A0A3D9HMZ5_9FLAO S-adenosylmethionine:tRN A ribosyltransferase-isomerase OS=Seonamhaeicola aphaed onensis OX=1461338 GN=queA PE=3 SV=1
MKLSNFGFNLPQELLAEYPSENRDESRLMVLNRKEQTIEHKLFKDIINYFDQDDVLILNNTKVFPARLYGNKEKTGARIEVFLLRELNEEQRLWDVLVDPARKIRIGNKLYFGDDETLVAEVIDNTTSRGRTLRFLYDGSYSDFRRKLQELGETPLPKYIKRDVEPEDEDRYQTIYAKNEGAVAAPTAGLHFSKHLLKRLEIKGVNFAEVTLHVGLGTFNPVEVEDLSKHKMDSEEISINSLAVETVNKAIQNKKRVCAVGTTAMRTIESSVSSNGLLNEMEGWTNKFIFPPYDFSIANCMITNFHTPKSTLLMMVSAFAGHDFIMKAYEEAVKEKYRFYSYGDAMLII

SEQ ID NO: 71975 - protein, 349 aa, Seonamhaeicola marinus
  misc_feature (1)..(349): tr|A0A5D0HEP1|A0A5D0HEP1_9FLAO S-adenosylmethionine:tRN A ribosyltransferase-isomerase OS=Seonamhaeicola marinu s OX=1912246 GN=queA PE=3 SV=1
MKLSNFGFDLPNELLAEYPSENRDEARLMVLNRKEQTIEHKLFKDIIDYFDEDDVLILNNTKVFPARLYGNKEKTGARIEVFLLRELNEEQRLWDVLVDPARKIRIGNKLYFGDDDTLVAEVIDNTTSRGRTLRFLYDGSYSEFRRKLQELGETPLPKYIKRDVEPEDEDRYQTIYAKNEGAVAAPTAGLHFSKHLLKRLEIKGVNFAEVTLHVGLGTFNPVEVEDLSKHKMDSEEIVIDEAAANTVNTAIKNKKRVCAVGTTAMRTIESSVSSNGLLNEMDGWTNKFIFPPYDFSIADCMITNFHTPKSTLLMMVSAFAGHDFIMRAYEEAVKEKYKFYSYGDAMLII

SEQ ID NO: 71976 - protein, 349 aa, Seonamhaeicola sp.
  misc_feature (1)..(349): tr|A0A562YF93|A0A562YF93_9FLAO S-adenosylmethionine:tRN A ribosyltransferase-isomerase OS=Seonamhaeicola sp. W2 55 OX=2528206 GN=queA PE=3 SV=1
MKLSNFGFNLPQELLAEYPSENRDESRLMVLNRKEQTIEHKLFKDIIDYFDQDDVLILNNTKVFPARLYGNKEKTGARIEVFLLRELNEEQRLWDVLVDPARKIRIGNKLYFGDDETLVAEVIDNTTSRGRTLRFLYDGSYSDFRRKLQELGETPLPKYIKRDVEPEDEDRYQTIYAKNEGAVAAPTAGLHFSKHLLKRLEIKGVNFAEVTLHVGLGTFNPVEVEDLSKHKMDSEEISIDRFAVETVNKAIQNKKRVCAVGTTAMRTIESSVSSNGLLNEMDGWTNKFIFPPYDFSIANCMITNFHTPKSTLLMMVSAFAGHDFIMKAYEEAVKEKYRFYSYGDAMLII

SEQ ID NO: 71977 - protein, 349 aa, Seonamhaeicola sp.
  misc_feature (1)..(349): tr|A0A1U7DSI8|A0A1U7DSI8_9FLAO S-adenosylmethionine:tRN A ribosyltransferase-isomerase OS=Seonamhaeicola sp. S2 -3 OX=1936081 GN=queA PE=3 SV=1
MKLSNFGFNLPPELLAEYPSENRDEARLMVLNRKEQTIEHKLFKDIIDYFDEDDVLILNNTKVFPARLYGNKEKTGARIEVFLLRELNEEQRLWDVLVDPARKIRIGNKLYFGDDDALVAEVIDNTTSRGRTLRFLYDGSYTEFRRKLQELGETPLPKYIKREVEPEDEERYQTIYAKKEGAVAAPTAGLHFSKHLLKRLEIKGVNFAEVTLHVGLGTFNPVEVEDLSKHKMDSEEVTIAKAAVETVNEAIQNKKRVCAVGTTAMRAIESSVSSNGLLNEIDGWTNKFIFPPYDFSIANCMITNFHTPKSTLLMMVSAFAGHDFIMKAYEEAVKEKYKFYSYGDAMLII

SEQ ID NO: 71978 - protein, 341 aa, Serpentinicella alkaliphila
  misc_feature (1)..(341): tr|A0A4R2TVE9|A0A4R2TVE9_9CLOT S-adenosylmethionine:tRN A ribosyltransferase-isomerase OS=Serpentinicella alkal iphila OX=1734049 GN=queA PE=3 SV=1
MKTKDFDFFLPEHLIAQHPLEKRDHSRLMVIERDTGDINHKHFYNIIDYLNENDCLVLNDTRVLPARLIGEKEETGGKVEFLLLKRTSLDTWETLVKPGKKAKIGSKFSFGEGMLNLEVVDIGEEGSRIVKFSYDGIFEEVLERLGKMPLPPYITAELEDKERYQTVYSKEVGSAAAPTAGLHFTEELLEKIKNKGVNIVYITLHVGLGTFRPVKAEDISEHKMHSEFYSISEKAAKTINECKSNGNKVIAVGTTSCRTLESASEVPGKIESKTGWTDIFIFPGYKFKIIDSLITNFHLPESTLIMLVSALAGRENILNAYKVAVEEEYRFFSFGDAMLLK

SEQ ID NO: 71979 - protein, 370 aa, Serpentinomonas mccroryi
  misc_feature (1)..(370): tr|A0A060NYG8|A0A060NYG8_9BURK S-adenosylmethionine:tRN A ribosyltransferase-isomerase OS=Serpentinomonas mccro ryi OX=1458426 GN=queA PE=3 SV=1
MERACPALKHTMPSAPPDASRAFTLSDFDYHLPPELIAQHPTPERSAARLLDGTRWPPRDRIFRDLPDFFSPLDLLVFNDTQVMKARLYGEKPSGGKVELLIERVLPSSGHEVLAHLKVSKKPPAGTVLHLWQRDGRSVAARATLLGRWPDEEGTLFRLALDQDPYALMAAHGHVPLPPYIEHADDAQDEERYQTVFAQRPGAVAAPTAALHFDQGVLDALDRLGVQRASVTLHIGAGTFVPCKSENIHEHVMHSEWYEVPAATQQAIADARARGGRVVAVGTTSVRTLESWARTGAASGDTALYITPGFEFALVDRLITNFHLPKSTLMMLVTAFAGYDHVMALYSHAVAQRYRFFSYGDSMLLQRASV

SEQ ID NO: 71980 - protein, 374 aa, Serpentinomonas raichei
  misc_feature (1)..(374): tr|A0A060NLE7|A0A060NLE7_9BURK S-adenosylmethionine:tRN A ribosyltransferase-isomerase OS=Serpentinomonas raich ei OX=1458425 GN=queA PE=3 SV=1
MNHTTHPATPATHRSYTLSDFDYALPPELIAQHPCPERSSARLLDGTGLDPADRVFRDLPGLLRAGDLLVFNDTLVVKARLYGEKPSGGRFELLLERVLGGPRHEVIAHMKVSKKPALGTELLLWNRTGDALVARATLLGRWPDANGALFRLSLSEEPYALMAAHGHVPLPPYIEHTDSEEDEARYQTVFAKNPGAVAAPTAALHFDQAVLDALQAHGVQCASVTLHIGAGTFQPCKSENIAEHVMHSEWYQIPQATQDAIQETRARGGQIVAVGTTSVRSLESWARTGEATGDTALYITPGFEFALVDRLITNFHLPKSTLMMLVTAFAGYDHVMALYRHAVAQRYRFFSYGDSMLLQRARLSGLSTTPSPPP

SEQ ID NO: 71981 - protein, 356 aa, Serratia ficaria
  misc_feature (1)..(356): tr|A0A240BH50|A0A240BH50_SERFI S-adenosylmethionine:tRN A ribosyltransferase-isomerase OS=Serratia ficaria OX=6 1651 GN=queA PE=3 SV=1
MRVADFSFELPESLIARYPQPERSGCRLLQLDGPSGELKHGVFTDLLDNLEAGDLLVFNNTRVIPARMFGRKVSGGKIEVLVERVLDDHRVLAHVRASKAPKPGAELLLGDDESIAATMVARHDTLFELRFNDDRDVFGILNAAGHMPLPPYIDRPDDAADRELYQTVYSEKPGAVAAPTAGLHFDEPLLAALRAKGIEMAFVTLHVGAGTFQPVRVETIEEHVMHAEYAEVPQEVVDAVLACKARGKRVVAVGTTSVRSLESAANASEGALIAPFFGDTSIFIYPGYRYQVIDALVTNFHLPESTLIMLVSAFAGYKNTMNAYRQAVAEQYRFFSYGDAMFISRNPQAENESVGG

SEQ ID NO: 71982 - protein, 356 aa, Serratia fonticola
  misc_feature (1)..(356): tr|U2M2P3|U2M2P3_SERFO S-adenosylmethionine:tRNA ribosy ltransferase-isomerase OS=Serratia fonticola AU-P3(3) O X=1332070 GN=queA PE=3 SV=1
MRVADFSFELPESLIARYPQPERSGCRLLQLDGPSGGLTHGVFTDLLDNLEAGDLLVFNNTRVIPARLFGRKVSGGKIEVLVERVLDDHRVLAHVRASKSPKPGTELLLGDDESIAATMVARHDTLFELRFNDDRDVFTILNAVGHMPLPPYIDRPDEDADRELYQTVYSEKPGAVAAPTAGLHFDEPLLAALRAKGIEMAFVTLHVGAGTFQPVRVETIEEHVMHAEYAEVPQEVVDAVLTCKARGKRVIAVGTTSVRSLESAANACQDAPIAPFFGDTSIFIYPGYHYQVVDALVTNFHLPESTLIMLVSAFAGYKNTMNAYHQAVAEQYRFFSYGDAMFISRNPLAESESVGE

SEQ ID NO: 71983 - protein, 356 aa, Serratia fonticola
  misc_feature (1)..(356): tr|A0A0F7HCG1|A0A0F7HCG1_SERFO S-adenosylmethionine:tRN A ribosyltransferase-isomerase OS=Serratia fonticola OX =47917 GN=queA PE=3 SV=1
MRVADFSFELPESLIARYPQPERSGCRLLQLDGPSGGLTHGVFTDLLDNLEAGDLLVFNNTRVIPARLFGRKVSGGKIEVLVERVLDDHRVLAHVRASKSPKPGTELLLGDDESIAATMVARHDTLFELRFNDDRDVFTILNAVGHMPLPPYIDRPDEDADRELYQTVYSEKPGAVAAPTAGLHFDEPLLAALRAKGIEMAFVTLHVGAGTFQPVRVETIEEHVMHAEYAEVPQDVVDAVLACKARGKRVVAVGTTSVRSLESAANACQDALIAPFFGDTSIFIYPGYHYQVIDALVTNFHLPESTLIMLVSAFAGYKNTMNAYHQAVAEQYRFFSYGDAMFISRNPLAESESVGE

SEQ ID NO: 71984 - protein, 356 aa, Serratia liquefaciens
  misc_feature (1)..(356): tr|A0A515CZJ1|A0A515CZJ1_SERLI S-adenosylmethionine:tRN A ribosyltransferase-isomerase OS=Serratia liquefaciens OX=614 GN=queA PE=3 SV=1
MRVADFSFELPESLIARYPQSERSGCRLLQLDGPSGALTHGVFTDLLDNLEAGDLLVFNNTRVIPARMFGRKVSGGKIEVLVERVLDDHRVLAHVRASKAPKPGADLLLGDDESIAATMVARHDTLFELRFNDERDVFTILNAVGHMPLPPYIDRPDEDADRELYQTVYSEKPGAVAAPTAGLHFDEPLLAALREKGIEMAFVTLHVGAGTFQPVRVETIEEHVMHAEYAEVPQDVVDAVLACKARGKRVVAVGTTSVRSLESAANASKEALIAPFFGDTSIFIFPGYHYQVVDALVTNFHLPESTLIMLVSAFAGYKNTMNAYQQAVAEQYRFFSYGDAMFISRNPQAEQESVGA

SEQ ID NO: 71985 - protein, 63 aa, Serratia liquefaciens
  misc_feature (1)..(63): tr|A0A484XBY3|A0A484XBY3_SERLI S-adenosylmethionine:tRN A ribosyltransferase-isomerase OS=Serratia liquefaciens OX=614 GN=queA_2 PE=3 SV=1
MIDALVTNFHLPESTLIMLVSAFAGYQHTMNAYKVAVEQKYRFFSYGDAMFITYNPQAISERP

SEQ ID NO: 71986 - protein, 356 aa, Serratia marcescens
  misc_feature (1)..(356): tr|A0A1C0QFF2|A0A1C0QFF2_SERMA S-adenosylmethionine:tRN A ribosyltransferase-isomerase OS=Serratia marcescens s ubsp. marcescens OX=211759 GN=queA PE=3 SV=1
MRVADFSFELPESLIAHYPQAERSACRLLQLDGPSGALTHGVFTDLLDKLEAGDLLVFNNTRVIPARMFGRKVSGGKIEVLVERVLDDHRVLAHVRASKAPKPGAELLLGDDESIAATMVARHETLFELRFNDERDVFTILNAAGHMPLPPYIARPDEDADRELYQTVYSEKPGAVAAPTAGLHFDEPLLAALRAKGVEMAFVTLHVGAGTFQPVRVETIEDHVMHAEYAEVPQDVVDAVLACKARGKRVVAVGTTSVRSLESAAAASKEALIAPFFGDTSIFIYPGYHYQVIDALVTNFHLPESTLIMLVSAFAGYKNTMNAYQQAVAEQYRFFSYGDAMFISRNPQAENESVGG

SEQ ID NO: 71987 - protein, 356 aa, Serratia marcescens; identical to SEQ ID NO: 71986
  misc_feature (1)..(356): tr|A0A3E2EP39|A0A3E2EP39_SERMA S-adenosylmethionine:tRN A ribosyltransferase-isomerase OS=Serratia marcescens s ubsp. sakuensis OX=211760 GN=queA PE=3 SV=1

SEQ ID NO: 71988 - protein, 221 aa, Serratia nematodiphila
  misc_feature (1)..(221): tr|A0A1W9F600|A0A1W9F600_9GAMM S-adenosylmethionine:tRN A ribosyltransferase-isomerase (Fragment) OS=Serratia n ematodiphila DZ0503SBS1 OX=1449981 GN=queA PE=3 SV=1
DVFTILNAAGHMPLPPYIARPDEDADRELYQTVYSEKPGAVAAPTAGLHFDEPLLAALRAKGVEMAFVTLHVGAGTFQPVRVETIEDHVMHAEYAEVPQEVVDAVLACKARGKRVVAVGTTSVRSLESAAAASKEALIAPFFGDTSIFIYPGYHYQVIDALVTNFHLPESTLIMLVSAFAGYKNTMNAYQQAVAEQYRFFSYGDAMFISRNPQAENESVGG

SEQ ID NO: 71989 - protein, 356 aa, Serratia nematodiphila
  misc_feature (1)..(356): tr|A0A5C7CUG7|A0A5C7CUG7_9GAMM S-adenosylmethionine:tRN A ribosyltransferase-isomerase OS=Serratia nematodiphil a OX=458197 GN=queA PE=3 SV=1
MRVADFSFELPESLIAHYPQAERSACRLLQLDGPSGALTHGVFTDLLDKLEAGDLLVFNNTRVIPARMFGRKVSGGKIEVLVERVLDDHRVLAHVRASKAPKPGAELLLGDDESIAATMVARHETLFELRFNDERDVFTILNAAGHMPLPPYIARPDEDADRELYQTVYSEKPGAVAAPTAGLHFDEPLLAALRAKGVEMAFVTLHVGAGTFQPVRVETIEDHVMHAEYAEVPQEVVDAVLACKARGKHVVAVGTTSVRSLESAAAASKEALIAPFFGDTSIFIYPGYHYQVIDALVTNFHLPESTLIMLVSAFAGYKNTMNAYQQAVAEQYRFFSYGDAMFISRNPQAENESVGG

SEQ ID NO: 71990 - protein, 356 aa, Serratia odorifera
  misc_feature (1)..(356): tr|D4DWD4|D4DWD4_SEROD S-adenosylmethionine:tRNA ribosy ltransferase-isomerase OS=Serratia odorifera DSM 4582 O X=667129 GN=queA PE=3 SV=1
MRVADFSFDLPESLIARYPQPQRSGCRLLQLDGPTGKLTHGVFTDLLDQLEAGDLLVFNNTRVIPARIFGRKASGGKIEVLVERVLDDHRVLAHVRASKAPKPGAALLLGDDDSIPATMVARHDTLFELRFDDPRDVFTILNAVGHMPLPPYIDRPDEDADRELYQTVYSQKPGAVAAPTAGLHFDEPLLAALREKGVEMAFVTLHVGAGTFQPVRVETIEEHVMHAEYAEVPQEVVDAVLACKARGKRVVAVGTTSVRSLESAAKASQDAPIAPFFGDTRIFIYPGYHYQVIDALITNFHLPESTLIMLVSAFAGYQNTMNAYRQAVAEQYRFFSYGDAMFISRNPQAENESVGK

SEQ ID NO: 71991 - protein, 356 aa, Serratia odorifera; identical to SEQ ID NO: 71990
  misc_feature (1)..(356): tr|A0A447KL78|A0A447KL78_SEROD S-adenosylmethionine:tRN A ribosyltransferase-isomerase OS=Serratia odorifera OX =618 GN=queA PE=3 SV=1

SEQ ID NO: 71992 - protein, 356 aa, Serratia oryzae
  misc_feature (1)..(356): tr|A0A1S8CMF0|A0A1S8CMF0_9GAMM S-adenosylmethionine:tRN A ribosyltransferase-isomerase OS=Serratia oryzae OX=20 34155 GN=queA PE=3 SV=1
MRVADFSFELPESLIAHYPQPERSACRLLQLDGPTGALTHGVFTDLLDKLEAGDLLVFNNTRVIPARLFGRKVSGGKVEVLVERVLDDHRVLAHVRASKAPKPGTELLLGDDESIAATMLARHDTLFELRFNDERDVFTILNAVGHMPLPPYIDRPDEDADRELYQTVYSEKPGAVAAPTAGLHFDEPLLAALRAKGVEMAFVTLHVGAGTFQPVRVETIEEHVMHAEYAEVPQEVVDAVLACKASGKRVIAVGTTSVRSLESAAKASEDALIAPFFGDTRIFIYPGYHYQVIDALVTNFHLPESTLIMLVSAFAGYQHTMNAYQQAVAERYRFFSYGDAMFISRNPQAESESVGE

SEQ ID NO: 71993 - protein, 356 aa, Serratia plymuthica
  misc_feature (1)..(356): tr|S4YFL8|S4YFL8_SERPL S-adenosylmethionine:tRNA ribosy ltransferase-isomerase OS=Serratia plymuthica S13 OX=13 48660 GN=queA PE=3 SV=1
MRVADFSFELPESLIAHYPQPERSGCRLLQLDGPSGALTHGVFTDLLDNLEAGDLLVFNNTRVIPARMFGRKVSGGKIEVLVERVLDDHRVLAHVRASKAPKPGAELLLGDDESVAATMVARHDTLFELRFNDERDVFTILNAVGHMPLPPYIDRPDEDADRELYQTVYSEKPGAVAAPTAGLHFDEPLLAALRAKGIEMAFVTLHVGAGTFQPVRVETIEEHVMHAEYAEVPQEVVDAVLACKARGKRVVAVGTTSVRSLESAANASKDALIAPFFGDTSIFIFPGYHYQVIDALVTNFHLPESTLIMLVSAFAGYKNTMHAYQQAVAEQYRFFSYGDAMFISRNPQAEHESVGA

SEQ ID NO: 71994 - protein, 356 aa, Serratia plymuthica; identical to SEQ ID NO: 71993
  misc_feature (1)..(356): tr|A0A318P6T1|A0A318P6T1_SERPL S-adenosylmethionine:tRN A ribosyltransferase-isomerase OS=Serratia plymuthica O X=82996 GN=queA PE=3 SV=1

SEQ ID NO: 71995 - protein, 356 aa, Serratia proteamaculans
  misc_feature (1)..(356): sp|A8GAM4|QUEA_SERP5 S-adenosylmethionine:tRNA ribosylt ransferase-isomerase OS=Serratia proteamaculans (strain 568) OX=399741 GN=queA PE=3 SV=1
MRVADFSFELPESLIAHYPQPERSGCRLLQLDGPSGELKHGVFTDLLDNLEAGDLLVFNNTRVIPARMFGRKVSGGKIEVLVERVLDDHRVLAHVRASKAPKPGTDLLLGDDESIAATMVARHDTLFELRFNDERDVFTILNAVGHMPLPPYIDRPDEDADRELYQTVYSEKPGAVAAPTAGLHFDEPLLAALREKGIEMAFVTLHVGAGTFQPVRVETIEEHVMHAEYAEVPQEVVDAVLACKARGKRVVAVGTTSVRSLESAANASKEALIAPFFDDTSIFIFPGYHYQVVDALVTNFHLPESTLIMLVSAFAGYKNTMHAYQQAVAEQYRFFSYGDAMFISRNPQAEQESVGA

SEQ ID NO: 71996 - protein, 356 aa, Serratia proteamaculans
  misc_feature (1)..(356): tr|A0A4Q4LM00|A0A4Q4LM00_9GAMM S-adenosylmethionine:tRN A ribosyltransferase-isomerase OS=Serratia proteamacula ns OX=28151 GN=queA PE=3 SV=1
MRVADFSFELPESLIAHYPQPERSACRLLQLDGPSGELKHGVFTDLLDNLEAGDLLVFNNTRVIPARMFGRKVSGGKIEVLVERVLDDHRVLAHVRASKAPKPGTDLLLGDDESIAATMVARHDTLFELRFNDERDVFTILNAVGHMPLPPYIDRPDEDADRELYQTVYSEKPGAVAAPTAGLHFDEPLLAALREKGIEMAFVTLHVGAGTFQPVRVETIEEHVMHAEYAEVPQEVVDAVLACKARGKRVVAVGTTSVRSLESAANASKEALIAPFFDDTSIFIFPGYHYQVVDALVTNFHLPESTLIMLVSAFAGYKNTMHAYQQAVAEQYRFFSYGDAMFISRNPQAEQESVGA

SEQ ID NO: 71997 - protein, 356 aa, Serratia quinivorans
  misc_feature (1)..(356): tr|A0A2X2G539|A0A2X2G539_9GAMM S-adenosylmethionine:tRN A ribosyltransferase-isomerase OS=Serratia quinivorans OX=137545 GN=queA PE=3 SV=1
MRVADFSFELPESLIAHYPQPERSACRLLQLDGPSGELKHGVFTDLLDNLEAGDLLVFNNTRVIPARMFGRKVSGGKIEVLVERVLDDHRVLAHVRASKAPKPGTDLLLGDDESIAATMVARHDTLFELRFNDERDVFTILNAVGHMPLPPYIDRPDEDADRELYQTVYSEKPGAVAAPTAGLHFDEPLLAALREKGIEMAFVTLHVGAGTFQPVRVETIEEHVMHAEYAEVPQDVVDAVLACKARGKRVVAVGTTSVRSLESAANASKEALIAPFFGDTSIFIFPGYHYQVIDALVTNFHLPESTLIMLVSAFAGYKNTMHAYQQAVAEQYRFFSYGDAMFISRNPQAEQESVGA

SEQ ID NO: 71998 - protein, 356 aa, Serratia quinivorans
  misc_feature (1)..(356): tr|A0A379YWR9|A0A379YWR9_9GAMM S-adenosylmethionine:tRN A ribosyltransferase-isomerase OS=Serratia quinivorans OX=137545 GN=queA PE=3 SV=1
MRVADFSFELPESLIAHYPQPERSGCRLLQLDGPSGELKHGVFTDLLDNLEAGDLLVFNNTRVIPARMFGRKVSGGKIEVLVERVLDDHRVLAHVRASKAPKPGTDLLLGDDESIAATMVARHDTLFELRFNDERDVFTILNAVGHMPLPPYIDRPDEDADRELYQTVYSEKPGAVAAPTAGLHFDEPLLAALREKGIEMAFVTLHVGAGTFQPVRVETIEEHVMHAEYAEVPQEVVDAVLACKARGKRVVAVGTTSVRSLESAANASKEALIAPFFDDTSIFIFPGYHYQVVDALVTNFHLPESTLIMLVSAFAGYKNTMHAYQQAVAEQYRFFSYGDAMFISRNPLAEQESVGA

SEQ ID NO: 71999 - protein, 397 aa, Serratia rubidaea
  misc_feature (1)..(397): tr|A0A4U9HAW1|A0A4U9HAW1_SERRU S-adenosylmethionine:tRN A ribosyltransferase-isomerase OS=Serratia rubidaea OX= 61652 GN=queA PE=3 SV=1
MRVADFSFELPESLIARYPQAQRSGCRLLQLDGPSGELTHGVFTDLLDKLEAGDLLVFNNTRVIPARIFGRKASGGKIEVLVERVLDDSRVLAHVRASKAPKPGAELLLGDDESIAATMVARHDALFELRFNDERDVFAILNDVGHMPLPPYIDRPDEDADRELYQTVYSEKPGAVAAPTAGLHFDEPLLAALRDKGVEMAFVTLHVGAGTFQPVRVDSIEDHIMHAEYAEVPQEVVDAVLACKARGKRVVAVGTTSVRSLESAAAASKDALIAPFFDDTSIFIYPGYHYQVIDALVTNFHLPESTLIMLVSAFAGYQHTCSLSAGGGRAVRFFSYGDAMFISRNPQRNKNPSANRRSGRAGAWPATAIIDDTRRFFWAAVARMGVSTTSVRPWRIQ

SEQ ID NO: 72000 - protein, 356 aa, Serratia rubidaea
  misc_feature (1)..(356): tr|A0A447QQ71|A0A447QQ71_SERRU S-adenosylmethionine:tRN A ribosyltransferase-isomerase OS=Serratia rubidaea OX= 61652 GN=queA PE=3 SV=1
MRVADFSFELPESLIARYPQAQRSGCRLLQLDGPSGELTHGVFTDLLDKLEAGDLLVFNNTRVIPARIFGRKASGGKIEVLVERVLDDSRVLAHVRASKAPKPGAELLLGDDESIAATMVARHDALFELRFNDERDVFAILNDVGHMPLPPYIDRPDEDADRELYQTVYSEKPGAVAAPTAGLHFDEPLLAALRDKGVEMAFVTLHVGAGTFQPVRVDSIEDHIMHAEYAEVPQEVVDAVLACKARGKRVVAVGTTSVRSLESAAAASKDALIAPFFDDTSIFIYPGYHYQVIDALVTNFHLPESTLIMLVSAFAGYQHTMHAYQQAVAEQYRFFSYGDAMFISRNPQAEQESVGE

SEQ ID NO: 72001 - protein, 356 aa, Serratia sp.
  misc_feature (1)..(356): tr|A0A1B3F8C6|A0A1B3F8C6_9GAMM S-adenosylmethionine:tRN A ribosyltransferase-isomerase OS=Serratia sp. YD25 OX= 1759437 GN=queA PE=3 SV=1
MRVADFSFELPESLIAHYPQAERSACRLLQLDGPSGALTHGVFTDLLDKLEAGDLLVFNNTRVIPARMFGRKVSGGKIEVLVERVLDDHRVLAHVRASKAPKPGAELLLGDDESIAATMVARHETLFELRFNDERDVFTILNAAGHMPLPPYIARPDEDADRELYQTVYSEKPGAVAAPTAGLHFDEPLLAALRAKGVEMAFVTLHVGAGTFQPVRVETIEDHVMHAEYAEVPQEVVDAVLACKARGKRVVAVGTTSVRSLESAAAASKEALIAPFFGDTSIFIYPGYHYQVIDALVTNFHLPESTLIMLVSAFAGYKNTMNAYQQAVAEQYRFFSYGDAMFISRNPQAENESVGG

SEQ ID NO: 72002 - protein, 356 aa, Serratia sp.; identical to SEQ ID NO: 66264
  misc_feature (1)..(356): tr|A0A4V3BNY3|A0A4V3BNY3_9GAMM S-adenosylmethionine:tRN A ribosyltransferase-isomerase OS=Serratia sp. BIGb0156 OX=2485132 GN=queA PE=3 SV=1

SEQ ID NO: 72003 - protein, 358 aa, Serratia symbiotica
  misc_feature (1)..(358): tr|R4I1B6|R4I1B6_9GAMM S-adenosylmethionine:tRNA ribosy ltransferase-isomerase OS=Serratia symbiotica str. 'Cin ara cedri' OX=568817 GN=queA PE=3 SV=1
MRVTDFSFDLPVSLIAQYPRPIRSSCRLLQLDGPSGEITHSIFTDLVYKLEAGDLLVFNNTRVIPARLFGRKSSGAKIEVLIERVLDEHYVLAHIRASKAPKPGTLLLFGENEKITATIITRHAMLFKLYFNTNSNVFSILNIIGRIPLPPYLNRPDEDTDYELYQTVYSKTPGAIAAPTAGLHFDEPMLEILRTKGIKIAFVTLHVGAGTFQPVRTETIEAHIMHAEYTEVSQEVVNAVLECKARGKRVIAVGTTTVRSLESAANNNDAALITPFFGDTRIFIIPGYHYRVVDVLITNFHLPKSTLIMLVAAFAGYKNTMYAYRQAIINKYRFLSYGDAMLINHNPWAAQESINTSI

SEQ ID NO: 72004 - protein, 359 aa, Serratia symbiotica
  misc_feature (1)..(359): tr|A0A068SKA2|A0A068SKA2_9GAMM S-adenosylmethionine:tRN A ribosyltransferase-isomerase OS=Serratia symbiotica S Ct-VLC OX=1347341 GN=queA PE=3 SV=1
MRVADFSFELPGSLIARYPQPARSSCHLLQLDGPSGELTHGVFTDLLDKLEAGDLLVFNNTRVIPARIFGRKASGGKVEVMVERVLDDHRVLAHVRASKAPKPGAELLLGDDESIAATMVARHDTLFELCFNDNRDVFSVLNAVGHMPLPPYIDRPDEDADRELYQTVYSEKPGAVAAPTAGLHFDEPLLAALRAKGIKMAFVTLHVGAGTFQPVRVETIEAHVMHAEYTEVSQEVVDAVLDCKARGKRVVAVGTTSVRSLESAANASKPALIAPFFGDTRIFITPGYRYQVVDALVTNFHLPESTLIMLVAAFAGYKNTMNAYQQAVAEQYRFFSYGDAMLISRNPQAEQESVGADAQ

SEQ ID NO: 72005 - protein, 356 aa, Serratia ureilytica
  misc_feature (1)..(356): tr|A0A5C7C2F5|A0A5C7C2F5_9GAMM S-adenosylmethionine:tRN A ribosyltransferase-isomerase OS=Serratia ureilytica O X=300181 GN=queA PE=3 SV=1
MRVADFSFELPESLIAHYPQAERSACRLLQLDGPSGALTHGVFTDLLDKLEAGDLLVFNNTRVIPARMFGRKVSGGKIEVLVERVLDDHRVLAHVRASKAPKPGAELLLGDDESIAATMVARHETLFELRFNDERDVFTLLNAAGHMPLPPYIARPDEDADRELYQTVYSEKPGAVAAPTAGLHFDEPLLAALRAKGVEMAFVTLHVGAGTFQPVRVETIEDHVMHAEYAEVPQDVVDAVLACKARGKRVVAVGTTSVRSLESAAAASKEALIAPFFGDTSIFIYPGYHYQVIDALVTNFHLPESTLIMLVSAFAGYKNTMNAYQQAVAEQYRFFSYGDAMFISRNPQAENESVGG

SEQ ID NO: 72006 - protein, 349 aa, Sharpea azabuensis
  misc_feature (1)..(349): tr|A0A1H6SZF9|A0A1H6SZF9_9LACO S-adenosylmethionine:tRN A ribosyltransferase-isomerase OS=Sharpea azabuensis OX =322505 GN=queA PE=3 SV=1
MEEKKTMDIELFDYDLPHELIAQTPLEKRDTSRLMVLHKPTGAVEHKHFYDILDYLKPGDVIVRNNTKVIPARLFGTKEETNAHVEVLLLKNTHDDVWECLCGNAKKIKEGSVISFGDGRLKAKCLEVRDEGIRVMEMIYDGIFYEVLDQLGIMPLPPYIKEKLDDPDRYNTVYAKVEGSAAAPTAGLHFTPELFEKVRAKGVEVLDVTLHVGLGTFRPVKVENVFEHHMHSEYYEIDEEVANKLNKAKAEGRRIIAVGTTSCRTLESNIKKYGKFTPTHENTSIFIYPGYTFEGIDALITNFHLPKSTLIMLVSALAGRENILNAYNIAVKEKYRFFSFGDAMFIDNE

SEQ ID NO: 72007 - protein, 345 aa, Shewanella algae
  misc_feature (1)..(345): tr|A0A3G4UQ96|A0A3G4UQ96_9GAMM S-adenosylmethionine:tRN A ribosyltransferase-isomerase OS=Shewanella algae OX=3 8313 GN=queA PE=3 SV=1
MRVADFSFDLPEELIAKFPMEKRSASRLLTLDGNSGALSDCRFTELLNLVQPGDLMVFNNTRVIPARLFGQKATGGKLEILVERMLDDKRVLAHVRSSKSPKEGSEILLDGGFKMLMRARHDALFELELVSGPSVLEVLEQVGHMPLPPYIDRPDEDADKERYQTVYNQTPGAVAAPTAGLHFDDSMLAELKAKGVDIAFVTLHVGAGTFQPVRVDNVLEHKMHSEWAEVPAEVVTKIHNTKAAGKRVIAVGTTSVRSLESAARASEGELQAFKGDTDIFIYPGYEFQVVDAMVTNFHLPESTLIMLVSAFAGFDEVMNAYRHAIAEKYRFFSYGDAMFVTKKAH

SEQ ID NO: 72008 - protein, 345 aa, Shewanella algae
  misc_feature (1)..(345): tr|A0A1S2TUL0|A0A1S2TUL0_9GAMM S-adenosylmethionine:tRN A ribosyltransferase-isomerase OS=Shewanella algae OX=3 8313 GN=queA PE=3 SV=1
MRVADFSFDLPEELIAKFPMEKRSASRLLTLDGNSGALSDCRFTELLNLVQPGDLMVFNNTRVIPARLFGQKATGGKLEILVERMLDDKRVLAHVRSSKSPKEGSEILLDGGFKMLTLARHDALFELELVSGPSVLEVLEQVGHMPLPPYIDRPDEDADKERYQTVYNQTPGAVAAPTAGLHFDDNMLAELKAKGVDIAFVTLHVGAGTFQPVRVDNILEHKMHSEWAEVPAEVVAKIHNTKAAGKRVIAVGTTSVRSLESAARASEGELQAFKGDTDIFIYPGYEFQVVDAMVTNFHLPESTLIMLVSAFAGFDEVMNAYRHAIAEKYRFFSYGDAMFVTKKAH

SEQ ID NO: 72009 - protein, 345 aa, Shewanella amazonensis
  misc_feature (1)..(345): sp|A1S7P3|QUEA_SHEAM S-adenosylmethionine:tRNA ribosylt ransferase-isomerase OS=Shewanella amazonensis (strain ATCC BAA-1098 / SB2B) OX=326297 GN=queA PE=3 SV=1
MRVADFTFDLPDELIARYPMAERTASRLLHLDGSTGALADRQFTDILALIEPGDLMIFNNTRVIPARLFGQKASGGKLEILVERMLDDKRILAHVRSSKSPKPGAEIILDGGFKMTMDARHDALFELSLKDDKTILEVLEAVGHMPLPPYIDRPDEDTDKERYQTVYNERPGAVAAPTAGLHFDESILAALKAKGVDMAFVTLHVGAGTFQPVRVDNVLEHKMHSEWAEVPADVVEKIRATKAAGKRVIAVGTTSVRSLESAAKASEGELEPFCGDTDIFIFPGFEFKVVDAMVTNFHLPESTLIMLVSAFAGFDEVIGAYRHAVEQKYRFFSYGDAMFVTKKAP

SEQ ID NO: 72010 - protein, 345 aa, Shewanella atlantica
  misc_feature (1)..(345): tr|A0A3S0KHC6|A0A3S0KHC6_9GAMM S-adenosylmethionine:tRN A ribosyltransferase-isomerase OS=Shewanella atlantica OX=271099 GN=queA PE=3 SV=1
MRVTDFSFDLPDELIARYPMANRTSSRLLSLDGNTGQLADNQFTDILNMVNPGDLMVFNNTRVIPARLFGQKITGGKLEILVERMLDDKRILAHVRCSKSPKVDTIICLDGDYEMKMLGRHDALFELELQSDKTILEVLEEVGHMPLPPYIDRPDEDADKERYQTVYNQNPGAVAAPTAGLHFDDVLLKALAEKGVDTAFVTLHVGAGTFQPVKVDNILEHKMHSEWAEVSQEVVDKVAQTKANGKRVIAVGTTSVRSLESAAKASEGELKEFCSDTDIFIYPGYEFKVVDAMVTNFHLPESTLIMLLSAFAGFDEVKNAYQHAIAQKYRFFSYGDAMFVTKKAN

SEQ ID NO: 72011 - protein, 345 aa, Shewanella baltica
  misc_feature (1)..(345): tr|A0A165IKK7|A0A165IKK7_9GAMM S-adenosylmethionine:tRN A ribosyltransferase-isomerase OS=Shewanella baltica OX =62322 GN=queA PE=3 SV=1
MRVADFSFDLPDELIARYPMAQRNASRLLTLDGNSGALGDKQFTDLLGMINPGDLMVFNNTRVIPARMFGQKASGGKLEILVERMLDDKRILAHVRSSKSPKVDSLILLDGGYQMKMVARHDTLFELELLSELTILEVLEAIGHMPLPPYIDRPDEDADKERYQTVYNQNPGAVAAPTAGLHFDDAMLDALKAKGVNIAFVTLHVGAGTFQPVRVDTILEHKMHSEWANVPQDVVDLIAQTKAAGKRVVAVGTTSVRSLESAARASQGELKAFSGDTDIFIYPGYQFQVVDAMVTNFHLPESTLIMLVSAFAGFDHVMAAYQHAIAQKYRFFSYGDAMFVTKKAH

SEQ ID NO: 72012 - protein, 345 aa, Shewanella baltica
  misc_feature (1)..(345): sp|A3D6B2|QUEA_SHEB5 S-adenosylmethionine:tRNA ribosylt ransferase-isomerase OS=Shewanella baltica (strain OS15 5 / ATCC BAA-1091) OX=325240 GN=queA PE=3 SV=1
MRVADFSFDLPDELIARYPMAQRNASRLLTLDGNSGALGDKQFTDLLGMINPGDLMVFNNTRVIPARMFGQKASGGKLEILVERMLDDKRILAHVRSSKSPKVDSFILLDGGYQMKMVARHDTLFELELLSELTILEVLEAVGHMPLPPYIDRPDEDADKERYQTVYNQNPGAVAAPTAGLHFDDAMLDALKAKDVNIAFVTLHVGAGTFQPVRVDTILEHKMHSEWANVPQDVVDLIAQTKAAGKRVVAVGTTSVRSLESAARASQGELKAFSGDTDIFIYPGYQFQVVDAMVTNFHLPESTLIMLVSAFAGFDHVMAAYQHAIAQKYRFFSYGDAMFVTKKAH

SEQ ID NO: 72013 - protein, 345 aa, Shewanella benthica
  misc_feature (1)..(345): tr|A9D3Z1|A9D3Z1_9GAMM S-adenosylmethionine:tRNA ribosy ltransferase-isomerase OS=Shewanella benthica KT99 OX=3 14608 GN=queA PE=3 SV=1
MRVSDYSFELPDELIARYPTAERTASRLLSLDGNTGQVTDKRFTDILNMVNPGDLMVFNNTRVIPARLFGKKQTGGKLELLVERMLDDKSILAHVRCSKSPKVDSIICLDGGYEMIMLARHDALFELKLLSDKTILEVLEDVGHMPLPPYIDRPDEDADKERYQTVYNKTPGAVAAPTAGLHFDNAMLKALADKGVDAAFVTLHVGAGTFQPVKVDNILEHKMHSEWAEVTQEVVDKVRQTKANGKRVIAVGTTSVRSLESAAKASSAELEAFCSDTDIFIYPGYEFQVVDAMVTNFHLPESTLIMLLSAFAGFDEVKNAYRHAIAQKYRFFSYGDAMFVTKKAN

SEQ ID NO: 72014 - protein, 345 aa, Shewanella benthica
  misc_feature (1)..(345): tr|A0A330M479|A0A330M479_9GAMM S-adenosylmethionine:tRN A ribosyltransferase-isomerase OS=Shewanella benthica O X=43661 GN=queA PE=3 SV=1
MRVSDYSFELPDELIARYPTAERTASRLLSLDGNTGQVTDKRFTDILNMVNPGDLMVFNNTRVIPARLFGKKQTGGKLELLVERMLDDKSILAHVRCSKSPKVNSIICLDGGYEMVMLARHDALFELKLLSDNTILEVLEEVGHMPLPPYIDRPDEDADKERYQTVYNETPGAVAAPTAGLHFDNAMLKALVDKGVDTAFVTLHVGAGTFQPVKVDNILEHKMHSEWAEVTQEVVDKVIQAKANGKRVIAVGTTSVRSLESAAKASSAQLEAFCSDTDIFIYPGYEFQVVDAMVTNFHLPESTLIMLLSAFAGFDEVKNAYRHAIAQKYRFFSYGDAMFVTKKAN

SEQ ID NO: 72015 - protein, 345 aa, Shewanella bicestrii
  misc_feature (1)..(345): tr|A0A220UNK9|A0A220UNK9_9GAMM S-adenosylmethionine:tRN A ribosyltransferase-isomerase OS=Shewanella bicestrii OX=2018305 GN=queA PE=3 SV=1
MRVTDFSFDLPDELIARYPMAQRNASRLLTLDGNTGTLADKQFTDLLGMINPGDLMVFNNTRVIPARLFGQKASGGKLEILVERMLDDKRILAHVRSSKSPKVDSIIHLDGGYEMKMAARYDALFELELLSDLTILEVLEAVGHMPLPPYIDRPDEDADKERYQTVYNQNPGAVAAPTAGLHFDDAMLDALKAKGVNIAFVTLHVGAGTFQPVRVDNVLEHKMHSEWANVPQDVVDLIAQTKAAGKRVVAVGTTSVRSLESAARASEGELKAFSGDTDIFIYPGYQFQIVDAMITNFHLPESTLIMLVSAFAGFDHVMAAYQHAITQKYRFFSYGDAMFVTKKAH

SEQ ID NO: 72016 - protein, 345 aa, Shewanella canadensis
  misc_feature (1)..(345): tr|A0A431WVA6|A0A431WVA6_9GAMM S-adenosylmethionine:tRN A ribosyltransferase-isomerase OS=Shewanella canadensis OX=271096 GN=queA PE=3 SV=1
MRVTDFSFDLPDELIARYPMANRTSSRLLSLEGNTGLLVDNQFTDILNMVNPGDLMVFNNTRVIPARLFGQKITGGKLEVLVERMLDDKRILAHVRCSKSPKVDSIICLDGGYEMKMLGRHDALFELELQSDKTILEVLEEVGHMPLPPYIDRPDEDADKERYQTVYNQNPGAVAAPTAGLHFDDALLKALSNKGVDTAFVTLHVGAGTFQPVKVDNILEHKMHSEWAEVSQEVVDKVAQTKANGKRVIAVGTTSVRSLESAAKASEGELKEFCSDTDIFIYPGYEFKVVDAMVTNFHLPESTLIMLLSAFAGFDEVKNAYQHAIAQKYRFFSYGDAMFVTKKAN

SEQ ID NO: 72017 - protein, 345 aa, Shewanella chilikensis
  misc_feature (1)..(345): tr|A0A2V4W069|A0A2V4W069_9GAMM S-adenosylmethionine:tRN A ribosyltransferase-isomerase OS=Shewanella chilikensi s OX=558541 GN=queA PE=3 SV=1
MRVADFSFDLPEELIAKFPMEKRSASRLLTLDGNSGALSDCRFTELLNLVQPGDLMVFNNTRVIPARLFGQKATGGKLEILVERMLDDKRVLAHVRSSKSPKEGSEILLDGGFKMLMIARHDALFELELVSGPSVLEVLEQVGHMPLPPYIDRPDEDADKERYQTVYNQTPGAVAAPTAGLHFDDNMLAELKAKGVDIAFVTLHVGAGTFQPVRVDNVLEHKMHSEWAEVPAEVVTKIHNTKAAGKRVIAVGTTSVRSLESAARASEGELQAFKGDTDIFIYPGYEFQVVDAMVTNFHLPESTLIMLVSAFAGFDEVMNAYRHAIAEKYRFFSYGDAMFVTKKAH

SEQ ID NO: 72018 - protein, 345 aa, Shewanella colwelliana
  misc_feature (1)..(345): tr|A0A1E5INA3|A0A1E5INA3_SHECO S-adenosylmethionine:tRN A ribosyltransferase-isomerase OS=Shewanella colwellian a OX=23 GN=queA PE=3 SV=1
MRVADFSFELPDELIARYPMPERTASRLLTLDGPSGRVADKQFTDILDMVNPGDLMVFNNTRVIPARLFGQKQTGGKLEILVERMLDDKRILAHVRSSKSPKPNSIVCLDGGYEMTMLARHDTLFELGLNSDKSILEVLEEVGHMPLPPYIDRPDDDADKERYQTVYNQKPGAVAAPTAGLHFDDTLLSALKEKGVNTAFVTLHVGAGTFQPVRVDNILEHKMHSEWAEVPQTVVDQIKVTKAAGNRVIAVGTTSVRSLESAAKASEGELQAYSSDTDIFIYPGYEFQIVDAMVTNFHLPESTLIMLISAFAGFDAVKEAYQHAIAEKYRFFSYGDAMFVTKKPN

SEQ ID NO: 72019 - protein, 345 aa, Shewanella decolorationis
  misc_feature (1)..(345): tr|A0A5B8QVU4|A0A5B8QVU4_9GAMM S-adenosylmethionine:tRN A ribosyltransferase-isomerase OS=Shewanella decolorati onis OX=256839 GN=queA PE=3 SV=1
MRVTDFSFDLPDELIARYPMAQRTASRLLTLDGNTGLLADKQFTDLLGMINPGDLMVFNNTRVIPARLFGQKASGGKLEILVERMLDDKRILAHVRSSKSPKVDSIIHLDGGYEMKMAARHDALFELQLLSDLTILEVLEAVGHMPLPPYIDRPDEDADKERYQTVYNQNPGAVAAPTAGLHFDDAMLEALKAKGVNIAFVTLHVGAGTFQPVRVDNVLEHKMHSEWANVPQDVVDLIAQTKAAGKRVVAVGTTSVRSLESAARASEGELKAFSGDTDIFIYPGYQFQIVDAMITNFHLPESTLIMLVSAFAGFDHVMAAYQHAITQKYRFFSYGDAMFVTKKAH

SEQ ID NO: 72020 - protein, 345 aa, Shewanella decolorationis
  misc_feature (1)..(345): tr|V1E3K9|V1E3K9_9GAMM S-adenosylmethionine:tRNA ribosy ltransferase-isomerase OS=Shewanella decolorationis S12 OX=1353536 GN=queA PE=3 SV=1
MRVTDFSFDLPDELIARYPMAQRTASRLLTLDGNTGLLADKQFTDLLGMINPGDLMVFNNTRVIPARLFGQKASGGKLEILVERMLDDKRILAHVRSSKSPKVDSIIHLDGGYEMKMAARHDALFELQLLSDLTILEVLEAVGHMPLPPYIDRPDEDADKERYQTVYNQNPGAVAAPTAGLHFDDAMLEALKAKGVNIAFVTLHVGAGTFQPVRVDNVLEHKMHSEWANVPQDVVDLIAQTKAAGKRVVAVGTTSVRSLESAARASEGELKAFSGDTDIFIYPGYQFQVVDAMITNFHLPESTLIMLVSAFAGFDHVMAAYKHAITQKYRFFSYGDAMFVTKKAH

SEQ ID NO: 72021 - protein, 346 aa, Shewanella denitrificans
  misc_feature (1)..(346): sp|Q12PE0|QUEA_SHEDO S-adenosylmethionine:tRNA ribosylt ransferase-isomerase OS=Shewanella denitrificans (strai n OS217 / ATCC BAA-1090 / DSM 15013) OX=318161 GN=queA PE=3 SV=1
MRVADFSFDLPDELIARYPTAQRNASRLLTLDGPTGALADKQFTDLFEMINPGDLMVFNNTRVIPARLFGQKATGGKLEILVERMLDDKRILAHVRSSKSPKVDTLINLDGEHQMKMIARHDALFELELLSELTILEVLEQVGHMPLPPYIDRPDEDADKERYQTVYNKTPGAVAAPTAGLHFDDAMLSALKHKGVNIAFVTLHVGAGTFQPVRVDNVLEHKMHSEWADVPQDVVDLIAQTKAAGNRVIAVGTTSVRSLESAAKACGDKPLATFSGDTDIFIYPGYEFKVVDAMVTNFHLPESTLIMLISAFTGVDEVRYAYQHAIAQKYRFFSYGDAMFLTKKAQ

SEQ ID NO: 72022 - protein, 345 aa, Shewanella fodinae
  misc_feature (1)..(345): tr|A0A4R2FDH0|A0A4R2FDH0_9GAMM S-adenosylmethionine:tRN A ribosyltransferase-isomerase OS=Shewanella fodinae OX =552357 GN=queA PE=3 SV=1
MRVADFAFDLPEELIAKFPMPERSASRLLHLDGNTGALNDLHFTDIFDLVEEGDLMVFNNTRVVPARVYGHKASGGKLEILLERMLDDKRMLAHVRSSKSPKSGSEIELDGGYLLKMLARHDALFELELQGDGTILSMLEAVGHMPLPPYIDRPDEDADKERYQTVYSKTPGAVAAPTAGLHFDQALLQKLAAKGIKQAFVTLHVGAGTFQPVRVDDVQKHHMHSEWANVSADVVEAIRATKAAGKRVIAVGTTSVRSLESAAKFNGGDIQPFCGDTDIFIYPGFEFKVVDAMVTNFHLPESTLIMLVSAFAGFEHVMPAYQHAVAQKYRFFSYGDAMFVTKKVN

SEQ ID NO: 72023 - protein, 346 aa, Shewanella frigidimarina
  misc_feature (1)..(346): sp|Q07ZM1|QUEA_SHEFN S-adenosylmethionine:tRNA ribosylt ransferase-isomerase OS=Shewanella frigidimarina (strai n NCIMB 400) OX=318167 GN=queA PE=3 SV=1
MRVADFSFDLPDELIARYPTAQRNASRLLTLSGENSELADKKFTDLFNLINPGDLMVFNNTRVIPARLFGQKSTGGKLEILVERMLDDKRILAHVRSSKSPKVDTLIDLDGGYQMKMLARHDALFELELQSDKTILEVLEDVGHMPLPPYIDRPDEDTDKERYQTVYNQTPGAVAAPTAGLHFDDAMLADLKAKGVNIAFVTLHVGAGTFQPVRVDNVLEHKMHSEWANVSQEVVDLIAQTKAAGNRVVAVGTTSVRSLESAARASGDSPLEAFSGDTDIFIYPGFQFKVVDAMVTNFHLPESTLIMLLSAFAGYEAVMKAYQHAITQKYRFFSYGDAMFVTKKAP

SEQ ID NO: 72024 - protein, 346 aa, Shewanella frigidimarina
  misc_feature (1)..(346): tr|A0A106C3P5|A0A106C3P5_SHEFR S-adenosylmethionine:tRN A ribosyltransferase-isomerase OS=Shewanella frigidimar ina OX=56812 GN=queA PE=3 SV=1
MRVADFSFDLPDELIARYPTAQRNASRLLTLSGENSELADKKFTDLFNLINPGDLMVFNNTRVIPARLFGQKSTGGKLEILVERMLDDKRILAHVRSSKSPKVDTIIDLDGGYQMKMLVRHDALFELELLSDKTILEVLEDVGHMPLPPYIDRPDEDTDKERYQTVYNQTPGAVAAPTAGLHFDDAMLADLKAKGVNIAFVTLHVGAGTFQPVRVDNVLEHKMHSEWANVPQEVVDLIALTKAAGNRVVAVGTTSVRSLESAARASGDSPLEAFSGDTDIFIYPGFQFKVVDAMVTNFHLPESTLIMLLSAFAGYEAVMKAYQHAITQKYRFFSYGDAMFVTKKAP

SEQ ID NO: 72025 - protein, 345 aa, Shewanella halifaxensis
  misc_feature (1)..(345): sp|B0TND3|QUEA_SHEHH S-adenosylmethionine:tRNA ribosylt ransferase-isomerase OS=Shewanella halifaxensis (strain HAW-EB4) OX=458817 GN=queA PE=3 SV=1
MRVADFSFELPDELIARYPTAERTASRLLSLDGNSGELTDLQFTDILEQVNLGDLMVFNNTRVIPARMFGQKQSGGKLEILVERMLDDKRVLAHVRCSKSPKVDSIICLDGGYEMIMVARHDALFELELQSDKTILEVLEDVGHMPLPPYIDRPDEDADKERYQTVYNQNPGAVAAPTAGLHFDDAMLAALKDKGVNTAFVTLHVGAGTFQPVRVDNILDHKMHSEWAEVPQNVVDLIAETKTRGNRVIAVGTTSVRSLESAAKASPEQLEAFSGDTDIFIYPGYQFQVVDAMVTNFHLPESTLIMLLSAFAGFDEVKNAYQHAIAQKYRFFSYGDAMFVTKKAN

SEQ ID NO: 72026 - protein, 345 aa, Shewanella hanedai
  misc_feature (1)..(345): tr|A0A553JH44|A0A553JH44_SHEHA S-adenosylmethionine:tRN A ribosyltransferase-isomerase OS=Shewanella hanedai OX =25 GN=queA PE=3 SV=1
MRVTDFSFELPDELIARYPMAERTSSRLLSLEGNSGQLGDQQFTDILDMVNPGDLMVFNNTRVIPARLFGQKETGGKLEVLVERMLDDKRILAHVRSSKSPKVDSKICLDGGYQMTMLARHDALFELELNDDKSILEVLEEVGHMPLPPYIDRPDEDADKERYQTVYNNTPGAVAAPTAGLHFDDELLLKLKEKGVDTAFVTLHVGAGTFQPVKVDDILDHKMHSEWAEVSQEVVDKVANTKAAGGRVIAVGTTSVRSLESAARASEAELQAFCGDTDIFIYPGYQFQVVDAMVTNFHLPESTLIMLLSAFAGFDEVKNAYQHAIAQKYRFFSYGDAMFVTKKAN

SEQ ID NO: 72027 - protein, 346 aa, Shewanella livingstonensis
  misc_feature (1)..(346): tr|A0A3G8LWM3|A0A3G8LWM3_9GAMM S-adenosylmethionine:tRN A ribosyltransferase-isomerase OS=Shewanella livingston ensis OX=150120 GN=queA PE=3 SV=1
MRVADFSFDLPDELIARYPTAQRNASRLLTLSGENGQLADKKFTDLLNMINPGDLMVFNNTRVIPARLFGQKSTGGKLEILVERMLDDKRILAHVRSSKSPKVDTLIDLDGGYQMKMLLRHDALFELELLSDKTILEVLEDVGHMPLPPYIDRPDEDADKERYQTVYNQTPGAVAAPTAGLHFDDAMLAELKAKGVNIAFVTLHVGAGTFQPVRVDNILEHKMHSEWANVGQDVVDLIAQTKANGHRVVAVGTTSVRSLESAARASGDGPLTAFCGDTDIFIYPGYQFNIVDSMVTNFHLPESTLIMLLSAFAGFDEVMNAYQHAITQKYRFFSYGDAMFVTKKAP

SEQ ID NO: 72028 - protein, 345 aa, Shewanella loihica
  misc_feature (1)..(345): sp|A3QFF6|QUEA_SHELP S-adenosylmethionine:tRNA ribosylt ransferase-isomerase OS=Shewanella loihica (strain ATCC BAA-1088 / PV-4) OX=323850 GN=queA PE=3 SV=1
MRVADFSFDLPDELIARYPMPNRTASRLLTLDGNSGAVADKQFTDILEMVNPGDLMVFNNTRVIPARVFGQKQTGGKLEILVERMLDDKRILAHVRSSKSPKPGTIICLDGGYEMTMLARHDTLFELELNSESTILEVLEEVGHMPLPPYIDRPDEDADKERYQTVYNQNPGAVAAPTAGLHFDDALLAALKEKGVNVAFVTLHVGAGTFQPVRVDSILDHKMHSEWAEVPQDVVDSIKATKAAGNRVIAVGTTSVRSLESAAKASEGELQAYSNDTDIFIYPGYEFQVVDAMVTNFHLPESTLIMLISAFAGFDEVKNAYQHAIAQKYRFFSYGDAMFVTKKAI

SEQ ID NO: 72029 - protein, 348 aa, Shewanella mangrovi
  misc_feature (1)..(348): tr|A0A094JD15|A0A094JD15_9GAMM S-adenosylmethionine:tRN A ribosyltransferase-isomerase OS=Shewanella mangrovi O X=1515746 GN=queA PE=3 SV=1
MRVADFAFDLPEELIAKFPTPERSASRLLTLDGNSGTLQDKHFTDILELVNEGDLMVFNNTRVVPARVFGQKASGGKLEILLERMLDEKRMLAHVRSSKSPKEGSEIILDGGYRLKMVARHDALFELELLEDGTILAMLDDVGHMPLPPYIDRPDEAADKERYQTVYNKNPGAVAAPTAGLHFDEGILAALKAKGVQIAFVTLHVGAGTFQPVRVDDVLNHHMHSEWANVPAEVVDAINATKAAGKRVIAVGTTSVRSLESAATFNDGVLKPFCGDTDIFIYPGYQWKVIDAMVTNFHLPESTLIMLVSAFAGYEHVIKAYHHAVAQRYRFFSYGDAMFVTRQTTAND

SEQ ID NO: 72030 - protein, 345 aa, Shewanella marisflavi
  misc_feature (1)..(345): tr|A0A4Y6J0L5|A0A4Y6J0L5_9GAMM S-adenosylmethionine:tRN A ribosyltransferase-isomerase OS=Shewanella marisflavi OX=260364 GN=queA PE=3 SV=1
MRVADFSFDLPDELIARYPMPNRTASRLLTLDGNTGAVEDKQFTDILEMVNPGDLMVFNNTRVIPARVFGQKQTGGKLEILVERMLDDKRILAHVRSSKSPKPGTIICLDGGYEMTMLARHDALFELELNSDSTILEVLEEVGHMPLPPYIDRPDEDADKERYQTVYNQNPGAVAAPTAGLHFDDALLAALKAKGVNTAFVTLHVGAGTFQPVRVDNILDHQMHSEWAEVPQDVVDSIKATKAAGHRVIAVGTTSVRSLESAAKASEGELQAYSNDTDIFIYPGYEFQIVDAMVTNFHLPESTLIMLISAFAGFDEVKNAYQHAIAQKYRFFSYGDAMFVTKKAN

SEQ ID NO: 72031 - protein, 345 aa, Shewanella morhuae
  misc_feature (1)..(345): tr|A0A1N6W5L4|A0A1N6W5L4_9GAMM S-adenosylmethionine:tRN A ribosyltransferase-isomerase OS=Shewanella morhuae OX =365591 GN=queA PE=3 SV=1
MRVADFCFDLPDELIARYPMAQRNASRLLTLDGNSGALGDKQFTDLLGMINPGDLMVFNNTRVIPARMFGQKASGGKLEILVERMLDDKRILAHVRSSKSPKVDSLIHLDGGYQMKMVARHDTLFELELLAELTILEVLEAVGHMPLPPYIDRPDEDADKERYQTVYNLNPGAVAAPTAGLHFDDAMLEALKAKGVNIAFVTLHVGAGTFQPVRVDTILEHKMHSEWANVPQDVVDLIARTKAAGKRVVAVGTTSVRSLESAARAGGGELKAFSGDTDIFIYPGYQFQVVDAMVTNFHLPESTLIMLVSAFAGFDHVMAAYQHAIAQKYRFFSYGDAMFVTKKAH

SEQ ID NO: 72032 - protein, 345 aa, Shewanella oneidensis
  misc_feature (1)..(345): sp|Q8ECM2|QUEA_SHEON S-adenosylmethionine:tRNA ribosylt ransferase-isomerase OS=Shewanella oneidensis (strain M R-1) OX=211586 GN=queA PE=3 SV=1
MRVTDFSFDLPDELIARYPMAQRNASRLLTLDGNTGTLVDKQFTDLLGMINPGDLMVFNNTRVIPARLFGQKASGGKLEILVERMLDDKRILAHVRSSKSPKVDSIIHLDGGYEMKMMARHDALFELQLLSELSILEVLEAVGHMPLPPYIDRPDEDADKERYQTVYNQNPGAVAAPTAGLHFDDAMLEALKAKGVNIAFVTLHVGAGTFQPVRVDNVLEHKMHSEWANVPQDVVDLIARTKAAGNRVVAVGTTSVRSLESAARASAGQLNAFSGDTDIFIYPGYQFQVVDAMVTNFHLPESTLIMLVSAFAGYEHVMAAYQHAIKQKYRFFSYGDAMFVTKKAH

SEQ ID NO: 72033 - protein, 345 aa, Shewanella oneidensis
  misc_feature (1)..(345): tr|A0A2W5FK52|A0A2W5FK52_SHEOE S-adenosylmethionine:tRN A ribosyltransferase-isomerase OS=Shewanella oneidensis OX=70863 GN=queA PE=3 SV=1
MRVTDFSFDLPDELIARYPMAQRTASRLLTLDGNTGTLADKQFTDLLEMINPGDLMVFNNTRVIPARLFGQKTSGGKLEILVERMLDDKRILAHVRSSKSPKVDSIIHLDGGYEMKMAARHDALFELELLSDLTILEVLEAVGHMPLPPYIDRPDEDADKERYQTVYNQNPGAVAAPTAGLHFDDVMLEALKAKGVNITFVTLHVGAGTFQPVRVDNVLEHKMHSEWANVPQDVVDLIAQTKAAGKRVVAVGTTSVRSLESAARASEGELTAFSGDTDIFIYPGYQFQIVDAMITNFHLPESTLIMLVSAFAGFDHVMAAYQHAITQKYRFFSYGDAMFVTKKAH

SEQ ID NO: 72034 - protein, 345 aa, Shewanella pealeana
  misc_feature (1)..(345): sp|A8H2K7|QUEA_SHEPA S-adenosylmethionine:tRNA ribosylt ransferase-isomerase OS=Shewanella pealeana (strain ATC C 700345 / ANG-SQ1) OX=398579 GN=queA PE=3 SV=1
MRVADYSFELPDELIARYPTAERTASRLLSLDGNSGQLADLQFTDILEQVNPGDLMVFNNTRVIPARMFGTKQSGGKLEILVERMLDDKRVLAHVRCSKSPKVDSIVCLDGGYEMVMLARHDALFELSLQSDKTILEVLEEVGHMPLPPYIDRPDEDADKERYQTVYNQNPGAVAAPTAGLHFDDAILAALKAKGVNTAFVTLHVGAGTFQPVRVDNILDHKMHSEWAEVPQTVVDLIGETKARGNRVIAVGTTSVRSLESAAKASQGVLQSFSGDTDIFIYPGYQFQVVDAMVTNFHLPESTLIMLLSAFAGFDEVKNAYQHAIAQKYRFFSYGDAMFVTKKAN

SEQ ID NO: 72035 - protein, 345 aa, Shewanella piezotolerans
  misc_feature (1)..(345): sp|B8CLC4|QUEA_SHEPW S-adenosylmethionine:tRNA ribosylt ransferase-isomerase OS=Shewanella piezotolerans (strai n WP3 / JCM 13877) OX=225849 GN=queA PE=3 SV=1
MRVADFSFELPDELIARYPTAERTASRLLSLDGNSGALADLQFTAILEKVQPGDLMVFNNTRVIPARLFGKKQSGGKLEILVERMLDDKRILAHVRCSKSPKVDNIICLDNGYEMKMCARHDALFELELQSDKTILEVLEEVGHMPLPPYIDRPDEDADKERYQTVYNQTPGAVAAPTAGLHFDDAMLAALKDKGVKTAFVTLHVGAGTFQPVRVDEILDHKMHSEWAEVSQDVVDLIALTKANGHRVIAVGTTSVRSLESAARASAAELEAFSGDTDIFIYPGYQFQVVDAMVTNFHLPESTLIMLLSAFAGFDEVKTAYQHAIAQKYRFFSYGDAMFVTKKAN

SEQ ID NO: 72036 - protein, 345 aa, Shewanella psychrophila
  misc_feature (1)..(345): tr|A0A1S6HT65|A0A1S6HT65_9GAMM S-adenosylmethionine:tRN A ribosyltransferase-isomerase OS=Shewanella psychrophi la OX=225848 GN=queA PE=3 SV=1
MRVTDFSFELPNELIARYPTSERTSSRLLSLEGNTGQVTDKQFTDILNMVNPGDLMVFNNTRVIPARLFGKKQSGGKLELLVERMLDDKSILAHVRCSKSPKVDSIVCLDGGYEMVMLARHDALFELKLQSDKTILEVLEEVGHMPLPPYIDRPDEDADKERYQTVYNESPGAVAAPTAGLHFDDAMLKALSDKGVDTAFVTLHVGAGTFQPVKVDNILEHKMHSEWAEVTQEVVDKVIQTKANGKRVIAVGTTSVRSLEGAAKASVGELKAFCSDTDIFIYPGYEFQVVDAMVTNFHLPESTLIMLLSAFAGFDEVKNAYQHAIAQKYRFFSYGDAMFVTKKAN

SEQ ID NO: 72037 - protein, 345 aa, Shewanella putrefaciens
  misc_feature (1)..(345): tr|E6XRC7|E6XRC7_SHEP2 S-adenosylmethionine:tRNA ribosy ltransferase-isomerase OS=Shewanella putrefaciens (stra in 200) OX=399804 GN=queA PE=3 SV=1
MRVADFSFDLPDELIARYPMAQRNASRLLTLDGNSGALGDKQFTELLEMINPGDLMVFNNTRVIPARMFGQKASGGKLEILVERMLDDKRILAHVRSSKSPKVDSLIHLDGGYQMKMVARHDTLFELELLSELTILEVLEAVGHMPLPPYIDRPDEDADKERYQTVYNQNPGAVAAPTAGLHFDDAMLDALKAKGVNIAFVTLHVGAGTFQPVRVDNVLEHKMHSEWANVPQDVVDLIAQTKAAGKRVVAVGTTSVRSLESAARASLGELKAFSGDTDIFIYPGYQFQVVDAMVTNFHLPESTLIMLVSAFAGFDHVMAAYQHAITQKYRFFSYGDAMFVTKKAH

SEQ ID NO: 72038 - protein, 345 aa, Shewanella putrefaciens; identical to SEQ ID NO: 72037
  misc_feature (1)..(345): sp|A4Y8C3|QUEA_SHEPC S-adenosylmethionine:tRNA ribosylt ransferase-isomerase OS=Shewanella putrefaciens (strain CN-32 / ATCC BAA-453) OX=319224 GN=queA PE=3 SV=1

SEQ ID NO: 72039 - protein, 345 aa, Shewanella sediminis
  misc_feature (1)..(345): tr|A8FXC7|A8FXC7_SHESH S-adenosylmethionine:tRNA ribosy ltransferase-isomerase OS=Shewanella sediminis (strain HAW-EB3) OX=425104 GN=queA PE=3 SV=1
MRVTDFSFDLPDELIARYPMANRTSSRLLSLEGNTGKLADNQFTDILNMVNPGDLMVFNNTRVIPARLFGQKITGGKLEILVERMLDDKRILAHVRCSKSPKADSIICLDGDYEMKMLGRHDALFELELQSDKTILEVLEEVGHMPLPPYIDRPDEDADKERYQTVYNQNPGAVAAPTAGLHFDDALLKALSDKGVDTAFVTLHVGAGTFQPVKVDNILEHKMHSEWAEVSQEVVAKVAQTKANGKRVIAVGTTSVRSLESAAKASEGELKEFCSDTDIFIYPGYEFKVVDAMVTNFHLPESTLIMLLSAFAGFDEVKNAYQHAIAQKYRFFSYGDAMFVTKKAN

SEQ ID NO: 72040 - protein, 345 aa, Shewanella sp.
  misc_feature (1)..(345): tr|A0A3Q9E7Q7|A0A3Q9E7Q7_9GAMM S-adenosylmethionine:tRN A ribosyltransferase-isomerase OS=Shewanella sp. TH2012 OX=1965282 GN=queA PE=3 SV=1
MRVADFTFDLPDELIARYPMAERTASRLLHLEGNSGALADRQFTDILGLIEPGDLMIFNNTRVIPARLFGQKASGGKLEILVERMLDDKRILAHVRSSKSPKPGAEIILDGGFKMTMDARHDALFELSLKDDKTILEVLEAVGHMPLPPYIDRPDEDADKERYQTVYNERPGAVAAPTAGLHFDETILDALKAKGVDMAFVTLHVGAGTFQPVRVDNVLEHKMHSEWAEVPADVVEKIRATKAAGKRVIAVGTTSVRSLESAAKASEGELQPFCGDTDIFIFPGFEFKVVDAMVTNFHLPESTLIMLVSAFAGFDEVIGAYRHAVEQKYRFFSYGDAMFVTKKAP

SEQ ID NO: 72041 - protein, 345 aa, Shewanella sp.
  misc_feature (1)..(345): sp|Q0HKF8|QUEA_SHESM S-adenosylmethionine:tRNA ribosylt ransferase-isomerase OS=Shewanella sp. (strain MR-4) OX =60480 GN=queA PE=3 SV=1
MRVTDFSFDLPDELIARYPMAQRNASRLLTLDGNTGTLADKQFTDLLGMINPGDLMVFNNTRVIPARLFGQKASGGKLEILVERMLDDKRILAHVRSSKSPKVDSIIHLDGGYEMKMAARHDALFELELLSDLTILEVLEAVGHMPLPPYIDRPDEDADKERYQTVYNQNPGAVAAPTAGLHFDDAMLDALKAKGVNIAFVTLHVGAGTFQPVRVDNVLEHKMHSEWANVPQDVVDLIAQTKAAGKRVVAVGTTSVRSLESAARASEGELKAFSGDTDIFIYPGYQFQIVDAMITNFHLPESTLIMLVSAFAGFDHVMAAYQHAITQKYRFFSYGDAMFVTKKAH

SEQ ID NO: 72042 - protein, 345 aa, Shewanella violacea
  misc_feature (1)..(345): tr|D4ZIP5|D4ZIP5_SHEVD S-adenosylmethionine:tRNA ribosy ltransferase-isomerase OS=Shewanella violacea (strain J CM 10179 / CIP 106290 / LMG 19151 / DSS12) OX=637905 GN =queA PE=3 SV=1
MRVTDFSFELPNELIARYPTPERTSSRLLSLEGNTGQVTDKQFTDILNMVNPGDLMVFNNTRVIPARLFGKKQTGGKLELLVERILDDKSILAHVRCSKSPKVDSIVCLDGGYEMIMLARHDALFELKLVSDKTILEVLEEVGHMPLPPYIDRPDEDADKERYQTVYNKTPGAVAAPTAGLHFDDAILQALADKGVDTAFVTLHVGAGTFQPVKVDNILEHKMHSEWAEVSQDVVDKVIQTKANGKRVIAVGTTSVRSLESAAKASEGALEAFCSDTDIFIYPGYKFQVVDAMVTNFHLPESTLIMLLSAFAGFDEVKNAYQHAIAQKYRFFSYGDAMFVTKKAN

SEQ ID NO: 72043 - protein, 345 aa, Shewanella woodyi
  misc_feature (1)..(345): sp|B1KNG3|QUEA_SHEWM S-adenosylmethionine:tRNA ribosylt ransferase-isomerase OS=Shewanella woodyi (strain ATCC 51908 / MS32) OX=392500 GN=queA PE=3 SV=1
MRVTDFSFELPDELIARYPMPERTSSRLLSLEGNSGKLGDNQFTDILDMVNPGDLMVFNNTRVIPARLFGQKETGGKLEILVERMLDDKRILAHVRSSKSPKVNTKVCLDGGYEMTMLARHDALFELELNDEKTILEVLEKVGHMPLPPYIDRPDEDADKERYQTVYNDAPGAVAAPTAGLHFDDALLNRLKEKGVDTAFVTLHVGAGTFQPVKVDDVLDHKMHSEWAEVSQEVVDKIAHTKAHGGRVIAVGTTSVRSLESAAKASEDELQPFCRDTDIFIYPGYEFKVVDAMVTNFHLPESTLIMLLSAFAGFDEVKNAYQHAIAQKYRFFSYGDAMFVTKKAN

SEQ ID NO: 72044 - protein, 345 aa, Shewanella xiamenensis
  misc_feature (1)..(345): tr|A0A073KMQ5|A0A073KMQ5_9GAMM S-adenosylmethionine:tRN A ribosyltransferase-isomerase OS=Shewanella xiamenensi s OX=332186 GN=queA PE=3 SV=1
MRVTDFSFDLPDELIARYPMAQRTASRLLTLDGNTGTLADKQFTDLLEMINPGDLMVFNNTRVIPARLFGQKASGGKLEILVERMLDDKRILAHVRSSKSPKVDSIIHLDGGYEMKMAARHDALFELELLSDLTILEVLEAVGHMPLPPYIDRPDEDADKERYQTVYNQNPGAVAAPTAGLHFDDVMLEALKAKGVNIAFVTLHVGAGTFQPVRVDNVLEHKMHSEWANVPQDVVDLIAQTKAAGKRVVAVGTTSVRSLESAARASEGELTAFSGDTDIFIYPGYQFQIVDAMITNFHLPESTLIMLVSAFAGFDHVMAAYQHAITQKYRFFSYGDAMFVTKKAH

SEQ ID NO: 72045 - protein, 345 aa, Shewanella xiamenensis
  misc_feature (1)..(345): tr|A0A1E3V266|A0A1E3V266_9GAMM S-adenosylmethionine:tRN A ribosyltransferase-isomerase OS=Shewanella xiamenensi s OX=332186 GN=queA PE=3 SV=1
MRVTDFSFDLPDELIARYPMAQRTASRLLTLDGNTGTLADKQFTDLLEMINPGDLMVFNNTRVIPARLFGQKASGGKLEILVERMLDDKRILAHVRSSKSPKVDSIIHLDGGYEMKMAARHDALFELELLSDLTILEVLEAVGHMPLPPYIDRPDEDADKERYQTVYNQNPGAVAAPTAGLHFDDVMLEALKAKGVNIAFVTLHVGAGTFQPVRVDNVLEHKMHSEWANVPQDVVDLIAQTKAAGKRVVAVGTTSVRSLESAARASEGELKAFSGDTDIFIYPGYQFQIVDVMITNFHLPESTLIMLVSAFAGFDHVMAAYQHAITQKYRFFSYGDAMFVTKKAH

SEQ ID NO: 72046 - protein, 356 aa, Shigella boydii
  misc_feature (1)..(356): tr|I6DTM3|I6DTM3_SHIBO S-adenosylmethionine:tRNA ribosy ltransferase-isomerase OS=Shigella boydii 965-58 OX=766 138 GN=queA PE=3 SV=1
MRVTDFSFELPESLIAHYPMPERSSCRLLSLDGPTGALTHGTFTDLLDKLNPGDLLVFNNTRVIPARLFGRKASGGKIEVLVERMLDDKRILAHIRASKAPKPGAELLLGDDESINATMTARHGALFEVEFNDDRSVLDILNSIGHMPLPPYIDRPDEDADRELYQTVYSEKPGAVAAPTAGLHFDEPLLEKLRAKGVEMAFVTLHVGAGTFQPVRVDTIEDHIMHSEYAEVPQDVVDAVLAAKARGNRVIAVGTTSVRSLESAAQAAKNDLIEPFFDDTQIFIYPGFQYKVIDALVTNFHLPESTLIMLVSAFAGYQHTMNAYKAAVEEKYRFFSYGDAMFITYNPQAINERVGE

SEQ ID NO: 72047 - protein, 356 aa, Shigella boydii
  misc_feature (1)..(356): sp|Q325J6|QUEA_SHIBS S-adenosylmethionine:tRNA ribosylt ransferase-isomerase OS=Shigella boydii serotype 4 (str ain Sb227) OX=300268 GN=queA PE=3 SV=1
MRVTDFFFELPESLIAHYPMPERSSCRLLSLDGPTGALTHGTFTDLLDKLNPGDLLVFNNTRVIPARLFGRKASGGKIEVLVERMLDDKRILAHIRASKAPKPGAELLLGDDESINATMTARHGALFEVEFNDDRSVLDILNSIGHMPLPPYIDRPDEDADRELYQTVYSEKPGAVAAPTAGLHFDEPLLEKLRAKGVEMAFVTLHVGAGTFQPVRVDTIEDHIMHSEYAEVPQDVVDAVLAAKARGNRVIAVGTTSVRSLESAAQAAKNDLIEPFFDDTQIFIYPGFQYKVVDALVTNFHLPESTLIMLVSAFAGYQHTMNAYKAAVEEKYRFFSYGDAMFITYNPQAINERVGE

SEQ ID NO: 72048 - protein, 356 aa, Shigella dysenteriae; identical to SEQ ID NO: 62661
  misc_feature (1)..(356): sp|Q32JF9|QUEA_SHIDS S-adenosylmethionine:tRNA ribosylt ransferase-isomerase OS=Shigella dysenteriae serotype 1 (strain Sd197) OX=300267 GN=queA PE=3 SV=1

SEQ ID NO: 72049 - protein, 356 aa, Shigella dysenteriae; identical to SEQ ID NO: 62661
  misc_feature (1)..(356): tr|E2XC45|E2XC45_SHIDY S-adenosylmethionine:tRNA ribosy ltransferase-isomerase OS=Shigella dysenteriae 1617 OX= 754093 GN=queA PE=3 SV=1

SEQ ID NO: 72050 - protein, 356 aa, Shigella flexneri; identical to SEQ ID NO: 62661
  misc_feature (1)..(356): tr|A0A4P7TQZ0|A0A4P7TQZ0_SHIFM S-adenosylmethionine:tRN A ribosyltransferase-isomerase OS=Shigella flexneri ser otype 5a (strain M90T) OX=1086030 GN=queA PE=3 SV=1

SEQ ID NO: 72051 - protein, 356 aa, Shigella flexneri; identical to SEQ ID NO: 62661
  misc_feature (1)..(356): sp|Q0T7I4|QUEA_SHIF8 S-adenosylmethionine:tRNA ribosylt ransferase-isomerase OS=Shigella flexneri serotype 5b ( strain 8401) OX=373384 GN=queA PE=3 SV=1

SEQ ID NO: 72052 - protein, 356 aa, Shigella sonnei
  misc_feature (1)..(356): tr|A0A5F0C647|A0A5F0C647_SHISO S-adenosylmethionine:tRN A ribosyltransferase-isomerase OS=Shigella sonnei OX=62 4 GN=queA PE=3 SV=1
MRVTDFSFELPESLIAHYPMPERSSCRLLSLDGPTGALTHGTFTDLLDKLNPGDLLVFNNTRVIPARLFGRKASGGKIEVLVERMLDDKRILAHIRASKAPKPGAELLLGDDESINATMTARHGALFEVEFNDDRSVLDILNSIGHMPLPPYIDRPDEDADRELYQTVYSEKPGAVAAPTAGLHFDEPLLEKLRAKGVEMAFVTLHVGAGTFQPVRVDTIEDHIMHSEYAEVPQDVVDAVLAAKARGNRVIAVGTTSVRSLESAAQAAKNDLIEPFFDDTQIFIYPGFQYKVVDALVTNFHLPESTLIMLVSAFAGYQHTMNAYKSAVEEKYRFFSYGDAMFITYNPQAINERVGE

SEQ ID NO: 72053 - protein, 356 aa, Shigella sonnei; identical to SEQ ID NO: 62661
  misc_feature (1)..(356): sp|Q3Z504|QUEA_SHISS S-adenosylmethionine:tRNA ribosylt ransferase-isomerase OS=Shigella sonnei (strain Ss046) OX=300269 GN=queA PE=3 SV=1

SEQ ID NO: 72054 - protein, 357 aa, Shigella sp.
  misc_feature (1)..(357): tr|A0A1D3DGE3|A0A1D3DGE3_9ENTR S-adenosylmethionine:tRN A ribosyltransferase-isomerase OS=Shigella sp. FC1655 O X=1898038 GN=queA PE=3 SV=1
MRVSDFTFELPEALIAHYPQPQRSGCRLLSLEGETGALSHGIFTDVLDKINAGDLLVFNNTRVIPARIYGRKASGGKIEVLVERMLDEHRVLAHVRASKSPKEGAALVLGEDESVQATMVARHDTLFEIRFDDERDVLTILNSIGHMPLPPYIDRPDEESDKELYQTVYNERPGAVAAPTAGLHFDEPLLQALKEKGVEMAFVTLHVGAGTFQPVRVDNIEEHTMHSEYAEVPQDVVDAVLACKARGNRVIAVGTTSVRSLESAAKATNDALIAPFFDDTQIFIYPGYQYQIIDALITNFHLPESTLIMLVSAFAGYKNTMNAYKEAVEQKYRFFSYGDAMFITRNPLAINEKVGQE

SEQ ID NO: 72055 - protein, 356 aa, Shigella sp.; identical to SEQ ID NO: 66400
  misc_feature (1)..(356): tr|A0A1E2VJP0|A0A1E2VJP0_9ENTR S-adenosylmethionine:tRN A ribosyltransferase-isomerase OS=Shigella sp. FC2928 O X=1886517 GN=queA PE=3 SV=1

SEQ ID NO: 72056 - protein, 348 aa, Shimia abyssi
  misc_feature (1)..(348): tr|A0A2P8FFW5|A0A2P8FFW5_9RHOB S-adenosylmethionine:tRN A ribosyltransferase-isomerase OS=Shimia abyssi OX=1662 395 GN=queA PE=3 SV=1
MQLSDFDFDLPDGLIATRPAEPRSSARLLVAEPDRITDGVVTDLVDWLRPGDRLVLNDTKVIPARLSGYRVRRGPEGETQARIEITLLEPRTGGRWAALVKPLKKIREGEEIIFAAGLKGVLEAKEDGQGVLSFDLEGEDFDAALDAAGSMPLPPYIAAKRAADERDKTDYQTVWARHSGAVAAPTASLHFDASLLAALETKGVTFTHVTLHVGAGTFLPVKVENVAEHKMHSEWGRVTPEAAKKIAATKAAGGRVIPVGTTALRLIESAGRGGQIMPWEGPTDIFIYPGFTFHVADALMTNFHLPKSTLMMLVSALMGQERIREIYNHAVAEEYRFFSYGDGSLLLP

SEQ ID NO: 72057 - protein, 350 aa, Shimia aestuarii
  misc_feature (1)..(350): tr|A0A1I4PHE6|A0A1I4PHE6_9RHOB S-adenosylmethionine:tRN A ribosyltransferase-isomerase OS=Shimia aestuarii OX=2 54406 GN=queA PE=3 SV=1
MQLSDFDFDLPETLIATRPAEPRSSARLLVAERDRITDARVTDLVDWLRPGDRLVLNDTKVIPARLSGYRERVGPDGPTQARIEVTLLEPRAGGHWAALVKPLKKIREGERIVFAAGLTATLEAKEDGQGILGFDLAGEDFDAALAEAGSMPLPPYIAAKRAADERDKTDYQTVWARHSGAVAAPTASLHFDAPLLATLEAKGVQFTHVTLHVGAGTFLPVKVENVKDHKMHAEWGRVTPEAAAEIAATKAAGGRVIPVGTTALRLIESAARSGVIAPWEGPTDIFIYPGFDFHVADALMTNFHLPKSTLMMLVSALMGAERIRRIYDHAVRSEYRFFSYGDASLLLPSG

SEQ ID NO: 72058 - protein, 348 aa, Shimia haliotis
  misc_feature (1)..(348): tr|A0A1I4BBH7|A0A1I4BBH7_9RHOB S-adenosylmethionine:tRN A ribosyltransferase-isomerase OS=Shimia haliotis OX=12 80847 GN=queA PE=3 SV=1
MQLSDFDFDLPEALIATRPAEPRSSARLLVSDAGRITDGVVTDLMEWLRPGDRLVLNDTKVIPARLMGYRVRTGPEGETQAKMEVTLLEPRAGGAWAALVKPLKKVREGEEIVFAAGLKGTLTAKEDGQGVIAFDLEGEDFDAALQAAGNMPLPPYIAAKRAADEKDKTDYQTVWAKHSGAVAAPTASLHFDDELLAALTAKGVDFTHVTLHVGAGTFLPVKVDNVKEHKMHAEWGRVTPEAAAEIAATKAAGGRVIPVGTTALRLIESAARDGEIKPWEAATDIFIYPGFTFHVADALMTNFHLPKSTLMMLVSALVGHGQIREIYAHAVSNEYRFFSYGDASLLIP

SEQ ID NO: 72059 - protein, 348 aa, Shimia isoporae
  misc_feature (1)..(348): tr|A0A4R1NM45|A0A4R1NM45_9RHOB S-adenosylmethionine:tRN A ribosyltransferase-isomerase OS=Shimia isoporae OX=64 7720 GN=queA PE=3 SV=1
MQLSDFDFELPDALIATRPAEPRSSARLLVSEADKITDGVVTDLVDWLRPGDRLVLNDTKVIPARLMGYRVRSGPEGETQAKMEVTLLEPRAGGAWAALVKPLKKIREGEEIIFAAGLKGTLTSKSEGQGVISFDLEGEDFDAALDAAGNMPLPPYIAAKRAADDKDKTDYQTVWAKHSGAVAAPTASLHFDEALLHRLSQKGVGFTHVTLHVGAGTFLPVKVDNVKEHKMHAEWGRVTPQAADEIAATKASGGRVIPVGTTALRLIESAAREGAIAPWEGKTDIFIYPGFQFHVADALMTNFHLPKSTLMMLVSALVGQDRIREVYTHAVAEEYRFFSYGDASLLIP

SEQ ID NO: 72060 - protein, 351 aa, Shimia marina
  misc_feature (1)..(351): tr|A0A0P1ET47|A0A0P1ET47_9RHOB S-adenosylmethionine:tRN A ribosyltransferase-isomerase OS=Shimia marina OX=3212 67 GN=queA PE=3 SV=1
MQLSDFDFDLPESLIATRPADPRSSARLLVAQGADITDGVVTDLVQWLKPGDRLVLNDTKVIPARLSGYRVRSGPEGETQARMEVTLLEPRAGGAWAALIKPLKKIREGEEIIFAAGLKGRLLSKDEGQGLVQFDLEGPDFDAALEAAGNMPLPPYIAAKRAADEKDKTDYQTVWAKNSGAVAAPTASLHFDEALLAALAARGISFTHVTLHVGAGTFLPVKVEDVKEHKMHAEWGRVSAEAAAEIKGTKASGGRVIPVGTTALRLIESAARATGEIAPWEGETDIFIYPGFAFQVADALMTNFHLPKSTLMMLVSALLGQEEIRQVYAHAIQEGYRFFSYGDASLLIPAE

SEQ ID NO: 72061 - protein, 348 aa, Shimia sp.
  misc_feature (1)..(348): tr|A0A0N0D9N8|A0A0N0D9N8_9RHOB S-adenosylmethionine:tRN A ribosyltransferase-isomerase OS=Shimia sp. SK013 OX=1 389006 GN=queA PE=3 SV=1
MQLSDFDFDLPDGLIATRPAEPRSSARLLVSEATGITDGVVTDLVDWLQPGDRLVLNDTKVIPARLMGYRVRQGPEGETQAKMDVTLLEPRAGGAWAALIKPLKKIREGEEIVFGAGLTGRLDSKADGQGVIVFDLQGADFDAALELAGNMPLPPYIAAKRAADARDKTDYQTVWAKHAGAVAAPTASLHFDRALLDALKVKGIDVTYVTLHVGAGTFLPVKVENVKEHKMHAERGQVTPEAAAEIAATKANGGRVIPVGTTALRLIESAAKQGAIAPWEGATDIFIYPGFEFHVADALMTNFHLPKSTLMMLVSALVGQDRIREVYAHAVAEKYRFFSYGDASLLIP

SEQ ID NO: 72062 - protein, 357 aa, Shimwellia blattae
  misc_feature (1)..(357): tr|I2BBT3|I2BBT3_SHIBC S-adenosylmethionine:tRNA ribosy ltransferase-isomerase OS=Shimwellia blattae (strain AT CC 29907 / DSM 4481 / JCM 1650 / NBRC 105725 / CDC 9005 -74) OX=630626 GN=queA PE=3 SV=1
MRLSDFSFELPESLIAHYPQAQRSACRLLSLDGPTGALTHGVFTDLLDKLNPGDLLVFNNTRVIPARLFGRKASGGKIELLVERMLDDHRVLAHIRASKSPKPGAELLLGDDESIKATMVARHDALFEVRFDDQRSVLDILNQIGHMPLPPYIDRPDEDADRELYQTVYSKRPGAVAAPTAGLHFDEPLLAALRAKGVELAFVTLHVGAGTFQPVRVESIEEHVMHSEYAEVPQEVVDAVLACKARGNRVIAVGTTSVRSLESAAQAAKDALIAPFFGDTQIFIYPGYQYQVIDALVTNFHLPESTLIMLVSAFAGYQHTLHAYHEAVKAEYRFFSYGDAMYITYNPQAINERPGQD

SEQ ID NO: 72063 - protein, 355 aa, Shinella granuli
  misc_feature (1)..(355): tr|A0A4R2CKY3|A0A4R2CKY3_9RHIZ S-adenosylmethionine:tRN A ribosyltransferase-isomerase OS=Shinella granuli OX=3 23621 GN=queA PE=3 SV=1
MRVDLFDFDLPEDNIALRPVTPREAARLLVVRPGQETPYADRTVGDLPSLLRPGDALVFNDTRVIPAQLEGIRHREGAGGQKVSATLHMRIAGDRWKAFARPGKRIKRGDRIAFGAAEALSAIVEQKGEGGEVTLHFDISGPDLDRAIASVGHIPLPPYIASKREDDEADRRDYQTIYAREEGAVAAPTAGLHFTDALFEKLDALGVERHFVTLHVGAGTFLPVKADDTTDHVMHEEIGHVCEATAAALNAVRARGGRIVSVGTTSLRLLESAADEDGTIRPWSGATGIFITPGYRFRTADMLMTNFHLPKSTLFMLVSAFSGLETMRGAYAHAIATGYRFYSYGDSSLLFRNDR

SEQ ID NO: 72064 - protein, 355 aa, Shinella sp.
  misc_feature (1)..(355): tr|A0A4Q8MMV4|A0A4Q8MMV4_9RHIZ S-adenosylmethionine:tRN A ribosyltransferase-isomerase OS=Shinella sp. JR1-6 OX =2527671 GN=queA PE=3 SV=1
MRVDLFDFDLPEENIALRPVSPREAARLLVVEPDRDVPYQDRTVGDLPSLLRPGDALVFNDTRVIPAQLEGIRHRDGAGGQKVSATLHMRIAGDRWKAFARPGKRIKRGDRITFGAAEDLSATVEQKGEGGEVTLHFDLSGPDLDRAIATVGHIPLPPYIASKREEDEADRRDYQTIYAREEGAVAAPTAGLHFTDALFEKLDALGVERHFVTLHVGAGTFLPVKADDTTDHVMHEEIGYVSGETAAALNAVRARGGRIISVGTTSLRLLESAADEDGTIRPWSGATGIFITPGYRFRTADMLMTNFHLPKSTLFMLVSAFSGLETMRGAYAHAIATGYRFYSYGDSSLLFRDHR

SEQ ID NO: 72065 - protein, 352 aa, Shinella sp.
  misc_feature (1)..(352): tr|A0A4Y8QKB7|A0A4Y8QKB7_9RHIZ S-adenosylmethionine:tRN A ribosyltransferase-isomerase OS=Shinella sp. MEC087 O X=1967501 GN=queA PE=3 SV=1
MRVDLFDFDLPEENIALRPVTPREAAKLLVVRPGTETPYEDFTVGDLPSLLRAGDALVFNDTRVIPAQLEGIRHREGAGGQAVSATLHMRIAGDRWKAFAKPGKRIKPGDRIAFGTLWATVENKGEGGEVTLHFDASGPELDRAIAIVGHIPLPPYIASKRAEDEADRKDYQTIYAREEGAVAAPTAGLHFTDALFEKLDALGVIRHFVTLHVGAGTFLPVKADDTTEHVMHEEIGYVSEETAASLNAVKARGGRIVSVGTTSLRLLESAADEDGTIKPWSGATGIFITPGYRFRTTDILMTNFHLPKSTLFMLVSAFSGLETMRGAYAHAISSGYRFYSYGDSSLLFRDHA

SEQ ID NO: 72066 - protein, 345 aa, Shuttleworthia satelles
  misc_feature (1)..(345): tr|C4GAC2|C4GAC2_9FIRM S-adenosylmethionine:tRNA ribosy ltransferase-isomerase OS=Shuttleworthia satelles DSM 1 4600 OX=626523 GN=queA PE=3 SV=1
MDVKDFDYELPEELIAQDPLLKRDQSRLLVLDPETGAMEHRHFYDIRDYLRAGDCLVINNTRVIPARLLGAKEETGAKVEVLLLINHGGDNWETLVKPGRKCREGARISFGEGLLVGQVTKVLEDGNRMIHFSYQGIWEEVLDRLGQMPLPPYIHHQLADKNRYQTVYAKHDGSAAAPTAGLHFTPELLEEIRKSGVEIAEVTLHVGLGTFRPVKADRVEDHDMHSEYYVVGQEAADTINRARANGGRIIAVGTTSTRTLESVAEADGTIPVKSGWTKIFIYPGYQFKAIDGLITNFHLPQSTLLMLVSALAGRDHILKAYREAVEEKYRFFSFGDAMFIKPREK

SEQ ID NO: 72067 - protein, 345 aa, Shuttleworthia sp.
  misc_feature (1)..(345): tr|X8H246|X8H246_9FIRM S-adenosylmethionine:tRNA ribosy ltransferase-isomerase OS=Shuttleworthia sp. MSX8B OX=9 36574 GN=queA PE=3 SV=1
MDVKDFDYELPEELIAQDPLLKRDQSRLLVLDPETGAMEHRHFYDIRDYLRAGDCLVINNTRVIPARLLGAKEETGAKVEVLLLINHGGDNWETLVKPGRKCREGARISFGEGLLVGQVTKVLEDGNRMIHFSYQGIWEEVLDRLGQMPLPPYIHHQLADKNRYQTVYARHDGSAAAPTAGLHFTPELLEEIRKSGVEIAEVTLHVGLGTFRPVKADRVEDHDMHSEYYVVGQEAADTINRARANGGRIIAVGTTSTRTLESVAEADGTIPVKSGWTKIFIYPGYQFKAIDGLITNFHLPQSTLLMLVSALAGRDHILNAYREAVEEKYRFFSFGDAMFIKPREK

SEQ ID NO: 72068 - protein, 349 aa, Siansivirga zeaxanthinifaciens
  misc_feature (1)..(349): tr|A0A0C5W829|A0A0C5W829_9FLAO S-adenosylmethionine:tRN A ribosyltransferase-isomerase OS=Siansivirga zeaxanthi nifaciens CC-SAMT-1 OX=1454006 GN=queA PE=3 SV=1
MKLSNFGFNLPEELLAEYPAENRDESRLMVLDRKKQTIEHRMFKDIVEYFDEDDVLILNNTKVFPARLYGNKEKTGARIEVFLLRELNQEQRLWDVLVDPARKIRIGNKLYFGDDDTLVAEVIDNTTSRGRTLRFLYDGSYTEFRKKLTELGETPLPKYIKREVQPEDEERYQTIYAKNEGAVAAPTAGLHFSKHVLKRLEIKGVKFAEVTLHVGLGTFNPVEVEDLSKHKMDSEELKIDEKAVEIVNAGIKNKKRVCAVGTTAMRAIESSVSSNGQLNEIEGWTNKFIFPPYDFSIANCMITNFHTPKSTLLMMVSAFAGHDFIKKAYEEAVKEKYKFYSYGDAMLIL

SEQ ID NO: 72069 - protein, 351 aa, Siccationidurans arizonensis
  misc_feature (1)..(351): tr|A0A1I6B628|A0A1I6B628_9BACT S-adenosylmethionine:tRN A ribosyltransferase-isomerase OS=Siccationidurans ariz onensis OX=1227077 GN=queA PE=3 SV=1
MAMKLHEFKFELPEELVALHPARNRDESRLMVVHRATGQIEHRTFKDILDYFNEGDVMVLNDTKVFPARLYGNKEKTGAKIEVFLLRELNKELRLWDVLVDPARKIRVGNKLYFGESDMVAEVIDNTTSRGRTIKFLFDGTDEEFRKALYELGETPIPKEVLNRETEPADKERYQTIYAENIGAVAAPSAGLHFTREVMKRMEIKGVDPAFVTLHVGLGTFRTVDVEDLTKHKMDSENFIVTAPACEIVNKALDAKKKVCAVGTTTIRAMEASVSANARMKPTQGWIDRFIFPPHDFKIANCLLTNFHMPESTLIMLAAAFAGYPLLMEAYKEAIKEKYKFFSYGDAMLIL

SEQ ID NO: 72070 - protein, 426 aa, Siccationidurans arizonensis
  misc_feature (1)..(426): tr|A0A1I6AXC4|A0A1I6AXC4_9BACT S-adenosylmethionine:tRN A ribosyltransferase-isomerase OS=Siccationidurans ariz onensis OX=1227077 GN=queA PE=3 SV=1
MNAHPRHLSIQDFTYPLPAERIASEPLPDRTASRLLVSRNGTLTDKHFRDLPHELPAGAMLVFNDTRVVRARLLARRPTGGQVELFCLEPVAPHRSLELALQQTGQCTWRCLVGNGRRWKEGPVLLEFETADGQQATLWAERQAQEAGTALIDFRWEPASLPFAEVLRAGGHLPLPPYLGRLDTPTDAVRYQTVYAAAEGAVAAPTAGLHFTPELLTELQQQGFSTGHVTLHVGAGTFQPVKAEHMADHPMHTEPILVSAALLRQLLAHRPRPVLAVGTTSLRTLESLYWLGVGLLRATEVDATQEVGELRMTQWQPYDMAEAAASISAEMALEALLQHLAATGTDTLQASTRLLIAPGYTFRLVDGLITNFHQPESTLLLLVAALMGPEWRTLYNHALTEGYRFLSYGDSSLLLPGTIIDNSSIS

SEQ ID NO: 72071 - protein, 356 aa, Siccibacter turicensis
  misc_feature (1)..(356): tr|A0A2P8VP18|A0A2P8VP18_9ENTR S-adenosylmethionine:tRN A ribosyltransferase-isomerase OS=Siccibacter turicensi s OX=357233 GN=queA PE=3 SV=1
MRVSDFAFELPDSLIAHYPQAQRSACRLLSLDGPTGQLEHGTFTDLLDKLNPGDLLVFNNTRVIPARLFGRKASGGKIEVLVERMLDDKRILAHVRASKAPKPGAELLLGDDESISATMVARHDALFEIAFNDARPVLDILNDIGHMPLPPYIERPDEDADRELYQTVYSQKPGAVAAPTAGLHFDEPLLAKLREKGVEMAFVTLHVGAGTFQPVRVDSIEDHIMHAEYAEVPQDVVDAVLGAKARGNRVIAVGTTSVRSLESAAQAAKNDLIEPFFGDTKIFIYPGYQYRVIDALITNFHLPESTLIMLVSAFAGYKHTMNAYQAAVNAQYRFFSYGDAMFITYNPAAINERPGA

SEQ ID NO: 72072 - protein, 360 aa, Siculibacillus lacustris
  misc_feature (1)..(360): tr|A0A4Q9VRG2|A0A4Q9VRG2_9RHIZ S-adenosylmethionine:tRN A ribosyltransferase-isomerase OS=Siculibacillus lacust ris OX=1549641 GN=queA PE=3 SV=1
MRVDLFDFELPPESIALRPASPRESARLLVVRPGAEPPLVDATVADLPSWLRAGDALVFNDTRVIPAELHGVRIREEARAGVAFNLIERVDASHWRAFARPGKRLKAGDRVLFGATGSACQLGEAWASVTAKDDDGVVDLAFDLAGPDLDAAIRALGSMPLPPYISARRKADDADTRDYQTIYAREEGAVAAPTAGLHFTPALMDRLAALGVERHFVTLHVGAGTFLPVKVDDTADHKMHFESGTLGADTAAALNAVRARGGRIVAVGTTSLRILESACDEAGRLAPWSGATDIFITPGRRVRSVDALMTNFHLPRSTLFMLVSAFSGLDRMRAAYAHAVATGYRFYSYGDASLLFPDPT

SEQ ID NO: 72073 - protein, 340 aa, Sideroxydans lithotrophicus
  misc_feature (1)..(340): tr|D5CQ32|D5CQ32_SIDLE S-adenosylmethionine:tRNA ribosy ltransferase-isomerase OS=Sideroxydans lithotrophicus ( strain ES-1) OX=580332 GN=queA PE=3 SV=1
MRTDDFDFILPERLIAQHPPLQRGASRLLQVGKTGLKDSQFADLHGLVHGHDLLVLNDTRVLKARLFGEKESGGKVEVLVERVLGEHEVLAQVRASKTPKPGSRLLLAEKLRVKVLGREGEFFHLCFEGAAAVTALLERYGHLPLPPYIAHVAGAEDEERYQTVFAREPGAVAAPTAGLHFGETMLQALRDKKVDIAYVTLHVGAGTFKPVRAENIEEHVMHSERYTIPQATVDAIREAKAKGGRIIAVGTTSLRALESAAASGELVAGSGETSIFITPGYRFGVVDVLLTNFHLPRSTLLMLVCAFGGMEKMLAAYRHAVEKEYRFFSYGDAMLIEREQ

SEQ ID NO: 72074 - protein, 225 aa, Sideroxydans sp.
  misc_feature (1)..(225): tr|A0A1G3JE45|A0A1G3JE45_9PROT S-adenosylmethionine:tRN A ribosyltransferase-isomerase (Fragment) OS=Sideroxyda ns sp. RIFOXYD2_FULL_59_7 OX=1802156 GN=A3J99_03930 PE= 3 SV=1
MRTDDFDFELPEHLIAQHPPAQRGGSRLLRVGAAGLEDRLFSELPLFLRAGDLLVLNDTRVLKARLFGQKATGGQVEVMVERVLGAHEVLAKVRASKTPKTGSSFLVADAVTVEVLGREDEFFHLRFAGEAPVEDILERYGKLPLPPYITHAAGAEDDERYQTVFAREQGAVAAPTAGLHFDAAMLDSLRAKGVNIAYVTLHVGAGTFQPVRADDVADHVMHSER

SEQ ID NO: 72075 - protein, 340 aa, Sideroxydans sp.
  misc_feature (1)..(340): tr|A0A1G3IM21|A0A1G3IM21_9PROT S-adenosylmethionine:tRN A ribosyltransferase-isomerase OS=Sideroxydans sp. GWF2 _59_14 OX=1802154 GN=queA PE=3 SV=1
MRTDDFDFILPERLIAQHPPAQRGASRLLQVGRAGLKDGQFAELHGLVRENDLLVLNDTRVIKARLFGEKESGGKVEVLVERVLDEHDVLAQVRVSKTPKPGSRLILAGRVRVQVMGREGEFFHLRFEDAEAVTTLLERHGHLPLPPYITHAAGAEDEARYQTVFAREPGAVAAPTAGLHFGETMLQALRDKKVDIAYVTLHVGAGTFKPVRAENVEEHVMHSERYTIPQATVDAVREARAKGGRIIAVGTTSLRALESAAADGELKAGSGETRIFITPGYRFRVVDVLLTNFHLPRSTLLMLVCAFGGMDKMLAAYRHAVEQEYRFFSYGDAMLIEREQ

SEQ ID NO: 72076 - protein, 369 aa, Silicibacter sp.
  misc_feature (1)..(369): tr|C9D440|C9D440_9RHOB S-adenosylmethionine:tRNA ribosy ltransferase-isomerase OS=Silicibacter sp. TrichCH4B OX =644076 GN=queA PE=3 SV=1
METRCDGPWTFAQARSIARAMKLSDFDFDLPEDLIATRPAVPRSSARLLVAEQDRITDARVTDLLQWLNAGDRLVLNDTRVIPARLSGQRHRTSAQGPVSARIEVTLLEPQADGCWSGLLKPLKKIKIGETVRFSDGLSAELVDVVEGQGRLRFNLAGDDFDAALAEAGAMPLPPYIAAKRPADEQDKTDYQTVWARSSGAVAAPTASLHFDEPLLAALAAKGVEFTYVTLHVGAGTFLPVKVEDVTSHKMHAEWGQVTAKAAAEIAATKAAGKRVIPVGTTALRLIESAARDSGAIAPWEGETDIFIYPGFTFRVADALMTNFHLPKSTLMMLVSALMGQERMRSVYAHAVTERYRFFSYGDASLLIP

SEQ ID NO: 72077 - protein, 351 aa, Silicimonas algicola
  misc_feature (1)..(351): tr|A0A316G831|A0A316G831_9RHOB S-adenosylmethionine:tRN A ribosyltransferase-isomerase OS=Silicimonas algicola OX=1826607 GN=queA PE=3 SV=1
MRLSDFDFDLPERLIATRPARPRSSSRLLVATPSTMTDAHSIDLPAFLRPGDRLVLNDTRVIPARLSGVRRRSGEGGDTSARIEATLLEPRADGTWSALLKPLKKVRDGEALAFSPDLSATVEGRDEGTARLRFNLSGDDFDAALAEAGAMPLPPYIEGRRPSDAQDREDYQTVWARETGAVAAPTASLHFDDALLAALAARGIDRSFVTLHVGAGTFLPVKVDDVRDHKMHAERGEITLEAAREINATRSAGGRIVPVGTTALRLIETAAEDDGTLAAWRGATDIFITPGYRFKAADALMTNFHLPKSTLMMLVSAFMGVDRVREIYDHAMRNDYRFFSYGDASLLLPAG

SEQ ID NO: 72078 - protein, 390 aa, Silvanigrella aquatica
  misc_feature (1)..(390): tr|A0A1L4CYR6|A0A1L4CYR6_9PROT S-adenosylmethionine:tRN A ribosyltransferase-isomerase OS=Silvanigrella aquatic a OX=1915309 GN=AXG55_03945 PE=3 SV=1
MKTDFFNYDLPEELIAQIPLENRSESRLLVCNSNNQSIQDKMFKEIPNVLNEVFQLKKTQSKVLLIANDSRVYPARVRIRRKTGARGEVFFLETGAKKTYRCLLRPKSKLKIDEVIYADIEEEKPLFKVTNLEPPEVSIIGSVSLDDILNQYGEMPLPPYIKRDPHKNKSNINLDKERYQTIYSNMNEIGSSAAPTAGLHFTPEIISECKNSNIEFAYVTLHVGLGTFLPVMAENIESHQMHEEYYHISHNTVEKIAEYIENNWPIVFVGTTSLRTVESFFRLAFPDLNQNTIYKMGSDKKLINYLTPYSNKWLPTKIFIYPKDEKDKFIPLIGKAIITNFHQPGSTLAMLVAALMGVKFWQVFYTHAIEKKYRFFSYGDSSLLVFGANV

SEQ ID NO: 72079 - protein, 390 aa, Silvanigrellales bacterium
  misc_feature (1)..(390): tr|A0A4P2VKX8|A0A4P2VKX8_9PROT S-adenosylmethionine:tRN A ribosyltransferase-isomerase OS=Silvanigrellales bact erium RF1110005 OX=2493639 GN=JCM31447_08210 PE=3 SV=1
MKTSFFNYELPEELIAQIPLQNRENSRLLVARSLNKSIVDSDFIHIADEINKVFNLKSKNLKALLIANDSRVYPARVRIRRKTGARGEVFLLERGNKDFYRCLLRPKSKIKQGEILYADQDELKPLFKVTSLSPPLVEIINSLPLDTLLEQYGEMPLPPYIQRGKVDNKNLKEIDKERYQNVYSNKMEIGSSAAPTAGLHFTPEIIKKCSENNIEFASVTLHVGLGTFQPVQAENVQQHNMHEEHYIVSKDVAEKITLYLENDWPIIFVGTTALRAVESFYRAALSESNRHSIIQKAKEKNLNNHIYNYVDKWLATRIFIHPTYENEIISPCVGNAIITNFHQPESTLAMLISALMGYHFWNEIYSHAINKKYRFFSYGDSSLLVFGENF

SEQ ID NO: 72080 - protein, 351 aa, Simiduia agarivorans
  misc_feature (1)..(351): tr|K4KGR0|K4KGR0_SIMAS S-adenosylmethionine:tRNA ribosy ltransferase-isomerase OS=Simiduia agarivorans (strain DSM 21679 / JCM 13881 / BCRC 17597 / SA1) OX=1117647 GN =queA PE=3 SV=1
MRRQDFFYQLPDELIAREPTPERTGSRLFQLDGPTGAMAHGQFEEILGLVEPGDLMVFNDTRVIPARVFGQKSTGGQVEILVERVLDRYNVKAHVRSSKSPKPGAVIALEDGTEITVTGREEALFLLQFPVPALELLEAIGHMPLPPYIDRADAKADRERYQTVYGTKAGAVAAPTAGLHFDDRLLNALKDKGVQLAFVTLHVGAGTFQPVRVDDIKTHVMHSEVMEVTPAVCEQVKATKAAGKRVIAVGTTSVRCLETAARDGEIRPYQGETQIFIYPSYRYQVVDALVTNFHLPESTLLMLVSAFAGYRNTMDAYREAVASRYRFFSYGDAMFITRNPNACDDPIGDTL

SEQ ID NO: 72081 - protein, 340 aa, Simonsiella muelleri
  misc_feature (1)..(340): tr|V9H9R4|V9H9R4_9NEIS S-adenosylmethionine:tRNA ribosy ltransferase-isomerase OS=Simonsiella muelleri ATCC 294 53 OX=641147 GN=queA PE=3 SV=1
MHLSEFDFELPEQLIAQNPPTVRGSSRLLVALPNQPIEDKKFSDLINYIEAGDVLIFNNTKVMKARLFGQKASGGKIEALIERVLDEHTALAHIRSSKSPKTGTELIFDGEIHATMLERVGELFKIHFSGSLNVYELLEQHGVLPLPPYIERAAGADDDDRYQTVYAKHQGAVAAPTAGLHFTDEILGSLKDKGVEFAEVTLHVGAGTFQPVRVDNIAEHKMHSEWFQIPDATVSTIQAAQARGNKIWSVGTTSLRAIESAARSGSLKAGSGDTDIFITPRFEFQIIDRLITNFHLPKSTLLMLVSAFSGSLKIREIYQHAIEQEYRFFSYGDAMILGRE

SEQ ID NO: 72082 - protein, 363 aa, Simplicispira metamorpha
  misc_feature (1)..(363): tr|A0A4R2NH18|A0A4R2NH18_9BURK S-adenosylmethionine:tRN A ribosyltransferase-isomerase OS=Simplicispira metamor pha OX=80881 GN=queA PE=3 SV=1
MTATPAPFTLSDFDFSLPPELIAQHPAPERSASRLLDGRAAQPADRIFKELPGLLRAGDLLVFNDTRVLKARLFGEKDSGGKLELLIERVLDGAEVVAHLKVSKKPLPGARIHLAGGLHQGGFEATLLGRYPDEDGPLFRFALRGAAGESPWELMERHGHLPLPPYIERQQNQAHDPDEAEDAQRYQTVFARAPGAVAAPTAALHFDEGVLADLAARGIETASVTLHVGAGTFQPVKTENLAEHQMHSEWYDVPLATLAALERCRQRGGRVVAVGTTTVRTLESWARSGQTSGDTNIFITPGFDFQVVDVLLTNFHLPKSTLMMLVSAFAGYVPVMGLYRYAIARGYRFFSYGDAMLLERAKG

SEQ ID NO: 72083 - protein, 371 aa, Simplicispira sp.
  misc_feature (1)..(371): tr|A0A2U1C822|A0A2U1C822_9BURK S-adenosylmethionine:tRN A ribosyltransferase-isomerase OS=Simplicispira sp. 125 OX=2135643 GN=queA PE=3 SV=1
MTDLPASAPRTFTLSDFDFVLPPERIAQHPAPERSASRLLDGRNRPPVDRIFHTLPGLLRAGDLLVFNDTRVVKARLFGEKASGGKLELLIERVLTGNEVVAHMKVSKKPLPGSTVHMAGGRSAGGFDATLLSRWPDAQGPLFRFALHGPAQESPWDLMERHGHLPLPPYIERQQNTGNDPDAAEDSQRYQTIFARAPGAVAAPTAALHFDDAVLADLAAQGIERASVTLHVGAGTFQPVKTENLAEHQMHSEWYEIPLPTLAALERCRQRGGRVVAVGTTTVRTLESWARSGLATGDTNIFITPGFAFQVVDLLVTNFHLPKSTLMMLVSAFAGYDQVMELYRHAIAQEYRFFSYGDAMLLERGAPTARL

SEQ ID NO: 72084 - protein, 381 aa, Simplicispira sp.
  misc_feature (1)..(381): tr|A0A398C8R5|A0A398C8R5_9BURK S-adenosylmethionine:tRN A ribosyltransferase-isomerase OS=Simplicispira sp. NY- 02 OX=2315688 GN=queA PE=3 SV=1
MTSHLPDSTARAFTLSDFDFDLPPERIAQHPAPERSSSRLLDGRGNAPRDRIFRELPALLRDGDLLVFNDTRVVKARIFGEKDSGGKLELLIERVLTGHAGCEVVAHMKVSKKPPVGARIHLAGGMAAGGFDATLLSRWPDAEGPLFRFALHGPAGESAWELMERCGHLPLPPYIARDQASGHDADEAQDSERYQTVFARAPGAVAAPTAALHFDNAVLADLAERGVERASVTLHVGAGTFQPVKTENLAEHRMHAEWYSIPSATLAALERCRQRGGRVVAVGTTTVRTLESWAQSGLAEGETRIFITPGFAFQVVDLLLTNFHLPKSTLMMLVSAFAGYERVMALYRHAVAGQYRFFSYGDAMLLARSAAPASHPESTTE

SEQ ID NO: 72085 - protein, 363 aa, Simplicispira suum
  misc_feature (1)..(363): tr|A0A2S0MY59|A0A2S0MY59_9BURK S-adenosylmethionine:tRN A ribosyltransferase-isomerase OS=Simplicispira suum OX =2109915 GN=queA PE=3 SV=1
MTSSSPRNFTLADFDFQLPEALIAQHPCAERSASRLLDGTAGAPVDRIFRELPSLVLPGDLLVFNDTRVLKARLFGEKPTGGKAELLIERVLQGQEVVAHVKVSKKPPIGTMLQMAGGFHATLLGRWPDAQGPLFRFRLDGPASETPFELMERHGHMPLPPYIERQQQHENAGDAAEDERRYQTVFARVPGAVAAPTAALHFDDAVLAALAARGVERASVTLHVGAGTFQPVKTDNLAEHRMHAEWYSIPAETLAAIQRCRQRGGRVVAVGTTTVRTLESWAQSGQTEGETRIFITPGFAFQVVDLLLTNFHLPKSTLMMLVSAFAGYERVMALYRHAIAQGYRFFSYGDAMLLARRAPMALA

SEQ ID NO: 72086 - protein, 342 aa, Singulisphaera acidiphila
  misc_feature (1)..(342): tr|L0DF28|L0DF28_SINAD S-adenosylmethionine:tRNA ribosy ltransferase-isomerase OS=Singulisphaera acidiphila (st rain ATCC BAA-1392 / DSM 18658 / VKM B-2454 / MOB10) OX =886293 GN=queA PE=3 SV=1
MQTSNFDFTLPGELIAQHPVEPRDQSRLMVIRRQEQRWEHRTFAELPDLLNAGDIIVRNDTRVVPARLLGLREATGGRWEGLFLRALPEGTWEILATTRGRPVEGERVVVGQGLKLILEARGEAGRWIVRPESDEAVHDLLGRHGQVPLPPYIRKGREDPADRLRYQTLYARTPGAVAAPTAGLHFTEDVFRRLAERGVASVDATLHVGLGTFRPIEVERIDEHQLHAEWAELGVPAATLLSEHKRQGGRIIAVGTTSARILETSAITGTIQPFSGETALYLRPGHIFQGLDALLTNFHLPRSSLLVLVSALAGVDLIRAAYAEAIQERYRFYSYGDAMLIL

SEQ ID NO: 72087 - protein, 342 aa, Singulisphaera sp.
  misc_feature (1)..(342): tr|A0A1N6KRJ8|A0A1N6KRJ8_9BACT S-adenosylmethionine:tRN A ribosyltransferase-isomerase OS=Singulisphaera sp. GP 187 OX=1882752 GN=queA PE=3 SV=1
MQTSEFDFTLPGELIAQHPVEPRDQSRLMVIRRNEQRWEHRTFAELPDLLEASDILVRNNTRVVPARLIGLREATGGRWEGLFLRALPEGTWEILATTRGRPVEGERVVVGDGLKLTLEARGEAGRWIVRPESDEAAHDLLGRHGQIPLPPYIRKGREDPGDRLRYQTLYASAPGAVAAPTAGLHFTDDVFRRLAERGIASVDATLHVGLGTFRPIEVERIDEHRLHAEWAELGVLEATVLNKHKSQGGRIVAVGTTSARILETSSTTGTIRPFSGETALYLRPGHVFQGLDALLTNFHLPRSSLLVLVAALAGVDLVRAAYAEAIRERYRFYSYGDAMLIL

SEQ ID NO: 72088 - protein, 345 aa, Sinimarinibacterium flocculans
  misc_feature (1)..(345): tr|A0A318ED52|A0A318ED52_9GAMM S-adenosylmethionine:tRN A ribosyltransferase-isomerase OS=Sinimarinibacterium f locculans OX=985250 GN=queA PE=3 SV=1
MRRSDFDYELPPELIAQQPAAERSASRLLQVAPSGLADRQIRELPALLAPGDLLVFNDTRVIPARLFGVKPTGGRVEILVERVLESGRFLAQLGVSKKPRPGGEIRVGSDRLEVLGRDGDLFELRYHGADGVLDFLERAGRLPLPPYITHAPGAQDAERYQTVFAREPGAVAAPTAGLHFDDALLAALDARGIVRATLTLHVGAGTFQPVRVENLDEHRMHAERYRIDAALCAAIDAARERGGRVVAVGTTVARALESAALAQDAEGRVAPCSAETRLFITPGFRFRVVDRLLTNFHLPQSTLMMLVCAFGGYERLMSAYRHAVAQRYRFFSYGDAMLIERDAAA

SEQ ID NO: 72089 - protein, 353 aa, Sinimarinibacterium sp.
  misc_feature (1)..(353): tr|A0A4U0GQJ5|A0A4U0GQJ5_9GAMM S-adenosylmethionine:tRN A ribosyltransferase-isomerase OS=Sinimarinibacterium s p. CAU 1509 OX=2562283 GN=queA PE=3 SV=1
MRRSDFQYSLPEELIAQRPAEQRSNSRLLRVGPGALLQDRMIAELPELLDARDLLVFNDTRVIPARVFGHKPTGGRVEILVERILDERRFLAQLGVSKKPRAGTLIIVGEDRLEVLGRDDDLFELSYCDDGGVQAFLERAGQLPLPPYIRHQPDRADLERYQTVFAREPGAVAAPTAGLHFDPPLFERLAQRGIETAMLTLHVGAGTFQPVRVDDLSEHRMHAERFHVGAALCAKIEACRARGGRVVAVGTTVARALESAALAQATERTLSPASGETQLFITPGFHFRIVDVLLTNFHLPESTLLMLVSAFAGYERVMAAYRHAVEQRYRFFSYGDAMLIDPSEAGVNAEIAA

SEQ ID NO: 72090 - protein, 355 aa, Sinirhodobacter ferrireducens
  misc_feature (1)..(355): tr|A0A443LV39|A0A443LV39_9RHOB S-adenosylmethionine:tRN A ribosyltransferase-isomerase OS=Sinirhodobacter ferri reducens OX=1215032 GN=queA PE=3 SV=1
MKLEDFDFDLPEGLIATRPARPRTAAKLLLAEGDEIRDLHVADLVDLFRPGDRLVLNNTKVIPARLSGTRTRMTGQGEVTAKVEITLLEPQASGEWTALAKPLRKLKEGETIRFSDALSAEVRAIGAAQLRLAFNLTGPDFDAALAAAGAMPLPPYIAALRAPDEADKTDYQTVFARHSGAVAAPTASLHFTRELLEAIHAKGVAFTEVTLHVGAGTFLPVKVEDVETHKMHAEWGEVTAAAAEEINATRAAGGRIIPVGTTALRLIESAAAEDGTMRPFRGTTEIFIYPGYRFRVTDALMTNFHLPKSTLLMLVSALMGQDRIRAIYDHAVKSGYRFFSYGDASLLIPERRKSA

SEQ ID NO: 72091 - protein, 355 aa, Sinirhodobacter hungdaonensis
  misc_feature (1)..(355): tr|A0A3S3NBX2|A0A3S3NBX2_9RHOB S-adenosylmethionine:tRN A ribosyltransferase-isomerase OS=Sinirhodobacter hungd aonensis OX=2501515 GN=queA PE=3 SV=1
MKLEDFDFDLPEGLIATRPARPRTAAKLLLAEGDRIRDLHVADLVDLFRPGDRLVLNNTKVIPARLSGTRTRMTGQGEVTAKVEITLLEPQASGEWTALAKPLRKLKEGETIRFSDALSAEVRAIEAAQLRLAFNLSGPDFDAALAAAGAMPLPPYIAALRAPDEADKTDYQTVFARHSGAVAAPTASLHFTMPLLEAIHAKGVAFTEVTLHVGAGTFLPVKVEDVETHKMHSEWGEVTAAAAAEINATRAAGGRIIPVGTTALRLIESAAAGDGTMRPFRGTTEIFIYPGYRFRVTDALMTNFHLPKSTLLMLVSALMGQDRIRAIYDHAVKSGYRFFSYGDASLLIPERRKSA

SEQ ID NO: 72092 - protein, 354 aa, Sinirhodobacter populi
  misc_feature (1)..(354): tr|A0A443KA62|A0A443KA62_9RHOB S-adenosylmethionine:tRN A ribosyltransferase-isomerase OS=Sinirhodobacter popul i OX=2306993 GN=queA PE=3 SV=1
MKLEDFDFDLPEGLIATRPARPRTAARLLLAEGDAIRDLHVSDLVDLFRPGDRLILNNTKVIPARLAGVRERDTGQGRVSAKIEVTLLEPSADGCWSALAKPLRKLKEGETIRFSDALSAEVRGISDAQMKIAFNLTGTDFDAALAEAGAMPLPPYIAALRAPDEADKTDYQTVFARHSGAVAAPTASLHFTRELLEAIHAKGVDFTEVTLHVGAGTFLPVKVEDVETHKMHSEWGEVTEAAAAAINATKAAGGRVIPVGTTALRLIESAAGADGVMRPFRGTTDIFIYPGYRFRVTDALMTNFHLPKSTLLMLVSALMGRERIRAIYAHAVAQGYRFFSYGDASLLIPDRGEP

SEQ ID NO: 72093 - protein, 354 aa, Sinirhodobacter populi
  misc_feature (1)..(354): tr|A0A443KMP7|A0A443KMP7_9RHOB S-adenosylmethionine:tRN A ribosyltransferase-isomerase OS=Sinirhodobacter popul i OX=2306993 GN=queA PE=3 SV=1
MKLEDFDFDLPEGLIATRPARPRTAARLLLAEGDAIRDLHVSDLVDLFRPGDRLILNNTKVIPARLAGVRERDTGQGRVSAKIEVTLLEPSADGCWSALAKPLRKLKEGETIRFSDVLSAEVRGISDAQMKIAFNLTGTDFDAALAEAGAMPLPPYIAALRAPDEADKTDYQTVFARHSGAVAAPTASLHFTRELLEAIHAKGVDFTEVTLHVGAGTFLPVKVEDVETHRMHSEWGEVTEAAAAAINATKAAGGRVIPVGTTALRLIESAAGADGVMRPFRGTTDIFIYPGYRFRITDALMTNFHLPKSTLLMLVSALMGRERIRAIYAHAVAQGYRFFSYGDASLLIPDRGEP

SEQ ID NO: 72094 - protein, 347 aa, Sinobaca qinghaiensis
  misc_feature (1)..(347): tr|A0A419V3K3|A0A419V3K3_9BACL S-adenosylmethionine:tRN A ribosyltransferase-isomerase OS=Sinobaca qinghaiensis OX=342944 GN=queA PE=3 SV=1
MNVQDFDFELPEELIAQTPLLNRDRSRLMVVDPQSGEVEHRQFPEVKTFLQKGDALVINDTRVLPARLIGEKDTGAAIEILLLKQLEGDKWETLVKPAKKIKTGTVITFGGGKLTAECTELQEHGGRILQFSYEGVFLEILESLGEMPLPPYIKEKLEDQERYQTVYAENNGSAAAPTAGLHFTEDLLHELKEQGVHIVPLTLHVGLGTFRPVSVDSIEDHDMHSEFYELKQQAAETLNEVRRSGGTITAVGTTSARTLETIAGQNNGLFAAGSGWTNIFIYPGYSFSGIDALLTNFHLPKSTLVMLVSALAGKDTILNAYEEAVNNKYRFFSFGDAMFIKKGGGVT

SEQ ID NO: 72095 - protein, 346 aa, Sinobacteraceae bacterium
  misc_feature (1)..(346): tr|A0A2T5MIN0|A0A2T5MIN0_9GAMM S-adenosylmethionine:tRN A ribosyltransferase-isomerase OS=Sinobacteraceae bacte rium GT1R17 OX=2029166 GN=queA PE=3 SV=1
MTTHQRRSDFFYDLPPDLIAQHPVEPRSASRLLHLGTSGVADRAIADLPDLLQPGDLLVFNDTRVIPARLFGQKPTGGRVEILVERVLGDREIIAQVGASKTPKPGGEILVADAVFRMIDRADDMFRLSYEGEGEGDVLSFLERVGQMPLPPYIHHDPDQTDSERYQTVFAREPGAVAAPTAGLHFDESLLARIRERGIRTATLTLHVGAGTFQPMRVELLSEHKMHAERFEVSTELVTAIAQTRERGGRVVAVGTTVTRALESAAAQGTLHAGKGETQIFITPGYTFKVVDLLLTNFHLPESTLMMLVSAFGGYERLMAAYRHAVEARYRFFSYGDAMLIEPLRG

SEQ ID NO: 72096 - protein, 352 aa, Sinobacteraceae bacterium
  misc_feature (1)..(352): tr|A0A522J4Y3|A0A522J4Y3_9GAMM S-adenosylmethionine:tRN A ribosyltransferase-isomerase OS=Sinobacteraceae bacte rium OX=1969813 GN=queA PE=3 SV=1
MLRSDFDYALPLELIAQHPPEVRGTSRLLCVDEAGLRDRHMGEFPAELRAGDLLVLNDTRVIPARLHGRKASGGKVEVMIERYTGTHTAVAQLRVSKSPHAGTELVVDGARLAVEGREHDMYRLRLVAGADSFDALLARAGEVPLPPYITHTPDAADVARYQTVYAKNPGAVAAPTAGLHFTEALLQQVRDRGVDIGFTTLHVGAGTFQPVREDDVSHHHMHSERAFVSPALVAQVQAARARGGRVVAVGTTVVRSLEAAAVGGTLQPFHGETDLFIVPGFEFHVVDALLTNFHLPQSTLLMLVCAFAGYDRMLAAYRHAVAEEYAFFSYGDATWLPFRCDSKNAMKRSSSQ

SEQ ID NO: 72097 - protein, 362 aa, Sinobacterium caligoides
  misc_feature (1)..(362): tr|A0A3N2DZZ1|A0A3N2DZZ1_9GAMM S-adenosylmethionine:tRN A ribosyltransferase-isomerase OS=Sinobacterium caligoi des OX=933926 GN=queA PE=3 SV=1
MKLSDFHFELPDELIARYPTEQRSASRLLRLHGEDSGRLEHLGFTDLLAQVDAGDLLVFNDTRVIPARLYGQKASGGKLEILVERVLDEHSVLCHLRSSRSPKPGAEILLGTDRDAAVTATVVARHDALFELRFDDDRSVFKLLQQLGHMPLPPYIDRPDETADGERYQTVYSDSNKEGAVAAPTAGLHFDEAMLAALQQKGVQLAFVTLHVGAGTFQPVKVDNILEHHMHAEYIEVSAEVAEQVKATHARGSRVIAVGTTSVRCLESAASKNGGIIAPYSGDTDIFIYPGYEFAVVDALLTNFHLPESTLIMLVSALAGREQVMQAYDVAVQEGYRFFSYGDAMFVTPIQPSRGFREHQQQ

SEQ ID NO: 72098 - protein, 349 aa, Sinomicrobium oceani
  misc_feature (1)..(349): tr|A0A1K1R632|A0A1K1R632_9FLAO S-adenosylmethionine:tRN A ribosyltransferase-isomerase OS=Sinomicrobium oceani OX=1150368 GN=queA PE=3 SV=1
MKLSHFNFDLPKELLAEYPSENRDEARLMVVHRKDGTIEHKMFKDLIDYFEEGDVMVLNNTKVFPARLYGNKEKTGARIEVFLLRELNEEQRLWDVLVDPARKIRIGNKLYFGDDESLVAEVIDNTTSRGRTLRFLYDGSYEDFRRKLKELGETPLPKYIKREVEPEDEERYQTIYAKYEGAVAAPTAGLHFSKHLLKRLEIKGTKFAEVTLHVGLGTFNPVEVEDLSKHKMDSEELLIPESATRVVNEAKRNKKKVCAIGTTVMRALESSVSSERLLNSYEGWTNKFIFPPYDFSIADSMVTNFHTPKSTLLMMVSAFAGHDLIKKAYEEAVKEKYKFYSYGDAMLIL

SEQ ID NO: 72099 - protein, 349 aa, Sinomicrobium pectinilyticum
  misc_feature (1)..(349): tr|A0A3N0E4N3|A0A3N0E4N3_9FLAO S-adenosylmethionine:tRN A ribosyltransferase-isomerase OS=Sinomicrobium pectini lyticum OX=1084421 GN=queA PE=3 SV=1
MKLSHFNFDLPKELLAEYPSENRDEARLMVVNRKDGTIEHKMFKDLIDYFDEGDVMVLNNTKVFPARLYGNKEKTGARIEVFLLRELNEEQRLWDVLVDPARKIRIGNKLYFGDDESLVAEVIDNTTSRGRTLRFLYDGSYEDFRQKLKELGETPLPKYIKREVEPEDEERYQTIYAKYEGAVAAPTAGLHFSKHLLKRLEIKGARFAEVTLHVGLGTFNPVEVEDLSKHKMDSEELLIPEEATRIVNEAKRNKKKVCAIGTTVMRALESSVSSEKLLNPYEGWTNKFIFPPYDFSIADCMVTNFHTPKSTLLMMVSAFAGHDLIKKAYEEAVKEKYKFYSYGDAMLIL

SEQ ID NO: 72100 - protein, 349 aa, Sinomicrobium sp.
  misc_feature (1)..(349): tr|A0A329N051|A0A329N051_9FLAO S-adenosylmethionine:tRN A ribosyltransferase-isomerase OS=Sinomicrobium sp. N-1 -3-6 OX=2219864 GN=queA PE=3 SV=1
MKLSHFNFDLPKELLAEYPSENRDEARLMVVHRKDGTVEHKMFKDLIDYFDEGDVMVLNNTKVFPARLYGNKEKTGARIEVFLLRELNEEQRLWDVLVDPARKIRIGNKLYFGDDESLVAEVIDNTTSRGRTLRFLYDGSYEDFRRKLKELGETPLPKYIKRGVEPEDEERYQTIYAKHEGAVAAPTAGLHFSKHLLKRLEIKGVNFAEVTLHVGLGTFNPVEVEDLSKHKMDSEELTIPESATEVVNAAKRNKNKVCAVGTTVMRAMESSVSSERLLNPFDGWTNKFIFPPYDFSIADCMITNFHTPKSTLLMMVSAFAGHDLIKKAYEEAVKEKYKFYSYGDAMLIL

SEQ ID NO: 72101 - protein, 361 aa, Sinorhizobium americanum
  misc_feature (1)..(361): tr|A0A2S3YQ06|A0A2S3YQ06_9RHIZ S-adenosylmethionine:tRN A ribosyltransferase-isomerase OS=Sinorhizobium america num OX=194963 GN=queA PE=3 SV=1
MRVDLFDFDLPETSIALRPASPRDSARMLVVRPEAEPVLSDHGVLDLPAFLRPGDALVFNDTKVIPAQLEGIRQRGEDVATQVSLTLHMRVGPDRWKAFARPARRLKPGDRIGFGHGGTACLLGSLDATVEEKGEAGEVTLRFDLSGPVLDEAIMSVGHIPLPPYIASKRPEDARDRADYQTVYAREEGAVAAPTAGLHFTDRLFARLDEAGIERHFVTLHVGAGTFLPVKADDTDDHVMHEEIGHVDAATAERLNAVRARGGRIVCVGTTSLRLIESAATEEGQICPWSGPTGIFITPGYRFRAADMLMTNFHLPKSTLFMLVSAFAGLDTMRAAYVHAIAAGYRFYSYGDASLLFRKDQ

SEQ ID NO: 72102 - protein, 361 aa, Sinorhizobium americanum
  misc_feature (1)..(361): tr|A0A4R2BU76|A0A4R2BU76_9RHIZ S-adenosylmethionine:tRN A ribosyltransferase-isomerase OS=Sinorhizobium america num OX=194963 GN=queA PE=3 SV=1
MRVDLFDFDLPETSIALRPASPRDSARMLVVRPEAEPVLSDHGVLDLTSFLRPGDALVFNDTKVIPAQLEGIRRRGEDVATQVSLTLHMRVGPDRWKAFARPARRLKPGDRISFGHGGNACLLGSLDATVEEKGGAGEVTLRFDLSGPVLDEAIMSVGHIPLPPYIASKRPEDARDRADYQTLYAREEGAVAAPTAGLHFTDRLFGKLDEAGIERHFVTLHVGAGTFLPVKADDTDDHVMHEEIGHVDAATAERLNAVRARDGRIVCVGTTSLRLIESAATEEGQIRPWSGPTGIFITPGYRFRAVDMLMTNFHLPKSTLFMLVSAFAGLDTMRAAYAHAIAAGYRFYSYGDASLLFRKDQ

SEQ ID NO: 72103 - protein, 361 aa, Sinorhizobium fredii
  misc_feature (1)..(361): tr|A0A2U8G260|A0A2U8G260_RHIFR S-adenosylmethionine:tRN A ribosyltransferase-isomerase OS=Sinorhizobium fredii CCBAU 45436 OX=1128331 GN=queA PE=3 SV=1
MRVDLFDFDLPETSIALRPASPRDSARMLVVRPEAEPVLSDHGVLDLPSFLRPGDALVFNDTKVIPAQLEGIRRRGEDVATQVSLTLHMRVAPDRWKAFARPARRLKPGDRISFGHGGNACLLGSLDATVEDKGEAGEVTLRFDLSGPVLDEAIMSVGHIPLPPYIASKRPEDSRDRTDYQTVYAREEGAVAAPTAGLHFTDRLFAELDEAGIERHFVTLHVGAGTFLPVKADDTDNHVMHEEIGHVDAATAERLNAVRARGGRIVCVGTTSLRLIESAATQDGKIHPWSGPTGIFITPGYRFRAVDMLMTNFHLPKSTLFMLVSAFAGLETMRGAYAHAIAAGYRFYSYGDASLLFRKDQ

SEQ ID NO: 72104 - protein, 361 aa, Sinorhizobium fredii
  misc_feature (1)..(361): tr|A0A249PST8|A0A249PST8_RHIFR S-adenosylmethionine:tRN A ribosyltransferase-isomerase OS=Sinorhizobium fredii CCBAU 83666 OX=1128334 GN=queA PE=3 SV=1
MRVDLFDFDLPETSIALRPASPRDSARMLVVRPEAEPVLCDHGVLDLPSFLRPGDALVFNDTKVIPAQLEGIRRRGEDVATQVSLTLHMRVAPDRWKAFARPARRLKPGDRISFGHGGNACLLGSLDATVEDKGEAGEVTLRFDLSGPVLDEAIMSVGHIPLPPYIASKRPEDSRDRTDYQTVYAREEGAVAAPTAGLHFTDRLFAELDEAGIERHFVTLHVGAGTFLPVKADDTDNHVMHEEIGHVDAATAERLNAVRARGGRIVCVGTTSLRLIESAATQDGKIHPWSGPTGIFITPGYRFRAVDMLMTNFHLPKSTLFMLVSAFAGLETMRGAYAHAIAAGYRFYSYGDASLLFRKDQ

SEQ ID NO: 72105 - protein, 360 aa, Sinorhizobium medicae
  misc_feature (1)..(360): sp|A6U8Y7|QUEA_SINMW S-adenosylmethionine:tRNA ribosylt ransferase-isomerase OS=Sinorhizobium medicae (strain W SM419) OX=366394 GN=queA PE=3 SV=1
MRVDLFDFDLPEDSVALRPASPRDSARMLVVRPGGEPVLEDRGVLDLPSFLRQGDALVFNDTKVIPAQLEGVRYRGEHISTPVSLTLHMRVAPDRWKAFARPARRLKPGDRVSFGHGGNACLLGSLDAMVEEKGDAGEVTLRFDLSGPSLDEAIMSVGHIPLPPYIASKRADDARDRTDYQTVYAREEGAVAAPTAGLHFTDRLFAMLDEAGIERHFVTLHVGAGTFLPVKADDTDDHVMHEEIGHVDAVTAAKLNAVRERGGRVVCVGTTSLRLVESAAAEDGTIHAWSGATGIFITPGYRFRAAHMLMTNFHLPKSTLFMLVSAFAGLETMRDAYAHAIATGYRFYSYGDSSLLFRKD

SEQ ID NO: 72106 - protein, 360 aa, Sinorhizobium medicae; identical to SEQ ID NO: 72105
  misc_feature (1)..(360): tr|A0A508WXI2|A0A508WXI2_9RHIZ S-adenosylmethionine:tRN A ribosyltransferase-isomerase OS=Sinorhizobium medicae OX=110321 GN=queA PE=3 SV=1

SEQ ID NO: 72107 - protein, 360 aa, Sinorhizobium meliloti; identical to SEQ ID NO: 71302
  misc_feature (1)..(360): tr|H0G0K8|H0G0K8_RHIML S-adenosylmethionine:tRNA ribosy ltransferase-isomerase OS=Sinorhizobium meliloti CCNWSX 0020 OX=1107881 GN=queA PE=3 SV=1

SEQ ID NO: 72108 - protein, 360 aa, Sinorhizobium meliloti
  misc_feature (1)..(360): tr|A0A0E0UBW9|A0A0E0UBW9_SINMB S-adenosylmethionine:tRN A ribosyltransferase-isomerase OS=Sinorhizobium melilot i (strain BL225C) OX=698936 GN=queA PE=3 SV=1
MRVDLFDFDLPENSIALRPASPRDSARMLVVRPDGAPVFEDRGVLDLPSFLRPGDALVFNDTKVIPAQLEGVRYRGEDISTPVSLTLHMRVAPSRWKAFARPARRLKPGDRISFGHGGSACLLGSLEAVVEEKGDAGEVTLRFDLSGPSLDEAIMAVGHIPLPPYIASKRADDERDRTDYQTVYAREEGAVAAPTAGLHFTDRLFAKLDEGGIERYFVTLHVGAGTFLPVKADDTADHVMHEEIGHVDPVTAAKLNAVRERGGRIVCVGTTSLRLIESAAAEDGNIRPWSGATGIFITPGYRFRAVDMLMTNFHLPKSTLFMLVSAFAGLETMHAAYAHAIATGYRFYSYGDSSLLFRKD

SEQ ID NO: 72109 - protein, 360 aa, Sinorhizobium saheli
  misc_feature (1)..(360): tr|A0A178YLW0|A0A178YLW0_SINSA S-adenosylmethionine:tRN A ribosyltransferase-isomerase OS=Sinorhizobium saheli OX=36856 GN=queA PE=3 SV=1
MRVDLFDFDLPETSIALRPASPRDSARMLVVRPQGEPVLSDHGVLDLPSFLRPGDALIFNDTKVIPAQLEGIRRRGEDISTPVSLTLHMRVAPDRWKAFARPARRLKPGDRIGFGHGGNACLLGSLDSTVEEKGDAGEVTLRFDLSGPVLDEAIMAVGHVPLPPYIASKRADDARDRADYQTIYAREEGAVAAPTAGLHFTERLFARLDEAGVERHFVTLHVGAGTFLPVKADDTDDHVMHEEIGHVDAATAEKLNAVRARGGRIVCVGTTSLRLIESAATKEGKILPWSGPTGIFITPGHRFRAVDMLMTNFHLPRSTLFMLVSAFAGLDTMRAAYAHAIATGYRFYSYGDSSLLFRKD

SEQ ID NO: 72110 - protein, 360 aa, Sinorhizobium sp.
  misc_feature (1)..(360): tr|A0A2N8JT45|A0A2N8JT45_9RHIZ S-adenosylmethionine:tRN A ribosyltransferase-isomerase OS=Sinorhizobium sp. M4_ 45 OX=2037901 GN=queA PE=3 SV=1
MRVDLFDFDLPENSIALRPASPRDSARMLIVRPDGEPVLEDRGVLDLPSFLRPGDALVFNDTKVIPAQLEGVRYRGEDISTPVSLTLHMRVAPSRWKAFARPARRLKPGDRISFGHGGNACLLGSLEAVVEEKGDAGEVTLRFDLSGPSLDEAIMAVGHIPLPPYIASKRADDARDRTDYQTVYAREEGAVAAPTAGLHFTDRLFASLDEAGIERYFVTLHVGAGTFLPVKADDTADHVMHEEIGHVDPVTAAKLNAVRERGGRIVCVGTTSLRLIESAAAEDGSIRPWSGATGIFITPGYRFRAVDMLITNFHLPRSTLFMLVSAFAGLETMHAAYAHAIATGYRFYSYGDSSLLFRKD

SEQ ID NO: 72111 - protein, 359 aa, Sinorhizobium sp.
  misc_feature (1)..(359): tr|A0A2A6MKW7|A0A2A6MKW7_9RHIZ S-adenosylmethionine:tRN A ribosyltransferase-isomerase OS=Sinorhizobium sp. NG0 7B OX=1538174 GN=queA PE=3 SV=1
MRVDLFDFDLPETSIALRPASPRDSARMLVVRPEPVLSDHGVLDLPAFLRPGDALVFNDTKVIPAQLEGIRQRGEDVATQVSLTLHMRVGPDRWKAFARPARRLKPGDRIGFGHGGTACLLGSLDATVEEKGEAGEVTLRFDLSGPVLDEAIMSVGHIPLPPYIASKRPEDARDRADYQTVYAREEGAVAAPTAGLHFTDRLFARLDEAGIERHFVTLHVGAGTFLPVKADDTDDHVMHEEIGHMDAATAERLNAVRARGGRIVCVGTTSLRLIESAATEEGQIRPWSGPTGIFITPGYRFRAADMLMTNFHLPKSTLFMLVSAFAGLDTMRAAYVHAIAAGYRFYSYGDASLLFRKDQ

SEQ ID NO: 72112 - protein, 407 aa, Siphonobacter aquaeclarae
  misc_feature (1)..(407): tr|A0A1G9XFF3|A0A1G9XFF3_9BACT S-adenosylmethionine:tRN A ribosyltransferase-isomerase OS=Siphonobacter aquaecl arae OX=563176 GN=queA PE=3 SV=1
METVPIADFTYDLPDDRIARFPLAERDQSRLLVYRGGAIRHGHFTDLPAELPEGSLLVFNNTKVIPARLFFRKQTGALIELFLLHPVEPTPVIQLAMEVSGSAVWECLIGNRKRWKGGEILVSEIPDGGGSFPLSAQQVDDTHVRLSWDAALPFAEVVQRAGKIPLPPYLDREAEESDLTTYQTVYSEKKGAVAAPTAGLHFTDRVFAALAERGVGTEFLTLHVGAGTFRPVKTENALEHRMHGEQIVVRAANLRKLITETCIIAVGTTSLRTLESLYWLGVQLLSGELAGLSDGFYIEQFVHRKERVALPTYPDAFRAILSHLEAAGREEVTGETGIMIYPGYTFRVIKGLVTNFHQPGSTLMLLVAALVGDDWKRIYSEALEGNYRFLSYGDSSLLWPSGTIFNQ

SEQ ID NO: 72113 - protein, 351 aa, Siphonobacter aquaeclarae
  misc_feature (1)..(351): tr|A0A1G9NL39|A0A1G9NL39_9BACT S-adenosylmethionine:tRN A ribosyltransferase-isomerase OS=Siphonobacter aquaecl arae OX=563176 GN=queA PE=3 SV=1
MKLSEFKFDLPQNLIALYPAERGESRLMVVNRQTRQIEHRQFGDIASYFGDGDTMVVNDTKVFPARLYGSKEKTGAKIEVFLLRELNREHRLWDVLVDPARKIRVGNKLYFGDSDLVAEVIDNTTSRGRTIRFLYDGDHSALMKAIHELGETPLPEEIKNRRKATEEDRERYQTIFADDNKVGAVAAPTAGLHFTKNIVKRMEINGTRFTPITLHVGLGTFRQVDVEDLTKHKTDSEPYFIPGGTADIVNDSLDHNKRVCSIGTTVLKTLESSVSANSRLKASEGWTDRFIFPPYDFKISNSLLTNLHLPESVLLMSVCAFGGYDLVMTAYEQAIKEKYKFFSYGDAMLIL

SEQ ID NO: 72114 - protein, 401 aa, Siphonobacter curvatus
  misc_feature (1)..(401): tr|A0A2S7INH6|A0A2S7INH6_9BACT S-adenosylmethionine:tRN A ribosyltransferase-isomerase OS=Siphonobacter curvatu s OX=2094562 GN=queA PE=3 SV=1
MQHLPIADFTYELPDEQIARFPLPVRDESRLLVYRKGTIEHRKFRSLTEELTSDTLLVFNNTRVIPARLHFQRQTGALIELFLLHPVEPSPVIPVVMEETQACVWECMIGNRKRWKAGERLQKEVEINGQSVLLTAELTNAEQSLVRLSWSQPVRFVDVVQAIGKIPLPPYLKREAETSDEQTYQTVYSEKEGAVAAPTAGLHFTDRVFAGLEAKGIRREFLTLHVGAGTFQPVKTENALEHKMHGEQLVITRSNLEHLQAANRIIPVGTTSMRSLESMYWLGVQLIHKEYTSLEQGFRIPQFVHQQYTELPTLHESLAAIVQQMEVEERQEIVGETEIMIFPGYTFRVCQGLVTNFHQPGSTLLLLIAALVGGNWKRIYDEALTQQYRFLSYGDSSLLLP

SEQ ID NO: 72115 - protein, 351 aa, Siphonobacter curvatus
  misc_feature (1)..(351): tr|A0A2S7IKY8|A0A2S7IKY8_9BACT S-adenosylmethionine:tRN A ribosyltransferase-isomerase OS=Siphonobacter curvatu s OX=2094562 GN=queA PE=3 SV=1
MKLSEFKFDLPQNLIALHPAERGDARLMVVNRQTKQIEHRKFGDIVSYFGDGDTMVVNDTKVFPARLYGSKEKTGAQIEVFLLRELNREHRLWDVLVDPARKIRVGNKLYFGDSDLVAEVIDNTTSRGRTIRFLYDGDHSALMKAIHELGETPLPEEIKNRRKTTDEDRERYQTIFADDNKVGAVAAPTAGLHFTKNIVKRMEINGTQFTPITLHVGLGTFRQVDVEDLTKHKTDSEPYFIPPATAEVVNASLDANKRVCSVGNTVLKTLESSVSANARLKPSEGWTDRFIFPPYDFKISNALLTNLHLPESVLLMGVCAFGGYDLVMQAYEIAMKEKYKFFSYGDLMLIL

SEQ ID NO: 72116 - protein, 351 aa, Siphonobacter sp.
  misc_feature (1)..(351): tr|A0A2N7BF09|A0A2N7BF09_9BACT S-adenosylmethionine:tRN A ribosyltransferase-isomerase OS=Siphonobacter sp. BAB -5405 OX=1864825 GN=queA PE=3 SV=1
MKLSEFKFDLPQNLIALHPAERGDSRLMVVNRQTKQIEHRKFGDIVSYFGDGDTMVVNDTKVFPARLYGSKEKTGAQIEVFLLRELNREHRLWDVLVDPARKIRVGNKLYFGDSDLVAEVIDNTTSRGRTIRFLYDGDHSALMKAIHELGETPLPEEIKNRRKTTDEDRERYQTIFADDNKVGAVAAPTAGLHFTKNIVKRMEINGTQFTPITLHVGLGTFRQVDVEDLTKHKTDSEPYFIPPVTAEVVNASLDANKRVCSVGNTVLKTLESSVSANSRLKPSEGWTDRFIFPPYDFKISNALLTNLHLPESVLLMGVCAFGGYDLVMQAYEIAMKEKYKFFSYGDLMLIL

SEQ ID NO: 72117 - protein, 401 aa, Siphonobacter sp.
  misc_feature (1)..(401): tr|A0A261Q3E2|A0A261Q3E2_9BACT S-adenosylmethionine:tRN A ribosyltransferase-isomerase OS=Siphonobacter sp. BAB -5385 OX=1864822 GN=queA PE=3 SV=1
MQHLPIADFTYELPDEQIARFPLPVRDESRLLVYRKGTIEHRQFRGLTEELASDTLLVFNNTRVIPARLHFQRQTGALIELFLLHPVEPSPVIPVVMEETQACVWECMIGNRKRWKAGERLQKEVEIDGQAVVLTAELTDTERSLVRLSWSVPVRFVDVVQGIGKIPLPPYLKREAEASDEQTYQTVYSEKEGAVAAPTAGLHFTDRVFAELEAKGVRREFLTLHVGAGTFQPVKTENALEHKMHGEQLVITRSNLEHLQAANRIIPVGTTSMRSLESMYWLGVQLIHDEYASLEQGFRIPQFVHEQYTELPTVHESLAAILQKMEAEQRQEIVGETEIMIFPGYTFRVCQGLITNFHQPGSTLLLLIAALVGKDWKRIYDEALDQQYRFLSYGDSSVLLP

SEQ ID NO: 72118 - protein, 344 aa, Skermanella aerolata
  misc_feature (1)..(344): tr|A0A512DQA4|A0A512DQA4_9PROT S-adenosylmethionine:tRN A ribosyltransferase-isomerase OS=Skermanella aerolata OX=393310 GN=queA PE=3 SV=1
MRTADFDFELPPELIADEPARPRDAARLLEVQCGALADRHVRDLPGLLMPGDLLVYNDTRVIPARLTGKRGEVRVEATLHKREGADTWHVFAKPGKRLRVGDTIVFASDLSAEVMEKRETGDIALRFSVAGADLMAALHRHGVMPLPPYIHRPDGASAKDADDYQTVFAAREGAVAAPTAGLHFTPELLTRLDERGIRRVPVTLHVGAGTFLPVKVDDIRDHRMHAEWGEISEDTARAIRDTRRAGGRIVSIGTTSLRLLETAAADDGTIGPFSGDTDIFITPGFRFKAVDLLLTNFHLPRSTLFMLVSAFAGMERMRAAYAHAISSGYRFYSYGDTSLIGRAP

SEQ ID NO: 72119 - protein, 344 aa, Skermanella aerolata; identical to SEQ ID NO: 72118
  misc_feature (1)..(344): tr|A0A0D2UKN3|A0A0D2UKN3_9PROT S-adenosylmethionine:tRN A ribosyltransferase-isomerase OS=Skermanella aerolata KACC 11604 OX=1385368 GN=queA PE=3 SV=1

SEQ ID NO: 72120 - protein, 345 aa, Skermanella stibiiresistens
  misc_feature (1)..(345): tr|W9H113|W9H113_9PROT S-adenosylmethionine:tRNA ribosy ltransferase-isomerase OS=Skermanella stibiiresistens S B22 OX=1385369 GN=queA PE=3 SV=1
MRTADFDFELPPDRIADQPASPRDASRLLHVGRTLADMRARDLPDLLDPRDLLVYNDTRVIPARLTGRRGEVKVEVTLHKREGADLWLAFCKPGKRLRVGDTIAFAPDLSAQVLDKRESGDVELRFSVGGSELMAALHRHGVMPLPPYIRRPDGALPDDDRNYQTVFAAREGAVAAPTAGLHFTPDLLARLDARGIRRMPVTLHVGAGTFLPVKVDDIRDHRMHSEWGEIGPDTARAIADTRKAGGRIVAVGTTSLRLLETAAAEDGTLAPFSGDTDIFITPGYRFKIVDLLLTNFHLPRSTLFMLVSAFAGLDRMRAAYAHAIASEYRFYSYGDTSLLEKVPQE

SEQ ID NO: 72121 - protein, 338 aa, Skermania sp.
  misc_feature (1)..(338): tr|A0A554V6W6|A0A554V6W6_9ACTN S-adenosylmethionine:tRN A ribosyltransferase-isomerase OS=Skermania sp. ID1734 OX=2597516 GN=FOS14_04420 PE=3 SV=1
MMDFALPPELQAAGPPESRGLARDEVRLLVSDTAGLTHAVFRELPTFLRPDDIVVVNNSATLSAAVDARLGEAAVVVHFSTWLDDGSWVIEVRTTDGRPVPWHILDIGTELRLSGGATAVLRQPWLPPARRLWTADIDVAIPAYLARHGRPITYAYLRQRWSAQYYQTAFGTVAGSAEMPSAGRPFTAELVARLVSTGIAVTPITLHCGVSSPETGEPPSPERFAVSQQTADRVNATRAAGGRVIAIGTTVTRALESATGSDGIVHAASGWTDVVLGPQRPAHVVDGLVTGWHAPGASHLDLLEAVAGAEVVRDAYAAALDAGYLWHEFGDSALLVRY

SEQ ID NO: 72122 - protein, 361 aa, Slackia equolifaciens
  misc_feature (1)..(361): tr|A0A3N0AT23|A0A3N0AT23_9ACTN S-adenosylmethionine:tRN A ribosyltransferase-isomerase OS=Slackia equolifaciens OX=498718 GN=queA PE=3 SV=1
MKTEDFDYDLPERCIAQEPAAVRDACKMLVMDRKTGALEDRIFRDIYDYLQPGDVLVANDTRVMPARLLGAKRGTGGQAEVFLLRERFDRELKTGSSAVWDVLVRPGKRLKPGSGAIVDFTDAAGEVALSAEIIDWGDDEGKGERVARLTTPRASLDEALHAVGHTPLPPYIKGYAGDEEMYQTVYSNEEKSAAAPTAGLHFTPELIERLKAKGVEWRTVELEVGLDTFRIVDEDDPLQHKMHTELYTVSQEVVDACDAAHARGNRVIAVGTTSVRSLESAFDRELGRLRARQHEATSLYILPGYEFGVVDALITNFHVPRSTLMMLVSAFSTRDNVMAAYRHAIENDYRMLSFGDAMFIH

SEQ ID NO: 72123 - protein, 359 aa, Slackia exigua
  misc_feature (1)..(359): tr|D0WG61|D0WG61_SLAES S-adenosylmethionine:tRNA ribosy ltransferase-isomerase OS=Slackia exigua (strain ATCC 7 00122 / DSM 15923 / CIP 105133 / JCM 11022 / KCTC 5966 / S-7) OX=649764 GN=queA PE=3 SV=1
MRTDDFDYDLPERCIAQEPAPVRDACRLLVMDRETGALADRIFRDIEGYLNPGDLLVANSTRVMPARLLGHKRTTGGEAEVFLLRERFDVEPKADASAVWDVLVRPGKRLKPGAIVDFVDGEGAVALSAEIIDWGLEGGKGERIARLSTERPSLDEALHAVGRTPLPPYIKHYAGDEEMYQTVYSHDEKSAAAPTAGLHFTPELIERLRAKGVAWKTVELEVGLDTFRIVDEDDPTQHTMHTEHYTVSQEVVDACDACHARGGRVFAVGTTSVRSLESAFDRETGRLHARDHEATSLYILPGFEFGVVDGLITNFHVPRSTLMMLVSAFSTCENVRAAYRHAIESGYRMLSFGDAMLFI

SEQ ID NO: 72124 - protein, 361 aa, Slackia faecicanis
  misc_feature (1)..(361): tr|A0A3N0AFF6|A0A3N0AFF6_9ACTN S-adenosylmethionine:tRN A ribosyltransferase-isomerase OS=Slackia faecicanis OX =255723 GN=queA PE=3 SV=1
MRTDDFDYELPERCIAQEPAPVRDACKMLAMDRATGAIEDRIFRDIYDYLQPGDVLVANDTRVLPARLLGAKRGTGGAAEVFLLRERFDVEPKTDSSAIWEVLVRPGKRLKPGSGAVVDFTDAEGNVALSAEVIGWGADEGRGERLVRLTTPLDSLDAALHAVGHTPLPPYIKGYAGDEEMYQTVFSREEKSAAAPTAGLHFTPELIERLREKGVEWRTVELEVGLDTFRVVDEDDPEKHTIHTEFYTVSQDVIDACDAAHARGNRVIAVGTTSVRSLESAYDRELGRMRARDREATSLYILPGYEFGVVDALITNFHVPRSTLMMLVSAFSTRENIMAAYKHAIENDYRMLSFGDAMLIH

SEQ ID NO: 72125 - protein, 361 aa, Slackia heliotrinireducens
  misc_feature (1)..(361): tr|C7N4D9|C7N4D9_SLAHD S-adenosylmethionine:tRNA ribosy ltransferase-isomerase OS=Slackia heliotrinireducens (s train ATCC 29202 / DSM 20476 / NCTC 11029 / RHS 1) OX=4 71855 GN=queA PE=3 SV=1
MRTDDFDYELPPERIAQEPWPVRDECRLLVMDRKTGEVTDRIFRDVAEYLQPGDVLVANETRVLPARLLGSKRGTGGACEVFLLRERFDVEPKTTHTAVWDVLVRPGRRLKPGTGAMVDFEGPDGNVVLSAEIIDWGSDTGKGERIARLSTPLDSFDEALHAAGHTPLPPYIKGYAGDEEMYQTVYSQAETSAAAPTAGLHFTPELIGSLKAKGVEWHTVELQVGLDTFRVVDEDDPAQHAMHTEFYSVPQSVVDACDAAHARGNRVFAVGTTSVRSLESAFDRESGKLRARDHEATCLFILPGYTFGVVDGLITNFHVPRSTLMMLVSAFSTRENIMAAYKHAIDSEYRMLSFGDAMLIC

SEQ ID NO: 72126 - protein, 374 aa, Slackia isoflavoniconvertens
  misc_feature (1)..(374): tr|A0A3N0I9R5|A0A3N0I9R5_9ACTN S-adenosylmethionine:tRN A ribosyltransferase-isomerase OS=Slackia isoflavonicon vertens OX=572010 GN=queA PE=3 SV=1
MKTDDFDYDLPERCIAQEPAAVRDACKMLVMNRETGELEDRIFRDIIEYLEPGDVLVANETRVMPARLLGAKRGTGGQAEVFLLRQRMGTAADAYVATEGPDGALGSNQQAIWEVLVRPGKRLKPGSGAIVDFCDAEGNVALSAEIVDWGADSGRGERIARLTTSRPSLDEALHAVGHTPLPPYIKHYAGDEELYQTVYSRHESSAAAPTAGLHFTPELIERLRAKGIEWHTVELEVGLDTFRIVDEDDPEKHTIHTEFYTVPQETVDACDAAHARGNRVIAVGTTSVRSLESAYDRELGCLRARNREATSLYILPGYTFGVVDALVTNFHVPRSTLMMLVSAFSTRENIMAAYKHAIESDYRLLSFGDAMFIE

SEQ ID NO: 72127 - protein, 374 aa, Slackia isoflavoniconvertens
  misc_feature (1)..(374): tr|A0A369LEY9|A0A369LEY9_9ACTN S-adenosylmethionine:tRN A ribosyltransferase-isomerase OS=Slackia isoflavonicon vertens OX=572010 GN=queA PE=3 SV=1
MKTDDFDYDLPERCIAQEPAAVRDACKMLVMNRETGELEDRIFRDIIEYLEPGDVLVANETRVMPARLLGAKRGTGGQAEVFLLRQRMGTAADAYVATEGPDGALGSNQQAIWEVLVRPGKRLKPGSGAIVDFCDAEGNVALSAEIVDWGADSGRGERIARLTTTRPSLDEALHAVGHTPLPPYIKHYAGDEELYQTVYSRHESSAAAPTAGLHFTPELIERLRAKGVEWHTVELEVGLDTFRIVDEDDPEKHTIHTEFYTVPQETVDACDAAHARGNRVIAVGTTSVRSLESAYDRELGRLRARNREATSLYILPGYTFGVVDALVTNFHVPRSTLMMLVSAFSTRENIMAAYKHAIESDYRLLSFGDAMFIE

SEQ ID NO: 72128 - protein, 361 aa, Slackia piriformis
  misc_feature (1)..(361): tr|K0ZB28|K0ZB28_9ACTN S-adenosylmethionine:tRNA ribosy ltransferase-isomerase OS=Slackia piriformis YIT 12062 OX=742818 GN=queA PE=3 SV=1
MRTDDFDYELPERCIAQAPAPVRDACKMLAMDRKSGAIEDRIFRDIYDYLEPGDVLVANNTRVMPARLLGAKRGTGGAAEVFLLRERFDVEPKTGSSAVWEVLVRPGKRLKPGSGAVVDFCDKGGQVALSAEVIGWGADEGKGERLVRLTTPLGSLDDALHAVGHTPLPPYIKGYAGDEEMYQTVYSHNEKSAAAPTAGLHFTPELIERLREKGVEWHTVELEVGLDTFRVVDEEDPEKHTIHTEFYTVSQSVVDACDAAHARGNRVIAVGTTSVRSLESAYDRKEGRLRARDHEATSLYILPGYEFGVVDALITNFHVPRSTLMMLVSAFSTRENIMAAYQHAIEGDYRMLSFGDAMFIH

SEQ ID NO: 72129 - protein, 359 aa, Slackia sp.
  misc_feature (1)..(359): tr|J6IV40|J6IV40_9ACTN S-adenosylmethionine:tRNA ribosy ltransferase-isomerase OS=Slackia sp. CM382 OX=1111137 GN=queA PE=3 SV=1
MRTDDFDYDLPERCIAQEPAPVRDACRLLVMDRETGALADRIFRDIEGYLNPGDLLVANSTRVMPARLLGRKRTTGGEAEVFLLRERFDVEPKADASAVWDVLVRPGKRLKPGAIVDFVDGEGAVALSAEIIDWGLEGGKGERIARLSTERSSLDEALHAVGRTPLPPYIKHYAGDEEMYQTVYSHDEKSAAAPTAGLHFTPELIERLRAKGVAWKTVELEVGLDTFRIVDEDDPTQHTMHTEHYTVSQEVVDACDACHARGGRVFAVGTTSVRSLESAFDREAGRLRARDHEATSLYILPGFEFGVVDGLITNFHVPRSTLMMLVSAFSTCENVRAAYRHAIESGYRMLSFGDAMLFI

SEQ ID NO: 72130 - protein, 345 aa, Smithella sp.
  misc_feature (1)..(345): tr|A0A1V5DY05|A0A1V5DY05_9DELT S-adenosylmethionine:tRN A ribosyltransferase-isomerase OS=Smithella sp. PtaU1.B in162 OX=1811697 GN=queA PE=3 SV=1
MELKDFSYFLPEELIAQHPYPERDRSRMMRLERESGRISDYSFFQLPEFLQKDDVLVINNSRVIPARLFGKKPTGASLEILLLTKREETDTSSVWEVLLRPAKRLRENDIIVLSTDCEAKVLTRISEKKWLLCFSCTGNFENYLNNHGRAPLPPYIKRKNNDEQFVDDLERYQTIYAKHPGSIAAPTAGLHFSAEVMQALRKKGVQIAPVTLHVGYGTFLPITVNSVEDHAMEPEYYEINPEAVEIINNARRVIAVGTTATRTLESIADEKGLIKAQSGFTNLFIYPGHQFRRVNGLITNFHLPESSLFLLVCAFAGTDFIKKAYLHAVDNRYTFYSYGDCMLII

SEQ ID NO: 72131 - protein, 345 aa, Smithella sp.
  misc_feature (1)..(345): tr|A0A348W567|A0A348W567_9DELT S-adenosylmethionine:tRN A ribosyltransferase-isomerase OS=Smithella sp. OX=2053 614 GN=queA PE=3 SV=1
MELKDFSYFLPDELIAQHPCQKRDQSHLLVLDKKKEKMADFSFFQLPDFLQSGDVLVINDSRVIPARLFGKKPTGGILEILLLTRKTNEKDSQTWEALLRSAGKLQENDVIDLGNKCEAKVLARISDKKWLLEFFSPYGFEAYLNTYGRVPLPPYIKRKRNAESNITDRERYQTIYAKNPGSVAAPTAGLHFSADVLQTLQKKGIQIAPITLHVGYGTFMPVEVNEVEKHVLESEYYEISSESSQIINNARRAIAVGTTSTRTLESVAGNDGYIAAKSGATNCFIYPGYKFKRVDGLLTNFHLPQSSLFLLVCAFAGTDLIKKAYQHAVESRYLFYSYGDCMLII

SEQ ID NO: 72132 - protein, 343 aa, Sneathia amnii
  misc_feature (1)..(343): tr|A0A0E3UTV1|A0A0E3UTV1_9FUSO S-adenosylmethionine:tRN A ribosyltransferase-isomerase OS=Sneathia amnii OX=187 101 GN=queA PE=3 SV=1
MDIESFDFYLPKELIAQHGVEPRDHSRLLALNRKTGKIEHKHFYNLIDYLKKGDVMVINRTKVIPARLIGHKENGVVIECLLLKRLGLNKWEVLLKPAKRLKVGDTLTFLKDKLSLTLLEIKDDGNRVVEFHYEGVFEAILDELGELPLPPYIKEKLEDKNRYQTVYAKEGESVAAPTAGLHFTKELLEKIREKGVIIAEIYLTVGLGTFRPVQCKNIEDHVMHTEEYEVPKETAEQVNLAKKEGRRVVAIGTTSIRTLESSLNEKGELIAQKSSTGIFIYGDYNFKIVDAIVTNFHLPKSTLVMLISAFTGKDNLFNAYDIAVKEKYRFFSLGDAMYIGDNV

SEQ ID NO: 72133 - protein, 343 aa, Sneathiella sp.
  misc_feature (1)..(343): tr|A0A2E2QKM3|A0A2E2QKM3_9PROT S-adenosylmethionine:tRN A ribosyltransferase-isomerase OS=Sneathiella sp. OX=19 64365 GN=queA PE=3 SV=1
MKVDAFNFTLPPELIADRPAVPREAAKLLVVGKELEDHTVADLPGLLREGDLLVFNDTKVIPARLRGTRRSAKIEVTLHKNVSADGWHAFAKPAKKLKPSDIIRFSDDFTALVTEKFDGGEVALSFSASGPELMEKLMTYGEIPLPPYISSLRAVDEQDRSDYQTIFAKDEGAVAAPTAGLHFTEELLEQFRARGIGMVTTTLHVGAGTFLPVKVENTEDHRMHAEIGILTQATADAINEARAKGGRIVSVGTTSLRLLESAADASGTIHPFNGETDIFITPGYRFKAIDLLITNFHLPKSTLFMLVSAFSGLETMKAAYAHAIAEKYRFYSYGDCSLLYPKQ

SEQ ID NO: 72134 - protein, 343 aa, Sneathiella sp.
  misc_feature (1)..(343): tr|A0A2G1YYZ2|A0A2G1YYZ2_9PROT S-adenosylmethionine:tRN A ribosyltransferase-isomerase OS=Sneathiella sp. OX=19 64365 GN=queA PE=3 SV=1
MKVDAFDFVLPQELIADRPAVPREAARLLCVGEAISDRHVADLPDLLREGDLLVFNDTKVIPARLRGLRRSAKIEVTLHKNISADTWHAFAKPAKKLKPSDIIVFGDDFTALVAEKFDGGEVALAFSVAGPDLMEKLMLHGEIPLPPYISSMRPVDEQDRDDYQTIFAKDEGAVAAPTAGLHFTEDLMARFRARGVESVATTLHVGAGTFLPVKAEDTDDHKMHSEIGILTSAAASKINQCRENGGRIVAIGTTSLRLLESAADTNGIVHPFHRETDIFITPGYRFKAVDLLITNFHLPKSTLFMLVSAFSGMDKMHAAYAHAIDKKYRFYSYGDCSLLYPGS

SEQ ID NO: 72135 - protein, 375 aa, Snodgrassella alvi
  misc_feature (1)..(375): tr|X2H6G8|X2H6G8_9NEIS S-adenosylmethionine:tRNA ribosy ltransferase-isomerase OS=Snodgrassella alvi wkB2 OX=11 96094 GN=queA PE=3 SV=1
MADKGNMLLLRSLCKPAYNMSFAFFGHIYMHINDFDFDLPPELIAQHPPAERGSSRLLVALPGQSPADSEFIRLADYVAAGDVLVFNNTRVMKARLFGRKASGGQIEALIERVLDNHTALAHVRSSKSPKPGTELIFEGGLHAQMQARQGELFVLHFSGDKTVWELLEAHGHLPLPPYITRSADHDDDERYQTIYAKYEGAVAAPTAGLHFTDTILQQLRDKGVHLTEVTLHVGAGTFQPVRVENIAEHHMHSEWYDVSEEVVAEIEAAQARGNKIWAVGTTAVRALESAARSGKLQAGQGDTNIFITPGYEFKVIDRMITNFHLPKSTLLMLVSAFSGYDEIRAIYQHAIGAGYRFFSYGDAMLLGNLAKTKTE

SEQ ID NO: 72136 - protein, 346 aa, Snodgrassella alvi
  misc_feature (1)..(346): tr|A0A2N9XSH5|A0A2N9XSH5_9NEIS S-adenosylmethionine:tRN A ribosyltransferase-isomerase OS=Snodgrassella alvi OX =1196083 GN=queA PE=3 SV=1
MHINDFDFDLPPELIAQHPPAVRGSSRLLVALPGQQPADSEFTRLADYIAAGDVLVFNNTRVMKARLFGHKASGGQIEALIERVLDAHTALAHVRSSKSPKPGTELIFEGGMQAQMQARQGELFILHFAGEQTVWELLAAHGHLPLPPYITRSADNDDDERYQTVYAKHEGAVAAPTAGLHFTDTIMQQLRDKGVHLAEVTLHVGAGTFQPVRVENIAEHHMHSEWYDVSEKVVAEIEAAHARGNKVWAVGTTAVRALESAARSGKLQAGQGDTNIFITPGYQFKVIDRMITNFHLPKSTLLMLVSAFSGYDEIRAIYQHAIAAGYRFFSYGDAMLLGNLAQTKTE

SEQ ID NO: 72137 - protein, 346 aa, Snodgrassella sp.
  misc_feature (1)..(346): tr|A0A1C4AU26|A0A1C4AU26_9NEIS S-adenosylmethionine:tRN A ribosyltransferase-isomerase OS=Snodgrassella sp. R-5 3583 OX=1798181 GN=queA PE=3 SV=1
MHINDFDFDLPPELIAQHPPAVRGSSRLLVALPGQQPADSEFTRLADYIAAGDVLVFNNTRVMKARLFGHKASGGQIEALIERVLDAHTALAHVRSSKSPKPGTELIFEGGMHAQMQARQGELFILHFAGEQTVWELLAAHGHLPLPPYITRSADNDDDERYQTVYAKHEGAVAAPTAGLHFTDTIMQQLRDKGVHLAEVTLHVGAGTFQPVRVENIAEHHMHSEWYDVSEKVVAEIEAAHARGNKVWAVGTTAVRALESAARSGKLQAGQGDTNIFITPGYQFKVIDRMITNFHLPKSTLLMLVSAFSGYDEIRAIYQHAIAAEYRFFSYGDAMLLGNLAQTKTE

SEQ ID NO: 72138 - protein, 361 aa, Snowella sp.
  misc_feature (1)..(361): tr|A0A2W7B943|A0A2W7B943_9CYAN S-adenosylmethionine:tRN A ribosyltransferase-isomerase OS=Snowella sp. OX=21641 31 GN=queA PE=3 SV=1
MNPNELLSSYDYTLPPELIAQSPVIPRDSSRLLVIQTSTHHHHQRFYDLPQYLEPNDLLVLNNTRVIPARLYGQKSTGTSVEILLLEEKSPDRWLALVKPGKKLKVGSEITFYPSQTSDPNLTLTATVLERDSETGGRILQFFPPSGTSFWDILEQFGEIPFPPYVTQSEAQADQYQTIYAQEPGAVAAPTAGLHFTDELLENLANKGIQTAQITLHVGVGTFRPVETENIREHTMHQEWIEVPQITVDKILATKAKGGRIIAIGTTSVRALEGAAQANLPELLTAYRGKTNLFIYPGYQWQIVDGLITNFHLPKSSLLMLVSALIGRERLLSLYQEAIQENYRFYSFGDAMLILPTARRS

SEQ ID NO: 72139 - protein, 353 aa, Sodalis glossinidius
  misc_feature (1)..(353): tr|A0A193QGX6|A0A193QGX6_SODGM S-adenosylmethionine:tRN A ribosyltransferase-isomerase OS=Sodalis glossinidius (strain morsitans) OX=343509 GN=queA PE=3 SV=1
MRVADFSFALPDNLIARYPQAQRSACRLLSLDGQTGALAHQVFTDLLEELAPGDLLVFNNTRVIPARLFGRKVSGGKIEVLVERVLDDKRVLAHVRASKAPKPGSALLLGDDDSIAATMVARHDALFELRFDDARDVLTLLNDAGHMPLPPYIDRPDDVADRELYQTVYGERPGSVAAPTAGLHFDEPLLAALRAKGVEMAFVTLHVGAGTFQPVRVDQIEHHQMHSEYAEVPQEVVDAVLACKARGNRVVAVGTTAVRSLESAAAAGEQALTPFFGDTSIFIYTGYQFRVVDVLITNFHLPESTLIMLVSAFAGYRHTLAAYREAVAQAYRFFSYGDAMFITRNPAAAAERG

SEQ ID NO: 72140 - protein, 353 aa, Sodalis glossinidius; identical to SEQ ID NO: 72139
  misc_feature (1)..(353): sp|Q2NVA5|QUEA_SODGM S-adenosylmethionine:tRNA ribosylt ransferase-isomerase OS=Sodalis glossinidius (strain mo rsitans) OX=343509 GN=queA PE=3 SV=1

SEQ ID NO: 72141 - protein, 357 aa, Sodalis praecaptivus
  misc_feature (1)..(357): tr|W0HW15|W0HW15_9GAMM S-adenosylmethionine:tRNA ribosy ltransferase-isomerase OS=Sodalis praecaptivus OX=12393 07 GN=queA PE=3 SV=1
MRVADFSFELPDNLIARYPQAERSACRLLSLDGQTGALAHQVFTDLLEKLAPGDLLVFNNTRVIPARLFGRKVSGGKIEVLVERVLDDKRVLAHVRASKAPKAGAALLLGDDDSIAATMVARHDSLFELRFDDPRDVLTLLNDAGHMPLPPYIDRPDEAADRELYQTVYGERPGAVAAPTAGLHFDEPLLAALRAKGVAMAFVTLHVGAGTFQPVRVDRIEQHQMHSEYAEVPQEVVDAVLACKARGNRVVAVGTTSVRSLESAAAAAGENTLAPFFGDTRIFIYPGYHFRVIDALITNFHLPESTLIMLVSAFAGYRHTLAAYREAVAQAYRFFSYGDAMFITRNPAAAQERVGES

SEQ ID NO: 72142 - protein, 363 aa, Sodalis sp.
  misc_feature (1)..(363): tr|A0A1J7C552|A0A1J7C552_9GAMM S-adenosylmethionine:tRN A ribosyltransferase-isomerase OS=Sodalis sp. TME1 OX=1 912097 GN=queA PE=3 SV=1
MRVADFSFELPDNLIARYPQAERSACRLLSLDGQTGALAHQVFTDLLDKLAPGDLLVFNNTRVIPARLFGRKVSGGKIEVLVERVLDDKRVLAHVRASKAPKAGVALLLGDDDSIAATMVARHDSLFELRFDDPRDVLTLLNDAGHMPLPPYIDRPDEAADRELYQTVYGERPGAVAAPTAGLHFDEPLLAALRAKGVAMAFVTLHVGAGTFQLVRVDRIEQHQMHSEYAEVPQEVVDAVLACKARGNRVVAVGTTSVRSLESAAAAAGENSLAPFFGDTRIFIYPGYHFRVIDALITNFHLPESTLIMLVSAFAGYRHTLAAYREAVAQAYRFFSYGDAMFITRTGTLALPRSAWVSRNRAG

SEQ ID NO: 72143 - protein, 357 aa, Sodalis sp.
  misc_feature (1)..(357): tr|A0A4R1NHF5|A0A4R1NHF5_9GAMM S-adenosylmethionine:tRN A ribosyltransferase-isomerase OS=Sodalis sp. 159R OX=2 529856 GN=queA PE=3 SV=1
MRVAEFSYELPEALIADYPLTERSACRLLALDGPSGEMTHGVFTDLLDRLAPGDLLVFNNTRVIPARLFGRKLSGGKIEVLVERVLDDHRVLAHVRASKSPKPGAALLLGDDESIAATMVARRDALFELRFDDDRDVLTLLNAAGHVPLPLYIHRHDEETDRESYQTVYSERPGAVAAPTAGLHFDQPMLDALRDKGIEMAFVTLHIGAGTFQPVRVENLEEHVMHSEYAEVPQEVVDAVLACKKRGNRVVAVGTTSVRSLESAAQAARGAVIAPFFGDTDIFIFPGYRFCIIDALITNFHLPESTLIMLVSAFAGYKHTMAAYHEAVALEYRFYSYGDAMFITRNDLAALDAIGER

SEQ ID NO: 72144 - protein, 357 aa, Unknown
  misc_feature (1)..(357): tr|A0A151UL77|A0A151UL77_9GAMM S-adenosylmethionine:tRN A ribosyltransferase-isomerase OS=Sodalis-like endosymb iont of Proechinophthirus fluctus OX=1462730 GN=queA PE =3 SV=1
MRVADFSFKLPDNLIARYPQVERSACRLLSLDGQTGVLAHQVFIDLLDKLAPGDLLVFNNTWVIPALLFGRKVSGGKIEVLVERVLDDKRVLAHVRASKAPKADAELLLGDDNSIATTMVARHNSLFELRFEDPRDVLTLLNDAGHMPLPPYIDRPDDTADRELYQTVYGERRGAVAAPTAGLHFDEPLLEALRAKGVVMAFVTLHVGAGTFQPVRVDRIEQHQMHSEYTEVTQEVVDAVLACKSRGNRVVAVGTTSARSLESAAAASGENTLAPFFGDTRIFIYPGYQFRVIDALITNFHLPESTLIMLVSAFAGYRHTLAAYREAVAQAYRFFSYGDAMFITRNPAAARERVGEP

SEQ ID NO: 72145 - protein, 340 aa, Soehngenia sp.
  misc_feature (1)..(340): tr|A0A4Z0D548|A0A4Z0D548_9FIRM S-adenosylmethionine:tRN A ribosyltransferase-isomerase OS=Soehngenia sp. 1933P OX=2562294 GN=queA PE=3 SV=1
MKTEDFNYKLPKELIAQVPLENRTSSRLMIVNRETEEISNNKFTDIVDELNSGDCLVLNDTKVMPARLFGHRPSREEKIEVLLLKRISENIWECLVKPGKKMREDTLIEFGDILKAKVLHITEGGIRVIEFFYSGVFEEVLDELGEMPLPPYITQKLEEKERYQTVYSKNLGSAAAPTAGLHFDNVILNEIENKGVNIAYLTLHVGLGTFRPVKVERIEEHKMHSEYYEINEDCANKINESKAKGGKIVSVGTTSLRTLETVADENGIVKAQSGWTDIFIYPGYRFKIVDELITNFHLPESTLLMLICAFANKDLIMKAYKIAIEEKYRFFSFGDAMLIK

SEQ ID NO: 72146 - protein, 338 aa, Solemya elarraichensis
  misc_feature (1)..(338): tr|A0A1T2L3E8|A0A1T2L3E8_9GAMM S-adenosylmethionine:tRN A ribosyltransferase-isomerase OS=Solemya elarraichensi s gill symbiont OX=1918949 GN=queA PE=3 SV=1
MKRSDFQFDLPEELIAQFPPEKRGDSRLLCLNESNGALDDKHFSDLPDLLEKGDLLVFNDTRVMKARLHGVKETGGQVEILVERLIDDSYALAHVRASKSPKPGTRLLIDDGIIEVRGREGDLFELTCTSPGFATLMETKGHVPLPPYIEREDVDEDLERYQTIYGDKVGAVAAPTAGLHFTHELLERLDAKGIHSARVTLHVGAGTFQPVRVDDLADHVMHSEWLEVAESTCEQVRACKEAGGRVVAVGTTSVRALESAAASGQLEAYVGDTELFITPGYKFSVIDALVTNFHLSESTLLMLVSALGGYDNIKRAYQHAIDQRYRFFSYGDAMLITL

SEQ ID NO: 72147 - protein, 349 aa, Solemya pervernicosa
  misc_feature (1)..(349): tr|A0A1T2LB47|A0A1T2LB47_9GAMM S-adenosylmethionine:tRN A ribosyltransferase-isomerase OS=Solemya pervernicosa gill symbiont OX=642797 GN=queA PE=3 SV=1
MKRTDFHYDLPDELIAQRPLPERSASRLLVLDGERGSTQDLQFESVVDLLQTEDLLIFNNTRVIPARLYGQKESGGKVEVLIERVVDEHHALAHIRSSKSPRPGSRLRLENAFDVEVTGRQDALFELRVDSEKPLLELLDRHGHIPLPPYIERAAEQDDLSRYQTVYAERPGAVAAPTAGLHFDDELLKRIDAKGIERAFTTLHVGAGTFQPVRADKLEDHLMHSEHIEVSAALVERIEAARQRGGRIVAVGTTVVRALESAAQSGKLEPYSGETSIFIYPGYRFRVIDALITNFHLPESTLLMLISAFSGYENVMASYRHAVKQGYRFFSYGDAMFCTPSNKTEEVCR

SEQ ID NO: 72148 - protein, 342 aa, Solemya velesiana
  misc_feature (1)..(342): tr|A0A1T2KTK4|A0A1T2KTK4_9GAMM S-adenosylmethionine:tRN A ribosyltransferase-isomerase OS=Solemya velesiana gil l symbiont OX=1918948 GN=queA PE=3 SV=1
MQRSDFNYHLPEELIAQYPPAKRGDSRLLCLNGEDGEVADRHFSDLPDLLSPEDLLVFNDTRVIPARMHGRKESGGKVEVLIERVIASRRALAHVRASKSPKPGSRILIGEQVLNVIRRQGDLFELEAVDVDLMDLMNQSGHMPLPLYISRDDGELDEERYQTVYAERPGAVAAPTAGLHFDQPMLNRLAEKGIESARVTLHVGAGTFQPVRVDNLDEYVMHSEYLEVSEAVCEKVRETRARRGRVVAVGTTCVRSLEAASADGEIKPFQGDTRLFIKPGYRFRSVDAMVTNFHLPESTLLMLVAAFVGYEVVMAAYRHAVEQHYRFFSYGDAMFLKGKGWK

SEQ ID NO: 72149 - protein, 338 aa, Solemya velum
  misc_feature (1)..(338): tr|A0A0B0H6T0|A0A0B0H6T0_SOVGS S-adenosylmethionine:tRN A ribosyltransferase-isomerase OS=Solemya velum gill sy mbiont OX=2340 GN=queA PE=3 SV=1
MKRTDFQFELPEELIAQFPPEKRGDSRLLSLNSSNGTVDDKHFSDLPDMLDEGDLLVFNDTRVMKARLHGVKETGGQVEILLERLLDDSYALAHVRASKSPKPGTRLLIDDGIIEVRGREGDLFELTCTHPGFASLMENKGHVPLPPYIERDDEVEDLERYQTVYGEKVGAVAAPTAGLHFTHELLERLDAKGIHSARVTLHVGAGTFQPVRVDNLSDHVMHSEWLEVAELTCEQVRACKEEGRRVVAVGTTSVRALESAATSGQLKPYVGDTELFITPGYQFNVIDALVTNFHLSESTLLMLVSALGGVDNIRHAYQHAIDQRYRFFSYGDAMLISP

SEQ ID NO: 72150 - protein, 338 aa, Solemya velum
  misc_feature (1)..(338): tr|A0A1T2CIB4|A0A1T2CIB4_SOVGS S-adenosylmethionine:tRN A ribosyltransferase-isomerase OS=Solemya velum gill sy mbiont OX=2340 GN=queA PE=3 SV=1
MKPTDFQFELPEELIAQFPPEKRGDSRLLSLNSSNGTVDDKHFSDLPDMLDEGDLLVFNDTRVMKARLHGVKETGGQVEILVERLLDDSYALAHVRASKSPKPGTRLLIDDGIIEVRGREGDLFELTCTHPGFASLMENKGHVPLPPYIERDDEVEDLERYQTVYGEKVGAVAAPTAGLHFTHELLERLDAKGIHSARVTLHVGAGTFQPVRVDNLSDHVMHSEWLEVAELTCEQVRACKEEGRRVVAVGTTSVRALESAATSGQLKPYVGDTELFITPGYQFNVIDALVTNFHLSESTLLMLVSALGGVDNIRHAYQHAIDQRYRFFSYGDAMLISP

SEQ ID NO: 72151 - protein, 347 aa, Solibacillus isronensis
  misc_feature (1)..(347): tr|K1KP15|K1KP15_9BACL S-adenosylmethionine:tRNA ribosy ltransferase-isomerase OS=Solibacillus isronensis B3W22 OX=1224748 GN=queA PE=3 SV=1
MNVKVEDFDFYLPEELIAQTPLLDRTASRLMVVNPNSLEVEHHTFGHILDELNAGDCLVLNDTRVLPARLMGVKADTGANIELLLLKQTNDDEWETLVKPAKRVKTGTVVTFGDGLLTATCTGELDHGGRTFKFTYDGIFYEILDQLGEMPLPPYIREKLEDQDRYQTVYAKERGSAAAPTAGLHFTQPLIEAIKAKGVEVVFITLHVGLGTFRPVSVDSIEDHDMHSEFYSVSEEAAAVIERVKQAGGKVISVGTTSTRTLETVASKNDGKIVASHGWTNIFIYPGYEYKAIDGLITNFHLPKSTLVMLVSALASKETIMNAYEQAVKEKYRFFSFGDAMFIRPAK

SEQ ID NO: 72152 - protein, 345 aa, Solibacillus silvestris
  misc_feature (1)..(345): tr|F2F3F9|F2F3F9_SOLSS S-adenosylmethionine:tRNA ribosy ltransferase-isomerase OS=Solibacillus silvestris (stra in StLB046) OX=1002809 GN=queA PE=3 SV=1
MKVEDFDFYLPEELIAQTPLLDRTASRLMVVNPNSLEVEHHTFGHILDELNAGDCLVLNDTRVLPARLMGVKADTGANIELLLLKQTNDDEWETLVKPAKRVKTGTVVTFGDGLLTATCTGELDHGGRTFKFTYDGIFYEILDQLGEMPLPPYIREKLEDQDRYQTVYAKERGSAAAPTAGLHFTQPLLEAIKAKGVEVVFITLHVGLGTFRPVSVDSIEDHDMHSEFYSVSEEAAAVIERVKQAGGKVISVGTTSTRTLETVASKNDGKIVASHGWTNIFIYPGYEYKAIDGLITNFHLPKSTLVMLVSALASKETIMNAYEQAVKEKYRFFSFGDAMFIRPAK

SEQ ID NO: 72153 - protein, 345 aa, Solibacillus silvestris
  misc_feature (1)..(345): tr|A0A1A7M0R9|A0A1A7M0R9_9BACL S-adenosylmethionine:tRN A ribosyltransferase-isomerase OS=Solibacillus silvestr is OX=76853 GN=queA PE=3 SV=1
MKVEDFDFYLPEELIAQTPLLDRTASRLMVVNPNSLEVEHHTFGHILDELNAGDCLVLNDTRVLPARLMGVKADTGANIELLLLKQTNDDEWETLVKPAKRVKTGTVVTFGDGLLTATCTGELDHGGRTFKFTYDGIFYGILDQLGEMPLPPYIREKLEDQDRYQTVYAKERGSAAAPTAGLHFTQPLLEAIKAKGVEVVFITLHVGLGTFRPVSVDSIEDHDMHSEFYSVSEEAAAVIERVKQAGGKVISVGTTSTRTLETVASKNDGKIVASHGWTNIFIYPGYEYKAIDGLITNFHLPKSTLVMLVSALASKETIMNAYEQAVKEKYRFFSFGDAMFIRPAK

SEQ ID NO: 72154 - protein, 345 aa, Solibacillus sp.
  misc_feature (1)..(345): tr|A0A2D1SW17|A0A2D1SW17_9BACL S-adenosylmethionine:tRN A ribosyltransferase-isomerase OS=Solibacillus sp. R5-4 1 OX=2048654 GN=queA PE=3 SV=1
MKVEDFDFQLPEELIAQTPLLDRTASRLMVVNPNSLDLEHHTFAKILDEFQAGDCLVLNDTRVLPARLMGVKPDTGANIEVLLLKQTNDDEWETLVKPAKRIKVGTVVTFGEGLLTATCTGELEHGGRLFKFDYDGIFYEILEQLGEMPLPPYIREKLDDQDRYQTVYAKERGSAAAPTAGLHFTEPLLDAIRAKGVEVVFVTLHVGLGTFRPVSVDSIENHDMHSEFYSVTEEAAATINRVKANGGNIISVGTTSTRTLETVASKNDGKIVAEQGWTSIFIYPGYEYKAIDGLITNFHLPKSTLVMLVSALASKETILHAYETAVEEQYRFFSFGDAMFIRPKK

SEQ ID NO: 72155 - protein, 352 aa, Solibacter usitatus
  misc_feature (1)..(352): sp|Q01SU0|QUEA_SOLUE S-adenosylmethionine:tRNA ribosylt ransferase-isomerase OS=Solibacter usitatus (strain Ell in6076) OX=234267 GN=queA PE=3 SV=1
MNLSEFDYHLPDELIAQEALADRAASRMLVVHREQGRWEDRCFRDLPEFLRPGDCLVLNDSRVFPARLFGHRSGVHSLAVGKNNPKRHEFLSGAVEVFLLRAVSQDGRDWQALVRPGRKMRTGERIVFDEGLEAEIIARGEFGERTVRFLGSGDLYAAFDRIGHVPLPPYIKRDDSPADRERYQTVFAREKGSVAAPTAGLHFTPEVIERCQAAGADVATVTLHVGLGTFQPLHQEVVEEVKLHTEHYRITADNAGKIGAATRVVAVGTTSVRTLETAARDGVLEGETDIFLYPGVPFRRTGAMLTNFHLPRTSLLVLVSAFAGKDLMLAAYRHAVEARYRFYSYGDCMLIV

SEQ ID NO: 72156 - protein, 351 aa, Solimicrobium silvestre
  misc_feature (1)..(351): tr|A0A2S9H0Y2|A0A2S9H0Y2_9BURK S-adenosylmethionine:tRN A ribosyltransferase-isomerase OS=Solimicrobium silvest re OX=2099400 GN=queA PE=3 SV=1
MHQPTYSLSDFNFDLPQELIAQTPLSKRSASRLLQVAGSTLIDSNFEDLVQQLSKDDVLVFNDTRVLKARFFGIKNTGGKVEVLVERVLFNNPEQHSVLAQIRASKSPAIGSTIRLADAFEVEVGERAGEFYTLHFPSDVFDLLEAYGKLPLPPYIEHAADDYDETRYQTVYSKVPGAVAAPTAGLHFDEALLEQCRVKGVQFAYVTLHVGAGTFQPVRHEDLSQHDMHSEWYSVPEETLAAVKKAQAAGRDVIAVGTTSLRALESASQSGQLEAGNANTRLFITPGYCFKTVTRLVTNFHLPKSTLLMLVSAFAGYDEIRAAYQHAIAQKYRFFSYGDAMLLTNNVKKES

SEQ ID NO: 72157 - protein, 342 aa, Solimonas aquatica
  misc_feature (1)..(342): tr|A0A1H9H5D3|A0A1H9H5D3_9GAMM S-adenosylmethionine:tRN A ribosyltransferase-isomerase OS=Solimonas aquatica OX =489703 GN=queA PE=3 SV=1
MRRADFHYELPPELIAQHPSAERSASRLLHVGATLADRHIRELPQLLSPGDLLVFNDTRVIPARLYGRKSTGGQVEILVERVLDARRFLAQLGVSKKPKAGGVIELGEDRLTVLGREDDLFELQLQGEGEVMAFLERAGRLPLPPYITHAPDAGDAERYQTVFAREPGAVAAPTAGLHFDAPLLAALKARGVQTATLTLHVGAGTFQPLRVEDLSQHRMHAERYVIDAALCEALAQTRARGGRIVAVGTTVTRALESAAAAQDSAALQPMRGETRLFITPGYRFAVVQRLLTNFHLPESTLMMLVCAFGGHERMMAAYRHAVAARYRFFSYGDAMLIEPETP

SEQ ID NO: 72158 - protein, 339 aa, Solimonas fluminis
  misc_feature (1)..(339): tr|A0A2S5TKZ5|A0A2S5TKZ5_9GAMM S-adenosylmethionine:tRN A ribosyltransferase-isomerase OS=Solimonas fluminis OX =2086571 GN=queA PE=3 SV=1
MRKSDFHYELPEELIAQHPAARRSASRLLHLQPGGGLADRQVRELPELLRPDDLLVFNDTRVIPARLFGRKPSGGKVEILVERVLDEQDFMAQLGVSKKPQAGGLIEVGEDRLTVLGRDEDLFRLRYDGPGAVMDFLQRAGRLPLPPYITHVPDGEDAERYQTVFAQNPGAVAAPTAGLHFDEELLAALRARGLRTATLTLHVGAGTFQPLRVDDLSQHRMHSERYALSPDLVQAIADTRARGGRVVAVGTTVTRALESAAVQNGLQPGEGETRLFITPGYRFAVVDALLTNFHLPESTLMMLVSAFGGYERLMAAYRHAVAQRYRFFSYGDAMLIDNG

SEQ ID NO: 72159 - protein, 340 aa, Solimonas sp.
  misc_feature (1)..(340): tr|A0A346N304|A0A346N304_9GAMM S-adenosylmethionine:tRN A ribosyltransferase-isomerase OS=Solimonas sp. K1W22B- 7 OX=2303331 GN=queA PE=3 SV=1
MRRSDFQYELPPELIAQHPAARRSASRLLQLRPDGSLADRQIRELPELLRPDDLLVFNDTRVIPARLYGRKPTGGKVEILVERVLDEREFLAQLGVSKKPKAGGLVEVGEDRLTLLGRDDDLFRLRYDGPGTVMDFLQRAGQLPLPPYITHTPGGEDAERYQTVFASNPGAVAAPTAGLHFDEELLAALRARGLRTATLTLHVGAGTFQPLRVDDLSEHRMHSERYQLGTELLQAIAETRERGGRVVAVGTTVTRALESAAAQNGLQAGEGETRLFITPGYRFAVVDVLLTNFHLPESTLLMLVSAFGGYERLMGAYRHAVEQRYRFFSYGDAMLIENPG

SEQ ID NO: 72160 - protein, 351 aa, Solirubrobacterales bacterium
  misc_feature (1)..(351): tr|A0A2W5Y8G2|A0A2W5Y8G2_9ACTN S-adenosylmethionine:tRN A ribosyltransferase-isomerase OS=Solirubrobacterales b acterium OX=1909295 GN=DLM63_02270 PE=3 SV=1
MTTALAGQLPELREARVPPEARGLARDDVRLLVASLPGGELRHTRFAELPELLAPGDVVVVNSSATLPAALPAHRADGGALALHLSTPAPDDEGDRWVVELRRDGARVHDGRAGERLALQGGASAELLAPYLGSRLWVAALFLPLPLHDYLARHGEPIRYGHVDGRWPLSAYQTPYATEPGSAEMPSAGRPFSAELVTRLVARGIDVAPLLLHTGVSSLERGERPYPERFAVSRATAERVNLARRLGGRVVAVGTTVVRALESACDEDGLVRARSGWTDLVVEPARGVRAVDGIVSGFHDPDASHLQLLDSIAGGRVLERCYAAAAQAGYLRHEFGDLHLLLPRRTLRGVQ

SEQ ID NO: 72161 - protein, 248 aa, Solirubrobacterales bacterium
  misc_feature (1)..(248): tr|A0A2W5ZT42|A0A2W5ZT42_9ACTN S-adenosylmethionine:tRN A ribosyltransferase-isomerase OS=Solirubrobacterales b acterium OX=1909295 GN=DLM63_00525 PE=3 SV=1
MVELRTHERLRFLNPPIGARLELPGGAHAQLLARHLGSDRLCVASLALGEPLDAYLGKHGRPIRYRPDGESWPIEAHHTIFALEPGSAEMPSAGRPFTTELVTELVARGVLVAPVTLHTGVSSLERCEAPYPERYRVPAATARLANAVRAWGGRVIAVGTTVVRALETVAGLDGAIHPGEGSTSLIVTPERGLRALDGVLTGWHESDSSHLELLQAAAGPDLLERCYRAARAEGYVGHEFGDLNLILP

SEQ ID NO: 72162 - protein, 407 aa, Solirubrum puertoriconensis
  misc_feature (1)..(407): tr|A0A0W8EDX4|A0A0W8EDX4_9BACT S-adenosylmethionine:tRN A ribosyltransferase-isomerase OS=Solirubrum puertorico nensis OX=1751427 GN=queA PE=3 SV=1
MHTPDPRQLSIQDFTYDLPAERIAPEPLPDRDSSRLLVYRQGAIQNRIFRELPNELPNDALLVFNNTKVVRARLYLHKPTGGQIELFCLEPVAPSRAIEPAMQQTGECVWRCLVGNGKRWKIGTVQASFTTPDGQTAVLEAERDAAEEGSSLIRFRWQPAELPFAQVLAGAGRLPLPPYLNREANPTDDERYQTVYAAHDGAVAAPTAGLHFTERVLQALQARGIGSAQLTLHVGAGTFQPVKAAQMADHAMHSEPISATRQVLRQLIAHAPRPIIAVGTTSLRTLESLYWLGCQVVRGGSLSGQVQQWEPYEHTTEVPMQTALQALLDELERRGDDALQASTQLLIAPGYRFRVVQGLITNFHQPESTLLLLVAALLGPGWRTVYDHALANNYRFLSYGDSSLLLP

SEQ ID NO: 72163 - protein, 350 aa, Solirubrum puertoriconensis
  misc_feature (1)..(350): tr|A0A0W8EMX7|A0A0W8EMX7_9BACT S-adenosylmethionine:tRN A ribosyltransferase-isomerase OS=Solirubrum puertorico nensis OX=1751427 GN=queA PE=3 SV=1
MKLSEFKFELPDNLVAQHPAKNRDESRLMVVHRDSGRIEHRTFKDIIEYFDDGDVMVVNDTKVFPARLYGNKEKTGAKIEVFLLRELNKELHLWDVLVDPARKIRVGNKLYFDDDGIMVAEVIDNTTSRGRTIKFLFDGPEEEFYKALHDLGETPLPKEFIPRDPEASDKERYQTIYAKHTGAVAAPSAGLHFTREVIKRLEIKGVEMVPVTLHVGLGTFRPVDVEDLTKHKMDSENFIVPTDSASMVNRALDHKKRVCAVGTTTMRAMESSVSANARLKPTEGWTDKFIFPPYDFKIANTLLTNFHMPESTLMMMAAAFAGYDLLIEAYQTAIKEKYKFFTYGDAMLIL

SEQ ID NO: 72164 - protein, 349 aa, Solitalea canadensis
  misc_feature (1)..(349): tr|H8KR02|H8KR02_SOLCM S-adenosylmethionine:tRNA ribosy ltransferase-isomerase OS=Solitalea canadensis (strain ATCC 29591 / DSM 3403 / NBRC 15130 / NCIMB 12057 / USAM 9D) OX=929556 GN=queA PE=3 SV=1
MKLSQFSFHLPESLVAHKPSETRDEARLMVLHKDSGKIEHKIFKDVLDYFDDKDVMILNNTKVFPARMYGNKEKTGAQIEVFLLRELNREMRLWDVLVDPARKIRVGNKLYFGDNDLLIAEVVDNTTSRGRTIRFLFDGTDEEFREAIEILGETPLPKYIKRKATAEDKERYQTVFAKNEGAVAAPTAGLHFSRELLKRLELKGVDFAEVTLHVGLGTFRPVEVEDLTKHKMDSEHFIIEQKDADIVNHALEQKRRICAVGTTSMRAIESAVSASRTLKAANEWTSKFIFPPYDFSIANTMITNFHTPESTLLMMVAAFGGYEHVMNAYEVAVKEKYHFYSYGDAMLII

SEQ ID NO: 72165 - protein, 349 aa, Solitalea koreensis
  misc_feature (1)..(349): tr|A0A521DCX8|A0A521DCX8_9SPHI S-adenosylmethionine:tRN A ribosyltransferase-isomerase OS=Solitalea koreensis O X=543615 GN=queA PE=3 SV=1
MKLSQFSFNLPESLVASTPSEQRDESRLMVLHKDTGKIEHKIFKDILGYFDDKDVMILNNTKVFPARMYGNKEKTGAQIEVFLLRELNREMRLWDVLVDPARKIRVGNKLYFGENDLLIAEVVDNTTSRGRTIRFLFDGTDEEFREAIEILGETPLPKYIKRKATPEDKDRYQTVFAKNEGAVAAPTAGLHFSRELLKRLELKGVEFAEVTLHVGLGTFRSVEVEDLTKHKMDSEHFIIEQREVDKVNKALEEKRRICAVGTTAMRAIESAVSASRILKPANEWTSKFIFPPYDFSIANSMITNFHTPESTLLMMVAAFGGYEHVMNAYEVAVKEKYRFYSYGDAMLII

SEQ ID NO: 72166 - protein, 349 aa, Solitalea longa
  misc_feature (1)..(349): tr|A0A2S5A0W8|A0A2S5A0W8_9SPHI S-adenosylmethionine:tRN A ribosyltransferase-isomerase OS=Solitalea longa OX=20 79460 GN=queA PE=3 SV=1
MKLSQFSFHLPESLVAHKPSETRDEARLMVLHKDSGKIEHKIFKDVLDYFDDKDVMILNNTKVFPARMYGNKEKTGAQIEVFLLRELNKEMRLWDVLVDPARKIRVGNKLYFGDNDLLVAEVVDNTTSRGRTIRFLFDGTDEEFREAIEILGETPLPKYIKRKATAEDKERYQTVFAKNEGAVAAPTAGLHFSRELLKRLELKGVDFAEVTLHVGLGTFRPVEVEDLTKHKMDSEHFIIEQKDADIVNHALEQKRRICAVGTTSMRAIESAVSAGRTLKAANDWTSKFIFPPYDFSIANCMITNFHTPESTLLMMVAAFGGYEHIMNAYEVAVKEKYNFYSYGDAMLII

SEQ ID NO: 72167 - protein, 345 aa, Solobacterium moorei
  misc_feature (1)..(345): tr|A0A412PIU4|A0A412PIU4_9FIRM S-adenosylmethionine:tRN A ribosyltransferase-isomerase OS=Solobacterium moorei OX=102148 GN=queA PE=3 SV=1
MKWKTSDFDYNLPEELIAQTPLLDRSSSRMLVIHNTEKKYEDKHFYDIVDYLHAGDVLVRNNTRVIPARLFGTKEETGAHVELLLLRQLPDDVWECLVGNAKVVKLGAIISFHDGRLRAECVEIGEKGLRKMRMIYDGIFNEILDELGNVPLPPYIKEKLNDPERYQTVYAKVRGSAAAPTAGLHFTDEIFTKLKEKGVTVIDVTLHVGLGTFRPMDTEDVEDHDMHSEVYYMSKEAADTLNAAKANGQRIFAIGTTSVRTLESVWNRFGKFEECSGETKLFIYPGYQWHTIDGMLTNFHLPKSTLIMMIASFVGYEFTLEAYRHAVQEKYRFFSFGDCMLITNE

SEQ ID NO: 72168 - protein, 345 aa, Solobacterium moorei
  misc_feature (1)..(345): tr|E7MPH2|E7MPH2_9FIRM S-adenosylmethionine:tRNA ribosy ltransferase-isomerase OS=Solobacterium moorei F0204 OX =706433 GN=queA PE=3 SV=1
MKWKTSDFDYNLPEELIAQTPLLDRSSSRMLVIHNTEKKYEDKHFYDIVDYLHAGDVLVRNNTRVIPARLFGTKEETGAHVELLLLRQLPDDVWECLVGNAKVVKLGTIISFHDGRLRAECVEIGEKGLRKMRMIYDGIFNEILDELGNVPLPPYIKEKLNDPERYQTVYAKVRGSAAAPTAGLHFTDEIFTKLKEKGVTVIDVTLHVGLSTFRPMDTEDVEDHDMHSEVYYMSKEAADTLNAAKANGQRIFAIGTTSVRTLESVWNRFGKFEECSGETKLFIYPGYQWHTIDGMLTNFHLPKSTLIMMIASFVGYEFTLEAYRHAVQEKYRFFSFGDCMLITNE

SEQ ID NO: 72169 - protein, 349 aa, Soonwooa buanensis
  misc_feature (1)..(349): tr|A0A1T5D367|A0A1T5D367_9FLAO S-adenosylmethionine:tRN A ribosyltransferase-isomerase OS=Soonwooa buanensis OX =619805 GN=queA PE=3 SV=1
MKTSDFNFDLPEELLAEHPSEHRDEARLMVLNRKDRTIEHKLFKDVIDYFDEHDLFIFNNTKVFPARLYGNKEKTGAKIEVFLLRELDKETRVWDVLVDPARKIRIGNKLFFTEDESLVAEVIDNTTSRGRTLRFLYDGSYEEFRAKLNELGETPLPKYIKREVEPEDAERYQTIYAKVEGAVAAPTAGLHFSKHLMKRLEIKGVDFAEITLHVGLGTFNPIEVEDLSKHKMESEEVIIDQHNADIINKAVEEKRRICAVGTTTMRAIETSVSSNRKIGPFNGWTNKFIYPPHDFGVANAMITNFHTPKSTLIMMIAAFADKDFIMEAYEEAIKEKYKFYSYGDAMLII

SEQ ID NO: 72170 - protein, 407 aa, Soonwooa buanensis
  misc_feature (1)..(407): tr|A0A1T5GDK7|A0A1T5GDK7_9FLAO S-adenosylmethionine:tRN A ribosyltransferase-isomerase OS=Soonwooa buanensis OX =619805 GN=SAMN05660477_02759 PE=3 SV=1
MMHPRELKIENFTYDLPNENIAYNPANPRDSSKLLVYKKNDISTDIYQHISDYLPSDAVLVFNDTKVIKSRLFFTNETGATIEVFCLEPYGENINYEDYFQKQGSVLWTCLIGKVAKWRTPKLSKILEIDNQNVELTAEIIEKLPDSYVVKLSWSPEEIPFADVVNAAGVTPLPPYIKRVADKTDEETYQTVYSEHDGSVAAPTAGLHFTKRILDDLHSKGIETLFTTLHVGAGTFKPVKSETMDEHIMHSECMNITVDFLEHLLENINRPIIPVGTTSMRTVESIFWMGNKVTNNPNILFENLKVTQWEPYETEIINSAEVAISALINWIKKHEQSHISVETEIIIAPSYTFRIAKGLITNFHQPQSTLLLLVSALIGEKWHELYDYALKNDFRFLSYGDGSLLLP

SEQ ID NO: 72171 - protein, 348 aa, Sorangiineae bacterium
  misc_feature (1)..(348): tr|A0A1W9QHM0|A0A1W9QHM0_9DELT S-adenosylmethionine:tRN A ribosyltransferase-isomerase OS=Sorangiineae bacteriu m NIC37A_2 OX=1970199 GN=queA PE=3 SV=1
MRTELFDYSLPEELIAPYPLPERDGARLCVLGPEEPSEARVRDLPRLVEPGDLLVLNETKVRPARVFCERPRSGSQGGGRVEVVFLRQLEAGQWEALARANRPLRPGDKLAIVEAGLELTVEKKGEQGTIFLRSTEDVEEALARHGQMPLPPYMRRAAEDLDRSRYQTVFAKEVGSAAAPTAGLHLTPELLSEIEAKGVRVARLVLHVGLGTFRPVSTDDLDDHAMHEEWIRVTAEVSEAVRRTREQGGRVVAIGTTVVRALESLADEQGQIAPGERATRLLIQPGYRFRVVDALLTNFHMPKSTLVALVSALGGRERVLAAYEWAIARKFRFLSYGDAMWIPGRMAE

SEQ ID NO: 72172 - protein, 374 aa, Sorangium cellulosum
  misc_feature (1)..(374): sp|A9FI02|QUEA_SORC5 S-adenosylmethionine:tRNA ribosylt ransferase-isomerase OS=Sorangium cellulosum (strain So ce56) OX=448385 GN=queA PE=3 SV=1
MRCELLDYELPEALIASRPPEERDGARLLLVDRGRRAGEVEHAAIRDLDRYIERGALVIVNDTKVVPARLFGRKRGTGGQVELFLLHRLDGAPAGAEDLGGGPQESAPRSERWRAMGRASKPIRPGSVLDIERDGALVAEVLERAEDGVLTVQLSSPAGLSVAAAIDAYGHVPLPPYLGRGDDASDRERYQTIFARVPGAVAAPTAGLHLSPGLVERLRANGVEIASVTLHVGLGTFQPVTVDDLDLHPMHAEVYSIPDATAGAIAGARARGAPVIAIGTTVVRALESAADPARAGLVQAQSGETRLLIQPGYRFRVVDALLTNFHLPRSTLLALVFAFAGRERTLLAYRAAIDAGYRFYSYGDAMLIRGVDAP

SEQ ID NO: 72173 - protein, 341 aa, Sorangium cellulosum
  misc_feature (1)..(341): tr|A9FKR0|A9FKR0_SORC5 S-adenosylmethionine:tRNA ribosy ltransferase-isomerase OS=Sorangium cellulosum (strain So ce56) OX=448385 GN=queA2 PE=3 SV=1
MSPATWPRENPLEERLLHVDPRAGRLRDARIADLPALLEPGDLLVVNDGATMPASLHGATERGAAVEVRLIGELSEGRYSALLFGAGDWHTRTEDRPAPPALGPGDAVTFGEDLSATVERVSPASPRLVEIAFHERGAPLWSALYRRGRPIQYAYVAGPLEIWHAQTRYASRPLCAELPSAGRPLVWGLLLELIRRGVRVASLTHAAGISSTGEPALDALLPLPERFDIPEETVAAVREAKARGRRVIAVGTTVTRALEGCAAQHGGELRAGAGVTDLMLHPGFRPRVVDGLLTGVHDPTESHFRLLEAFAPASLLHRANSYAEEAGYLCHEFGDSYLVLS

SEQ ID NO: 72174 - protein, 325 aa, Spartobacteria bacterium
  misc_feature (1)..(325): tr|A0A2A2XUA3|A0A2A2XUA3_9BACT S-adenosylmethionine:tRN A ribosyltransferase-isomerase OS=Spartobacteria bacter ium AMD-G4 OX=1982325 GN=queA PE=3 SV=1
MSGQVRDYHYDLPPELIARTPAARRDESRMLVLHRTSGEIEHRRFQDFPSILTEEDIVALNDSRVIKARLLTDPPGVEIFLLENLAGNRWKCLVKPGRKLRPGTRVPIAGTVAEVVEVLPGGERIMQFDEAPDLEVHGHMPLPPYFKREAEKLDDDRYQTVYANSPGSVAAPTAGLHFTPEILSQIHHTFLTLHVGAGTFLPVKTEKIADHEMHEESYSISARSAAALNNAKRIIAVGTTATRVLESQPPGPLQTCEGRTGIFIYPPYEFQRVGALLTNFHLPESTLLMLVSAFAGREAVFKAYQEAISERYRFYSYGDCMLVVD

SEQ ID NO: 72175 - protein, 326 aa, Spartobacteria bacterium
  misc_feature (1)..(326): tr|A0A3D4A795|A0A3D4A795_9BACT S-adenosylmethionine:tRN A ribosyltransferase-isomerase OS=Spartobacteria bacter ium OX=2052183 GN=queA PE=3 SV=1
MNARLLDYDYDLPAELIAQRPLPRRDDSRMMVLRRDAQRIEHRQFTELKTLLNSGDLLVLNNTRVLPARKFSDDGAIEFLFTQRIGPARWKCLVKPGRKMRLGAIAKIDNAILRVEEILPEGERVVSLNEDVDLYAGGSMPLPPYIGRESDAEDERRYQTIFAGAPGALAAPTAGLHFTQEILNEIPHAFVTLHVGTGTFLPVRSEKISAHRMHPEQFSISPVAAAKIDNAKRTLAVGTTTVRVLESARRQNGNLIAQSGSTDLFIYPPYQFRHVDLLFTNFHLPCSTLLMLVCAFAGRDFVLAAYQEAIRERYRFYSYGDCMLIL

SEQ ID NO: 72176 - protein, 334 aa, Sphaerisporangium album
  misc_feature (1)..(334): tr|A0A367FL02|A0A367FL02_9ACTN S-adenosylmethionine:tRN A ribosyltransferase-isomerase OS=Sphaerisporangium alb um OX=509200 GN=DQ384_16480 PE=3 SV=1
MITFDLPRAREAHEPPEARGLARDHVRLMVSVTDSGSITHHSFTELPDLLRPGDVLVVNDSITLPAAVPLDRLAVHFSTAREDGTWLVELRRRTGTTTAPYPGGAPGEWLPLPGGATLRLLERETPRLWRAALDRDVPGYLRQYGVPIRYSYVEHDWPLSAYQTVFGVRPGSAEMPSAGRPFSHELVTALVSRGILIAPITLHTGVASPEKDEPPYPERFAVPAHTARLVNQAEGRVIAVGTTVVRALETAALGVRGPGRVRAAEGFTSHVVTPAQGVRAVDGLVTGLHEPRSSHLMMLSAIAGEELVARSYEEALREGYLWHEFGDLHLIMHE

SEQ ID NO: 72177 - protein, 341 aa, Sphaerisporangium sp.
  misc_feature (1)..(341): tr|A0A366M657|A0A366M657_9ACTN S-adenosylmethionine:tRN A ribosyltransferase-isomerase OS=Sphaerisporangium sp. LHW63015 OX=2248750 GN=DP939_02875 PE=3 SV=1
MTVQAFAFDFDLPAALEAHEPPEARGLARDGVRLMVSWRDTGHIAHRGFADLPDLLAPGDLLVVNDSATLPAAVRLDKLAVHFSTEREDGSWLVELRHRTQAGGTRPYGGGAPGEWLPLPGQATLRLIERETPRLWRARLDRDVRTYLGEHGVPIRYSYIARDRPLADYQTVFARVPGSAEMPSAARPFSQRLVTSLVVRGIGIAPVTLHTGVASPERDEPPYEEWFSVPAATARQVNLARASGARVIAVGTTVVRALESAAGDDGQVRAAAGWTGRVVTPETGVRAVDGLVTGLHEPRSTHLMMLAAIGGAGLIARGYEEALAKEYLWHEFGDAHLILAR

SEQ ID NO: 72178 - protein, 341 aa, Sphaerisporangium sp.
  misc_feature (1)..(341): tr|A0A2W2GWE5|A0A2W2GWE5_9ACTN S-adenosylmethionine:tRN A ribosyltransferase-isomerase OS=Sphaerisporangium sp. 7K107 OX=2070365 GN=C1I98_14015 PE=3 SV=1
MTVQASAFDFELPAAREAHEPPEARGLTRDGVRLMVSWRDTGHIAHRRFADLPDLLEPGDLLVVNDSATLPAAVRLDKLAVHFSTEREDGSWLVELRHRTQAGGTRPYGGGAPGEWLPLPGQATLRLIERETPRLWRARLDRDVRTYLGEHGVPIRYSYIARDWPLADYQTVFARVPGSAEMPSAARPFSQRLVTSLVVRGIGIAPVTLHTGVASPERDEPPYQEWFSVPPATARQVNLARASGARVIAVGTTVVRALESAAGDDGRVRAAAGWTDRVVTPEIGVRAVDGLVTGLHEPRSSHLMMLAAIGGGELIARGYEEALAKEYLWHEFGDTHLILTR

SEQ ID NO: 72179 - protein, 341 aa, Sphaerobacter thermophilus
  misc_feature (1)..(341): tr|D1C3D8|D1C3D8_SPHTD S-adenosylmethionine:tRNA ribosy ltransferase-isomerase OS=Sphaerobacter thermophilus (s train DSM 20745 / S 6022) OX=479434 GN=queA PE=3 SV=1
MADYDYDLPPELIAQHPVEPRDASRLMVVDRASETIAHRRFRDLPSLLSPGDLLIVNDTRVMPARLHGRRPTGGQVELLLLRRLEDGCWEAMGRPARRLRPGTFVHLRDQGGREAVEPAEVVARRGEGLLAVRLPSEVEARLDEFGEMPLPPYIRARLEDPERYQTVFATEVGSAAAPTAGLHFTPRLLAELDAAGIRRATITLHVGLGTFLPVKVEDARQHRMHQEWYHVPADTLAAIRETRAAGRRVVAVGTTACRTLESIAPDLDADDDLSGWTDLFIVPGHQFQVVDALVTNFHLPRSTLLLLVSAFAGRELILRAYEEAVRTRYRFFSFGDAMLIL

SEQ ID NO: 72180 - protein, 346 aa, Sphaerochaeta coccoides
  misc_feature (1)..(346): tr|F4GK42|F4GK42_SPHCD S-adenosylmethionine:tRNA ribosy ltransferase-isomerase OS=Sphaerochaeta coccoides (stra in ATCC BAA-1237 / DSM 17374 / SPN1) OX=760011 GN=queA PE=3 SV=1
MKTKEFFFDLPEELIAQTPSERRGASHLLVLDKTTGKLTDSSMEDFASFLPEDAVMVINNSKVRKARAYGISGSGGKVEFLFLEENADQTWNVMVTKSKKQKSGKEYVFHAPDGRIGASAQIIRENPDGTKTVSFNAPITEAFFQECGHVPLPPYIKREDTFSDESRYQTIYARPEGSVAAPTAGLHFTGEILDSIRERGVQVVPVTLHVGPGTFLPMRVDDIEDHHMHYERYEVPEDTARIVTDAKANNRPVIAVGTTSIRTLESAWDSVHGMLTPGQGRTNLFITPGFTYRVANHLLTNFHTPESTLLVLVSAFAGKDLIFSAYHHAIERRYHFFSYGDAMFIR

SEQ ID NO: 72181 - protein, 346 aa, Sphaerochaeta dissipatitropha
  misc_feature (1)..(346): tr|A0A375AMK8|A0A375AMK8_9SPIO S-adenosylmethionine:tRN A ribosyltransferase-isomerase OS=Sphaerochaeta dissipa titropha OX=1945881 GN=queA PE=3 SV=1
MTIKEYSFDLPEHLIAQTPVDRRGTDRLLVLDKQTGTIIDEQMTNFSSYIEKGSVLVINNSKVRKARVYAVSETGSRVEFLFLEENLDHSWNVMVTKTKKQHVGKHYTFSDAQGSYVRTGCIIKANDDGTRTIRFDQILDEMFFTKLGHVPLPPYIKRDDSFADENRYQTVYAQKEGSVAAPTAGLHFTDEILASVRDKGCTIVAVTLHVGPGTFLPVRTENLEDHHMHYESYEISQESARIINEAKAQGRKIVATGTTSVRTLESAFNTETGLLEHGQGRTNLFIRPPYAFKIVDQLLTNFHTPESTLLVLVSTFAGKELIDKAYRHAVSESYRFFSYGDAMFIC

SEQ ID NO: 72182 - protein, 346 aa, Sphaerochaeta globosa
  misc_feature (1)..(346): tr|F0RZ21|F0RZ21_SPHGB S-adenosylmethionine:tRNA ribosy ltransferase-isomerase OS=Sphaerochaeta globosa (strain ATCC BAA-1886 / DSM 22777 / Buddy) OX=158189 GN=queA P E=3 SV=1
MTIKEYSFDLPEHLIAQTPIDRRGEDRLLVLDKHSGTIIDEQMTHFASYLQEGSILVVNNSKVRKARVFAISETKSRVEFLFLEENLDHSWNVMVTKTKKQHVGKHYTFCTADQSYVRTGCITKANEDGTRTITFNHVLDEDFFLKLGHVPLPPYIKREDCFADENRYQTIYAQKEGSVAAPTAGLHFTQEILASIRAKGCTIVPVTLHVGPGTFLPVRTDNLEDHHMHYESYEIEEESARIINQAKAQGRKIVATGTTSVRTLESAFNTETGLLESGQGRTNLFIRPPYTFKIVDQLLTNFHTPESTLLVLVSTFAGKEKIDRAYRHAVEQSYRFFSYGDAMFIC

SEQ ID NO: 72183 - protein, 346 aa, Sphaerochaeta halotolerans
  misc_feature (1)..(346): tr|A0A372MGM4|A0A372MGM4_9SPIO S-adenosylmethionine:tRN A ribosyltransferase-isomerase OS=Sphaerochaeta halotol erans OX=2293840 GN=queA PE=3 SV=1
MKIKEFSFDLPPHLIAQTPADKRGEDRLLVLNRSDGSVIDEQMHNFASYLDEGSVVVVNNSKVRKARVYATSDTGSMVEFLFLEENLDNTWQCMVTKAKRQKVGKHYTFSDEEGSYIQKAWITEIGDDGTRTVAFETPLDEEFFRRLGHVPLPPYIKREDSFADEKRYQTIYAEKEGSVAAPTAGLHFTEEILSSIQEKGCTIVPITLHVGPGTFLPVRTEHLDDHTMHYERYNISEEAAKLITQAHKEGRKVVATGTTSVRTLESAFNSETGCLESGEGRTNLFIRPEYQWKVVDQLLTNFHTPESTLLVLVSTFAGKQLIDSAYRHAVDKEYRFFSYGDAMFIR

SEQ ID NO: 72184 - protein, 346 aa, Sphaerochaeta pleomorpha
  misc_feature (1)..(346): tr|G8QW16|G8QW16_SPHPG S-adenosylmethionine:tRNA ribosy ltransferase-isomerase OS=Sphaerochaeta pleomorpha (str ain ATCC BAA-1885 / DSM 22778 / Grapes) OX=158190 GN=qu eA PE=3 SV=1
MKIKEFSFDLPPELIAQTPAERRGNDRLLVLDRKNGTYTDAMMQDFVDYLEEGSVIVINNSKVRKARVFGMSETGGRVEFLFLEENLDHSWQVMVTKLKKQRVGKRYHFANEEGSLSYNAEIISENEDGTRTIAFAQPLDESFFQELGHVPLPPYIKREDDFKDETRYQTVFAKTEGSVAAPTAGLHFTQEIIDRILQKGCTFAPITLHVGPGTFLPVRTEDLEDHHMHYERFEVSEETARIVTEAKKAGKKIVATGTTSVRTLESAFNVEQQLLAPGLNRTNLFIMPGYQWKVVDQLLTNFHTPESTLLVLVSTFAGRDHIMGAYAHAVEERYRFYSYGDAMFIR

SEQ ID NO: 72185 - protein, 81 aa, Sphaerochaeta sp.
  misc_feature (1)..(81): tr|A0A3B9RQH0|A0A3B9RQH0_9SPIO S-adenosylmethionine:tRN A ribosyltransferase-isomerase (Fragment) OS=Sphaerocha eta sp. OX=1972642 GN=DCG32_06545 PE=3 SV=1
MKIKEYSFELPPELIAQTPIDKRGSDRLMVVDRTTGSVIDSEMSNFVDYLPSGCLLVVNNSKVRKARLYACSETGGTVEFL

SEQ ID NO: 72186 - protein, 344 aa, Sphaerochaeta sp.
  misc_feature (1)..(344): tr|A0A3D1X3Q2|A0A3D1X3Q2_9SPIO S-adenosylmethionine:tRN A ribosyltransferase-isomerase OS=Sphaerochaeta sp. OX= 1972642 GN=queA PE=3 SV=1
MKTKEFSFDLPENLIAQFPSDKRGESRLLVLDRSTGEFSDSHITDLPSFVEPGSVLVVNNSKVRKARVYAESETGARVEFLFLHELPDHTWTAMVTKSKKQRIGKHYRFDSPSGMQWQASIVGEHEDGKLVRFEQPIDETFFSECGHVPLPPYIKRSDAMSDESRYQTVYADRAGSVAAPTAGLHFTSEILEQIRNKGVEICPVTLHVGPGTFLPVRADHLEDHLMHLEQYDIPVGTAEAVTKAKREGRKIVAVGTTSVRTMESAFDVGTESLPAGPGSTRLFILPPYRFKVVDQLLTNFHTPESTLLVLVSTFAGKEHIMRAYTHAVQEKYRFFSYGDAMFIR

SEQ ID NO: 72187 - protein, 391 aa, Sphaerospermopsis kisseleviana
  misc_feature (1)..(391): tr|A0A1Z4UI78|A0A1Z4UI78_9CYAN S-adenosylmethionine:tRN A ribosyltransferase-isomerase OS=Sphaerospermopsis kis seleviana NIES-73 OX=1973480 GN=queA PE=3 SV=1
MPNAHYPLPIPCLPFRKMSNLENQGVDLNRSLSGYDYELPTELIAQNPAVPRDSSRLLVIDSLSTGVEKPALDYIFRDLVEILKSGDLLVMNNTKVIPARLYGRKSTGAEVEVLLLEERQHNCWLALVKPGKYFKPGTQIIFDGQKLAAGNELTATVVERDEATGGRLLQFDLPENVPLVQVLEKFGEIPLPPYINASSAADEQYQTVYAQEQGAIAAPTAGLHFTPELLQKLRDIGINQAFLTLHVGVGTFRPVEVEDVTTHQMHEEWIEVSNATVEQIKATKAAGGRIIAVGTTVVRALEGAAQSGDLQPYVGKVNLFIYPGYQWRVVQGLITNFHLPRSSLLMLVSALIGRERLLKIYEQAIASRYRFYSFGDAMLILPQATINAGDW

SEQ ID NO: 72188 - protein, 398 aa, Sphaerospermopsis reniformis
  misc_feature (1)..(398): tr|A0A480A0T4|A0A480A0T4_9CYAN S-adenosylmethionine:tRN A ribosyltransferase-isomerase OS=Sphaerospermopsis ren iformis OX=531300 GN=queA PE=3 SV=1
MPNAQCPMPNAHYPLPIPCLPFRKMSNLENQGVDLDRSLSGYDYELPTELIAQNPAVPRDSSRLLVIDSLSTGVEKPALDYIFRDLVEILKSGDLLVMNNTKVIPARLYGRKSTGAEVEVLLLEERQHNCWLALVKPGKYFKPGTQIIFDGQKLAAGNELTATVVERDEANGGRLLQFDLPENVPLVQVLEKFGEIPLPPYINASSAADEQYQTVYAQEQGAIAAPTAGLHFTPELLQKLRDIGINQAFLTLHVGVGTFRPVEVEDVTTHQMHEEWIEVSNATVEQIKATKAAGGRIIAVGTTVVRALEGAAQSGDLQPYVGKVNLFIYPGYQWRVVQGLITNFHLPRSSLLMLVSALIGRERLLKIYEQAIASRYRFYSFGDAMLILPQATINAGDW

SEQ ID NO: 72189 - protein, 372 aa, Sphaerotilus hippei
  misc_feature (1)..(372): tr|A0A318H0D6|A0A318H0D6_9BURK S-adenosylmethionine:tRN A ribosyltransferase-isomerase OS=Sphaerotilus hippei O X=744406 GN=queA PE=3 SV=1
MNLPPSPARHDHVVADFDFELPPELIAQQPAAERTGSRLLDGRAWPPVDRPFADLPGLLQAGDLLVFNDTQVIRARLHGHKDTGGGVEALIERVLPGAGARHEAWAHLRASKSPRAGQRVRFGPAGAQVEAEVLGRCGPEDSLFHLRFPSDVFEVLERIGHVPLPPYITHDDSADDVRRYQTVFAREPGAVAAPTAALHFDEAMLARLADAGIGQARVTLHVGAGTFQPVRVERLADHRMHSEWFEVPADTVAAIARTRAAGGRVVSVGTTTLRALESAAADPTLPVDASGRRLPLAGARETEIFITPGFEFQVVDRLITNFHLPRSTLLMLVSALAGHAHMRALYQHAIEQRYRFFSYGDAMLLDRVATPR

SEQ ID NO: 72190 - protein, 372 aa, Sphaerotilus natans
  misc_feature (1)..(372): tr|A0A059KJD9|A0A059KJD9_9BURK S-adenosylmethionine:tRN A ribosyltransferase-isomerase OS=Sphaerotilus natans s ubsp. natans DSM 6575 OX=1286631 GN=queA PE=3 SV=1
MTAYTVADFDFDLPQELIAQHPAPERSASRLLDGRTLPATERVFRELPDLLSPGDLLVFNDTRVIRARLHGAKDTGGSVEALVERVLPGAADGRHEVWAHLRASKSPRAGQTVHFRNAAGQSFPAEVLGRCGPENGLFHLRLPGDALALLEQFGHVPLPPYITHADDEDDARRYQTVFARVPGAVAAPTAALHFDEGVLAALEARDVRRASVTLHVGAGTFQPVRVESIADHRMHSEWFEVPQATVDAITETRARGGQVIAVGTTTLRSLESAALGTPDRLPRAGARDTDIFITPGFDFRVVDRLVTNFHLPRSTLMMLVSAFAGFDTIRTLYADAIARRMRFFSYGDAMLLQRAASAGNDGDPSGNSAVPR

SEQ ID NO: 72191 - protein, 389 aa, Sphaerotilus natans
  misc_feature (1)..(389): tr|A0A5C1PXF7|A0A5C1PXF7_9BURK S-adenosylmethionine:tRN A ribosyltransferase-isomerase OS=Sphaerotilus natans s ubsp. sulfidivorans OX=639200 GN=queA PE=3 SV=1
MHHSAPPPFPSQALPREPVNHTVADFDFDLPQELIAQHPTPERSASRLLDGRALPATERVFRELPDLLEPGDLLVFNDTRVIRARLHGAKDTGGSVEALVERVLPGTEDGRHEVWAHLRASKSPRAGQTVHFHNAAGERFAAEVLGRCGPENGLFHLRLPGDALTLLEQFGHVPLPPYITHADDEDDARRYQTVFARVPGAVAAPTAALHFDEGVLAALEARGVRRASVTLHVGAGTFQPVRVESISDHRMHSEWFEVPQATVDAIAETRARGGRVIAVGTTTLRSLESAALGTPDRLPRAGARDTDIFITPGFDFRVVDRLVTNFHLPRSTLMMLVSAFAGFDAIRTLYADAIARRMRFFSYGDAMLLQRAASAGNDGDPSGNSAVPR

SEQ ID NO: 72192 - protein, 108 aa, Sphingobacteriaceae bacterium
  misc_feature (1)..(108): tr|A0A4Q3EDA2|A0A4Q3EDA2_9SPHI S-adenosylmethionine:tRN A ribosyltransferase-isomerase (Fragment) OS=Sphingobac teriaceae bacterium OX=2021370 GN=EOP42_32925 PE=3 SV=1
KQADIVNRGIENKRRICAIGTTSMRTIESAVSASHTLKAANDWTSKFIFPPYDFSIANSMVTNFHTPESTLLMMISAFGGYEHVMNAYEVAIKEKYRFYSYGDAMLII

SEQ ID NO: 72193 - protein, 349 aa, Sphingobacteriaceae bacterium
  misc_feature (1)..(349): tr|A0A1X9ZCB2|A0A1X9ZCB2_9SPHI S-adenosylmethionine:tRN A ribosyltransferase-isomerase OS=Sphingobacteriaceae b acterium GW460-11-11-14-LB5 OX=1986952 GN=queA PE=3 SV= 1
MKLSQFKFNLPESLVANNPAEQRDEARLMVLHKDSGKIEHKIFKDVLGYFDDKDVMILNNTKVFPARLYGNKEKTGATIEVFLLRELNKELRLWDVLVDPARKIRVGNKLYFGDDDLLVAEVVDNTTSRGRTIRFLFEGTDEEFRKNVEILGETPLPKYIKRKATAEDKERYQTIFAKHEGAVAAPTAGLHFSRELMKRLELKGVEFAEVTLHVGLGTFRTVEVEDLTKHKMDSEQFIIEQKDANIVNKALEEKRKICAVGTTSMRAIESAVSANRTLKAANDWTSKFIFPPYDFSIANSMITNFHTPESTLLMMVSAFGGYENVMNAYEVAVKEKYKFYSYGDAMLII

SEQ ID NO: 72194 - protein, 349 aa, Sphingobacteriales bacterium
  misc_feature (1)..(349): tr|A0A0R2VH45|A0A0R2VH45_9SPHI S-adenosylmethionine:tRN A ribosyltransferase-isomerase OS=Sphingobacteriales ba cterium BACL12 MAG-120802-bin5 OX=1655599 GN=queA PE=3 SV=1
MKLSKFSFDLPESLIAQSPSKERDESKLMVVHRDTGKLENKKFKDILDYFDDGDVMVLNNTKVFNARLYGRKEKTGARIEVFMLRELNSDMHLWDVLVDPARKIRVGNKLYFGEDDMLVAEVVDNTTSRGRTIRFIHDGTSEELRRMLDILGETPLPKYIKRKPTDEDKERYQTIYAKNEGAVAAPTAGLHFTPELMKRLELKGVNFAEVTLHVGLGTFRSIEVEDLSKHKMDAEFIRIDKKAADTVNKGIEAHKRICAIGTTSVRTIETSVSANKLLKPEEGWTNLFIHPPYEFSICNSMITNFHLPKTSLIIMVAAFAGYDLTMEAYKKAIKDKYRFYSYGDAMLII

SEQ ID NO: 72195 - protein, 349 aa, Sphingobacteriales bacterium
  misc_feature (1)..(349): tr|A0A1M3H3H0|A0A1M3H3H0_9SPHI S-adenosylmethionine:tRN A ribosyltransferase-isomerase OS=Sphingobacteriales ba cterium 50-39 OX=1895841 GN=queA PE=3 SV=1
MKLSQFKFDLPLNLIAQHPAKKREDSRMMVVHRATGQIENKHFRDILDYFDDKDVFVVNNTKVFPARMYGRKEKTGAKIEVFLLRELNKPNRLWDVIVDPARKIRVGNKLYFGDNDELVAEVIDNTTSRGRTIRFLWDGTDDEFRQVLEVLGETPLPKYIKRKPDEEDKERYQTVYAKHEGAVAAPTAGLHFSKELIKRLEIKGVRFAEVTLHTGLGTFRPIEVEDLSKHKMDAEYYRIEDDACKIVNKARMGGHRICSIGTTTMRAVESSFTAEKLLKPSEGWTNTFIHPPYQFNIADALVTNFHLPKTSLLIMVCAFAGYDLAMEAYKKAIKDKYRFFSYGDAMLVV

SEQ ID NO: 72196 - protein, 410 aa, Sphingobacteriia bacterium
  misc_feature (1)..(410): tr|A0A259HLX4|A0A259HLX4_9BACT S-adenosylmethionine:tRN A ribosyltransferase-isomerase OS=Sphingobacteriia bact erium 39-39-8 OX=1970578 GN=B7X72_09505 PE=3 SV=1
MLAEQVKKIQIKDYSYELPDERIAKFPLDNRDQSKLLIANQPYQIDQYLNLAQHLPANSFLVFNNTKVVEARILFQKPTGGVIELFCLEPDESYADITTAMLQKGTVQWKCLVGGAKKWKEEFLEKTIIDQGQTITLRARRVAQGAEAYLIEFSWSNEQMSFAELLHIAGLIPLPPYLNRQAENSDAERYQTVYAKHDGSVAAPTAGLHFTEGVFASLASKGIQKDFVTLHVGAGTFKPVKADAMQDHEMHAEFIDVSISFIENLLSRLGDPIVPVGTTSMRTLESLYWLGGKTISNPSISLAELAVYQWDPYERNEVIPASIALASLLQWMKALQLIRLITKTQIIIAPGYQFRICSGLITNFHQPQSTLLLLVSALIGDKWKDLYDHAMKNDFRFLSYGDGCLIWNVS

SEQ ID NO: 72197 - protein, 469 aa, Sphingobacteriia bacterium
  misc_feature (1)..(469): tr|A0A1G3J3U6|A0A1G3J3U6_9BACT S-adenosylmethionine:tRN A ribosyltransferase-isomerase OS=Sphingobacteriia bact erium RIFOXYD2_FULL_35_12 OX=1802167 GN=A2546_08000 PE= 3 SV=1
MKHPSLLHIADFTYELPDHKIARYPLEQRDQSKLLIWGSSQNLMGAGHGSEVLESDFAPIRENTYANIADELPSASLLVFNNTKVVEARLLFQKPTGGLIELFCLEPADQYEDITTAMLQKGSVQWKCLVGGAKKWKEGSVQLSVEAPSGVGAAGGGAAASGAGLRIEATKVAALPDCFLIEFRWEPAGLSFAEVLHLAGDIPLPPYLNRATEEADKERYQTIYAKHDGSVAAPTAGLHFTESVFLKLSEKNILKAYVTLHVGAGTFKPVKAAQMKDHEMHAEFIDVTVETVEQLLAHVEKGIIAVGTTSLRTLESLYWIGVKTIRNPAISSDNLHVTQWEPYVSAGEIAENKSAQKNIPKEYTSGGDIVLPTATESLQSLLQWMQKNNASRIITKTQIIIAPGYSFKIIRALITNFHQPQSTLLLLVSAIVGENWKKIYQYALANEYRFLSYGDGSILWVAKPESVEN

SEQ ID NO: 72198 - protein, 349 aa, Sphingobacterium alimentarium
  misc_feature (1)..(349): tr|A0A4R3VS47|A0A4R3VS47_9SPHI S-adenosylmethionine:tRN A ribosyltransferase-isomerase OS=Sphingobacterium alim entarium OX=797292 GN=queA PE=3 SV=1
MKLSQFKFNLPESLLANEPSEHRDEARLMVLHKDTGKIEHKIFKDVLDYFDDKDVMILNNTKVFPARMYGNKEKTGATIEVFLLRELNKELRLWDVLVDPARKIRVGNKLYFGDDDLLVAEVVDNTTSRGRTIRFLFDGTDEEFRRNIEILGETPLPKYIKRKATPEDKFRYQTIYAKNEGAVAAPTAGLHFSRELMKRLELKGIDFAEITLHVGLGTFRTVEVEDLTKHKMDSEQFIITDEAARTVNKAIENKRRVCAVGTTSMRAIESSVSADRRLKPASDWTSKFIYPPYDFSIANSMITNFHTPESTLLVMIAAFAGYENVMNAYEEAVKEKYKFYSYGDAMLII

SEQ ID NO: 72199 - protein, 349 aa, Sphingobacterium alkalisoli
  misc_feature (1)..(349): tr|A0A4U0H961|A0A4U0H961_9SPHI S-adenosylmethionine:tRN A ribosyltransferase-isomerase OS=Sphingobacterium alka lisoli OX=1874115 GN=queA PE=3 SV=1
MKLSQFKFNLPESLLASEPSEHRDESRLMVLHRDTGKIEHKIFKDVLDYFDDKDVMILNNTKVFPARMYGNKEKTGATIEVFLLRELNRELRLWDVLVDPARKIRVGNKLYFGEEDLLVAEVVDNTTSRGRTIRFLFDGTDEEFRRNIEILGETPLPKYIKRKATPEDKFRYQTIYAKNEGAVAAPTAGLHFSRELMKRLELKGVDFAEVTLHVGLGTFRTVEVEDLTKHKMDSEQFIITDEAAKTVNKGIDNKRRICAVGTTSMRAIESSVSADRHLKPAADWTSKFIYPPYDFSIANSMITNFHTPESTLLVMIAAFAGYENIMNAYDVAVKEKYRFYSYGDAMLII

SEQ ID NO: 72200 - protein, 349 aa, Sphingobacterium cellulitidis
  misc_feature (1)..(349): tr|A0A235E8N3|A0A235E8N3_9SPHI S-adenosylmethionine:tRN A ribosyltransferase-isomerase OS=Sphingobacterium cell ulitidis OX=1768011 GN=queA PE=3 SV=1
MKLSQFNFNLPESLLASEPSEQRDESRLMVLHRDSGKIEHKIFKDVLDYFDDKDVMILNNTKVFPARMYGNKEKTGATIEVFLLRELNKELRLWDVLVDPARKIRVGNKLYFGDDDLLVAEVVDNTTSRGRTIRFLFDGTDEEFRKNIEILGETPLPKYIKRKATPEDKFRYQTIYAKNEGAVAAPTAGLHFSRELMKRLELKGVDFAEVTLHVGLGTFRTVEVEDLTKHKMDSEQYIISEEAARIVNKGIDDKRKICAVGTTSMRAIESSVSADKHLKAANDWTSKFIYPPYDFSIANSMITNFHTPQSTLLVMIAAFAGYENVMNAYEVAVKEKYRFYSYGDAMLII

SEQ ID NO: 72201 - protein, 349 aa, Sphingobacterium daejeonense
  misc_feature (1)..(349): tr|A0A4U9JVI1|A0A4U9JVI1_9SPHI S-adenosylmethionine:tRN A ribosyltransferase-isomerase OS=Sphingobacterium daej eonense OX=371142 GN=queA PE=3 SV=1
MKLSQFNFNLPESLLASEPSEQRDESRLMVLHRDSGKIEHKIFKDVLDYFDDKDVMILNNTKVFPARMYGNKEKTGATIEVFLLRELNKELRLWDVLVDPARKIRVGNKLYFGDDDLLVAEVVDNTTSRGRTIRFLFDGTDEEFRKNIEILGETPLPKYIKRKATPEDKFRYQTIYAKNEGAVAAPTAGLHFSRELMKRLELKGVDFAEVTLHVGLGTFRTVEVEDLTKHKMDSEQFIISEEAARIVNKGIDNKRKICAVGTTSMRAIESSVSADHHLKAANDWTSKFIYPPYDFSIANSMITNFHTPQSTLLVMIAAFAGYENVMNAYEVAVKEKYRFYSYGDAMLII

SEQ ID NO: 72202 - protein, 349 aa, Sphingobacterium deserti
  misc_feature (1)..(349): tr|A0A0B8T5W4|A0A0B8T5W4_9SPHI S-adenosylmethionine:tRN A ribosyltransferase-isomerase OS=Sphingobacterium dese rti OX=1229276 GN=queA PE=3 SV=1
MKLSQFKFNLPESLLASEPSEQRDESRLMVLHRDSGKIEHKIFKDVLDYFDDKDVMILNNTKVFPARMYGNKEKTGATIEVFLLRELNKELRLWDVLVDPARKIRVGNKLYFGDDDLLVAEVVDNTTSRGRTIRFLFEGTDEEFRRNIEILGETPLPKYIKRKATPEDKFRYQTIYAKNEGAVAAPTAGLHFSRELMKRLELKGVDFAEVTLHVGLGTFRTVEVEDLTKHKMDSEQFIISDEAARVVNKGIDAKRRVCAVGTTSMRAIESSVSADKHLKAANDWTSKFIYPPYDFSIANSMITNFHTPESTLLVMIAAFAGYENTMNAYEVAVKEKYRFYSYGDAMLIV

SEQ ID NO: 72203 - protein, 349 aa, Sphingobacterium detergens
  misc_feature (1)..(349): tr|A0A420BJ67|A0A420BJ67_9SPHI S-adenosylmethionine:tRN A ribosyltransferase-isomerase OS=Sphingobacterium dete rgens OX=1145106 GN=queA PE=3 SV=1
MKLSQFKFNLPESLLASEPSENRDESRLMVLHKDTGKIEHKIFKDVLDYFDDKDVMILNNTKVFPARLYGNKEKTGATIEVFLLRELNNELRLWDVLVDPARKIRVGNKLYFGDDDLLVAEVVDNTTSRGRTIRFLFDGTDEEFRRNIEILGETPLPKYIKRKATPEDKFRYQTIYAKNEGAVAAPTAGLHFSRELMKRLELKGVDFAEVTLHVGLGTFRTVEVEDLTKHKMDSEQFIITDEAAKVVNRAIDNKRRVCAVGTTSMRAIESSVSADHHLKAASDWTSKFIYPPYDFSIANSMVTNFHTPESTLLVMIAAFAGYENVMNAYEVAVKEKYRFYSYGDAMLII

SEQ ID NO: 72204 - protein, 349 aa, Sphingobacterium faecium
  misc_feature (1)..(349): tr|A0A2T5YAW3|A0A2T5YAW3_9SPHI S-adenosylmethionine:tRN A ribosyltransferase-isomerase OS=Sphingobacterium faec ium OX=34087 GN=queA PE=3 SV=1
MKLSQFKFNLPESLLASEPTENRDESRLMVLHRDTGKIEHKIFKDVLDYFDDKDVMILNNTKVFPARLYGNKEKTGATIEVFLLRELNKELRLWDVLVDPARKIRVGNKLYFGDDDLLVAEVVDNTTSRGRTIRFLFDGTDEEFRRNIEILGETPLPKYITRKATPEDKFRYQTIYAKNEGAVAAPTAGLHFSRELMKRLELKGVDFAEVTLHVGLGTFRTVEVEDLTKHKMDSEQFIITDEAAKTVNKAIDLKRRVCAVGTTSMRAIESAVSADRHLKPANDWTSKFIYPPYDFSIANSMITNFHTPESTLLVMIAAFGGYEHVMNAYEQAVKEKYRFYSYGDAMLII

SEQ ID NO: 72205 - protein, 349 aa, Sphingobacterium gobiense
  misc_feature (1)..(349): tr|A0A2S9JRD6|A0A2S9JRD6_9SPHI S-adenosylmethionine:tRN A ribosyltransferase-isomerase OS=Sphingobacterium gobi ense OX=1382456 GN=queA PE=3 SV=1
MKLSQFKFNLPESLLASEPSEQRDESRLMVLHRDSGKIEHKIFKDVLNYFDENDVMILNNTKVFPARMYGNKEKTGATIEVFLLRELNKELRLWDVLVDPARKIRVGNKLYFGEEDLLVAEVVDNTTSRGRTIRFLFDGTDEEFRRNIEILGETPLPKYIKRKATPEDKFRYQTIYAKNEGAVAAPTAGLHFSRELMKRLELKGVEFAEVTLHVGLGTFRTVEVEDLTKHKMDSEQFIISEEAARTVNKGIDDKRRICSVGTTSMRAIESSVSADKHLKPANDWTSKFIYPPYDFSIANSMITNFHTPESTLLVMIAAFGGYENVMNAYEVAVKEKYRFYSYGDAMLII

SEQ ID NO: 72206 - protein, 349 aa, Sphingobacterium haloxyli
  misc_feature (1)..(349): tr|A0A2S9J1E4|A0A2S9J1E4_9SPHI S-adenosylmethionine:tRN A ribosyltransferase-isomerase OS=Sphingobacterium halo xyli OX=2100533 GN=queA PE=3 SV=1
MKLSQFKFNLPESLLASEPSEQRDESRLMVLHRDSGKIEHKIFKDVLDYFDDKDVMILNNTKVFPARMYGNKEKTGATIEVFLLRELNKELRLWDVLVDPARKIRVGNKLYFGEEDLLVAEVVDNTTSRGRTIRFLFEGTDEEFRRNIEILGETPLPKYIKRKATPEDKFRYQTIYAKNEGAVAAPTAGLHFSRELMKRLELKGVEFAEVTLHVGLGTFRTVEVEDLTKHKMDSEQFIISEEAARTVNKGIDDKRRICSVGTTSMRAIESSVSADKHLKPANDWTSKFIYPPYDFSIANSMITNFHTPESTLLVMIAAFGGYENVMNAYEVAVKEKYRFYSYGDAMLII

SEQ ID NO: 72207 - protein, 349 aa, Sphingobacterium lactis
  misc_feature (1)..(349): tr|A0A1H5XKY1|A0A1H5XKY1_9SPHI S-adenosylmethionine:tRN A ribosyltransferase-isomerase OS=Sphingobacterium lact is OX=797291 GN=queA PE=3 SV=1
MKLSQFNFNLPESLLASEPSEQRDESRLMVLHRDSGKIEHKIFKDVLNYFDDKDVMILNNTKVFPARMYGNKEKTGATIEVFLLRELNKELRLWDVLVDPARKIRVGNKLYFGDDDLLVAEVVDNTTSRGRTIRFLFDGTDEEFRKNIEILGETPLPKYIKRKATPEDKFRYQTIYAKNEGAVAAPTAGLHFSRELMKRLELKGVEFAEVTLHVGLGTFRQVEVEDLTKHKMDSEQFIISEEAARLVNKGIDDKRKICAVGTTSMRAIESSVSADHHLKAANDWTSKFIYPPYDFSIANSMITNFHTPQSTLLVMIAAFAGYENVMNAYEVAVKEKYRFYSYGDAMLII

SEQ ID NO: 72208 - protein, 349 aa, Sphingobacterium mizutaii
  misc_feature (1)..(349): tr|A0A239XQB8|A0A239XQB8_9SPHI S-adenosylmethionine:tRN A ribosyltransferase-isomerase OS=Sphingobacterium mizu taii OX=1010 GN=queA PE=3 SV=1
MKLSQFNFNLPESLLASEPSEQRDESRLMVLHRDSGKIEHKIFKDVLDYFDDKDVMILNNTKVFPARMYGNKEKTGATIEVFLLRELNKELRLWDVLVDPARKIRVGNKLYFGDDDLLVAEVVDNTTSRGRTIRFLFDGTDEEFRKNIEILGETPLPKYIKRKATPEDKFRYQTIYAKNEGAVAAPTAGLHFSRELMKRLELKGVDFAEVTLHVGLGTFRTVEVEDLTKHKMDSEQFIISEEAARIVNTGIDNKRKICAVGTTSMRAIESSVSADKHLKAANDWTSKFIYPPYDFSIANSMITNFHTPQSTLLVMIAAFAGYENVMNAYEVAVKEKYRFYSYGDAMLII

SEQ ID NO: 72209 - protein, 349 aa, Sphingobacterium multivorum
  misc_feature (1)..(349): tr|A0A2X2JFF0|A0A2X2JFF0_SPHMU S-adenosylmethionine:tRN A ribosyltransferase-isomerase OS=Sphingobacterium mult ivorum OX=28454 GN=queA PE=3 SV=1
MKLSQFKFNLPESLLASEPSENRDESRLMVLHRDTGKIEHKIFKDVLDYFDDKDVMILNNTKVFPARLYGNKEKTGATIEVFLLRELNNELRLWDVLVDPARKIRVGNKLYFGDDDLLVAEVVDNTTSRGRTIRFLFDGTDEEFRRNIEILGETPLPKYIKRKATPEDKFRYQTIYAKNEGAVAAPTAGLHFSRELMKRLELKGVDFAEVTLHVGLGTFRTVEVEDLTKHKMDSEQFIITDEAARVVNKAIDNKRRVCAVGTTSMRAIESSVSADHHLKAASDWTSKFIYPPYDFSIANSMITNFHTPESTLLVMIAAFAGYENVMNAYEVAVKEKYRFYSYGDAMLII

SEQ ID NO: 72210 - protein, 349 aa, Sphingobacterium nematocida
  misc_feature (1)..(349): tr|A0A1T5EIK0|A0A1T5EIK0_9SPHI S-adenosylmethionine:tRN A ribosyltransferase-isomerase OS=Sphingobacterium nema tocida OX=1513896 GN=queA PE=3 SV=1
MKLSQFKFNLPESLLASEPSEQRDESRLMVLHKDTGKIEHKIFKDVLDYFDDKDVMILNDTKVFPARMYGNKEKTGATIEVFLLRELNKELRLWDVLVDPARKIRVGNKLYFGDDDLLVAEVVDNTTSRGRTIRFLFEGTDEEFRRNIEILGETPLPKYIKRKATPEDKFRYQTIYAKNEGAVAAPTAGLHFSRELMKRLELKGVDFAEITLHVGLGTFRTVEVEDLTKHKMDSEQFIITEEAAKTVNRAIDNKRRICSVGTTSMRAIESSVSADKHLKAGTDWTSKFIYPPYEFSIANSMITNFHTPESTLLVMIAAFGGYENVMNAYEIAVKEKYRFYSYGDAMLII

SEQ ID NO: 72211 - protein, 349 aa, Sphingobacterium paludis; identical to SEQ ID NO: 72202
  misc_feature (1)..(349): tr|A0A4R7DB25|A0A4R7DB25_9SPHI S-adenosylmethionine:tRN A ribosyltransferase-isomerase OS=Sphingobacterium palu dis OX=1476465 GN=queA PE=3 SV=1

SEQ ID NO: 72212 - protein, 349 aa, Sphingobacterium paucimobilis
  misc_feature (1)..(349): tr|U2J7X5|U2J7X5_9SPHI S-adenosylmethionine:tRNA ribosy ltransferase-isomerase OS=Sphingobacterium paucimobilis HER1398 OX=1346330 GN=queA PE=3 SV=1
MKLSQFKFNLPESLLASEPSEQRDESRLMVLHKDTGKIEHKIFKDVLDYFDDKDVMILNDTKVFPARMYGNKEKTGATIEVFLLRELNRELRLWDVLVDPARKIRVGNKLYFGDDDLLVAEVVDNTTSRGRTIRFLFEGTDEEFRRNIEILGETPLPKYIKRKATPEDKFRYQTIYAKNEGAVAAPTAGLHFSRELMKRLELKGVDFAEITLHIGLGTFRTVEVEDLTKHKMDSEQFIITDDAAKTVNRAIDDKRRICAVGTTSMRAIESSVSADRHLKPGSDWTSKFIYPPYEFSIANSMITNFHTPESTLLVMIAAFGGYENVMNAYEVAVKEKYRFYSYGDAMLII

SEQ ID NO: 72213 - protein, 349 aa, Sphingobacterium psychroaquaticum
  misc_feature (1)..(349): tr|A0A1X7I538|A0A1X7I538_9SPHI S-adenosylmethionine:tRN A ribosyltransferase-isomerase OS=Sphingobacterium psyc hroaquaticum OX=561061 GN=queA PE=3 SV=1
MKLSQFKFNLPESLLASEPSEQRDEARLMVLHRDSGKIEHKIFKDVLDYFDDQDVMILNNTKVFPARMYGNKEKTGATIEVFLLRELNKELRLWDVLVDPARKIRVGNKLYFGDDDLLVAEVVDNTTSRGRTIRFLFDGTDEEFRRNIEILGETPLPKYIKRKATPEDKFRYQTIYAKNEGAVAAPTAGLHFSRELMKRLELKGINFAEVTLHVGLGTFRTVEVEDLTKHKMDSEQFIITDEAAKIVNKGIDSKRRVCAVGTTSMRAIESAVSADRHLKASSDWTSKFIYPPYDFSIANSMITNFHTPESTLLVMIAAFAGYENTMNAYEVAVKEKYRFYSYGDAMLII

SEQ ID NO: 72214 - protein, 349 aa, Sphingobacterium siyangense
  misc_feature (1)..(349): tr|A0A420GAR4|A0A420GAR4_9SPHI S-adenosylmethionine:tRN A ribosyltransferase-isomerase OS=Sphingobacterium siya ngense OX=459529 GN=queA PE=3 SV=1
MKLSQFKFNLPESLLASEPSENRDESRLMVLHRDTGKIEHKIFKDVLDYFDDKDVMILNNTKVFPARLYGNKEKTGATIEVFLLRELNNELRLWDVLVDPARKIRVGNKLYFGDDDLLVAEVVDNTTSRGRTIRFLFDGTDEEFRRNIEILGETPLPKYIKRKATPEDKFRYQTIYAKNEGAVAAPTAGLHFSRELMKRLELKGVDFAEVTLHVGLGTFRTVEVEDLTKHKMDSEQFIITDEAARVVNRAIDNKRRVCAVGTTSMRAIESSVSADHHLKAASDWTSKFIYPPYDFSIANSMITNFHTPESTLLVMIAAFAGYENVMNAYEVAVKEKYRFYSYGDAMLIV

SEQ ID NO: 72215 - protein, 349 aa, Sphingobacterium sp.
  misc_feature (1)..(349): tr|A0A4P7DTH1|A0A4P7DTH1_9SPHI S-adenosylmethionine:tRN A ribosyltransferase-isomerase OS=Sphingobacterium sp. CZ-2 OX=2557994 GN=queA PE=3 SV=1
MKLSQFNFNLPESLLASEPSEQRDESRLMVLHRDSGKIEHKIFKDVLDYFDDKDVMILNNTKVFPARMYGNKEKTGATIEVFLLRELNKELRLWDVLVDPARKIRVGNKLYFGDDDLLVAEVVDNTTSRGRTIRFLFDGTDEEFRKNIEILGETPLPKYIKRKATPEDKFRYQTIYAKNEGAVAAPTAGLHFSRELMKRLELKGVDFAEVTLHVGLGTFRTVEVEDLTKHKMDSEQFIISEEAARVVNKGIDAKRRICAVGTTSMRAIESSVSADKHLKAANDWTSKFIYPPYDFSIANSMITNFHTPQSTLLVMIAAFAGYENVMNAYEVAVKEKYRFYSYGDAMLII

SEQ ID NO: 72216 - protein, 349 aa, Sphingobacterium sp.
  misc_feature (1)..(349): tr|A0A4R3ACZ5|A0A4R3ACZ5_9SPHI S-adenosylmethionine:tRN A ribosyltransferase-isomerase OS=Sphingobacterium sp. JUb78 OX=2485111 GN=queA PE=3 SV=1
MKLSQFKFNLPESLLASEPTENRDESRLMVLHRDTGKIEHKIFKDVLDYFDDKDVMILNNTKVFPARLYGNKEKTGATIEVFLLRELNKELRLWDVLVDPARKIRVGNKLYFGDDDLLVAEVVDNTTSRGRTIRFLFDGTDEEFRRNIEILGETPLPKYITRKATPEDKFRYQTIYAKNEGAVAAPTAGLHFSRELMKRLELKGVDFAEVTLHVGLGTFRTVEVEDLTKHKMDSEQFIITEEAAKTVNKAIDLKRRVCAVGTTSMRAIESAVSADRHLKPANDWTSKFIYPPYDFSIANSMITNFHTPESTLLVMIAAFGGYEHVMNAYEQAVKEKYRFYSYGDAMLII

SEQ ID NO: 72217 - protein, 349 aa, Sphingobacterium spiritivorum
  misc_feature (1)..(349): tr|C2FW72|C2FW72_9SPHI S-adenosylmethionine:tRNA ribosy ltransferase-isomerase OS=Sphingobacterium spiritivorum ATCC 33300 OX=525372 GN=queA PE=3 SV=1
MKLSQFKFNLPESLLASEPSEQRDEARLMVLHRDSGKIEHKIFKDVLDYFDDKDVMILNNTKVFPARMYGNKEKTGATIEVFLLRELNKELRLWDVLVDPARKIRVGNKLYFGDDDLLVAEVVDNTTSRGRTIRFLFDGTDEEFRRNIEILGETPLPKYIKRKATPEDKYRYQTIYAKNEGAVAAPTAGLHFSRELMKRLELKGVDFAEVTLHVGLGTFRTVEVEDLTKHKMDSEQFIITEEAARIVNKGIDNKRRVCAVGTTSMRAIESSVSADRHLKAASDWTSKFIYPPYDFSIANSMITNFHTPESTLLVMIAAFAGYENVMNAYEVAVKEKYRFYSYGDAMLII

SEQ ID NO: 72218 - protein, 349 aa, Sphingobacterium spiritivorum; identical to SEQ ID NO: 72217
  misc_feature (1)..(349): tr|A0A380BGY0|A0A380BGY0_9SPHI S-adenosylmethionine:tRN A ribosyltransferase-isomerase OS=Sphingobacterium spir itivorum OX=258 GN=queA PE=3 SV=1

SEQ ID NO: 72219 - protein, 349 aa, Sphingobacterium thalpophilum
  misc_feature (1)..(349): tr|A0A4U9W640|A0A4U9W640_9SPHI S-adenosylmethionine:tRN A ribosyltransferase-isomerase OS=Sphingobacterium thal pophilum OX=259 GN=queA PE=3 SV=1
MKLSQFKFNLPESLLASEPSENRDESRLMVLHKDTGKIEHKIFKDVLDYFDDKDVMILNNTKVFPARLYGNKEKTGATIEVFLLRELNNELRLWDVLVDPARKIRVGNKLYFGDDDLLVAEVVDNTTSRGRTIRFLFDGTDEEFRRNIEILGETPLPKYIKRKATPEDKFRYQTIYAKNEGAVAAPTAGLHFSRELMKRLELKGVDFAEVTLHVGLGTFRTVEVEDLTKHKMDSEQFIITEEAARIVNKAIDNKRRVCAVGTTSMRAIESSVSADHHLKPASDWTSKFIYPPYDFSIANSMITNFHTPESTLLVMIAAFAGYENVMNAYEVAVKEKYRFYSYGDAMLII

SEQ ID NO: 72220 - protein, 349 aa, Sphingobacterium wenxiniae
  misc_feature (1)..(349): tr|A0A1I6SS41|A0A1I6SS41_9SPHI S-adenosylmethionine:tRN A ribosyltransferase-isomerase OS=Sphingobacterium wenx iniae OX=683125 GN=queA PE=3 SV=1
MKLSQFKFNLPESLLASEPSEHRDESRLMVLHRDTGKIEHKIFKDVLDYFDDQDVMILNNTKVFPARMYGNKEKTGATIEVFLLRELNKELRLWDVLVDPARKIRVGNKLYFGDDDLLVAEVVDNTTSRGRTIRFLFDGTDEEFRRNIEILGETPLPKYIKRKATPEDKFRYQTIYAKNEGAVAAPTAGLHFSRELMKRLELKGINFAEVTLHVGLGTFRTVEVEDLTKHKMDSEQFIITDQAAKVVNKGIDEKRRVCAVGTTSMRAIESSVSADKHLKAANDWTSKFIYPPYDFSIANSMITNFHTPESTLLVMIAAFGGYENVMNAYEVAVKEKYRFYSYGDAMLII

SEQ ID NO: 72221 - protein, 368 aa, Sphingobacterium yanglingense
  misc_feature (1)..(368): tr|A0A4R6W8I0|A0A4R6W8I0_9SPHI S-adenosylmethionine:tRN A ribosyltransferase-isomerase OS=Sphingobacterium yang lingense OX=1437280 GN=queA PE=3 SV=1
MCAFLALLRTVKTHKYCLHMKLSQFKFNLPESLLASEPSEQRDESRLMVLHKDTGKIEHKIFKDVLDYFDDKDVMILNDTKVFPARMYGNKEKTGATIEVFLLRELNRELRLWDVLVDPARKIRVGNKLYFGDDDLLVAEVVDNTTSRGRTIRFLFEGTDEEFRRNIEILGETPLPKYIKRKATPEDKFRYQTIYAKNEGAVAAPTAGLHFSRELMKRLELKGVDFAEITLHIGLGTFRTVEVEDLTKHKMDSEQFIITDEAANRVNRAIDDKRRICAVGTTSMRAIESSVSADRHLKPGTDWTSKFIYPPYEFSIANSMITNFHTPESTLLVMIAAFGGYENVMNAYEVAVKEKYRFYSYGDAMLII

SEQ ID NO: 72222 - protein, 342 aa, Sphingobium algicola
  misc_feature (1)..(342): tr|A0A5J5H5I7|A0A5J5H5I7_9SPHN tRNA preQ1(34) S-adenosy lmethionine ribosyltransferase-isomerase QueA OS=Sphing obium algicola OX=2048546 GN=queA PE=4 SV=1
MRVDLFDFDLPPENIALRPASPRDSARMLLVPGDGAMQDRIVRDLPSMLRAGDVLVFNDTKVIPAQLEGMRGEARIGATLHKRQGPRQWQAFLRNAKRVRAGDRIDFGAGVTAIAGPRDEDGGVTLDFEGDEPVEVLLERAGRMPLPPYIASKRPTDERDRSDYQTMFAREDGAVAAPTAALHFTPALMAAIADAGIATETLTLHVGAGTFLPVKADDTDDHRMHAEWGRIDAATADRLNAARAAGGRLIAVGTTSLRLLESAAGEDDVIRPFADETRIFITPGYRFRAVDGLMTNFHLPKSTLFMLVSALMGTERMRAVYGHAIETGYRFYSYGDSSLLLP

SEQ ID NO: 72223 - protein, 342 aa, Sphingobium algorifonticola
  misc_feature (1)..(342): tr|A0A437J9Q6|A0A437J9Q6_9SPHN S-adenosylmethionine:tRN A ribosyltransferase-isomerase OS=Sphingobium algorifon ticola OX=2008318 GN=queA PE=3 SV=1
MRVDLFDFDLPPERIALRPAVPRDAARMLVAEGPTGLSDRIVSDLPQILRPGDCLVFNDTRVIPAQLEGTRGQARIGATLHKRLGLRSWQAFVRNGKRVRAGDRIDFGGGVTAIAGPKDADGAIALDFEGDEPVELLLERAGQMPLPPYIAAKRPTDARDAQDYQTMFAREDGAVAAPTAALHFTPALVDALAVRGVLTQTLTLHVGAGTFLPVKAQDTQDHHMHAEWGRIEPQAADRLNAVRAAGGRIIAVGTTSLRLLESATGEDGIIRPFADETRIFITPGYRFRAIDGLMTNFHLPRSTLFMLVSALMGRERMQAAYAHAIAQGYRFYSYGDSSLLLP

SEQ ID NO: 72224 - protein, 342 aa, Sphingobium amiense
  misc_feature (1)..(342): tr|A0A494W2U5|A0A494W2U5_9SPHN S-adenosylmethionine:tRN A ribosyltransferase-isomerase OS=Sphingobium amiense O X=135719 GN=queA PE=3 SV=1
MRVDLFDFDLPQDNIALRPASPRDSARLLLVPGDGAMQDHIVRNLPSLLRSGDVLVFNDTKVIPAQLEGKRGEARIGATLHRRLGLRQWQAFLRNARRVRAGDRIDFGAGVTAIAGPRDEDGGVTLDFEGEEPVEILLERAGRMPLPPYIASKRPTDERDRSDYQTMFAREDGAVAAPTAALHFTPALMTAIAQAGVLTETLTLHVGAGTFLPVKADDTDDHRMHAEWGRIDAATAERLNAARAAGGRLIAVGTTSLRLLESACGEDGVIRPFADETRIFITPGYRFRAVDGLMTNFHLPKSTLFMLVSALMGRERMQSAYAHAIATGYRFYSYGDSSLLLP

SEQ ID NO: 72225 - protein, 234 aa, Sphingobium baderi
  misc_feature (1)..(234): tr|T0HMZ5|T0HMZ5_9SPHN S-adenosylmethionine:tRNA ribosy ltransferase-isomerase (Fragment) OS=Sphingobium baderi LL03 OX=1114964 GN=L485_15280 PE=3 SV=1
MRVDLFDFDLPPERIALRPAAPRDSARLMLVDGNAPIEDRIVRDLPGLLRAGDVLVFNDTRVIPAQLEGMRGQAKIGATLHKRLGLRQWQAFLRNARRVRDGDRIDFGAGVTAIAGPRDGEGGVTLRFEGEEPVEVLLERAGRMPLPPYIASKRPTDERDRADYQTMFARKDGAVAAPTAALHFTPDLMAGLAAAGVATETLTLHVGAGTFLPVKAEDTDDHRMHAEWGRIDAA

SEQ ID NO: 72226 - protein, 344 aa, Sphingobium baderi
  misc_feature (1)..(344): tr|A0A0S3EY66|A0A0S3EY66_9SPHN S-adenosylmethionine:tRN A ribosyltransferase-isomerase OS=Sphingobium baderi OX =1332080 GN=queA PE=3 SV=1
MRVDLFDFDLPPERIALRPASPRDSARLMLVAGDAPIADGVVRDLPALLRKGDVLVFNDTRVIPAQLEGIRGQAKVGATLHKRLGLRQWQAFLRNAKRVRDGDRIDFGAGVTAIAGPRDEDGGVTLSFEGDEPVELLLERAGRMPLPPYIASKRPTDERDRADYQTMFAQKDGAVAAPTAALHFTPELMEGLAKAGVATETLTLHVGAGTFLPVKADDTDDHRMHAEWGRIDAATADRLNAARAGGGRLIAVGTTSLRLLESAAGEDGVIRPFEDETRIFITPGYRFRAVDGLMTNFHLPKSTLFMLVSALMGRDRMQAAYAHAISQGYRFYSYGDSSLLLPQG

SEQ ID NO: 72227 - protein, 344 aa, Sphingobium barthaii
  misc_feature (1)..(344): tr|A0A4R6FN65|A0A4R6FN65_9SPHN S-adenosylmethionine:tRN A ribosyltransferase-isomerase OS=Sphingobium barthaii OX=1054037 GN=queA PE=3 SV=1
MRVDLFDFDLPPDRIALRPASPRDSARLLLVSGDAPFQDRIVRDLPDLLRAGDVLVFNDTKVIPAQLEGERGQAKIGATLHKRLGLRQWQAFLRNAKRVRDGDRIDFGNGVSAVAGPRDEEGGVTLRFEGEEPVELLLERAGRMPLPPYIASKRPTDERDRSDYQTMFAREDGAVAAPTAALHFTTELMAVVEKAGIMTETLTLHVGAGTFLPVKAEDTDDHRMHAEWGRIDQATADRLNAARAAGGRLIAVGTTSLRLLESATGEDGIIRPFADETRIFITPGYRFRAVDGLMTNFHLPKSTLFMLVSALMGTEKMQSVYRHAIDGGYRFYSYGDSSLLLPKR

SEQ ID NO: 72228 - protein, 344 aa, Sphingobium chinhatense
  misc_feature (1)..(344): tr|W1L073|W1L073_9SPHN S-adenosylmethionine:tRNA ribosy ltransferase-isomerase OS=Sphingobium chinhatense IP26 OX=1346790 GN=queA PE=3 SV=1
MRVDLFDFDLPPESIALRPASPRHSARLLLAAGDAPFQDRIVRDLPGLLRPGDVLVFNDTKVIPAQLEGMRGQAKIGATLHKRLGLRQWQAFLRNAKRVRDGDRIDFGNGVTAVAGPRDEEGGVMLRFEGEEPVELLLERAGRMPLPPYIASKRPTDERDRSDYQTMFAREDGAVAAPTAALHFTPELMTAIEKAGIGTETLTLHVGAGTFLPVKAEDTDDHHMHAEWGRIDQATAGRLNAARAAGGRLIAVGTTSLRLLESATGEDGIIRPFEDETRIFITPGYRFRAIDGLMTNFHLPKSTLFMLVSALMGTEKMQSVYRHAIDGGYRFYSYGDSSLLLPNP

SEQ ID NO: 72229 - protein, 37 aa, Sphingobium chlorophenolicum
  misc_feature (1)..(37): tr|A0A081RJF3|A0A081RJF3_SPHCR S-adenosylmethionine:tRN A ribosyltransferase-isomerase OS=Sphingobium chlorophe nolicum OX=46429 GN=queA_2 PE=3 SV=1
MLVSALMGRERMQAAYDHAIAQGYRFYSYGDSSLLLP

SEQ ID NO: 72230 - protein, 344 aa, Sphingobium chlorophenolicum
  misc_feature (1)..(344): tr|A0A081RJE1|A0A081RJE1_SPHCR S-adenosylmethionine:tRN A ribosyltransferase-isomerase OS=Sphingobium chlorophe nolicum OX=46429 GN=queA_1 PE=3 SV=1
MRVDLFDFDLPPENIALRPASPRDSARLLLVSGDAPFEDRIVRDLPGLLGPGDVLVFNDTKVIPAQLEGMRGEARIGATLHKRLSLRQWQAFLRNAKRVRDGDRIDFGAGVTAIAGPRDEDGGVTLSFEGEEPVEVLLERAGRMPLPPYIASKRPTDERDRSDYQTMFAREDGAVAAPTAALHFTPELTAELAKAGVGTETLTLHVGAGTFLPVKAEDTDDHRMHAEWGRIDQPTADRLNAARQAGGRLIAVGTTSLRLLESATDEHGVIHPFADETRIFITPGYRFRAVDGLMTNFHLPKSTLFMLVSALMGTEKMQSAYRHAIKEGYRFYSYGDSSLLLPEG

SEQ ID NO: 72231 - protein, 342 aa, Sphingobium chungbukense
  misc_feature (1)..(342): tr|A0A0M3ALT9|A0A0M3ALT9_9SPHN S-adenosylmethionine:tRN A ribosyltransferase-isomerase OS=Sphingobium chungbuke nse OX=56193 GN=queA PE=3 SV=1
MRVDLFDFNLPPESIALRPASPRDSARLLLVAGEAPFGDRIVRDLPGLLRAGDVLVFNDTRVIPAQLEGMRGQAKIGATLHKRLGLRQWQAFLRNAKRVRDGDRIDFGAGVAALAGPRDEDGGVTLSFEGEEPVEVLLERAGRMPLPPYIASKRPTDERDRSDYQTMFAREDGAVAAPTAALHFTPELMVALEAAGVKTETLTLHVGAGTFLPVKADDTDDHRMHAEWGRIDQATADRLNAARKAGGRLIAVGTTSLRLLESAVGEDGIVRPFADETRIFITPGYRFRAVDGLMTNFHLPRSTLFMLVSALMGWERMQAVYAHAIAEGYRFYSYGDSSLLLP

SEQ ID NO: 72232 - protein, 344 aa, Sphingobium cloacae
  misc_feature (1)..(344): tr|A0A1E1F138|A0A1E1F138_9SPHN S-adenosylmethionine:tRN A ribosyltransferase-isomerase OS=Sphingobium cloacae O X=120107 GN=queA PE=3 SV=1
MRVDLFDFDLPAERIALRPASPRDSARLMLVAGNAPIEDRIVRDLPGLLRAGDVLVFNDTRVIPAQLEGMRGAAKIGATLHKRLGLRQWQAFLRNAKRVRDGDRIDFGAGVTAIAGPRDEDGGVTLHFEGEEPVELLLERAGRMPLPPYIASKRSTDERDKSDYQTIFAREDGAVAAPTAALHFTPDLMAGLASAGIVTETLTLHVGAGTFLPVKADDTDDHRMHAEWGRIDAAAADRLNAARAAGGRLIAVGTTSLRLLESASGEDGVIRPFEDETRIFITPGYRFRAVDGLMTNFHLPRSTLFMLVSALMGRDRMQAAYAHAIAQGYRFYSYGDSSLLLPGE

SEQ ID NO: 72233 - protein, 346 aa, Sphingobium cupriresistens
  misc_feature (1)..(346): tr|A0A4V1WCC2|A0A4V1WCC2_9SPHN S-adenosylmethionine:tRN A ribosyltransferase-isomerase OS=Sphingobium cupriresi stens OX=1132417 GN=queA PE=3 SV=1
MRVELFDFDLPPENIALRPASPRDSARLLLAPGNGAMEDHVVRDLPGLLRAGDVLVFNDTKVIPAQLEGMRGEARIGATLHKRQGLRQWQAFLRNAKRVRAGDRIDFGAGVTAIAGPRDEDGGVTLDFEGDEPVEILLERAGRMPLPPYIASKRPTDERDRSDYQTMFARKDGAVAAPTAALHFTPDLMAALDQAGITTETLTLHVGAGTFLPVKADDTDDHRMHAEWGRIDAATVDRLNAARAAGGRLIAVGTTSLRLLESAVDKDGLIRPFADETRIFITPGYRFKAVDGLMTNFHLPKSTLFMLVSALMGTDRMRAVYGHAIETGYRFYSYGDSSLLLPQRSV

SEQ ID NO: 72234 - protein, 346 aa, Sphingobium czechense
  misc_feature (1)..(346): tr|A0A0J7XV86|A0A0J7XV86_9SPHN S-adenosylmethionine:tRN A ribosyltransferase-isomerase OS=Sphingobium czechense LL01 OX=1420583 GN=queA PE=3 SV=1
MRVELFDFDLPPENIALRPASPRDSARLLLAPGNGAMEDHVVRDLPGLLRAGDVLVFNDTKVIPAQLEGMRGEARIGATLHKRQGLRQWQAFLRNAKRVRAGDRIDFGAGVTAIAGPRDEDGGVTLDFEGDEPVEILLERAGRMPLPPYIASKRPTDERDRSDYQTMFARKDGAVAAPTAALHFTPDLMAALDQAGITTETLTLHVGAGTFLPVKADDTDDHRMHAEWGRIDAATVDRLNAARAAGGRLIAVGTTSLRLLESAVDKDGLIRPFADETRIFITPGYRFKAIDGLMTNFHLPKSTLFMLVSALMGTDRMRAVYGHAIETGYRFYSYGDSSLLLPQRSV

SEQ ID NO: 72235 - protein, 356 aa, Sphingobium faniae
  misc_feature (1)..(356): tr|A0A1G4R6C9|A0A1G4R6C9_9SPHN S-adenosylmethionine:tRN A ribosyltransferase-isomerase OS=Sphingobium faniae OX =570446 GN=queA PE=3 SV=1
MRVDLFDFDLPPERIALRPASPRDSARLMLVKGGAPIEDRIVRDLPDLLRAGDVLVFNDTRVIPAQLEGLRGQAKVGATLHKRLGLRQWQAFLRNARRVRDGDRIDFGAGVTAIAGPRDEDGGVTLNFEGDEPVELLLERAGRMPLPPYIASKRPTDERDRADYQTMFAQKDGAVAAPTAALHFTPDLMAALKAAGIGTETLTLHVGAGTFLPVKADDTDHHRMHAEWGRIDAAAADRLNAARAAGGRLIAVGTTSLRLLESATGEDGVIRPFADETRIFITPGYRFRAVDGLMTNFHLPRSTLFMLVSALMGRDRMQAAYAHAIVEGYRFYSYGDSSLLLPGGQDGKSASGPALG

SEQ ID NO: 72236 - protein, 344 aa, Sphingobium francense
  misc_feature (1)..(344): tr|A0A4Q4J9N2|A0A4Q4J9N2_9SPHN S-adenosylmethionine:tRN A ribosyltransferase-isomerase OS=Sphingobium francense OX=332057 GN=queA PE=3 SV=1
MRVDLFDFDLPPESIALRPASPRHSARLLLAAGDAPFQDRIVRDLPGLLRPGDVLVFNDTKVIPAQLEGIRGQAKIGATLHKRLGLRQWQAFLRNAKRVRDGDRIDFGNGVTAVAGPRDEEGGVMLRFEGEEPVELLLERAGRMPLPPYIASKRPTDERDRSDYQTMFAREDGAVAAPTAALHFTPELMTAIEKAGIGTETLTLHVGAGTFLPVKVEDTDDHHMHAEWGRIDQATADRLNAARAAGGRLIAVGTTSLRLLESATGEDGIIRPFEDETRIFITPGYRFRAVDGLMTNFHLPKSTLFMLVSALMGTEKMQSVYRHAIDGGYRFYSYGDSSLLLPNP

SEQ ID NO: 72237 - protein, 344 aa, Sphingobium fuliginis
  misc_feature (1)..(344): tr|A0A4Q4J5K2|A0A4Q4J5K2_SPHSA S-adenosylmethionine:tRN A ribosyltransferase-isomerase OS=Sphingobium fuliginis (strain ATCC 27551) OX=336203 GN=queA PE=3 SV=1
MRVDLFDFDLPPESIALRPASPRDAARLLLVPGDAPFQDRIVRDLPDLLRAGDVLVFNDTRVIPAQLEGMRGQARVGATLHKRLGLRQWQAFLRNAKRVRDGDWIDFGNGVTAVAGPRDEDGGVTLRFEGEEPVELLLERAGRMPLPPYIASKRPTDERDRSDYQTMFAREDGAVAAPTAALHFTPELMAAVEKAGVRTETLTLHVGAGTFLPVKADDTDDHRMHAEWGRIDQATADRLNAARAAGGRLIAVGTTSLRLLESATGEDGIIRPFADETRIFITPGYRFRAVDGLMTNFHLPKSTLFMLVSALMGTEKMLSVYRHAIDRGYRFYSYGDSSLLLPQP

SEQ ID NO: 72238 - protein, 344 aa, Sphingobium fuliginis
  misc_feature (1)..(344): tr|A0A5B8CGA2|A0A5B8CGA2_SPHSA S-adenosylmethionine:tRN A ribosyltransferase-isomerase OS=Sphingobium fuliginis ATCC 27551 OX=1208342 GN=queA PE=3 SV=1
MRVDLFDFDLPPESIALRPASPRDAARLLLVPGDAPFQDRIVRDLPDLLRAGDVLVFNDTRVIPAQLEGMRGQAKVGATLHKRLGLRQWQAFLRNAKRVRDGDRIDFGNGVTAVAGPRDEDGGVTLCFEGEEPVELLLERAGRMPLPPYIASKRPTDERDRSDYQTMFAREDGAVAAPTAALHFTPELMAAVEKAGVRTETLTLHVGAGTFLPVKADDTDDHRMHAEWGRIDQATADRLNAARAAGGRLIAVGTTSLRLLESATGEDGIIRPFADETRIFITPGYRFRAVDGLMTNFHLPKSTLFMLVSALMGTEKMLSVYRHAIDRGYRFYSYGDSSLLLPQP

SEQ ID NO: 72239 - protein, 342 aa, Sphingobium herbicidovorans
  misc_feature (1)..(342): tr|A0A086PF89|A0A086PF89_SPHHM S-adenosylmethionine:tRN A ribosyltransferase-isomerase OS=Sphingobium herbicido vorans (strain ATCC 700291 / DSM 11019 / NBRC 16415 / M H) OX=1219045 GN=queA PE=3 SV=1
MRVDLFDFDLPPENIALRPASPRDSARLLLVSGDASLRDHCVRDLPSLLRAGDVLVFNDTKVIPAQLEGMRGQAKVGATLHKRLGLRQWQAFLRNAKRVREGDRIDFGGGVTAIAGPRDDEGGVTLTFEGEEPVELLLERAGRMPLPPYIASKRPTDARDRSDYQTMFAREDGAVAAPTAALHFTPELMAALADAGVASETLTLHVGAGTFLPVKADDTDDHRMHAEWGRIDQATADRLNAARQKGCRLIAVGTTSLRLLESACDADGLVRPFADETRIFITPGYRFRAIDGLMTNFHLPRSTLFMLVSALMGRDRMQAAYAHAIATGYRFYSYGDSSLLLP

SEQ ID NO: 72240 - protein, 342 aa, Sphingobium hydrophobicum
  misc_feature (1)..(342): tr|A0A249MPF8|A0A249MPF8_9SPHN S-adenosylmethionine:tRN A ribosyltransferase-isomerase OS=Sphingobium hydrophob icum OX=1673076 GN=queA PE=3 SV=1
MRVDLFDFDLPPENIALRPASPRDSARLLLVPGEGDFANLSVRDLPSLLRAGDVLVFNDTRVIPAQLEGMRGNARIGATLHKRLGLRQWQAFLRNAKRVRDGDRIDFGAGVTAIAGPRDDDGGVTLSFEGEEPVEILLERAGRMPLPPYIASKRPTDERDRADYQTMFAREDGAVAAPTAALHFTPELMAALAERGIVTETLTLHVGAGTFLPVKADDTDDHRMHAEWGRIEAATAERLNAARAAGGRLIAVGTTSLRLLESAAGEDGIIRAFADETRIFITPGYRFRAVDGLMTNFHLPKSTLFMLVSALMGTERMRAAYAHAIGAGYRFYSYGDSSLLLP

SEQ ID NO: 72241 - protein, 344 aa, Sphingobium indicum; identical to SEQ ID NO: 72236
  misc_feature (1)..(344): tr|A0A1L5BRL6|A0A1L5BRL6_SPHIB S-adenosylmethionine:tRN A ribosyltransferase-isomerase OS=Sphingobium indicum ( strain DSM 16412 / CCM 7286 / MTCC 6364 / B90A) OX=8611 09 GN=queA PE=3 SV=1

SEQ ID NO: 72242 - protein, 344 aa, Sphingobium japonicum
  misc_feature (1)..(344): tr|D4Z6E2|D4Z6E2_SPHJU S-adenosylmethionine:tRNA ribosy ltransferase-isomerase OS=Sphingobium japonicum (strain DSM 16413 / CCM 7287 / MTCC 6362 / UT26 / NBRC 101211 / UT26S) OX=452662 GN=queA PE=3 SV=1
MRVDLFDFDLPPESIALRPASPRHSARLLLAAGDAPFQDRIVRDLPGLLRPGDVLVFNDTKVIPAQLEGMRGQAKIGATLHKRLGLRQWQAFLRNAKRVRDGDRIDFGNGVTAVAGPRDEEGGVMLRFEGEEPVELLLERAGRMPLPPYIASKRPTDERDRSDYQTMFAREDGAVAAPTAALHFTPELMTAIEKAGIGTETLTLHVGAGTFLPVKAEDTDDHHMHAEWGRIDQATAGRLNAARAAGGRLIAVGTTSLRLLESATGEDGIIRPFEDETRIFITPGYRFRAVDGLMTNFHLPKSTLFMLVSALMGTEKMQSVYRHAIDGGYRFYSYGDSSLLLPNP

SEQ ID NO: 72243 - protein, 342 aa, Sphingobium japonicum
  misc_feature (1)..(342): tr|N1MLJ2|N1MLJ2_9SPHN S-adenosylmethionine:tRNA ribosy ltransferase-isomerase OS=Sphingobium japonicum BiD32 O X=1301087 GN=queA PE=3 SV=1
MRVDLFDFDLPPENIALRPASPRDSARLLLVPGEGDFADLSVRDLPSLLRAGDVLVFNDTRVIPAQLEGMRGQARIGATLHKRLGLRQWQAFLRNAKRVRDGERIDFGAGVTAIAGPRDDDGGVTLSFEGEEPVEVLLERAGRMPLPPYIASKRATDERDRTDYQTMFAREDGAVAAPTAALHFTPELMAALAERGITTETLTLHVGAGTFLPVKADDTDDHRMHAEWGRIEAATADRLNAARAAGGRLIAVGTTSLRLLESAAGEDGMIRAFADETRIFITPGYRFRAVDGLMTNFHLPKSTLFMLVSALMGTERMRAAYDHAIGSGYRFYSYGDSSLLLP

SEQ ID NO: 72244 - protein, 344 aa, Sphingobium lactosutens
  misc_feature (1)..(344): tr|T0HWA7|T0HWA7_9SPHN S-adenosylmethionine:tRNA ribosy ltransferase-isomerase OS=Sphingobium lactosutens DS20 OX=1331060 GN=queA PE=3 SV=1
MRVDLFDFDLPPENIALRPASPRDSARLLVAAGASGVDDRIVRDLPSLLRAGDMLVFNDTRVIPAQLEGRRGEARIGATLHKRLGLRHWQAFLRNAKRVRDGDRIDFGAGVTAIAGARDAEGGVTLDFEGEEPVEILLERAGTMPLPPYIASKRPTDEQDRSDYQTMFAREDGAVAAPTAALHFTPELMDAIAAAGVLTQTLTLHVGAGTFLPVKAEDTQDHRMHAEWGRIDAEAADRMNAARAAGGRVIAVGTTSLRLLESAAGEDGVIRPFADETRIFITPGYRFRAVDGLMTNFHLPKSTLFMLVSALMGRERMQGIYAHAIAQGYRFYSYGDSSLLLPHE

SEQ ID NO: 72245 - protein, 346 aa, Sphingobium limneticum
  misc_feature (1)..(346): tr|A0A5J5H142|A0A5J5H142_9SPHN tRNA preQ1(34) S-adenosy lmethionine ribosyltransferase-isomerase QueA OS=Sphing obium limneticum OX=1007511 GN=queA PE=4 SV=1
MRVDLFDFDLPPENIALRPASPRDSARMLLVPGDGAMQDRIVRDLPSMLRAGDVLVFNDTKVIPAQLEGMRGEARIGATLHKRQGLRQWQAFLRNAKRVRAGDRIDFGAGVTAIAGPRDDDGGVTLDFEGDEPVEVLLERAGRMPLPPYIASKRPTDERDRSDYQTMFAREDGAVAAPTAALHFTPELMAAIADAGIATETLTLHVGAGTFLPVKADDTDDHRMHAEWGRIDAATADRLNAARAAGGRLIAVGTTSLRLLESAAGEDDVIRPFADETRIFITPGYRFKAVDGLMTNFHLPKSTLFMLVSALMGTERMQAVYGHAIGTGYRFYSYGDSSLLLPDRSV

SEQ ID NO: 72246 - protein, 344 aa, Sphingobium lucknowense; identical to SEQ ID NO: 72228
  misc_feature (1)..(344): tr|A0A081T0V9|A0A081T0V9_9SPHN S-adenosylmethionine:tRN A ribosyltransferase-isomerase OS=Sphingobium lucknowen se F2 OX=1450518 GN=queA PE=3 SV=1

SEQ ID NO: 72247 - protein, 342 aa, Sphingobium paulinellae; identical to SEQ ID NO: 72222
  misc_feature (1)..(342): tr|A0A5J5I186|A0A5J5I186_9SPHN tRNA preQ1(34) S-adenosy lmethionine ribosyltransferase-isomerase QueA OS=Sphing obium paulinellae OX=2048545 GN=queA PE=4 SV=1

SEQ ID NO: 72248 - protein, 342 aa, Sphingobium quisquiliarum
  misc_feature (1)..(342): tr|T0H887|T0H887_9SPHN S-adenosylmethionine:tRNA ribosy ltransferase-isomerase OS=Sphingobium quisquiliarum P25 OX=1329909 GN=queA PE=3 SV=1
MRVDLFDFDLPPESIALRPASPRDSARLLRVAGDAPFEDRIVRDLPSMLRPGDVLVFNDTKVIPAQLEGMRGEARVGATLHKRLGLRQWQAFLRNAKRVRDGDRIDFGAGVTAIAGPRDEDGGVTLRFEGEEPVELLLERAGRMPLPPYIASKRPTDARDRSDYQTMFAREDGAVAAPTAALHFTPELMAALGKAGVQAETLTLHVGAGTFLPVKADDTDDHRMHAEWGRIEQDTADRLNAARARGGRLIAVGTTSLRLLESAADEEGRIHPFADETRIFITPGYRFRAVDGLMTNFHLPKSTLFMLVSALMGCERMQAAYAHAIAQGYRFYSYGDSSLLLP

SEQ ID NO: 72249 - protein, 344 aa, Sphingobium sp.
  misc_feature (1)..(344): tr|A0A2A3MWM0|A0A2A3MWM0_9SPHN S-adenosylmethionine:tRN A ribosyltransferase-isomerase OS=Sphingobium sp. D43FB OX=2017595 GN=queA PE=3 SV=1
MRVDLFDFDLPPENIALRPASPRDAARLLLVPGAGDFADLTVRDLPGLLRAGDVLVFNDTRVIPAQLEGTRGEARIGATLHKRLGLRQWQAFLRNAKRVRDGDRIDFGAGVTAIAGPRDEDGGVTLDFEGTEAVEVLLERAGRMPLPPYIASKRPTDERDVSDYQTMFAREDGAVAAPTAALHFTPDLMAALAQTGVLTETLTLHVGAGTFLPVKADDTDDHRMHAEWGRIEPATADRLNAARAAGGRLIAVGTTSLRLLESAASEDGIIHPFADETRIFITPGYRFRAIDGLMTNFHLPKSTLFMLVSALMGRDRMQAAYAHAIGSGYRFYSYGDSSLLLPAG

SEQ ID NO: 72250 - protein, 342 aa, Sphingobium sp.
  misc_feature (1)..(342): tr|A0A013XPA9|A0A013XPA9_9SPHN S-adenosylmethionine:tRN A ribosyltransferase-isomerase OS=Sphingobium sp. Ant17 OX=1461752 GN=queA PE=3 SV=1
MRVDLFDFDLPPENIALRPASPRDAARLLLVPGAGDFTDATVRDLPGLLRAGDMLVFNDTRVIPAQLEGMRGEARIGATLHKRLGLRQWQAFLRNAKRVRDGDRIDFGAGVTAIAGPRDEDGGVTLDFEGTEPVEVLLERAGRMPLPPYIASKRPTDERDVSDYQTMFAREDGAVAAPTAALHFTPDLMAMLAQAGVLTETLTLHVGAGTFLPVKADDTDDHRMHAEWGRIDPATADRLNAARAAGGRLIAVGTTSLRLLESAASEDGIIHPFADETRIFITPGYRFRAIDGLMTNFHLPKSTLFMLVSALMGTDRMKAAYGHAIENGYRFYSYGDSSLLLP

SEQ ID NO: 72251 - protein, 342 aa, Sphingobium ummariense
  misc_feature (1)..(342): tr|T0K5W8|T0K5W8_9SPHN S-adenosylmethionine:tRNA ribosy ltransferase-isomerase OS=Sphingobium ummariense RL-3 O X=1346791 GN=queA PE=3 SV=1
MRIDLFDFDLPPDRIALRPASPRDSARMLLVDGDRPFQDRTVRDLPSLLRRGDVLVFNDTRVIPAQLEGMRGEARIGATLHKRLGLRQWQAFLRNAKRVREGDRIDFGADVTAIAGPRDEDGCVTLDFEGDEPVELLLERAGRMPLPPYIASKRPTDERDRSDYQTMFAREDGAVAAPTAALHFTPELMARLVAAGIGSETLTLHVGAGTFLPVKADDTDDHRMHAEWGRIDAATADRLNAVRASGGRLIAVGTTSLRLLESAADESGIIRPFADETRIFITPGYRFRAVDGLMTNFHLPKSTLFMLVSALMGLERMHAAYAHAIAQGYRFYSYGDSSLLLP

SEQ ID NO: 72252 - protein, 344 aa, Sphingobium wenxiniae
  misc_feature (1)..(344): tr|A0A562KI44|A0A562KI44_SPHWJ S-adenosylmethionine:tRN A ribosyltransferase-isomerase OS=Sphingobium wenxiniae (strain DSM 21828 / JZ-1) OX=595605 GN=queA PE=3 SV=1
MRVDLFDFDLPPERIALRPAAPRDSARLMLVDGNAPIEDRIVRDLPGLLRAGDVLVFNDTRVIPAQLEGMRGQAKIGATLHKRLGLRQWQAFLRNARRVRDGDRIDFGAGVTAIAGPRDGEGGVTLRFEGEEPVEVLLERAGRMPLPPYIASKRPTDERDRADYQTMFARKDGAVAAPTAALHFTPDLMAGLAAAGVATETLTLHVGAGTFLPVKAEDTDDHRMHAEWGRIDAAAAARLNAARAAGGRLIAVGTTSLRLLESAAGEDGLVRPFEDETRIFITPGYRFRAVDGLMTNFHLPRSTLFMLVSALMGRDRMQAAYAHAIAAGYRFYSYGDSSLLLPEG

SEQ ID NO: 72253 - protein, 342 aa, Sphingobium xenophagum
  misc_feature (1)..(342): tr|A0A401J0S9|A0A401J0S9_SPHXE S-adenosylmethionine:tRN A ribosyltransferase-isomerase OS=Sphingobium xenophagu m OX=121428 GN=queA PE=3 SV=1
MRVDLFDFDLPPENIALRPASPRDSARLLLVPGEGDFADLSVRDLPSLLRAGDVLVFNDTRVIPAQLEGMRGNARIGATLHKRLGLRQWQAFLRNAKRVRDGDRIDFGAGVTAIAGPRDDDGGVTLSFEGEEPVEILLERAGRMPLPPYIASKRPTDERDRADYQTMFAREDGAVAAPTAALHFTPELMAALAERGVATETLTLHVGAGTFLPVKADDTDDHRMHAEWGRIEAATAERLNAARAAGGRLIAVGTTSLRLLESAAGEDGIIRAFADETRIFITPGYRFRAVDGLMTNFHLPKSTLFMLVSALMGTERMRAAYAHAIGAGYRFYSYGDSSLLLP

SEQ ID NO: 72254 - protein, 344 aa, Sphingobium yanoikuyae
  misc_feature (1)..(344): tr|A0A085K351|A0A085K351_SPHYA S-adenosylmethionine:tRN A ribosyltransferase-isomerase OS=Sphingobium yanoikuya e OX=13690 GN=queA PE=3 SV=1
MRVDLFDFDLPAENIALRPASPRDSARLLLVPGGGAMEDRIVRDLPSLLRAGDVLVFNDTRVIPAQLEGMRGEARIGATLHKRLGLRQWQAFLRNAKRVRDGDRIDFGAGVTAIAGPRDEDGGVTLDFEGEEPVEILLERAGRMPLPPYIASKRATDERDRSDYQTMFAREDGAVAAPTAALHFTPDLTAALAQAGVLTETLTLHVGAGTFLPVKADDTDDHRMHAEWGRIDQDTADRLNAARAADGRIIAVGTTSLRLLESATGEDGVIRPFADETRIFITPGYRFRAIDGLMTNFHLPKSTLFMLVSALMGTEKMQSVYKHAIEEGYRFYSYGDSSLLLPER

SEQ ID NO: 72255 - protein, 342 aa, Sphingobium yanoikuyae
  misc_feature (1)..(342): tr|A0A0J9D0W4|A0A0J9D0W4_SPHYA S-adenosylmethionine:tRN A ribosyltransferase-isomerase OS=Sphingobium yanoikuya e OX=13690 GN=queA PE=3 SV=1
MRVDLFDFDLPAENIALRPASPRDSARLLLVPGDGAMEDRIVRDLPSLLRAGDVLVFNDTRVIPAQLEGMRGEARIGATLHKRLGLRQWQAFLRNAKRVRDGDRIDFGAGVTAIAGPRDEDGGVTLDFEGEEPVEILLERAGRMPLPPYIASKRATDERDRSDYQTMFAREDGAVAAPTAALHFTPDLTAALAQAGVLTETLTLHVGAGTFLPVKADDTDDHRMHAEWGRIDQDTADRLNAARAAGGRIIAVGTTSLRLLESATGEDGVIRPFADETRIFITPGYRFRAIDGLMTNFHLPKSTLFMLVSALMGRDRMQQVYAHAIATGYRFYSYGDSSLLLP

SEQ ID NO: 72256 - protein, 346 aa, Sphingomonadaceae bacterium
  misc_feature (1)..(346): tr|A0A257DKS9|A0A257DKS9_9SPHN S-adenosylmethionine:tRN A ribosyltransferase-isomerase OS=Sphingomonadaceae bac terium PASS1 OX=2015579 GN=queA PE=3 SV=1
MRVDLFDFELPPERIALRPVSPRDSARMLCVGGESGLVDAYVSDLPQKLRKGDCLIFNDTRVIPAQLTARRGDATIGATLHKRIDLRRWQAFIRNAKRLHIGDCIDFGQGVLAKAEERHDDGSFTLFFEGDEPVEVLLHRAGTMPLPPYIAGKRPTDARDAEDYQTMFAQKDGAVAAPTASLHFTPELMQAVHDAGIETATLTLHVGAGTFLPVKVDDTASHRMHSEWGSIDAETAYRLNSIRENGGRLIAVGTTSLRLVESAADQNGMVHPFEGDTDIFITPGYRFKAINGLMTNFHLPKSTLFMLVSALMGRETMQAAYVHAIAEEYRFYSYGDSSLLLPQHSA

SEQ ID NO: 72257 - protein, 344 aa, Sphingomonadaceae bacterium
  misc_feature (1)..(344): tr|A0A2D8FG86|A0A2D8FG86_9SPHN S-adenosylmethionine:tRN A ribosyltransferase-isomerase OS=Sphingomonadaceae bac terium OX=1930536 GN=queA PE=3 SV=1
MKVDLFDFELPPERIALRPARPRDAARMLVVRSAGPFEDRGVRDLPEMLRAGDVLVFNDTRVIPAQLEGRRGEARIGATLHKRIDLRRWQAFVRNAKRLRIGDVVEFGGGVAATAEDRLEDGSFVLAFAGEEPVEILLERAGRMPLPPYIAGKRATDAQDREDYQTMFAAEDGAVAAPTAALHFTPELIGALDAAGIGRETLTLHVGAGTFLPVKADDTSDHAMHSEWGRIEPEAAARLNAVRAAGGRVIAVGTTSLRLLESATGEDGIIGAFAGDTDIFITPGYRFRAVDGLMTNFHLPKSTLMMLVSALMGRERMMDAYAHAIDSEYRFYSYGDSSLLLPHD

SEQ ID NO: 72258 - protein, 349 aa, Sphingomonadales bacterium
  misc_feature (1)..(349): tr|A0A258J738|A0A258J738_9SPHN S-adenosylmethionine:tRN A ribosyltransferase-isomerase OS=Sphingomonadales bact erium 32-65-25 OX=1970594 GN=queA PE=3 SV=1
MLVDDFDFHLPEDRIALRPVIPRDSARLLTVRGRDVGVLDDLHFSDLPGQLRPGDVLVVNDTRVIPAQLFAKVGEAAIGVTLHKRETGNRWWSFVKNARRLKPGTRVDFSQGGSAMLIGEVIEKADEGGVLWQFETAGQPLESALHSVGEMPLPPYIARRRDIDAQDFSDYQTLHAAKDGAVAAPTAGLHFTPRLWSALHAAGISRETVTLHVGAGTFLPVKADRIEDHQMHAEWGSIDDQTALRLNAARATGGRIIAVGTTSLRLLESAADKGGAIRAFSGDTSIFITPGYRWKAIDGLITNFHLPRSTLFMLVSALMGLDVMRKAYAHAIENEYRFYSYGDGSLLLP

SEQ ID NO: 72259 - protein, 341 aa, Sphingomonadales bacterium
  misc_feature (1)..(341): tr|A0A4Q2ZD29|A0A4Q2ZD29_9SPHN S-adenosylmethionine:tRN A ribosyltransferase-isomerase OS=Sphingomonadales bact erium OX=1978525 GN=queA PE=3 SV=1
MNVDLFDFELPAERIALRPASPRDSARMLVVERGAMREAVVGDLPAMLRAGDCLVFNDTRVIPAQLEGVRGAAKIGATLHKREGPRRWRAFIRGAKKLREGDAIDFGQGVSAIASDRGEDGSFALDFAGDEPVEVLLHRCGRMPLPPYIASKRPTDARDADDYQTMFANEPGAVAAPTAALHFTPSLMTALESAGIGHATLTLHVGAGTFLPVKAEDTAEHRMHAEWGRIDAATADRLNAVRKNGGRVIAVGTTSLRLIESATGEDGVIQRFEGDTAIFITPGYRFKGVDGLITNFHLPRSTLFMLVSALMGLETMQAAYAHAIENDYRFYSYGDASLLLP

SEQ ID NO: 72260 - protein, 341 aa, Sphingomonas adhaesiva
  misc_feature (1)..(341): tr|A0A2A4I7C7|A0A2A4I7C7_9SPHN S-adenosylmethionine:tRN A ribosyltransferase-isomerase OS=Sphingomonas adhaesiv a OX=28212 GN=queA PE=3 SV=1
MLVDLFDFALPPERIALRPAAPRDTARMLVVTPDALADRIVRDLPSQLRRGDLLVFNDTRVIPAQLEGTRGDARIGATLHKREGPRRWRAFVRNARRLRDGDLIDFGAGVAAAARDRADDGSWALEFAGDEPVELLLERAGRMPLPPYIAGKRATDARDADDYQTMFANEPGAVAAPTAALHFTPDLLAALAAAGVDHATLTLHVGAGTFLPVKADDTADHRMHAEWGRIDAATAERLNTVRAAGGRVIAVGTTSLRLIESAAGDDGVIRPFEGDTAIFITPGYRFRGIDGLMTNFHLPRSTLFMLVSALMGLERMQAAYAHAITRDYRFYSYGDASLLLP

SEQ ID NO: 72261 - protein, 351 aa, Sphingomonas aerolata
  misc_feature (1)..(351): tr|A0A2T4YQJ1|A0A2T4YQJ1_9SPHN S-adenosylmethionine:tRN A ribosyltransferase-isomerase OS=Sphingomonas aerolata OX=185951 GN=queA PE=3 SV=1
MNVDLFDFDLPTDRIALRPETPRDAARLLVLDGDATRDLRVTDLAGQLRRGDLLVFNDTRVIPAQLEGRRAGIEQDGQLSSGAKIGATLHKREGPRRWRAFIRNARRLRDGDPIDFGNGVVARTVDRAEDGSYALEFAGDEPIELLLDRAGRMPLPPYIAAKRPTDARDAEDYQTMFAAEPGAVAAPTAALHFTPSVMAALEAAGIAKATLTLHVGAGTFLPMKVDDTDDHQMHAEWGRIDATTADQLNAVRAAGGRVIAVGTTSLRLIESATGNDGVIRPFEGDTAIFITPGYRFKGIDGLMTNFHLPRSTLFMLVSALMGRERMQAAYVHAIAAKYRFYSYGDASLLLP

SEQ ID NO: 72262 - protein, 344 aa, Sphingomonas aquatilis
  misc_feature (1)..(344): tr|A0A511Q7K8|A0A511Q7K8_9SPHN S-adenosylmethionine:tRN A ribosyltransferase-isomerase OS=Sphingomonas aquatili s NBRC 16722 OX=1219039 GN=queA PE=3 SV=1
MKVELFDFELPAERIALRPASPRDSARLLVLDGDATRDRIVRDLPAELRAGDCLVFNDTRVIPAQLEGRRGEAKIGATLHKREGPRRWRAFVRNARRLRDGDSIDFGSGVTAIATDRGEDGSLALYFAGDEPVELLLERAGRMPLPPYIAAKRPTDARDADDYQTMFAAEPGAVAAPTAALHFTPDLIAALDAAGIGHETLTLHVGAGTFLPVKADDTDDHRMHAEWGRIDAATADRLNAVRARGGRVIAVGTTSLRLIESASGEDQVIRPFEGDTAIFITPGYTFRGIDGLLTNFHLPKSTLFMLVSALMGRERMQAAYAHAIAEGYRFYSYGDASLLLPARL

SEQ ID NO: 72263 - protein, 341 aa, Sphingomonas aurantiaca
  misc_feature (1)..(341): tr|A0A2T5GM85|A0A2T5GM85_9SPHN S-adenosylmethionine:tRN A ribosyltransferase-isomerase OS=Sphingomonas aurantia ca OX=185949 GN=queA PE=3 SV=1
MNVDLFDFDLPPANIALRPAAPRDAARMLVLEGDATRDAGVADLPSSLRRGDILVFNDTRVIPAQLDGRRGDAKIGATLHKREGPRRWRAFIRNARRLRDGDVIDFGNGVSAAAVDREDDGSYALVFAGDEPVELLLERAGHMPLPPYIAGKRPTDERDADDYQTMFAAEPGAVAAPTAALHFTPALMAALEAAGIGHATLTLHVGAGTFLPVKATDTTEHRMHAEWGRIDAATADRLNAVRAGGGRVIAVGTTSLRLIESATGEDDVILPFDGDTAIFITPGYRFRGIDGLMTNFHLPRSTLFMLVSALMGRERMQAAYAHAIAGGYRFYSYGDASLLLP

SEQ ID NO: 72264 - protein, 345 aa, Sphingomonas carotinifaciens
  misc_feature (1)..(345): tr|A0A1G7L2K5|A0A1G7L2K5_9SPHN S-adenosylmethionine:tRN A ribosyltransferase-isomerase OS=Sphingomonas carotini faciens OX=1166323 GN=queA PE=3 SV=1
MNVDLFDFALPNDRIALHPAAPRDAARMLVLDGEATRDAEVRDLPGCLRAGDLLVFNDTRVIPAQLEGRRGEARIGATLHKREGPRRWRAFIRNAKRLRDGDVIDFGAGVAATAGERGEDGSFVLDFAGDEPVELLLERAGRMPLPPYIAQKRGIEARDADDYQTMFANEPGAVAAPTAALHFTPGLIAALEAAGIGHATLTLHVGAGTFLPVKADDTADHRMHAEWGRIDQATADRLNATRAAGGRIIAVGTTSLRLIESASGEDRIVRPFEGDTAIFITPGYRFRGIDGLMTNFHLPRSTLFMLVSALMGLERMQAAYAHAIAAGYRFYSYGDASLLLPGDDA

SEQ ID NO: 72265 - protein, 341 aa, Sphingomonas changbaiensis
  misc_feature (1)..(341): tr|A0A0E9MSE7|A0A0E9MSE7_9SPHN S-adenosylmethionine:tRN A ribosyltransferase-isomerase OS=Sphingomonas changbai ensis NBRC 104936 OX=1219043 GN=queA PE=3 SV=1
MKVDLFDFDLPPDRIALRPAEPRDSAKLLLLDGDRTADHIVRDLPTLLRPGDCLVFNDTRVIPAQLEGQRGDARIGATLHKRADLRRWHAFVRNAKRLRIGDTIDFPAQVQAVVEARNADGSILLRFLGDEPVELLLERAGRMPLPPYIASKREADERDRADYQTMFAREEGAVAAPTAALHFTPALMAALADAGVGHETLTLHVGAGTFLPVKAEDTADHQMHAEWGRIDVATADRLNAVRARGGRVIAVGTTSLRLLESAATEDGCIQPFEGDTAIFITPGYRFRAIDGLMTNFHLPKSTLFMLVSALMGRERMLAAYEHAIAGGYRFYSYGDASLLLP

SEQ ID NO: 72266 - protein, 345 aa, Sphingomonas desiccabilis
  misc_feature (1)..(345): tr|A0A4Q2IZR3|A0A4Q2IZR3_9SPHN S-adenosylmethionine:tRN A ribosyltransferase-isomerase OS=Sphingomonas desiccab ilis OX=429134 GN=queA PE=3 SV=1
MNVDDFDFELPAERIALRPAAPRDAARMLVLDGATTRDAVVTDLPDALRPGDLLVFNDTRVIPAQLEGRRGEARIGATLHKREGPRAWRAFVRNARRLRDGDVIDFGAGVTAAAGERGDDGSVLLEFAGDEPVELLLERAGRMPLPPYIASKRSTDARDAEDYQTLFAREAGAVAAPTAALHFTPGLMAALEARGIGHATLTLHVGAGTFLPVKASDTDEHRMHAEWGRLDAETAERLNQVRRDGGRVIAVGTTSLRLIESASGEDGIIRPFEGDTAIFITPGYRFRGIDGLMTNFHLPRSTLFMLVSALMGLERMQAAYAHAIASGYRFYSYGDASLLLPARPA

SEQ ID NO: 72267 - protein, 341 aa, Sphingomonas dokdonensis
  misc_feature (1)..(341): tr|A0A245ZNG6|A0A245ZNG6_9SPHN S-adenosylmethionine:tRN A ribosyltransferase-isomerase OS=Sphingomonas dokdonen sis OX=344880 GN=queA PE=3 SV=1
MNVDQFDFDLPPARIALRPAAPRDAARLLVLDSDGTRDRTVADLPDALRPGDLLVFNDTRVIPAQLEGTRGAAKIGATLHKREGPRRWRAFIRNAKRLRDGDPIDFGAGVMAIASDRAEDGSFALDFAGDEPVELLLERAGRMPLPPYIAAKRPLDARDAQDYQTMFAREAGAVAAPTAALHFTPALMAALDAAGIGHATLTLHVGAGTFLPVKAADTDDHQMHAEWGRIDQATADRLNAVRRDGGRIIAVGTTSLRLIESAAGEDRVVRPFEGDTSIFITPGYRFRGIDGLLTNFHLPRSTLFMLVSALMGLDRMQAAYAHAVQSEYRFYSYGDASLLLP

SEQ ID NO: 72268 - protein, 342 aa, Sphingomonas edaphi
  misc_feature (1)..(342): tr|A0A418Q1F1|A0A418Q1F1_9SPHN S-adenosylmethionine:tRN A ribosyltransferase-isomerase OS=Sphingomonas edaphi O X=2315689 GN=queA PE=3 SV=1
MRVDLFDFDLPPDRIALRPARPRDAARLLLVTGEVMSDRTVLDLPGLLQPGDVLVFNDTRVIPAQLEGKRGDATVGATLHKREDLRSWWAFVRNARRVRDGDLIDFGNDVRASAVCRDEQGAILLHFHGDEPVELLLERAGEMPLPPYIASKRGIDDSDRADYQTMFARKEGAVAAPTAALHFTERLLAAIEERGIKCETLTLHVGAGTFLPVKADDTTAHRMHSEWGQIDRATADRLNAARSAGGRLVAVGTTSLRLLESAAGEDGIINAFEGDTAIFITPGYKFRAVDGLMTNFHLPKSTLFMLVSALMGLDVMKRAYAHAIEHDYRFYSYGDSSLLLPA

SEQ ID NO: 72269 - protein, 343 aa, Sphingomonas elodea
  misc_feature (1)..(343): tr|A0A495F0T1|A0A495F0T1_SPHEL S-adenosylmethionine:tRN A ribosyltransferase-isomerase OS=Sphingomonas elodea O X=179878 GN=queA PE=3 SV=1
MNVDLFDFELPNERIALRPAAPRDSARLLVLDGAETRDAIVRDLAAQLRPGDCLVFNDTRVIPAQLEGTRGEARIGATLHKREGPRRWRAFIRNAKRLREGDAIDFGPDAIAIASDRAEDGSFALDFQGDEPVELLLERCGRMPLPPYIASKRPTDARDANDYQTMFAAEPGAVAAPTAALHFTPELMASLEAAGIGHTTLTLHVGAGTFLPVKAEDTADHKMHAEWGRITPEVAERLNAVRAAGNRIIAVGTTSLRLLESAADEDRVIQPFEGDTAIFITPGYRFKGVDGLVTNFHLPRSTLFMLVSALMGLDRMQAAYAHAIETGYRFYSYGDSSLLLPAR

SEQ ID NO: 72270 - protein, 341 aa, Sphingomonas endophytica
  misc_feature (1)..(341): tr|A0A147I6H5|A0A147I6H5_9SPHN S-adenosylmethionine:tRN A ribosyltransferase-isomerase OS=Sphingomonas endophyt ica OX=869719 GN=queA PE=3 SV=1
MNVDLFDFALPPERIALRPAVPRDAARMLVVTPEGLADRIVSDLPSQLRPGDLLVFNDTRVIPAQLEGTRGHARIGATLHKREGPRRWRAFVRNARRLRDGDAIDFGQGVTATAHDRAEDGSWALDFAGDEPVELLLERAGRMPLPPYIAGKRDTDARDADDYQTMFAAEPGAVAAPTAALHFTPALLAALDAAGIGHATLTLHVGAGTFLPVKAEDTADHRMHAEWGRIDAATADRLNATRAGGGRVIAVGTTSLRLIESATDAQGVIRPFDGDTSIFITPGYRFRGIDGLMTNFHLPRSTLFMLVSALMGLDRMQAAYAHAIGNDYRFYSYGDASLLLP

SEQ ID NO: 72271 - protein, 341 aa, Sphingomonas faeni
  misc_feature (1)..(341): tr|A0A2T5UBS8|A0A2T5UBS8_9SPHN S-adenosylmethionine:tRN A ribosyltransferase-isomerase OS=Sphingomonas faeni OX =185950 GN=queA PE=3 SV=1
MNVDLFDFDLPTDNIALRPAAPRDAARMLVLEGDATQDAGVSDLPSLLRRGDMLVFNDTRVIPAQLDGRRGDAKIGATLHKREGPRRWRAFIRNARRLRDGDVIEFGNGVSAAAVDREDDGSYALVFAGDEPVELLLERAGHMPLPPYIAGKRPTDERDADDYQTMFASEPGAVAAPTAALHFTPKLMAALEAAGIGHATLTLHVGAGTFLPVKAADTTEHKMHAEWGRIDAATADRLNAVRANGGRVIAVGTTSLRLIESATGEDDVIRPFDGDTAIFITPGYRFRGIDGLMTNFHLPRSTLFMLVSALMGRERMQAAYAHAIAGKYRFYSYGDASLLLP

SEQ ID NO: 72272 - protein, 341 aa, Sphingomonas fennica
  misc_feature (1)..(341): tr|A0A2T4HPU0|A0A2T4HPU0_9SPHN S-adenosylmethionine:tRN A ribosyltransferase-isomerase OS=Sphingomonas fennica OX=114404 GN=queA PE=3 SV=1
MRVDLFDFDLPAERIALRPASPRDSARMLVVDAAGMADRIVRDLGDILRPGDILVFNDTRVIPAQLEGRRGEARIGATLHKREGPRAWRAFVRNAKRLRDGDRVEFGAGVAAIAASRGDDGSILLEFEGDEPVELLLERAGRMPLPPYIAGKRPADERDRDDYQTMFAAEPGAVAAPTAALHFTPGLIASLAARGVDHVTLTLHVGAGTFLPVKAEDTDDHRMHAEYGRIDAATADRLNAARAAGGRVIAVGTTSLRLIESAAGEDGIIRPFDGDTAIFITPGYRFRGIDGLMTNFHLPKSTLFMLVSALMGRERMQAAYAHAIAEGYRFYSYGDASLLIP

SEQ ID NO: 72273 - protein, 345 aa, Sphingomonas gei
  misc_feature (1)..(345): tr|A0A4S1XFR6|A0A4S1XFR6_9SPHN S-adenosylmethionine:tRN A ribosyltransferase-isomerase OS=Sphingomonas gei OX=1 395960 GN=queA PE=3 SV=1
MNVDLFDFELPAERIALRPASPRDSARLLVLDGADTRDASVRDLPSCLRAGDLLVFNDTRVIPAQLEGLRGEARVGATLHKREGPRRWRAFIRNAKRLRQGDSVDFGQGVTAIASDRAEDGSFALDFAGDEPVELLLTRCGRMPLPPYIASKRPTDSRDADDYQTMFASEPGAVAAPTAALHFTPELLAALDAAGIGHATLTLHVGAGTFLPVKAEDTDAHRMHAEWGRIDAATADRLNAVRAVGGRVVAVGTTSLRLIESAAGNDGVIHPFEGDTAIFITPGYRFKGIDGLVTNFHLPRSTLFMLVSALMGLDRMQAAYAHAIASGYRFYSYGDASLLLPLKGR

SEQ ID NO: 72274 - protein, 341 aa, Sphingomonas ginsenosidimutans
  misc_feature (1)..(341): tr|A0A2A4I0X9|A0A2A4I0X9_9SPHN S-adenosylmethionine:tRN A ribosyltransferase-isomerase OS=Sphingomonas ginsenos idimutans OX=862134 GN=queA PE=3 SV=1
MLVDLFDFALPPERIALRPAAPRDAARMLVVTPVALGDRIVRDLPAQLRRGDLLVFNDTRVIPAQLEGTRGEARIGATLHKREGPRRWRAFVRNARRLRDGDVIDFGAGVAAAARDRADDGSWALEFAGDEPVELLLERAGRMPLPPYIAGKRATDARDADDYQTMFASEPGAVAAPTAALHFTPELMAALAAAGIEHATLTLHVGAGTFLPVKADDTADHRMHAEWGRIDPATADRLNAVRAAGGRVIAVGTTSLRLIESAAGKDGVIRPFEGDTAIFITPGYRFRGIDGLMTNFHLPRSTLFMLVSALMGLETMQAAYAHAIAQGYRFYSYGDASLLLP

SEQ ID NO: 72275 - protein, 341 aa, Sphingomonas ginsenosidivorax
  misc_feature (1)..(341): tr|A0A5C6UI81|A0A5C6UI81_9SPHN S-adenosylmethionine:tRN A ribosyltransferase-isomerase OS=Sphingomonas ginsenos idivorax OX=862135 GN=queA PE=3 SV=1
MNVDLFDFDLPTDRIALRPAAPRDAARMLVLDGDATRDAGVADLPGLLRRGDLLVFNDTRVIPAQLDGRRGDAKIGATLHKREGPRRWRAFVRNARRLRDGDVIDFGNGVSAAAVDREEDGSYALDFAGDEPVELLLERAGHMPLPPYIAGKRPTDERDAADYQTMFAAEPGAVAAPTAALHFTPALMAALAAAGIGHATLTLHVGAGTFLPVKATDTADHRMHAEWGRIDAATADRLNAVRTAGGRVIAVGTTSLRLIESATDADGVIRPFDGDTSIFITPGYRFRGIDGLMSNFHLPRSTLFMLVSALMGRERMQAAYAHAIAKGYRFYSYGDASLLLP

SEQ ID NO: 72276 - protein, 347 aa, Sphingomonas glacialis
  misc_feature (1)..(347): tr|A0A502G3Z4|A0A502G3Z4_9SPHN S-adenosylmethionine:tRN A ribosyltransferase-isomerase OS=Sphingomonas glaciali s OX=658225 GN=queA PE=3 SV=1
MNVDLFDFVLPPERIALRPATPRDSARLLVVEGAALHDRSVGDLPGALRAGDLLVFNDTRVIPAQLEGTRGDSRIGATLHKREGPRRWRAFIRNARRLRDGDAIDFGSGVTATAHDRGEDGSFALEFQGDEPVELLLDRAGRMPLPPYIAARRPADAQDADDYQTMFAAEKGAVAAPTAALHFTPELMARFAAAGIEHATLTLHVGAGTFLPVKATDTADHKMHAEWGRIDAATADRLNAVRAAGGRVIAVGTTSLRLIESATGEDGVIRPFEGDTAIFITPGYRFRGIDGLVTNFHLPRSTLFMLVSALMGTDTMQAAYAHAIADGYRFYSYGDASLLLPDRGVRA

SEQ ID NO: 72277 - protein, 347 aa, Sphingomonas guangdongensis
  misc_feature (1)..(347): tr|A0A285R383|A0A285R383_9SPHN S-adenosylmethionine:tRN A ribosyltransferase-isomerase OS=Sphingomonas guangdon gensis OX=1141890 GN=queA PE=3 SV=1
MNVDLFDFELPPERIALRPAEPRDAARLLVLDGPETRDCVVADLPAQLRRGDLLVFNDTRVIPAQLDGRRGEARIGATLHKREGPRRWRAFVRNARRLRDGDVIDFGEGVSAAASGKAADGSIALDFAGDEPVELLLARAGRMPLPPYIAARRAPDARDADDYQTMFATEPGAVAAPTAALHFTPDLLAGLAAAGVEHATLTLHVGAGTFLPVKAADTNEHRMHAEWGRIDAATADRLNAVRARGNRVIAVGTTSLRLLESAANADGRIRPFEGDTAIFITPGFRFRAVDGLLTNFHLPRSTLFMLVSALMGLERMQSAYAHAIANGYRFYSYGDGSLLLPEQPNSR

SEQ ID NO: 72278 - protein, 341 aa, Sphingomonas haloaromaticamans; identical to SEQ ID NO: 72272
  misc_feature (1)..(341): tr|A0A1S1H8T9|A0A1S1H8T9_9SPHN S-adenosylmethionine:tRN A ribosyltransferase-isomerase OS=Sphingomonas haloarom aticamans OX=653954 GN=queA PE=3 SV=1

SEQ ID NO: 72279 - protein, 343 aa, Sphingomonas hengshuiensis
  misc_feature (1)..(343): tr|A0A2W4Z8K2|A0A2W4Z8K2_9SPHN S-adenosylmethionine:tRN A ribosyltransferase-isomerase OS=Sphingomonas hengshui ensis OX=1609977 GN=queA PE=3 SV=1
MHVDLFDFELPNDHIALRPASPRDAARMLVLDGAATLDRGVADLPGCLRAGDLLVFNDTRVIPAQLEGRRGDATVGATLHKREGPRRWRAFVRNARRLRDGDSIDFGAGVTAIAGDKGEDGSVALDFQGDDPVELLLERAGRMPLPPYIASKRGGADARDAEDYQTLFAREAGAVAAPTAALHFTPGLMAALDAAGIGHATLTLHVGAGTFLPVKAQDTDDHRMHAEWGRIDRDTADRLNAVRAAGGRVIAVGTTSLRLIESACDADGRVQPFEGDTAIFITPGYRFRGIDGLMTNFHLPRSTLFMLVSALMGRERMQAAYAHAIAEGYRFYSYGDASLLLPA

SEQ ID NO: 72280 - protein, 344 aa, Sphingomonas histidinilytica
  misc_feature (1)..(344): tr|A0A1T4ZWZ2|A0A1T4ZWZ2_9SPHN S-adenosylmethionine:tRN A ribosyltransferase-isomerase OS=Sphingomonas histidin ilytica OX=439228 GN=queA PE=3 SV=1
MRVDLFDFDLPPENIALRPASPRDSARMLLVEGREGALADRQVSDLPGLLRAGDCLVFNDTRVIPAQLEGRRGEARIGATLHKREGLRQWRAFVRNAKRVRTGDRIDFGAGVSAIAAERGEDGSILLDFEGDEPVELLLERAGTMPLPPYIAGKRATDDRDRDDYQTMFAREKGAVAAPTAALHFTPRLVEALAAAGIASETLTLHVGAGTFLPVKADDTDDHRMHAEWGRIDAATADRLNAVRAAGGRVIAVGTTSLRLLESATGEDGVIRPFDGDTAIFITPGYRFRAIDGLMTNFHLPKSTLFMLVSALMGRERMQAAYAHAIAEGYRFYSYGDSSLLLPG

SEQ ID NO: 72281 - protein, 343 aa, Sphingomonas indica
  misc_feature (1)..(343): tr|A0A1X7GFZ5|A0A1X7GFZ5_9SPHN S-adenosylmethionine:tRN A ribosyltransferase-isomerase OS=Sphingomonas indica O X=941907 GN=queA PE=3 SV=1
MRVDLFDFDLPPERIALRPASPRDSARMLVVRPEGFEDRGVADLPAMLRAGDMLVFNDTRVIPAQLEGTRGEARIGATLHKREGPRDWRAFVRNAKRVRAGDRIDFGAGVTALAGDKGEDGSILLRFEGDEPVELLLERAGRMPLPPYIAGKREADARDAIDYQTMFAREKGAVAAPTAALHFTPVLMNALEAAGIGHATLTLHVGAGTFLPVKAEDTDAHRMHSEWGRIDAATADRLNAVRAEGGRVIAVGTTALRLLESAAGEDGLIRPFEGDTAIFITPGYRFRAIDGLVTNFHLPRSTLFMLVGALMGRETMQAAYAHAIAEGYRFYSYGDASLLLPER

SEQ ID NO: 72282 - protein, 341 aa, Sphingomonas jatrophae
  misc_feature (1)..(341): tr|A0A1I6K119|A0A1I6K119_9SPHN S-adenosylmethionine:tRN A ribosyltransferase-isomerase OS=Sphingomonas jatropha e OX=1166337 GN=queA PE=3 SV=1
MRVDLFDFELPPERIALRPADPRDAARLLLLDGARTEDRTVRDLPALLRQGDCLVFNDTRVIPAQLEGRRGEARIGATLHKREGPRAWRAFVRNAKRLRDGDRIDFGEGVEAQAGERGADGSWQLTFAGDEPVELLLERAGRMPLPPYIAARRAADAADAADYQTMFAREAGAVAAPTAALHFTPALMAALAEAGIGHETLTLHVGAGTFLPVKAEDTADHAMHAEWGRIDAATAERLNQVRARGGRVIAVGTTSLRTIESAAGADGRIAAWEGDTAIFITPGYTFRGIDGLLTNFHLPRSTLFMLVSALMRLDRMKAAYAYAIENGYRFYSYGDASLLLP

SEQ ID NO: 72283 - protein, 345 aa, Sphingomonas jeddahensis
  misc_feature (1)..(345): tr|A0A1V2EX89|A0A1V2EX89_9SPHN S-adenosylmethionine:tRN A ribosyltransferase-isomerase OS=Sphingomonas jeddahen sis OX=1915074 GN=queA PE=3 SV=1
MNVDLFDFDLPNERIALRPASPRDSARLLVLDGAAPRDRIVTDLPAELRAGDLLVFNDTRVIPAQLEGMRGAAKIGATLHKREGPRRWRAFIRNAKRLRDGDTIDFGSGVSAIAGDRADDGSFALDFAGDEPVELLLERAGRMPLPPYIAAKRPTDARDADDYQTMFAREAGAVAAPTAALHFTPGLMAALDAAGIGHTTLTLHVGAGTFLPVKAEDTADHRMHAEWGRIDAATADRLNAVRASGGRVIAVGTTSLRLIESAAGEDGMVRPFEGDTSIFITPGYRFRGIDGLVTNFHLPRSTLFMLVSALMGLERMQAAYAHAIAADYRFYSYGDASLLIPDRAG

SEQ ID NO: 72284 - protein, 355 aa, Sphingomonas koreensis
  misc_feature (1)..(355): tr|A0A430FXH2|A0A430FXH2_9SPHN S-adenosylmethionine:tRN A ribosyltransferase-isomerase OS=Sphingomonas koreensi s OX=93064 GN=queA PE=3 SV=1
MNVDLFDFELPPERIALRPASPRDSARLLLLDGALTGDRSVGDLPALLAPGDLLVFNDTRVIPAQLEGMRGEAKIGATLHKREGPRHWVAFIRNAKRLRTGETIDFGNAVTAVAEARHDDGSFILFFPGDEPVELLLERAGRMPLPPYIAAKRPTDARDADDYQTMFANEPGAVAAPTAALHFTPGLMSALEAAGIGHTTLTLHVGAGTFLPVKAEDTDDHRMHAEWGRIDPATADRLNAVRAAGGRVIAVGTTSLRLIESAAGDDGVIRPFEGDTAIFITPGYRFRGIDGLVTNFHLPRSTLFMLVSALMGLDRMQAAYAHAIAAGYRFYSYGDASLLLPETPHASGRHGHSAK

SEQ ID NO: 72285 - protein, 345 aa, Sphingomonas koreensis
  misc_feature (1)..(345): tr|A0A1L6J9Q8|A0A1L6J9Q8_9SPHN S-adenosylmethionine:tRN A ribosyltransferase-isomerase OS=Sphingomonas koreensi s OX=93064 GN=queA PE=3 SV=1
MNVDLFDFELPPERIALRPASPRDSARLLLLDGALTGDRSVGDLPALLAPGDLLVFNDTRVIPAQLEGMRGEAKIGATLHKREGPRHWIAFIRNAKRLRTGETIDFGNAVTAVAEARHDDGSFTLFFPGDEPVELLLERAGRMPLPPYIAAKRPTDARDADDYQTMFANEPGAVAAPTAALHFTPGLMSALEAAGIGHTTLTLHVGAGTFLPVKAEDTDDHRMHAEWGRIDPATADRLNAVRAAGGRVIAVGTTSLRLIESATGDDGVIRPFEGDTAIFITPGYRFRGIDGLVTNFHLPRSTLFMLVSALMGLERMQAAYAHAIAAGYRFYSYGDASLLLPGKPA

SEQ ID NO: 72286 - protein, 341 aa, Sphingomonas laterariae
  misc_feature (1)..(341): tr|A0A239CPJ0|A0A239CPJ0_9SPHN S-adenosylmethionine:tRN A ribosyltransferase-isomerase OS=Sphingomonas laterari ae OX=861865 GN=queA PE=3 SV=1
MRVDLFDFDLPAERIALRPASPRDSARMLVVDQDGMADRIIRDLPDILRPDDLLVFNDTRVIPAQLEGRRGEARIGATLHKREGPRAWRAFVRNAKRVRDGDRIEFGAGVTALAASRGDDGSILLEFDGDEPVELLLERAGRMPLPPYIAGKRAADERDADDYQTMFAAEPGAVAAPTAALHFTPDLMAALDARGIGHVTLTLHVGAGTFLPVKAEDTDDHRMHAEYGRIDAATADRLNAVRRAGGRVIAVGTTSLRLIESAAGEDGIIRPFDGDTAIFITPGYRFRGIDGLMTNFHLPKSTLFMLVSALMGRERMQAAYAHAIADGYRFYSYGDGSLLLP

SEQ ID NO: 72287 - protein, 344 aa, Sphingomonas melonis
  misc_feature (1)..(344): tr|A0A175Y087|A0A175Y087_9SPHN S-adenosylmethionine:tRN A ribosyltransferase-isomerase OS=Sphingomonas melonis TY OX=621456 GN=queA PE=3 SV=1
MRVELFDFELPAERIALRPASPRDSARLLVLDGDATRDRIVRDLPAELRAGDCLVFNDTRVIPAQLEGRRGEAKIGATLHKREGPRRWRAFVRNARRLRDGDSIDFGSGVTAIATDRGEDGSLALDFAGDEPVELLLERAGRMPLPPYIAAKRPTDARDADDYQTMFAAEPGAVAAPTAALHFTPDLIAALDAAGIGHETLTLHVGAGTFLPVKADDTDDHRMHAEWGRIDAATADRLNAVRARGGRVIAVGTTSLRLIESASGEDQVIRPFEGDTAIFITPGYTFRGIDGLLTNFHLPKSTLFMLVSALMGRERMQAAYAHAIAEGYRFYSYGDASLLLPTRG

SEQ ID NO: 72288 - protein, 344 aa, Sphingomonas melonis
  misc_feature (1)..(344): tr|A0A0D1M2J3|A0A0D1M2J3_9SPHN S-adenosylmethionine:tRN A ribosyltransferase-isomerase OS=Sphingomonas melonis OX=152682 GN=queA PE=3 SV=1
MKVELFDFELPAERIALRPAAPRDSARLLVLDGDATRDRIVRDLPAELRAGDCLVFNDTRVIPAQLEGRRGEAKIGATLHKREGPRRWRAFVRNARRLRDGDSIDFGSGVTAIATDRGEDGSLALDFAGDEPVELLLERAGRMPLPPYIAAKRPTDARDADDYQTMFAAEPGAVAAPTAALHFTPDLIAALDAAGIGHETLTLHVGAGTFLPVKADDTDDHRMHAEWGRIDAATVDRLNAVRARGGRVIAVGTTSLRLIESASSEDKMIRPFEGDTAIFITPGYTFRGIDGLLTNFHLPKSTLFMLVSALMGRERMQAAYAHAIAEGYRFYSYGDASLLLPTRG

SEQ ID NO: 72289 - protein, 341 aa, Sphingomonas mucosissima
  misc_feature (1)..(341): tr|A0A245ZM03|A0A245ZM03_9SPHN S-adenosylmethionine:tRN A ribosyltransferase-isomerase OS=Sphingomonas mucosiss ima OX=370959 GN=queA PE=3 SV=1
MNVDHFDFDLPQERIALRPAAPRDSARLLVLDGGSTHDRIVSDLPSELRAGDLLVFNDTRVIPAQLEGTRGAARIGATLHKREGPRRWRAFIRNAKRLRDGDPIDFGNGVTATASDRAQDGSFALDFAGEEPVELLLERAGRMPLPPYIAAKRPTDERDADDYQTMFARETGAVAAPTAALHFTPGLMTALKAAGIGHATLTLHVGAGTFLPVKASDTDDHQMHAEWGRIDQATADRLNAVRAGGGRVIAVGTTSLRLIESAAGTDGLVRPFEGDTSIFITPGYRFRGIDGLLTNFHLPRSTLFMLVSALMGLERMQAAYAHAIENGYRFYSYGDASLLLP

SEQ ID NO: 72290 - protein, 352 aa, Sphingomonas naasensis
  misc_feature (1)..(352): tr|A0A4V3QW81|A0A4V3QW81_9SPHN S-adenosylmethionine:tRN A ribosyltransferase-isomerase OS=Sphingomonas naasensi s OX=1344951 GN=queA PE=3 SV=1
MKVELFDFELPNERIALRPASPRDSARLLVLEGAAETRDACVGDLPSFLRKGDLLVFNDTRVIPAQLEGRRAARDDDAAGGSGASIGATLHKREGPRRWRAFIRNAKRLREGDSIDFGADVTALASDRAEDGSFALDFAGDEPVELLLERCGHMPLPPYIASKRPTDARDADDYQTMFASEPGAVAAPTAALHFTPALLASLDAAGIGHTTLTLHVGAGTFLPVKADDTDAHRMHAEWGRIDSATAERLNAVRAAGGRVIAVGTTSLRLIESAADADGSIAPFEGDTAIFITPGYRFKGIDGLVTNFHLPRSTLFMLVSALMGLERMQAAYAHAIASGYRFYSYGDASLLLP

SEQ ID NO: 72291 - protein, 341 aa, Sphingomonas olei
  misc_feature (1)..(341): tr|A0A4S4GF06|A0A4S4GF06_9SPHN S-adenosylmethionine:tRN A ribosyltransferase-isomerase OS=Sphingomonas olei OX= 1886787 GN=queA PE=3 SV=1
MNVDLFDFDLPPERIALRPAAPRDSARLLVLDGAATRDRIVADLPGELRANDILVFNDTRVIPAQLEGTRGEARIGATLHKREGPRRWRAFIRNAKRLRPGDTIDFGAGVSATASDRAQDGSFALDFAGDEPVELLLERAGRMPLPPYIAAKRPTDARDADDYQTMFAREAGAVAAPTAALHFTPDLIAALDAAKIAHTTLTLHVGAGTFLPVKAQDTADHQMHAEWGRIDAPTADRLNAVRASGGRVIAVGTTSLRLIESATDADGTIRPFEGDTSIFITPGYRFRGIDGLLTNFHLPRSTLFMLVSALMGLDRMQAAYAHAVANDYRFYSYGDASLLLP

SEQ ID NO: 72292 - protein, 341 aa, Sphingomonas oleivorans
  misc_feature (1)..(341): tr|A0A2T5G072|A0A2T5G072_9SPHN S-adenosylmethionine:tRN A ribosyltransferase-isomerase OS=Sphingomonas oleivora ns OX=1735121 GN=queA PE=3 SV=1
MRVDLFDFDLPPERIALRPAEPRDAARLLLLEGDQIEDARVRDLPDLLRAGDILVFNDTRVIPAQLEGRRGEARIGATLHKREGPRRWIAFVRNAKRVRDGDRIEFGAGVSAIASARLADGSIILDFEGEEPVELLLERAGRMPLPPYIAGKRAADARDAEDYQTMFAREEGAVAAPTAALHFTPGLMAALEARGIGHATLTLHVGAGTFLPVKAEDTEDHRMHAEWGRIDPATANRLNAARAAGGRLIAVGTTSLRLLESATGEDGIIRPFEGDTAIFITPGYRFRAIDGLMTNFHLPRSTLFMLVSALMGRERMQAAYAHAIQAGYRFYSYGDASLLLP

SEQ ID NO: 72293 - protein, 352 aa, Sphingomonas oligophenolica
  misc_feature (1)..(352): tr|A0A502CRF3|A0A502CRF3_9SPHN S-adenosylmethionine:tRN A ribosyltransferase-isomerase OS=Sphingomonas oligophe nolica OX=301154 GN=queA PE=3 SV=1
MNVDLFDFDLPTDRIALRPAVPRDAARMLVLDDDRQRDLSVADLPSQLRRGDLLVFNDTRVIPARLEGKRAPRAEDAGNGVAGANIGATLHKREGPRRWRAFIRNARRLLDGDRIDFGHDVVAIAGDRAEDGSFALDFLGDEPVELLLERAGRMPLPPYIAARRPTDARDADDYQTMFATDPGAVAAPTAALHFTPGLIAALDAAGIEHATLTLHVGAGTFLPVKADDTDDHRMHAEWGRIDAATADRLNAVRASGGRVIAVGTTSLRLIESASGDDGIIEPFDGDTSIFITPGYRFRGIDGLMTNFHLPRSTLFMLVSALMGTGRMQNAYAHAIASGYRFYSYGDASLLLP

SEQ ID NO: 72294 - protein, 341 aa, Sphingomonas panacis
  misc_feature (1)..(341): tr|A0A1B3Z9B6|A0A1B3Z9B6_9SPHN S-adenosylmethionine:tRN A ribosyltransferase-isomerase OS=Sphingomonas panacis OX=1560345 GN=queA PE=3 SV=1
MKVDLFDFELPPERIALRPASPRDSARLLVLERDATRDLAVTDLPGQLRAGDMLVFNDTRVIPAQLEGIRGDAKIGATLHKREGPHRWRAFIRNARRIRDGEAIDFGGGVSAVASERQEDGSFALTFAGDEPVELLLERAGRMPLPPYIASKRAADARDLDDYQTMFAAEKGAVAAPTAALHFTPELMAALDAAGIGHATLTLHVGAGTFLPVKAEDTAAHRMHTEWGRIDPATAARLNAVRAAGGRVIAVGTTSLRLIESAADRDGIIRPFEGDTAIFITPGYRFKGVDGLMTNFHLPRSTLFMLVSALMGLDRMQAAYAHAIANGYRFYSYGDASLLLP

SEQ ID NO: 72295 - protein, 345 aa, Sphingomonas parapaucimobilis
  misc_feature (1)..(345): tr|A0A0A1WBZ5|A0A0A1WBZ5_9SPHN S-adenosylmethionine:tRN A ribosyltransferase-isomerase OS=Sphingomonas parapauc imobilis NBRC 15100 OX=1219049 GN=queA PE=3 SV=1
MNVDLFDFALPPERIALYPASPRDSARMLVLDGDATRDQRVSDLPAALRAGDLLVFNDTRVIPAQLEGVRGEARIGATLHKREGTRRWRAFIRNAKRLRDGDVIDFGAGVSATARDRAEDGSFALDFAGDEPVELLLERAGTMPLPPYIAQKRGVTEKDADDYQTMFAQEPGAVAAPTAALHFTPGLLDSLAAAGIEHATLTLHVGAGTFLPVKAEDTVDHKMHAEWGRIDAATADRLNAVKARGGRVIAVGTTSLRLIESAAGEDGVIRPFEGDTAIFITPGYRFRGIHGLMTNFHLPRSTLFMLVSALMGLDRMQAAYAHAIANAYRFYSYGDASLLLPERPA

SEQ ID NO: 72296 - protein, 342 aa, Sphingomonas paucimobilis
  misc_feature (1)..(342): tr|A0A031JIE7|A0A031JIE7_SPHPI S-adenosylmethionine:tRN A ribosyltransferase-isomerase OS=Sphingomonas paucimob ilis OX=13689 GN=queA PE=3 SV=1
MRVDLFDFDLPPESIALRPASPRDSARLLLVAGDAPFEDRIVRDLPSMLRPGDVLVFNDTKVIPAQLEGMRGEARVGATLHKRLGLRQWQAFLRNAKRVRDGDRIDFGAGVTAIAGPRDEDGGVTLRFEGEEPVELLLERAGRMPLPPYIASKRPTDARDRSDYQTMFAREDGAVAAPTAALHFTLELMAALGKAGVQAETLTLHVGAGTFLPVKADDTDDHRMHAEWGRIEQDTADRLNAARARGGRLIAVGTTSLRLLESAADEEGRIHPFADETRIFITPGYRFRAVDGLMTNFHLPKSTLFMLVSALMGRERMQAAYAHAIAQGYRFYSYGDSSLLLP

SEQ ID NO: 72297 - protein, 345 aa, Sphingomonas paucimobilis
  misc_feature (1)..(345): tr|A0A411LIK1|A0A411LIK1_SPHPI S-adenosylmethionine:tRN A ribosyltransferase-isomerase OS=Sphingomonas paucimob ilis OX=13689 GN=queA PE=3 SV=1
MNVDLFDFALPPERIALYPASPRDSARMLVLDGDATRDERVSDLPQALRAGDLLVFNDTRVIPAQLQGTRGDAKIGATLHKREGVRRWRAFIRNAKRLREGDVIDFGAGVSATANDRAEDGSFALDFAGDEPVELLLERAGTMPLPPYIAQKRGVTEKDAEDYQTMFAQEPGAVAAPTAALHFTPGLLESLAAAGIEHATLTLHVGAGTFLPVKADDTVDHKMHAEWGRIDAATAHRLNAVKARGGRVIAVGTTSLRLIESAAGEDGVIRPFEGDTAIFITPGYRFRGIDGLMTNFHLPRSTLFMLVSALMGLDRMQAAYAHAIAQGYRFYSYGDASLLLPGPAA

SEQ ID NO: 72298 - protein, 343 aa, Sphingomonas pokkalii
  misc_feature (1)..(343): tr|A0A2U0SEM1|A0A2U0SEM1_9SPHN S-adenosylmethionine:tRN A ribosyltransferase-isomerase OS=Sphingomonas pokkalii OX=2175090 GN=queA PE=3 SV=1
MNVDLFDFELPTDRIALRPASPRDSARLLVLDGAETRDAIIRDLAQQLRPGDCLVFNDTRVIPAQLEGTRGEARIGATLHKREGPRRWRAFIRNAKRLRDGDAIDFGPNAVAIASDRADDGSFALDFQGDEPVELLLERCGRMPLPPYIASKRPTDERDAEDYQTMFAAEPGAVAAPTAALHFTPELMASLEAAGIGHTTLTLHVGAGTFLPVKAEDTEDHKMHAEWGRITPEVADRLNAVRAAGNRIVAVGTTSLRLLESAANADRVIEPFEGDTAIFITPGYRFKGVDGLVTNFHLPRSTLFMLVSALMGLDRMQAAYAHAIETGYRFYSYGDSSLLLPAR

SEQ ID NO: 72299 - protein, 345 aa, Sphingomonas rubra
  misc_feature (1)..(345): tr|A0A1I5QI66|A0A1I5QI66_9SPHN S-adenosylmethionine:tRN A ribosyltransferase-isomerase OS=Sphingomonas rubra OX =634430 GN=queA PE=3 SV=1
MNVDLFDFDLPPERIALHPAAPRDAARMLVLDGQATRDAGVADLPAALRPGDCLVFNDTRVIPAQLDGHRGEARIGATLHKREGPRRWRAFVKGAKRLRDGDLIDFGHGVGATSTARGEDGSWALDFAGDEPVELLLERAGRMPLPPYIAARRGIRPSDADDYQTMFADEPGAVAAPTAALHFTPMLMAALGEAGIGHETLTLHVGAGTFLPVKAADTDDHRMHAEWGRIDAATAARLNAVRARGGRVIAVGTTSLRLLESAADVDGTIRPFEGDTAIFITPGVALRAVDGLLTNFHLPRSTLFMLVSALMGTDRMQAAYAHAIAQGYRFYSYGDASLLLPGTRP

SEQ ID NO: 72300 - protein, 78 aa, Sphingomonas sanguinis
  misc_feature (1)..(78): tr|A0A147IJB2|A0A147IJB2_9SPHN S-adenosylmethionine:tRN A ribosyltransferase-isomerase OS=Sphingomonas sanguini s OX=33051 GN=SB4_18495 PE=3 SV=1
MIRPFEGDTAIFITPGYRFRGIDGLMTNFHLPRSTLFMLVSALMGLERMQAAYAHAIATDYRFYSYGDGSLLLPERAA

SEQ ID NO: 72301 - protein, 210 aa, Sphingomonas sanguinis
  misc_feature (1)..(210): tr|A0A147J554|A0A147J554_9SPHN S-adenosylmethionine:tRN A ribosyltransferase-isomerase (Fragment) OS=Sphingomon as sanguinis OX=33051 GN=NS258_15475 PE=3 SV=1
LLERAGTMPLPPYIAQKRGVTEKDADDYQTMFANEPGAVAAPTAALHFTPELLASLDAAGIEHATLTLHVGAGTFLPVKADDTVDHKMHAEWGRIDAATADRLNAVRQRGGRVIAVGTTSLRLIESAAGEDGVIRPFEGDTAIFITPGYRFRGIDGLMTNFHLPRSTLFMLVSALMGLERMQAAYAHAIATDYRFYSYGDGSLLLPERAA

SEQ ID NO: 72302 - protein, 341 aa, Sphingomonas sanxanigenens
  misc_feature (1)..(341): tr|W0AHV4|W0AHV4_9SPHN S-adenosylmethionine:tRNA ribosy ltransferase-isomerase OS=Sphingomonas sanxanigenens DS M 19645 = NX02 OX=1123269 GN=queA PE=3 SV=1
MRVDLFDFELPPERIALRPANPRDSARLLLLNGSETADHMVRELPSLLQPGDCLVFNDTRVIPAQLDGHRGEAGIGATLHKREGPRRWRAFLRNARRVREGDRIDFAHGVAATASEKGADGSMALTFLGDEPVELLLERAGRMPLPPYIAARRTPDAADAEDYQTMFAREAGAVAAPTAALHFTPQLMAAFAAQGVEHATLTLHVGAGTFQPVKVEDTVDHQMHAEWGRIDAATADRLSAVRARGNRLIAVGTTSLRLLESAAGEDDVIRPFEGDTAIFITPGYRFRAIDGLVTNFHLPRSTLFMLVSALMGRDRMQAAYAHAIASGYRFYSYGDASLLLP

SEQ ID NO: 72303 - protein, 346 aa, Sphingomonas sanxanigenens
  misc_feature (1)..(346): tr|A0A2W5AA33|A0A2W5AA33_9SPHN S-adenosylmethionine:tRN A ribosyltransferase-isomerase OS=Sphingomonas sanxanig enens OX=397260 GN=queA PE=3 SV=1
MRIDLFDFALPPESIALRPAAPRDSARLLLIDGDARQDRIVSDLPSLLRAGDCLVFNDTRVIPAQLEGRRGDARIGATLHKREGPRDWRAFVRNARRVRDGDRIDFAAGVSAIAGARGEDGSLLLSFEGDEPVELLLERAGTMPLPPYIAGKRATDARDAEDYQTMFAREAGAVAAPTAALHFTPALMEALAGAGVGRETLTLHVGAGTFLPVKVEDTDDHRMHSEWGRIDAAAADRLNAVRAAGGRLIAVGTTSLRLLESAAGEDGVIRPFEGDTDIFITPGYRFRAIDGLMTNFHLPRSTLFVLVSALMGRETMLDAYAHAIATGYRFYSYGDASLLLPAPETR

SEQ ID NO: 72304 - protein, 345 aa, Sphingomonas sp.
  misc_feature (1)..(345): tr|A0A514WFZ5|A0A514WFZ5_9SPHN S-adenosylmethionine:tRN A ribosyltransferase-isomerase OS=Sphingomonas sp. IC08 1 OX=304378 GN=queA PE=3 SV=1
MRVDLFDFDLPPENIALRPARPRDSARMLLVEGAESGSLVDRHVHDLPGILRPGDVLVFNDTRVIPAQLEGRRGEAKIGATLHKRIDLRRWQAFVRNAKRLRPSDRIEFPAGVTALAEQRLDDGSWVLFFEGEEPVEVLLERAGRMPLPPYIAGKRETDEADRSDYQTMFAEKDGAVAAPTASLHFTPELMARLEAAGVKRETLTLHVGAGTFLPVKADDTQDHRMHAEWGSIDAATADRLNAARAAGNRVIAVGTTSLRLLESATGDDNVIRPFEGDTAIFITPGYRFKAIDGLMTNFHLPKSTLFMLVSALMGLERMQAVYRHAISTGYRFYSYGDSSLLIRE

SEQ ID NO: 72305 - protein, 351 aa, Sphingomonas sp.
  misc_feature (1)..(351): tr|A0A0Q8XFJ1|A0A0Q8XFJ1_9SPHN S-adenosylmethionine:tRN A ribosyltransferase-isomerase OS=Sphingomonas sp. Root 241 OX=1736501 GN=queA PE=3 SV=1
MNVDLFDFELPSERIALRPASPRDSARLLVLEGAETRDATVRELPRFLRRGDLLVFNDTRVIPAQLEGLRGERNDGAQSAPGARIGATLHKREGPRRWRAFIRNAKRLREGDSVDFGHGVTALASDRAEDGSFALDFGGDEPVELLLTRCGRMPLPPYIASKRPTDARDAEDYQTMFASEPGAVAAPTAALHFTPELLAALEAAGIGHATLTLHVGAGTFLPVKAEDTDAHKMHAEWGRIDAATADRLNAVRAAGGRVIAVGTTSLRLIESAASADGAIRPFEGDTAIFITPGYRFKGIDGLVTNFHLPRSTLFMLVSALMGLDRMQAAYAHAIDKDYRFYSYGDASLLLP

SEQ ID NO: 72306 - protein, 341 aa, Sphingomonas spermidinifaciens
  misc_feature (1)..(341): tr|A0A2A4B769|A0A2A4B769_9SPHN S-adenosylmethionine:tRN A ribosyltransferase-isomerase OS=Sphingomonas spermidi nifaciens OX=1141889 GN=queA PE=3 SV=1
MQVDLFDFELPSERIALRPAAPRDAARMLVVEGSGLRDAIVRDLPQCLRPGDCLVFNDTRVIPAQLEGTRGEARIGATLHKREGPRRWRAFIRNAKRLREGDAIDFGADVSATASDRAADGSFALDFAGDEPVELLLERAGRMPLPPYIAAKRPTDERDADDYQTMFAREAGAVAAPTAALHFTPDLLASLDAAGIGHATLTLHVGAGTFLPVKAEDTDDHAMHAEWGRIDAATADRLNAVHAAGGRVIAVGTTSLRLIESAAGEDGVIRPFEGDTAIFITPGYRFRGIDGLMTNFHLPRSTLFMLVSALMGLETMQAAYAHAIAGGYRFYSYGDASLLLP

SEQ ID NO: 72307 - protein, 344 aa, Sphingomonas taxi
  misc_feature (1)..(344): tr|A0A097EJB6|A0A097EJB6_9SPHN S-adenosylmethionine:tRN A ribosyltransferase-isomerase OS=Sphingomonas taxi OX= 1549858 GN=queA PE=3 SV=1
MRVDLFDFDLPAERIALRPAVPRDAARLLVLDGEATRDLTVGALPGQLRAGDCLVFNDTRVIPAQLEGRRGDATIGATLHKREGPRRWRAFIRNAKRLRDGDTIDFGAGVGARASDRGEDGSFALDFAGDEPVELLLERAGRMPLPPYIAAKRPTDAQDATDYQTMFAAEPGAVAAPTAALHFTPALIDALAAAGIAHETLTLHVGAGTFLPVKAEDTADHRMHAEWGRIDAATADRLNAVRVNGGRVIAVGTTSLRLIESAARADGVIAPFEGDTAIFITPGYAFRGIDGLVTNFHLPKSTLFMLVSALMGRERMQAAYAHAIAAGYRFYSYGDASLLLPARS

SEQ ID NO: 72308 - protein, 341 aa, Sphingomonas taxi
  misc_feature (1)..(341): tr|A0A2W5RHN6|A0A2W5RHN6_9SPHN S-adenosylmethionine:tRN A ribosyltransferase-isomerase OS=Sphingomonas taxi OX= 1549858 GN=queA PE=3 SV=1
MNVDLFDFALPPERIALRPAVPRDAARMLVVTPDGLADRVVAALPAQLRAGDLLVFNDTRVIPAQLEGTRGAARIGATLHKREGPRRWRAFVRNARRLRDCDAIDFGRDVTATARDRQADGSWALDFAGDEPVELLLERAGRMPLPPYIAGKRDTDARDARDYQTMFATEPGAVAAPTAALHFTPALMAALEAAGIAHATLTLHVGAGTFLPVKAEDTADHRMHAEWGRIDAALAARLNAVRAAGGRVIAVGTTSLRLIESATDADGQVRAFEGDTAIFITPGYRFRGIDGLMTNFHLPRSTLFMLVSALMGLDRMQAAYAYAIENDYRFYSYGDASLLLP

SEQ ID NO: 72309 - protein, 343 aa, Sphingomonas trueperi
  misc_feature (1)..(343): tr|A0A543LRB5|A0A543LRB5_9SPHN S-adenosylmethionine:tRN A ribosyltransferase-isomerase OS=Sphingomonas trueperi OX=53317 GN=queA PE=3 SV=1
MNVDLFDFELPNERIALRPAAPRDSARLLVLDGPETRDAIVRDLAAQLRPGDCLVFNDTRVIPAQLEGTRGEARIGATLHKREGPRRWRAFIRNAKRLRDGDAIDFGPDAIAIASDRAEDGSFALDFQGDEPVELLLQRCGRMPLPPYIASKRPTDARDADDYQTMFAAEPGAVAAPTAALHFTPDLMASLEAAGIGHTTLTLHVGAGTFLPVKAEDTADHKMHAEWGRITPEVADRLNAVRAAGNRIIAVGTTSLRLLESAADEHRVIQPFEGDTAIFITPGYRFKGVDGLVTNFHLPRSTLFMLVSALMGLDRMQAAYAHAIETGYRFYSYGDSSLLLPAR

SEQ ID NO: 72310 - protein, 351 aa, Sphingomonas turrisvirgatae
  misc_feature (1)..(351): tr|A0A1E3LXZ1|A0A1E3LXZ1_9SPHN S-adenosylmethionine:tRN A ribosyltransferase-isomerase OS=Sphingomonas turrisvi rgatae OX=1888892 GN=queA PE=3 SV=1
MNVDLFDFELPPERIALRPASPRDAARLLLLDGERTEDRIVRDLPTLLRAGDLLVFNDTRVIPAQLEGRRGAREGSEDAGSGAKIGATLHKREGPRDWIAFIRNAKRLRVSDVIDFGNDVRAVAEARHADGSFTLHFPGDEPVELLLQRAGHMPLPPYIAAKRPTDARDADDYQTMFANEPGAVAAPTAALHFTPELIAALDAAGIGHTTLTLHVGAGTFLPVKAEDTDDHRMHAEWGRIDADTADRLNAVRAGGGRVIAVGTTSLRLIESAAGEDGLVRPFEGDTSIFITPGYRFRGIDGLISNFHLPRSTLFMLVSALMGLERMQAAYAHAIASDYRFYSYGDASLLLP

SEQ ID NO: 72311 - protein, 344 aa, Sphingomonas wittichii
  misc_feature (1)..(344): sp|A5V282|QUEA_SPHWW S-adenosylmethionine:tRNA ribosylt ransferase-isomerase OS=Sphingomonas wittichii (strain RW1 / DSM 6014 / JCM 10273) OX=392499 GN=queA PE=3 SV=1
MRVDLFDFDLPPENIALRPASPRDSARMLLVEGSEGALADRHVSDLPGLLRVGDCLVFNDTRVIPAQLEGRRGEARIGATLHKREGLRQWRAFVRNAKRVRTGDRIDFGAGVSAIAAERGEDGSILLDFEGDEPVELLLERAGTMPLPPYIAGKRPTDDRDRDDYQTMFAREKGAVAAPTAALHFTPRLMEALAAAGIASETLTLHVGAGTFLPVKADDTDDHRMHAEWGRIDAATADHLNAIRAAGGRVIAVGTTSLRLLESATGEDGVIRPFDGDTAIFITPGYRFRAIDGLMTNFHLPKSTLFMLVSALMGRDRMQAAYAHAIAEGYRFYSYGDSSLLLPG

SEQ ID NO: 72312 - protein, 344 aa, Sphingomonas wittichii
  misc_feature (1)..(344): tr|A0A1X9UND4|A0A1X9UND4_SPHSD S-adenosylmethionine:tRN A ribosyltransferase-isomerase OS=Sphingomonas wittichi i (strain DC-6 / KACC 16600) OX=1283312 GN=queA PE=3 SV =1
MRVDLFDFDLPPENIALRPASPRDSARMLLVEGSEGALADRHVSDLPGLLRVGDCLVFNDTRVIPAQLEGRRGEARIGATLHKREGLRQWRAFVRNAKRVRTSDRIDFGAGVSAVAAERGEDGSILLDFEGDEPVELLLERAGTMPLPPYIAGKRPTDDRDRDDYQTMFAREKGAVAAPTAALHFTPRLVEALAAAGIASETLTLHVGAGTFLPVKADDTDDHRMHAEWGRIDAATADRLNAIRAAGGRVIAVGTTSLRLLESATGEDGVIRPFDGDTAIFITPGYRFRAIDGLMTNFHLPKSTLFMLVSALMGRDRMQAAYAHAIAEGYRFYSYGDSSLLLPG

SEQ ID NO: 72313 - protein, 345 aa, Sphingomonas yabuuchiae
  misc_feature (1)..(345): tr|A0A147IM33|A0A147IM33_9SPHN S-adenosylmethionine:tRN A ribosyltransferase-isomerase OS=Sphingomonas yabuuchi ae OX=172044 GN=queA PE=3 SV=1
MNVDLFDFALPPERIALYPASPRDSARMLLLDGEATRDQRVSDLPAALRAGDLLVFNDTRVIPAQLEGVRGEARIGATLHKREGTRRWRAFIRNAKRLRDGDVIDFGAGVSATARDRAEDGSFALDFAGDEPVELLLERAGTMPLPPYIAQKRGVTEKDADDYQTMFANEPGAVAAPTAALHFTPELLASLAAAGIEHATLTLHVGAGTFLPVKAEDTVDHKMHAEWGRIDAATADRLNAVKARGGRVIAVGTTSLRLIESAAGEDGVIRPFEGDTAIFITPGYRFRGIDGLMTNFHLPRSTLFMLVSALMGLDRMQAAYAHAVANDYRFYSYGDASLLLPERCA

SEQ ID NO: 72314 - protein, 351 aa, Sphingopyxis alaskensis
  misc_feature (1)..(351): sp|Q1GR22|QUEA_SPHAL S-adenosylmethionine:tRNA ribosylt ransferase-isomerase OS=Sphingopyxis alaskensis (strain DSM 13593 / LMG 18877 / RB2256) OX=317655 GN=queA PE=3 SV=1
MRVDAFDFDLPSERIALRPARPRDAARMLVVDAGNIVDAGVRDLPQWLRPGDCLVFNDTRVIPAQLEGLRGEAKIGATLHKRIDLRRWQAFVRNAKRLRVGETVDFGSGVAALAEERLADGSFVLAFAGDEPVELLLERAGTMPLPPYIAGKRGADEADRDDYQTMFAREDGAVAAPTAALHFTPELLAALAAAGIATETLTLHVGAGTFLPVKADDTDDHVMHAEWGRIEADTAARLNAVRASGGRVIAVGTTSLRLLESAARDDGTITPFAGDTSIFITPGYRFKAIDGLMTNFHLPRSTLFMLVSALMGLETMQAAYAHAIAREYRFYSYGDASLLLPRQSGRSRTLS

SEQ ID NO: 72315 - protein, 345 aa, Sphingopyxis bauzanensis
  misc_feature (1)..(345): tr|A0A246K2C6|A0A246K2C6_9SPHN S-adenosylmethionine:tRN A ribosyltransferase-isomerase OS=Sphingopyxis bauzanen sis OX=651663 GN=queA PE=3 SV=1
MRVDAFDFDLPNERIALRPARPRDAARMLVVDGDRIVDAGVGDLPAWLHPGDCLVFNDTRVIPAQLEGRRGDAKIGATLHKRIDLRRWQAFVRNAKRLRVGETVDFGSEVSALAEERLPDGSFILAFAGDEPVEVLLERAGTMPLPPYIAGKRATDEEDRSDYQTMFAAKDGAVAAPTAALHFTPGLLAALAAMGIATETLTLHVGAGTFLPVKADDTEDHVMHAEWGRIEADTAARLNAVRAAGGRIIAVGTTSLRLLESAAQDDGTIAAFVDDTAIFITPGYRFKAIDGLMTNFHLPRSTLFMLVSALMGLETMQAAYAHAIANDYRFYSYGDASLLLPVRAV

SEQ ID NO: 72316 - protein, 348 aa, Sphingopyxis flava
  misc_feature (1)..(348): tr|A0A1T5DG55|A0A1T5DG55_9SPHN S-adenosylmethionine:tRN A ribosyltransferase-isomerase OS=Sphingopyxis flava OX =1507287 GN=queA PE=3 SV=1
MRVDAFDFELPPERIALRPVRPRDAARMLVVERGGIRDATVSDLPGELRAGDCLVFNDTRVIPAQLEGRRGDAKIGATLHKRIDLRRWQAFVRNAKRLRVGESVDFGSGVTAAAEERLSDGSFILAFAGDEPVELLLERAGTMPLPPYIAGKRATDEADRRDYQTMFAREDGAVAAPTAALHFTPTLLDALAAAGIACETLTLHVGAGTFLPVKADNTEDHVMHAEWGRIDAATADRLNAVRAAGGRIIAVGTTSLRLLESAALGTGLIEPFEGDTAIFITPGYRFKAIDGLMTNFHLPRSTLFMLVSALMGLETMQAAYAHAIANGYRFYSYGDASLLLPQRPDRSA

SEQ ID NO: 72317 - protein, 344 aa, Sphingopyxis fribergensis
  misc_feature (1)..(344): tr|A0A0A7PI84|A0A0A7PI84_9SPHN S-adenosylmethionine:tRN A ribosyltransferase-isomerase OS=Sphingopyxis friberge nsis OX=1515612 GN=queA PE=3 SV=1
MRVDAFDFDLPNERIALRPARPRDAARMLVVDDGKIVDAGVRDLPQWLRPGDCLVFNDTRVIPAQLEGRRGDAKIGATLHKRIDLRRWQAFVRNAKRLRVGETVDFGAGVEALAEERLADGSFILTFAGDEPVELLLERAGTMPLPPYIAGKRATDEDDRSDYQTMFAREDGAVAAPTAALHFTPKLLDALAAADIATETLTLHVGAGTFLPVKADDTEDHVMHAEWGRIEADTAARLNAVRAAGGRVIAVGTTSLRLLESAAQDDGIIAPFAGDTAIFITPGYRFRAIDGLMTNFHLPRSTLFMLVSALMGLETMQAAYAHAIAQSYRFYSYGDASLLLPRAK

SEQ ID NO: 72318 - protein, 351 aa, Sphingopyxis granuli
  misc_feature (1)..(351): tr|A0A0X8R176|A0A0X8R176_9SPHN S-adenosylmethionine:tRN A ribosyltransferase-isomerase OS=Sphingopyxis granuli OX=267128 GN=queA PE=3 SV=1
MRVDAFDFELPPDRIALRPARPRDAARMLVVAGSGLHDAGVRDLPAWLRRGDCLVFNDTRVIPARLEGVRGGRDGDGAAGAKIGATLHKRVDLRRWQAFVRNAKRLHVGETVDFGAGVIAVAEQRLPDGSFVLAFQGDEPVELLLDRAGTMPLPPYIAGKRATDEADRADYQTMFARADGAVAAPTAALHFTPALLAALGEAGIASETLTLHVGAGTFLPVKADDTADHVMHAEWGCIDADAAARLNAVRAAGGRVIAVGTTSLRLLESAARADGTIEPFTGDTSIFITPGYRFRAIDGLMTNFHLPRSTLFMLVSALMGLDVMRAAYDHAIAEGYRFYSYGDSSLLLPDG

SEQ ID NO: 72319 - protein, 353 aa, Sphingopyxis indica
  misc_feature (1)..(353): tr|A0A239H3G9|A0A239H3G9_9SPHN S-adenosylmethionine:tRN A ribosyltransferase-isomerase OS=Sphingopyxis indica O X=436663 GN=queA PE=3 SV=1
MRVDDFDFDLPPERIALRPARPRDAARMLVVEGRAMRDAGVRDLPALLRAGDCLVFNDTRVIPAQLEGQRGVRRDGAASAPGAKIGATLHKRVDLRRWQAFVRNAKRLRVGETVDFGSGVEAVAEERLADGSFILAFAGDEPVELLLERAGTMPLPPYIAGKRGADDADRADYQTMFAREDGAVAAPTAALHFTPGLLDAIAAAGIATETLTLHVGAGTFLPVKADDTDDHVMHAEWGRIEPETAARLNAVRAAGGRIIAVGTTSLRLLESAARTDGTIAPFAGDTSIFITPGYRFRAVGGLMTNFHLPRSTLFMLVSALMGLDVMHAAYSHAIAEGYRFYSYGDSSLLLPER

SEQ ID NO: 72320 - protein, 346 aa, Sphingopyxis lindanitolerans
  misc_feature (1)..(346): tr|A0A2S8B716|A0A2S8B716_9SPHN S-adenosylmethionine:tRN A ribosyltransferase-isomerase OS=Sphingopyxis lindanit olerans OX=2054227 GN=queA PE=3 SV=1
MRVDAFDFDLPSERIALRPARPRDAARMLVVEGGSISDAKMSDRGVRDLPALLRAGDCLVFNDTRVIPAQLEGKRGDAKIGATLHKRVDLRRWQAFVRNAKRLRVGETVDFGSGVAALAEQRLADGSFILAFGGDEPVEILLERAGTMPLPPYIAGKRATDDEDRADYQTMFADKDGAVAAPTAALHFTPDLLAALTAAGVATEMLTLHVGAGTFLPVKSDDTADHVMHAEWGRIDAATAGRLNAVRARGGRVIAVGTTSLRLLESAAREDGRIAPFEGDTAIFITPGYRFRAIDGLMTNFHLPRSTLFMLVSALMGLETMQSAYGHAIGEGYRFYSYGDASLLLP

SEQ ID NO: 72321 - protein, 347 aa, Sphingopyxis macrogoltabida
  misc_feature (1)..(347): tr|A0A2W5L3M9|A0A2W5L3M9_SPHMC S-adenosylmethionine:tRN A ribosyltransferase-isomerase OS=Sphingopyxis macrogol tabida OX=33050 GN=queA PE=3 SV=1
MRVDAFDFDLPPGNIALRPARPRDAARMLVVEGGAIRDAGVRDLPACLRAGDCLVFNDTRVIPAQLEGTRGAAKIGATLHKRVDLRRWQAFVRNAKRLRVGESVDFGMGVTALAEERLADGSFILAFAGDEPVELLLERAGTMPLPPYIAGKRATDADDRSDYQTMFAREDGAVAAPTAALHFTPALLAALAEAGVSTETLTLHVGAGTFLPVKADDTDDHAMHAEWGRIDAETAARLNAVRAAGGRVIAVGTTSLRLLESATGEDGVIAPFAGDTAIFITPGYRFRAIDGLMTNFHLPRSTLFMLVSALMGLETMQAAYAHAIAGGYRFYSYGDASLLLPGPAIPK

SEQ ID NO: 72322 - protein, 345 aa, Sphingopyxis macrogoltabida
  misc_feature (1)..(345): tr|A0A0P0DIL0|A0A0P0DIL0_SPHMC S-adenosylmethionine:tRN A ribosyltransferase-isomerase OS=Sphingopyxis macrogol tabida OX=33050 GN=queA PE=3 SV=1
MRVDAFDFELPGERIALRPARPRDAARMLVVAGNDMADAGVAELPKWLRPGDCLVFNDTRVIPAQLEGRRGEAKIGATLHKRIDLRRWQAFVRNAKRLRVGETIDFGAGVAAIAEDRLPDGSFILAFGGDKPVEVLLERAGTMPLPPYIAGKRATDEEDRADYQTMFAREDGAVAAPTAALHFTPRLLDALAAAGVASETLTLHVGAGTFLPVKADDTEDHVMHAEWGRIEADTAERLNAVRAAGGRVIAVGTTSLRLLESAASADGTIEPFAGDTSIFITPGYRFRAIDGLMTNFHLPRSTLFMLVSALMGLETMQAAYAHAIAGGYRFYSYGDASLLLPERSA

SEQ ID NO: 72323 - protein, 341 aa, Sphingopyxis sp.
  misc_feature (1)..(341): tr|A0A270B5Z9|A0A270B5Z9_9SPHN S-adenosylmethionine:tRN A ribosyltransferase-isomerase OS=Sphingopyxis sp. GW24 7-27LB OX=2012632 GN=queA PE=3 SV=1
MRVDAFDFDLPPERIALRPARPRDAARMLVVEGGAIGDAVVRDLPNRLRAGDCLVFNDTRVIPAQLEGRRGEAKIGATLHKRIGLRRWQAFVRNAKRLRVGETVDFGAGVAALAEERLPDGSFVLAFAGDEPVEILLERAGTMPLPPYIAGKRATDEADRSDYQTMFARQDGAVAAPTAALHFTLSLLDTLTAAGIGSETLTLHVGAGTFLPVKADDTEDHVMHAEWGRIDAATADRLNAVRAAGGRVIAVGTTSLRLLESAAREDGVIAPFEGDTAIFITPGYRFKAIDGLMTNFHLPRSTLFMLVSALMGLETMQAAYAHAIAQDYRFYSYGDASLLLP

SEQ ID NO: 72324 - protein, 348 aa, Sphingopyxis sp.
  misc_feature (1)..(348): tr|A0A0Q8S0Q4|A0A0Q8S0Q4_9SPHN S-adenosylmethionine:tRN A ribosyltransferase-isomerase OS=Sphingopyxis sp. Root 214 OX=1736491 GN=queA PE=3 SV=1
MRVDAFDFDLPNERIALRPARPRDAARMLVVDGDEIADAGVGDLPAWLRPGDCLVFNDTRVIPAQLEGRRGDARIGATLHKRIDLRRWQAFIRNAKRLRVGETVDFGAGAAALADERLPDGSFILAFAGDEPVEVLLERAGTMPLPPYIAGKRPTDDADRADYQTMFAREDGAVAAPTAALHFTPKLLEALAAAGVLTETLTLHVGAGTFLPVKADDTEDHVMHAEWGRIDADTAARLNAVRAAGGRVIAVGTTSLRLLESAAQDDGVIAPFAGDTAIFITPGYRFKAIDGLMTNFHLPRSTLFMLVSALMELETMQAAYAHAIESEYRFYSYGDASLLLPRQSDRSA

SEQ ID NO: 72325 - protein, 341 aa, Sphingopyxis terrae
  misc_feature (1)..(341): tr|A0A142VUZ2|A0A142VUZ2_9SPHN S-adenosylmethionine:tRN A ribosyltransferase-isomerase OS=Sphingopyxis terrae s ubsp. terrae NBRC 15098 OX=1219058 GN=queA PE=3 SV=1
MRVDAFDFDLPPERIALRPARPRDAARMLVVAGGAMTDAGVRDLPLWLRPGDCLVFNDTRVIPAQLEGRRGDARIGATLHKRIDLRRWQAFVRNAKRLRIGETVDFGAGVGALAEDRLADGSFILFFPGEEPVELLLERAGTMPLPPYIAGKRATDDADRSDYQTMFAQKDGAVAAPTAALHFTPDLLAALGAAGIESETLTLHVGAGTFLPVKADDTEDHVMHAEWGVIDSATAERLNAVRARGNRVIAVGTTSLRLLESAAGEEGVIRPFEGDTAIFITPGYRFRAIDGLMTNFHLPRSTLFMLVSALMGLETMQAAYAHAIAGGYRFYSYGDSSLLLP

SEQ ID NO: 72326 - protein, 343 aa, Sphingopyxis terrae
  misc_feature (1)..(343): tr|A0A1Y6FVI7|A0A1Y6FVI7_9SPHN S-adenosylmethionine:tRN A ribosyltransferase-isomerase OS=Sphingopyxis terrae s ubsp. ummariensis OX=429001 GN=queA PE=3 SV=1
MRVDAFDFDLPPERIALRPARPRDAARMLVVAGSAMTDAGVRDLPQWLRPGDCLVFNDTRVIPAQLEGRRGDARIGATLHKRTDLRRWQAFVRNAKRLRIGETVDFGAGVSALAEDRLADGSFILFFPGDEPVELLLERAGTMPLPPYIAGKRATDDADRSDYQTMFAQKDGAVAAPTAALHFTPDLLAALGAAGIESETLTLHVGAGTFLPVKADDTEDHVMHAEWGVIDAATADRLNAVRARGNRVIAVGTTSLRLLESAAGEDGVIRPFEGDTAIFITPGYRFRAIDGLMTNFHLPRSTLFMLVSALMGLETMQAAYAHAIAGGYRFYSYGDSSLLLPQR

SEQ ID NO: 72327 - protein, 343 aa, Sphingopyxis witflariensis
  misc_feature (1)..(343): tr|A0A246JXN3|A0A246JXN3_9SPHN S-adenosylmethionine:tRN A ribosyltransferase-isomerase OS=Sphingopyxis witflari ensis OX=173675 GN=queA PE=3 SV=1
MRVDAFDFDLPPERIALRPARPRDAARMLVVDGGSMTDAGVGDLPSWLRPGDCLVFNDTRVIPAQLEGKRGDARIGATLHKRIDLRRWQAFIRNAKRLRVGETVDFGSGVSAVAEDRLADGSFILAFAGDEPVEVLLERAGTMPLPPYIAGKRATDADDRSDYQTMFAREDGAVAAPTAALHFTPGLLDALAKAGIATETLTLHVGAGTFLPVKADNTEDHVMHAEWGRIDADTAARLNAVRAKGGRVIAVGTTSLRLLESAAGEDNIIAPFAGDTAIFITPGYRFRAIDGLMTNFHLPKSTLFMLVSALMGLDVMQATYAHAIASEYRFYSYGDASLLLPPR

SEQ ID NO: 72328 - protein, 343 aa, Sphingorhabdus contaminans
  misc_feature (1)..(343): tr|A0A553WC89|A0A553WC89_9SPHN S-adenosylmethionine:tRN A ribosyltransferase-isomerase OS=Sphingorhabdus contam inans OX=1343899 GN=queA PE=3 SV=1
MRVDLFDFVLPADRIALRPVSPRDSARMLHVCGKEGLSDHSVRDLPNLLRKGDCLIFNDTRVIPAQLEGTRGDAKVGATLHKRVDLRRWQAFVRNAKRLRVGETVDFGRGVLAVAEERHEDGSFTLYFEGNERVEILLERAGTMPLPPYIAGKRPPDERDAQDYQTMFADKDGAVAAPTASLHFTPELMAGIEAAGIETATLTLHVGAGTFLPVKVDDTTEHRMHHEWGQIDSNTAYRLNSVRENGGRLIAVGTTSLRLIESAADEEGTIRPFSGDTDIFITPGYRFKAIQGLMTNFHLPKSTLFMLVSALMGRETMQAAYAHAIANDYRFYSYGDSSLLIPA

SEQ ID NO: 72329 - protein, 341 aa, Sphingorhabdus marina
  misc_feature (1)..(341): tr|A0A1N6CM31|A0A1N6CM31_9SPHN S-adenosylmethionine:tRN A ribosyltransferase-isomerase OS=Sphingorhabdus marina DSM 22363 OX=1123272 GN=queA PE=3 SV=1
MRVDLFDFALPPENIALRPAVPRDSARLLLAQNGHITDHIVRDLADLLTPNDVLVFNDTRVIPAQLTGRRGNATIGATLHKRVDLRRWQAFVKNAKRLKPGDRIDFGADVFATAEQKNPDGSFTLRFLGDEPVEILLDRAGTMPLPPYIASKREIDERDAEDYQTMFAREDGAVAAPTAALHFTDELMASLAAAGIGTQTLTLHVGAGTFLPVKADETDDHQMHSEWGRIEADVADRLNDIRASGGRVIAVGTTSLRLLESAAGDDDIIRPFAGDTDIFITPGYRFKAIDGLMTNFHLPRSTLFMLVSALMGLERMQAIYAHAIAQDYRFYSYGDSSLLIP

SEQ ID NO: 72330 - protein, 343 aa, Sphingorhabdus sp.
  misc_feature (1)..(343): tr|A0A220W769|A0A220W769_9SPHN S-adenosylmethionine:tRN A ribosyltransferase-isomerase OS=Sphingorhabdus sp. SM R4y OX=2584094 GN=queA PE=3 SV=1
MRVDLFDFALPQELIALRPAVPRDSARMLQVEGDRISDHIVSDLPQLLGPNDILVFNDTKVIPAQLQGRRGEAKIGATLHKRVDLRRWQAFIRNAKRLRVGEVVDFGSDVTAEAEAKLDDGSFILHFLGNEPVELMLERAGTMPLPPYIASKRAIDARDADDYQTMFAREKGAVAAPTAALHFTDGLLAGLAAAGVGSETLTLHVGAGTFLPVKVDETDDHQMHSEWGRIDAATADRLNAAREAGGRVIAVGTTSLRLLESATGEDGIIRPFEGDTDIFITPGYRFRAIDGLMTNFHLPKSTLFMLVSALMGLETMQEVYAHAVAEGYRFYSYGDSSLLLPKR

SEQ ID NO: 72331 - protein, 346 aa, Sphingorhabdus sp.
  misc_feature (1)..(346): tr|A0A5C6U921|A0A5C6U921_9SPHN S-adenosylmethionine:tRN A ribosyltransferase-isomerase OS=Sphingorhabdus sp. D- 2Q-5-6 OX=2601267 GN=queA PE=3 SV=1
MRVDLFDFDLPPERIALRPAAPRDQARMLCVTPDSLSDHRVADLPQLLRAGDCLVFNDTRVIPARLEGVRLRDGNAAQIGATLHKRLALREWQAFVRNAKRVRDGERIDFGQGVTAIASAKADDGSMTLSFEGDEPVETLLARAGTMPLPPYIAGKRPTDARDAEDYQTMFADKDGAVAAPTAALHFTPDLMTALADAGIAHETLTLHVGAGTFLPVKADDTDDHAMHAEWGLIDQATAGRLNAVRARGGRVIAVGTTSLRLLESAANAAGMIEAFEGDTAIFITPGYAFRGIDGLMTNFHLPRSTLFMLVSALMGRETMQAAYGYAIDHDYRFYSYGDASLLLPG

SEQ ID NO: 72332 - protein, 342 aa, Sphingorhabdus wooponensis
  misc_feature (1)..(342): tr|A0A3R8RSA0|A0A3R8RSA0_9SPHN S-adenosylmethionine:tRN A ribosyltransferase-isomerase OS=Sphingorhabdus woopon ensis OX=940136 GN=queA PE=3 SV=1
MRVDLFDFELPPERIALRPVSPRDSARMLCVSGDAAMVDRSVRDLPQMLRKGDCLIFNDTRVIPAQLQGMRGDASIGATLHKRIDLRRWQAFIRNAKRLHPGDVIDFGQGVTAISEERHDDGSFTLFFEGEEPVEILLHRAGTMPLPPYIAGKRPTDERDAQDYQTMFAQKDGAVAAPTASLHFTPELMEAVHAAGIETATLTLHVGAGTFLPVKADDTTEHRMHSEWGSIDAATAQRLNSICEAGGRLIAVGTTSLRLVESAADENGVVHPFEGDTDIFITPGYRFKAIGGLMTNFHLPKSTLFMLVSALMGRETMQAAYAHAIAHEYRFYSYGDSSLLLP

SEQ ID NO: 72333 - protein, 341 aa, Sphingosinicella ginsenosidimutans
  misc_feature (1)..(341): tr|A0A5C6TQQ4|A0A5C6TQQ4_9SPHN S-adenosylmethionine:tRN A ribosyltransferase-isomerase OS=Sphingosinicella gins enosidimutans OX=1176539 GN=queA PE=3 SV=1
MRVDLFDFDLPPDRIALRPARPRDSARLLQVTPGGLADHLVTDLPRLLRRGDVLVFNDTRVIPAQLEGMRGSARIGATLHKREGVREWRAFIRNAKRLKPGDRIDFGAGVQAIASDRGDDGSFLLAFEGDEPVELMLTRAGRMPLPPYIAGKRAVDARDAEDYQTMFAREDGAVAAPTAALHFTPRLMAALAEAGIGHETLTLHVGAGTFLPVKAEDTDAHAMHAEWGRIDAATAARLNAARAAGGRIVAVGTTSLRLIESAAGDDGAIQPFQGDTAIFITPGYRFRGIDGLVTNFHLPKSTLFMLVSALMGLERMQAAYAHAIAAGYRFYSYGDASLLLP

SEQ ID NO: 72334 - protein, 341 aa, Sphingosinicella microcystinivorans
  misc_feature (1)..(341): tr|A0A495RP34|A0A495RP34_SPHMI S-adenosylmethionine:tRN A ribosyltransferase-isomerase OS=Sphingosinicella micr ocystinivorans OX=335406 GN=queA PE=3 SV=1
MRVDDFDFELPQDLIALRPASPRDAARMLVVRPGGLDDRVVRDLPGLLAPGDVLVFNDTRVIPAQLFGQKGDAKIGVTLHKREGPYEWRAFVRNAKRLKAGDRVDFGAGLEGVVTEKSADGSILWRFECEGALEAALHAAGTMPLPPYIAGKRPADARDAEDYQTMFAAREGAVAAPTAALHFSPDLIAALDARGVGRETLTLHVGAGTFLPVKVDDTRDHKMHAEWGEVSAGAAARLNAARAAGGRIIAVGTTSLRLLESAAREDGQIAAFSGDTDIFITPGYRFRAVQGLMTNFHLPRSTLFMLVSALVGLQTMRGAYAHAIENGYRFYSYGDSSLLLP

SEQ ID NO: 72335 - protein, 341 aa, Sphingosinicella sp.
  misc_feature (1)..(341): tr|A0A4P6FIH0|A0A4P6FIH0_9SPHN S-adenosylmethionine:tRN A ribosyltransferase-isomerase OS=Sphingosinicella sp. BN140058 OX=1892855 GN=queA PE=3 SV=1
MRVDLFDFELPPERIALRPAEPRDSARLLLVRPDGLADHSVADLPQLLRPGDVLVFNDTRVIPAQLEGRRGDARIGATLHKREGLRDWRAFVRNAKRVRDGDRIDFGAGVTALAGEKAEDGSILLSFDGEEPVELLLERAGRMPLPPYIAARREADARDVEDYQTMFAREKGAVAAPTAALHFTPALIDALGRRGIAHETLTLHVGAGTFLPVKADDTDDHRMHSEWGRIDAAAAERLNAARAEGGRIIAVGTTSLRLLESATGEDGIVRPFEGDTAIFITPGYRFRAIGGLLTNFHLPRSTLFMLVSALMGRETMQAAYAHAIKGGYRFYSYGDASLLLP

SEQ ID NO: 72336 - protein, 343 aa, Sphingosinicella sp.
  misc_feature (1)..(343): tr|A0A2U2IZS1|A0A2U2IZS1_9SPHN S-adenosylmethionine:tRN A ribosyltransferase-isomerase OS=Sphingosinicella sp. QZX222 OX=2068657 GN=queA PE=3 SV=1
MRVDLFDFELPPERIALRPASPRDSARMLVVRPDGLGDRVVTDLPGQLRAGDMLVFNDTRVIPAQLEGRRGEARIGATLHKREGPREWRAFIRNAKRVREGDRIDFGEGVSAIAGDRASDGSMALVFEGEEPVELLLERAGRMPLPPYIAGKREADERDASDYQTMFAKEKGAVAAPTAALHFTPALMESLGAAGILHETLTLHVGAGTFLPVKAEDTDSHVMHSEWGRIEAATAERLNAARAEGGRIIPVGTTSLRLLESAADETGRLHPFEGDTAIFITPGYRFRVTDGLITNFHLPRSTLFMLVSALMGRERMQAAYAHAIGTGYRFYSYGDASLLLPRG

SEQ ID NO: 72337 - protein, 347 aa, Spiribacter aquaticus
  misc_feature (1)..(347): tr|A0A557RK00|A0A557RK00_9GAMM S-adenosylmethionine:tRN A ribosyltransferase-isomerase OS=Spiribacter aquaticus OX=1935996 GN=queA PE=3 SV=1
MQVSDFNYELPTHLIASEPLPNRTDSRLLVLDPATGGITDRRFPAIRDYLQPGDLLVVNDTRVLPARLYGRKASGGQVEILLERLTGEGEALAQLRANKTPAIPSTLTLEGDLSVEVVAREGDFFRLRFAGDEPLPVLLERHGHMPLPPYIKRADRPDDRQRYQTVFAERPGAVAAPTAGLHFDEPLLEALRSDGIETATLTLHVGAGTFQPIRTDSLEDHRMHAEWLSVPASVCEAVARTRARGGRVVAVGTTVVRALESAAQTGELQPFEGETEIFIYPGFPFQVIDGLITNFHLPGSTLVMLVSALAGRESILAAYRHAVEAEYRFFSYGDAMLIMAGTAEVPS

SEQ ID NO: 72338 - protein, 347 aa, Spiribacter curvatus
  misc_feature (1)..(347): tr|U5T2Y5|U5T2Y5_9GAMM S-adenosylmethionine:tRNA ribosy ltransferase-isomerase OS=Spiribacter curvatus OX=13357 57 GN=queA PE=3 SV=1
MQVSDFNYELPEALIASEPLPNRTDSRLLVLDPDTGGVTDRQFPAIREYLRPGDLLVVNDTRVLPARLYGRKDTGGAIELLLERLTGGNEALAQIRASKTPPIPSRITLEGNLVVEVTGREGEFFRLRFPGDEPLPTLLERHGHMPLPPYIKREDTPADRERYQTVFADRPGAVAAPTAGLHFDASLLAALRDDGVETATLTLHVGAGTFQPIRTETLEDHRMHAEWLSVPASVCAAVARTRARGGRVIAVGTTVVRALESAAQTGALQPFEGETEIFIYPGFEFRVIDGLVTNFHLPGSTLVMLVSALAGRDAILNAYGHAVRERYRFFSYGDAMLILSAAGGERP

SEQ ID NO: 72339 - protein, 180 aa, Spiribacter salinus
  misc_feature (1)..(180): tr|A0A540VRH0|A0A540VRH0_9GAMM S-adenosylmethionine:tRN A ribosyltransferase-isomerase (Fragment) OS=Spiribacte r salinus OX=1335746 GN=FKY71_08940 PE=3 SV=1
MKVSDFHYDLPESLIASEPLPRRTDSRLLVLDPATGAITDDRFPGIRQWLQPGDLLVLNDTRVLPARLYGHKDTGGAIEILLERLTGGTEALAQIRASKTPRAGTQLKLEGGIEAEVTGRAGEFFRLRFSDQRPLPELLERHGHMPLPPYIRREDTAADRARYQTVFAAKPGAVAAPTAG

SEQ ID NO: 72340 - protein, 182 aa, Spiribacter salinus
  misc_feature (1)..(182): tr|A0A540VN72|A0A540VN72_9GAMM S-adenosylmethionine:tRN A ribosyltransferase-isomerase (Fragment) OS=Spiribacte r salinus OX=1335746 GN=queA PE=3 SV=1
YQTVFAAKPGAVAAPTAGLHFDEPLLDDLRSAGIETATLTLHVGAGTFQPVRSETVSGHQMHAEWLSVSESVCEAVAATRARGGRVIAVGTTVVRSLEAAAQAGQLAPYEGETEIFIYPGFEFQVVDGLITNFHLPGSTLVMLVSALAGREHILAAYRHAVAKEYRFFSYGDAMLILPQVST

SEQ ID NO: 72341 - protein, 347 aa, Spiribacter sp.
  misc_feature (1)..(347): tr|A0A2U2N4Y1|A0A2U2N4Y1_9GAMM S-adenosylmethionine:tRN A ribosyltransferase-isomerase OS=Spiribacter sp. E85 O X=2182432 GN=queA PE=3 SV=1
MRVSDFHYELPERLIAAEPPARRTDSRLLVLDGETGAVADRRFTDLRELLCPGDLLVLNDTRVLPARLLGHKDSGGAVEVLLERLLGGSEALAQLRVSKKPRAGSELVLEGGLAVTVVAREGDFFRLRFPDDAPLPVLLERHGHMPLPPYIRRPDTETDRERYQTVYARTPGAVAAPTAGLHFDRPLLEALRADGVRTESLTLHVGAGTFQPVRSETVEGHHMHAEWLSVPAAVCEAAADTRARGGRVIAVGTTVVRALETAARGGELAPFEGETDIFLYPGHRFRAIDGLITNFHLPESTLLMLVSAFGGRENVLAAYRHAVAAKYRFFSYGDAMFLCPPAPEARP

SEQ ID NO: 72342 - protein, 390 aa, Spirobacillus cienkowskii
  misc_feature (1)..(390): tr|A0A369KTZ5|A0A369KTZ5_9PROT S-adenosylmethionine:tRN A ribosyltransferase-isomerase OS=Spirobacillus cienkow skii OX=495820 GN=queA PE=3 SV=1
MKKELFNYDLPEELIAQTPLANRDESRLLVCNAKNKSIADCMFKNLDEVLNYEFQLQKNNAKLLLIANNSRVYPARVRIKRSSGGRGEVFFLERGEKTHYSCLLRPQSKLKIGEILYADLKEDIALFEISHLNPPKVSIIANMSLDKILDLYGEMPLPPYIQRDPKKIINYSKLDKERYQTVYSNINHVGSSASPTAGLHFSPSILKKCEENRIELSYVTLHVGLGTFLPVKSEDIESHEMHQEYYFISQETIKKISEYLSNGWPIVFVGTTSLRAVESYFQLLNLELGKNFILNNKNINQLENNLNKFSDKWHTTNIFIHPKNENSIFVPTIGNAIITNFHQPESTLAMLIAALMGMKFWKQFYSYAITNKYRFFSYGDSSLLIFGEQN

SEQ ID NO: 72343 - protein, 370 aa, Spirochaeta africana
  misc_feature (1)..(370): tr|H9UJB6|H9UJB6_SPIAZ S-adenosylmethionine:tRNA ribosy ltransferase-isomerase OS=Spirochaeta africana (strain ATCC 700263 / DSM 8902 / Z-7692) OX=889378 GN=queA PE=3 SV=1
MLTKDFSFELPEELIAQLPTEERGASRMMVLDAPESGAETAASTASGANRYHRMVADIVDLLPANTVMVVNNSRVRRARLEATTRNGGTVEVLLLRHIHETGKGGCDGAWEVMLSKAKRRRPGEILGLPGDRQLEIRERQDSDSWLVTIQPGIDDDYLQQYGRVPLPPYIRRMHQDIDLDRYQTVYAETTGSVAAPTAGLHFTPEILSRIREKGIQLCSITLHVGLGTFLPVRAERITDHAMHREEYTISKETARAVEQARAAGRPVLAVGTTSVRALESSWQDDNTLATGAQSTDIFIYPGYRFRAVDMLFTNFHTPESTLLMLVSAFAGKERILAAYQEAVQLRYRFFSYGDAMLINRWSRPLLQNQP

SEQ ID NO: 72344 - protein, 347 aa, Spirochaeta lutea
  misc_feature (1)..(347): tr|A0A098R1K6|A0A098R1K6_9SPIO S-adenosylmethionine:tRN A ribosyltransferase-isomerase OS=Spirochaeta lutea OX= 1480694 GN=queA PE=3 SV=1
MKTNNFSFNLPEHLIAQYPSDKRGTSRLLVANITPGSAPRMTHTRVEEISQHLPSGSLLIFNDSRVRKARIFGTNQKTGSRVEFLLVEETNDPTTWKAMANKSKKQREGTVYRFPQGVQGTIIGNDANLKLLQFSQPISDTYLDKNGHIPLPPYIDRTDEPLDETRYQTVYARADHTGSVAAPTAGLHFTPEILEALTAEGHTIAYVTLHVGLGTFLPVRTEDIEQHRMHTEHYSIPEKTAQLVNKAKEEGRPIIAVGTTSIRTLESAWDPRTQQLKSGMSKTGIFIYPGYSFQVINGIFTNFHTPESTLLMLVSAFAGLDAIKQIYATAVQLEYRFFSYGDAMLLL

SEQ ID NO: 72345 - protein, 340 aa, Spirochaeta perfilievii
  misc_feature (1)..(340): tr|A0A5C1QAV1|A0A5C1QAV1_9SPIO S-adenosylmethionine:tRN A ribosyltransferase-isomerase OS=Spirochaeta perfiliev ii OX=252967 GN=queA PE=3 SV=1
MKISDYSFDLPKEQIAQYPPEERGTANLMVIDRLDGSIEHKNMQNFTDYIDDNTVVVFNNSRVRKARLFATTDDSGGKVEFFMLSKTEKNQWEVMVSKAKKQVVGRSYTFEGGAKGRITRIISTNHRIVEFDTDINDDYLDQYAHIPLPPYIKRGDDNADSERYQTVFSKEIGSCAAPTASLHFTQDILDKIKEKGADIAFVTLHVGLGTFAPVRTEYLDDHDMHYEDFYISDESATIIENAKKAGKKILAVGTTSVRTLESSWVDGKLLRGTRSTNLFIKPGYEFKVVDRMFTNFHTPESTLLVLVSTFATKTLIDKAYKEAVDSDYMFFSYGDAMLIM

SEQ ID NO: 72346 - protein, 340 aa, Spirochaeta sp.
  misc_feature (1)..(340): tr|A0A1W9N7J2|A0A1W9N7J2_9SPIO S-adenosylmethionine:tRN A ribosyltransferase-isomerase OS=Spirochaeta sp. LUC14 _002_19_P3 OX=1940821 GN=queA PE=3 SV=1
MRTSLFSFDLPAHLIASHPPSERGSSRLMVLDRHTGAVCHDAVQSLPALLKPGTLMVFNDTRVRKARLFATNAANGAKGEFLFLQPSADGGWDCLVDRAKRKRTGQEWLFPSGICGVITGAPAPDRRTLRLVPMPDEGWFERNGHIPLPPYMRRKDEPEDSEHYQTVYAKNTGSAAAPTAGLHFTPALLEALKAAGMELAWLTLTVGLGTFAPMRAEDISTHTMHTEHYDIPEETARAVNAAKAEGRPVLAVGTTAVRALESAWKGARLIPGPGSANLFISPGYSFSVVDVLFTNFHTPRSTLLVLVSAFARREWILGAYGRAIEEGYRFFSYGDAMLIR

SEQ ID NO: 72347 - protein, 346 aa, Spirochaeta sp.
  misc_feature (1)..(346): tr|A0A3C0T2C4|A0A3C0T2C4_9SPIO S-adenosylmethionine:tRN A ribosyltransferase-isomerase OS=Spirochaeta sp. OX=28 185 GN=queA PE=3 SV=1
MKTSHFSFDLPDELIAQYPSNRRGESRLMSLNRKTESITHHSITELPELLPEGSLMVFNNSRVRKARIYGESSTGGKVEFLLIKPLTEEETDGRRWLAMVSKAKKQKPGKRYSFAVGMEGEILRIEGSHRVIEFSNPIDDSWLDKHGRMPLPPYIKREDEFSDADRYQTVYSENTGSIAAPTAGLHFTEETMSALAEHKIETAFISLHVGLGTFLPVRTDDIRDHKMHSEDYEISDSAAAAINRAVSEKRDIIAVGTTSVRTLESEAQRIGTPAVDPGRRSTDIFIYPGRSFKLVNHMLTNFHTPESSLLMLVSAFAGKENIDKAYKKAIENKYRFYSYGDAMLII

SEQ ID NO: 72348 - protein, 351 aa, Spirochaeta thermophila
  misc_feature (1)..(351): tr|E0RST7|E0RST7_SPITD S-adenosylmethionine:tRNA ribosy ltransferase-isomerase OS=Spirochaeta thermophila (stra in ATCC 49972 / DSM 6192 / RI 19.B1) OX=665571 GN=queA PE=3 SV=1
MTISTSSPEEKTATMKLKDFYFDLPEELIAQHPAQRREDARLMVVHRETGRIEHAHVRELPWILPPSCLVFNDTRVRKSRLLATRRDSGGKVEILLLEEVEPSLWKAVVSRARRQRPGVVYELPGGREAEIVGMEEGLRLVRISPPIDEVYLDRHGHVPLPPYIKRSDLPEDEERYQTVFARHPGSAAAPTAGLHFTPALMDELKSRHTVTFLTLHVGLGTFQPVRTENVEEHRMHKERFYIPEETARVIEGAKSQHIPVCAVGTTTTRALESAWEHGRLKRGWQETSLYIYPGYTFRVIDRLFTNFHTPGSSLVLLVSAFLGKDLLLEAYRKAIEHRYRFFSYGDAMLII

SEQ ID NO: 72349 - protein, 337 aa, Spirochaeta thermophila
  misc_feature (1)..(337): tr|G0GE78|G0GE78_SPITZ S-adenosylmethionine:tRNA ribosy ltransferase-isomerase OS=Spirochaeta thermophila (stra in ATCC 700085 / DSM 6578 / Z-1203) OX=869211 GN=queA P E=3 SV=1
MKLKDFYFDLPEDLIAQHPSQRREDARLMVVHRETGRIEHSYVRELPLILPPSCLVFNDTRVRKSRILATRRDSGGKVEILLLEEVEPSLWKALVSRTRRQRAGVVYDLPGGREAEIVGMEDGLRLVRISPPIDEAYLDRHGHVPLPPYIKRADLPEDEERYQTVFARHPGSAAAPTAGLHFTPALMDELKSRHTVTFLTLHVGLGTFQPVRTENVEEHRMHTERFHISEETARVIESAKSRHIPVCAVGTTSTRALESAWEHGRLKRGWQETSLYIYPGYTFKVIDHLFTNFHTPGSSLILLVSAFLGKDLLLEAYRKAIEHRYRFFSYGDAMLII

SEQ ID NO: 72350 - protein, 267 aa, Spirochaetaceae bacterium
  misc_feature (1)..(267): tr|A0A3D3SBR9|A0A3D3SBR9_9SPIO S-adenosylmethionine:tRN A ribosyltransferase-isomerase (Fragment) OS=Spirochaet aceae bacterium OX=1898206 GN=DIT55_09245 PE=3 SV=1
MKTDDFNFDLPETSIAQYPPERRGDSRLLVLDRAGSAAAQPDRIHQTHSMVKDLLRFLEPGTLMVFNDSKVRKARIYGTALETGAVVEFLLLEPLTRQTGPSAVSASWRAMTSKAKKQKIGKSYIFPDGLKGTIVGEEDDEKIIEFDEALGDQYLEANGHMPLPPYIKREDEVSDSERYQTVYAKVTGSAACPTAGLHFTQPLLDSLSSAGIDIEWVTLHVGLGTFLPVRVDEVERHRMHEEWYTVSEKTAAAVNAAKKEGRKVLAV

SEQ ID NO: 72351 - protein, 346 aa, Spirochaetaceae bacterium
  misc_feature (1)..(346): tr|A0A3C0WXU5|A0A3C0WXU5_9SPIO S-adenosylmethionine:tRN A ribosyltransferase-isomerase OS=Spirochaetaceae bacte rium OX=1898206 GN=queA PE=3 SV=1
METKDLYFDLPDELIAQYPADRRGNDRLLAVNRRTGKYEDMRFCDFPSLLEPGCLLVLNESKVRKARVFASTENGGKVELLFLSPESGGAWRVTSNRLKKRKAGETLVAGKVAFKLLRINDDGTFCLMPVSGTDSPEGIREDFFLENGHVPLPPYIKREDEFSDENRYQTVYAKNLGSVASPTAGLHYTKEILDNIRARGVEIAFVTLHVGMGTFLPIRSQTLEDHRMHSEDYEITPDNAALINSAIAAKTPIIASGTTSLRCLESACDASSGIVRSGLSSTSIFITPGYEFKVANRLLTNFHTPYSTLMALVAAFSSLDIVKSAYEHAVKEKYRFFSYGDATYWY

SEQ ID NO: 72352 - protein, 344 aa, Spirochaetae bacterium
  misc_feature (1)..(344): tr|A0A2N1T7J6|A0A2N1T7J6_9SPIR S-adenosylmethionine:tRN A ribosyltransferase-isomerase OS=Spirochaetae bacteriu m HGW-Spirochaetae-1 OX=2013832 GN=queA PE=3 SV=1
MNPHYTLEDFNFHLPEELIAQYPREKRDESRLFVMDRKSSDFRHSVFSDLPAELHEGDILVFNDARVIPGRIFCRRKTGGKIEVILTRRINDTEWLVICNRTKRMNPGELLQVDKDHAIELKVMDRVDDYLRVECNCSLDDDVLNEIGEIPLPPYIKREHEGDDAERYQTVYARESGAVAAPTAGLHFTNDLMDIIAKKGIEQHFLTLHVSWGTFQPVRENDLARHKMHNERYILPEKTAQSLARAKRENRRIIAVGTTSLRVLESCYDNGNYKAGYGETEIFIYPPYKIKSIDALITNFHTPYSTLLMLVSAFAGYDKIKQAYQEAVRERYNFFSYGDAMIIT

SEQ ID NO: 72353 - protein, 344 aa, Spirochaetae bacterium; identical to SEQ ID NO: 72186
  misc_feature (1)..(344): tr|A0A2N1QQP6|A0A2N1QQP6_9SPIR S-adenosylmethionine:tRN A ribosyltransferase-isomerase OS=Spirochaetae bacteriu m HGW-Spirochaetae-9 OX=2013841 GN=queA PE=3 SV=1

SEQ ID NO: 72354 - protein, 244 aa, Spirochaetales bacterium
  misc_feature (1)..(244): tr|A0A524M2C4|A0A524M2C4_9SPIR S-adenosylmethionine:tRN A ribosyltransferase-isomerase (Fragment) OS=Spirochaet ales bacterium OX=2026792 GN=queA PE=3 SV=1
RAKKLKVGTRILLPDGTPAEVVGHDEIHVHLTVEPSLSEEFFRTHGHVPLPPYIRREDAPEDEERYQTVYARTIGSIAAPTAGLHFTRDLLGQLESRGIQMEWVSLHVGLGTFLPVRCDDIENHEMHSEECEVSADTASRINTAIARGRPVIAVGTTSVRTLESAFDPTIGALREFRSATRLFSRPGYEFKVVSGIFTNFHTPESTLLMLVSAMGGQESVLAAYKEAVSRGYRFFSYGDAMLII

SEQ ID NO: 72355 - protein, 354 aa, Spirochaetales bacterium
  misc_feature (1)..(354): tr|A0A524IPS4|A0A524IPS4_9SPIR S-adenosylmethionine:tRN A ribosyltransferase-isomerase OS=Spirochaetales bacter ium OX=2026792 GN=queA PE=3 SV=1
MKTRTFSFNLPEELIAQSPAAERGASRLLVLDRASGTVRHDWFSSLPDLLSPETLIVFNDTSVVKARIYGRSADGLSAAREMEVLLVERVSALRWKILARGKRKSLSGKYVVFPEGLAGTIDAGEPEGTGGGAFSAGDEYLYIDFDKPLSEDYLERNGHVPLPPYIRRPDNEEDLKRYETVYASVKGSVAAPTAGLHFSEAMLGELTKRGIEYCFVTLHVGLGTFRPIRAENIEDHVMHEEEYFVSDETAAAVTAAHRAGRHVCAVGTTVVRTLESAWKGTLLQAGRGRTGLFITPGYSFGIVKQLVTNFHTPESSLLVLVSAFAGVDSIRQAYEEAVREKYRFFSYGDAMFIQ

SEQ ID NO: 72356 - protein, 338 aa, Spirochaetes bacterium
  misc_feature (1)..(338): tr|A0A496QWR7|A0A496QWR7_9SPIR S-adenosylmethionine:tRN A ribosyltransferase-isomerase OS=Spirochaetes bacteriu m OX=2202144 GN=queA PE=3 SV=1
MKTRDLFFNIPDHLIAQHPPKERCKSRLLVLNRGDGSLKHSTMESFPEFIRPGTVAVFNDTRVRKCRIYGYSSSGGNVEFLLLKEQRKNLWEALVRRIAKQKEGKEYNFPGGIKGKIEKRESSTVLVRFDSDIDDDYLERYGHIPLPPYIKREDTPEDELRYQTVYSKKTGSVAAPTAGLHFNEKIIEELKVRGIEILFVTLHVGLGTFTPIRTEEVENHRMHREEYEIDEQTANSINKARREGRKILAVGTTTLRAIESAYDEEMVRAKRDETDLYIYPGYRFKVVDQLLTNFHAPESSLLALVMAFSGKESIQRAYREAALKEYRFFSYGDAMLIL

SEQ ID NO: 72357 - protein, 370 aa, Spirochaetes bacterium
  misc_feature (1)..(370): tr|A0A1V5T6Z9|A0A1V5T6Z9_9SPIR S-adenosylmethionine:tRN A ribosyltransferase-isomerase OS=Spirochaetes bacteriu m ADurb.Bin269 OX=1852911 GN=queA PE=3 SV=1
MQTKDFYFDLPEDLIAQEPSAVRGRDRLLQLDRNTGAWADHEFADLVSLIDPGTLMVFNDSRVRKARIYATADSSGNRTEFLLISRIHDLPGAASVVPAGTQHGAQAIPSAPCVWKAMVRNAKRHKSGRTYTFADGTRAEIIADPQGLLDGTEFRYLQFDRLVDDAWLDAQGHLPLPPYIRRDDSAADQDRYQTVYARTVGSVAAPTAGLHFTPEILASLDERGIERRSVTLHVGLGTFLPVRSERLEDHTMHSESFSVSGETARAVTQAKREGRPVLAVGTTSIRTLESAWNREERVLEPGERDTSIFIYPGYEFGVVDQVFTNFHTPESTLLMLVSAFAGKERIFAAYRHAVESRYRFFSYGDSMYIR

SEQ ID NO: 72358 - protein, 341 aa, Spirochaetia bacterium
  misc_feature (1)..(341): tr|A0A352VFW2|A0A352VFW2_9SPIR S-adenosylmethionine:tRN A ribosyltransferase-isomerase OS=Spirochaetia bacteriu m OX=2053615 GN=queA PE=3 SV=1
MKTDNFDFELPDELIAQKPADIRSDARLLVYYRNTGEIVDSKVLNITDFIDDTYHLVFNNSKVIPCRMKIKKVDSNREGELLVLKIVDNTTIHSLTDSNKKYKIGQRIVLPDGTMAIFKANIDDISKVIVSDKPVFDVDYFNTYGSIPLPPYIKKIPDSYDNERYQTTFSKKYGSAAAPTAGLHFDEKIFTILNDKKIDVSFVSLHVGLGTFQPIYSDDIENHQIHEEEYEIDREQSDALNQAIFNKKKIIPIGTTSLRTIESAYTSDGIFPGVAKTKLYITPGYQLKVASGLFTNFHTPKSSLAVLVASIIGYDNFIRIYKHAIENKYRFFSYGDAMLIL

SEQ ID NO: 72359 - protein, 343 aa, Spirochaetia bacterium
  misc_feature (1)..(343): tr|A0A3D3AJH1|A0A3D3AJH1_9SPIR S-adenosylmethionine:tRN A ribosyltransferase-isomerase OS=Spirochaetia bacteriu m OX=2053615 GN=queA PE=3 SV=1
MKKEEFDFYLPEELIALKPAQKREDCRLLVIDKENKKYQDDIFKNILNYLNENDLLVFNNTKVDKARLFAEKKSGGKHEILLIEPLNPEKTLWKTIASKTKKLKPETILFFPHNIHAVVSESKGNGILYLQFNLSMEDDVLEKIGELPLPPYIRNKRNYSLEDEIDYQTVYACVPGSKAAPTAGLHFSDEILKELKKRKIQTADIQLFVSLGTFEPIRTETIHEHVMHEEEFFISKETADLLNAHLSSGKRIIAVGTTVVRTLESAFDGEKILHGKQKTTIFIKPGYQFKTVRGLITNFHTPLSTLLVLVSSFMGKKFTMDVYNHAVEKKYRFFSYGDSMLIL

SEQ ID NO: 72360 - protein, 346 aa, Unknown
  misc_feature (1)..(346): tr|A0A421KA18|A0A421KA18_9SPIR S-adenosylmethionine:tRN A ribosyltransferase-isomerase OS=spirochete symbiont o f Stewartia floridana OX=1968597 GN=queA PE=3 SV=1
MKTSLFSFDLPERLIAQTPLKERGCSRLMVLERNGSARLAAHRKVRDLPVLLKPGTLVVFNDTRVRKARLFATNQTTGGKGEFLFLRRIANGDWECMADKMKRKRYGQRWLFPDGAEGRIIGFSGDNTVILTLKPPPSEDWFERFGHMPLPPYIRRADAPIDCENYQTVYAREVGSVAAPTAGLHFTPEILKALEDREIQFAWVTLKVGSGTFLPVRCESIEDHLMHRESFHVPEETAQAVETAKREGRPILAVGTTTVRTLESAWNGTHLRAGHGVTDLFIYPGYEFGLVDELFTNFHTPKSSLIMMVSAFAGHERLLEAYRLAAEEEYRFYSYGDAMLITRGAA

SEQ ID NO: 72361 - protein, 404 aa, Spirosoma endophyticum
  misc_feature (1)..(404): tr|A0A1I1WHV6|A0A1I1WHV6_9BACT S-adenosylmethionine:tRN A ribosyltransferase-isomerase OS=Spirosoma endophyticu m OX=662367 GN=SAMN05216167_108282 PE=3 SV=1
MSETDDLLLSEFQYDLPDERIARFPLPRRDASKLLVYRNGRISHERFSSLADLLPEASFLVFNNTKVIPARLYFTKPTGAIIELFLLNPFPNNLPISQAMETTGSAIWQGMIGNRKRWKQDESLQTTFPTSTGDVTLTAAWQNYETSVVRLSWQPIELTFAQLIQLAGEIPLPPYLKRDATDTDRDTYQTVYSTQEGAVAAPTAGLHFTPAIFDTLAEHGLEHDYLTLHVGAGTFQPIKTDNVRQHHMHTEQVVYTQQNLLNLLGHLGHIIAVGTTSMRALESLYWMGVKLLRNEPDPFSLDQQYAYQLPTDQQPKVDEALTAVLRYLTSTNKESVVAHTGIYITPGYRVRMCTGIITNFHQPGSTLILLIATLIGDEWKHIYKEALQNDYRFLSYGDSSLLLP

SEQ ID NO: 72362 - protein, 347 aa, Spirosoma endophyticum
  misc_feature (1)..(347): tr|A0A1I1LMZ1|A0A1I1LMZ1_9BACT S-adenosylmethionine:tRN A ribosyltransferase-isomerase OS=Spirosoma endophyticu m OX=662367 GN=queA PE=3 SV=1
MKLSEFKFDLPESLIAKYPVERGESRLMVVDRKAKTIEHKQFSDMLSYFGDGDVMVINNTKVFPARLYGNKEKTGAKIEVFLLRELNREMKLWDVLVDPARKIRVGNKLYFGDSDLVAEVIDNTTSRGRTIRFLFDGNHEEFMKAVDELGETPIPREMNREAESADRDDYQTVFAQHVGAVAAPTAGLHFTRAMMKRMEIKGIHFAPVTLHVGLGTFRQVDVEDLTKHKSDSENYRIPEESAQIVNTALDAGKRVCAIGTTSLKAIESSVSANSRLKPVEGWTDKFIFPPYDFKIANSLLTNLHLPESILIMMTSAFGGHELIKEAYQIAIKEKYRFFSYGDAMLII

SEQ ID NO: 72363 - protein, 347 aa, Spirosoma fluviale
  misc_feature (1)..(347): tr|A0A286GT45|A0A286GT45_9BACT S-adenosylmethionine:tRN A ribosyltransferase-isomerase OS=Spirosoma fluviale OX =1597977 GN=queA PE=3 SV=1
MKLSEFKFDLPESLIAKYPVERGESRLMVVDRKAKTIEHKQFSDMLSYFGDGDVMVINNTKVFPARLYGNKEKTGAKIEVFLLRELNREMKLWDVLVDPARKIRVGNKLYFGDSDLVAEVIDNTTSRGRTIRFLFDGNHEEFMKAVDELGETPIPREMNREAEDADRDAYQTVFAQHVGAVAAPTAGLHFTRAMMKRMEIKGIDFAPVTLHVGLGTFRQVDVEDLTKHKTDSENYRIPEESAQIVNKALDAGKRVCAVGTTSLKAIESSVSANSRLKPVEGWTDRFIFPPYDFKIANSLLTSLHLPESILIMMTSAFGGHELIKEAYQVAIKEKYRFFSYGDAMLII

SEQ ID NO: 72364 - protein, 410 aa, Spirosoma fluviale
  misc_feature (1)..(410): tr|A0A286GNZ3|A0A286GNZ3_9BACT S-adenosylmethionine:tRN A ribosyltransferase-isomerase OS=Spirosoma fluviale OX =1597977 GN=SAMN06269250_5694 PE=3 SV=1
MMTNSNELLLSEFQYDLPDSRIARFPLPQRDASKLLLYKGGKVSHNRFTDLPDLLPPNSFLVFNDTKVIPARLHFAKPTGAVIELFLLSPFPTEPGGEPAPISLAMEATGTTIWQGMIGNRKRWKQDELLVTSFPTPEGEVILTASWYDYEQSAVRLSWQPAKLTFAQLVQYIGEIPLPPYLKREATATDRETYQTVYSKQEGAVAAPTAGLHFTPAVFEALTNKNISHDYLTLHVGAGTFQPIKTDDVRQHHMHTEQVVYTQANLTNLLNHLDTIIAVGTTSMRALESLYWMGTKLVRKESNPFQLDQHYAYQLPPDKQPIVADALKAVLDYLIAMNKESVVAHTGIYITPGYRIRLCKGLVTNFHQPGSTLILLIATLIGDNWKTVYKEALENEYRFLSYGDSSLLLP

SEQ ID NO: 72365 - protein, 347 aa, Spirosoma linguale
  misc_feature (1)..(347): tr|D2QKY7|D2QKY7_SPILD S-adenosylmethionine:tRNA ribosy ltransferase-isomerase OS=Spirosoma linguale (strain AT CC 33905 / DSM 74 / LMG 10896) OX=504472 GN=queA PE=3 S V=1
MKLSEFKFDLPESLIAKYPVERGESRLMVVDRKAKTIEHKQFSDMLSYFGDGDVMVINNTKVFPARLYGNKEKTGAKIEVFLLRELNREMKLWDVLVDPARKIRVGNKLYFGDSDLVAEVIDNTTSRGRTIRFLFDGNHEEFMKAVDELGETPIPREMNREAEDADRDAYQTVFAQHVGAVAAPTAGLHFTRAMMKRMEIKGINFAPVTLHVGLGTFRQVDVEDLTKHKTDSENYRIPEDSAQIVNKALDAGKRVCAVGTTSLKAIESSVSANSRLKPVEGWTDRFIFPPYDFKIANSLLTSLHLPESILIMMTSAFGGHELIKEAYQVAIKEKYRFFSYGDAMLII

SEQ ID NO: 72366 - protein, 409 aa, Spirosoma linguale
  misc_feature (1)..(409): tr|D2QK30|D2QK30_SPILD S-adenosylmethionine:tRNA ribosy ltransferase-isomerase OS=Spirosoma linguale (strain AT CC 33905 / DSM 74 / LMG 10896) OX=504472 GN=Slin_1101 P E=3 SV=1
MTNTNELLLSEFQYDLPDDRIARFPLPQRDASKLLLYKGGVVSHNRFTDLPSLLLPNSFLVFNDTKVIPARLHFTKPTGALIELFLLNPFPIEPGGEPAPISLAMEETGTAIWQGMIGNRKRWKQDEPLVTTFPTPEGEVILTASWHDYDQSAVRLSWQPAELTFAQLVQYIGEIPLPPYLKREATATDRETYQTVYSKQEGAVAAPTAGLHFTAAVFEALANNNINHDYLTLHVGAGTFQPIKTDDVRQHHMHTEQVVYTQANVRNLLAHLDTVVAVGTTSMRALESLYWIGTKLVRKEPNPFQLDQQYAYQLPDDQQPSVADALNAVLDYLVTANKESVVAHTGIYITPGYRIRLCKGLVTNFHQPGSTLILLIATLIGDSWKNVYKEALENDYRFLSYGDSSLLIP

SEQ ID NO: 72367 - protein, 347 aa, Spirosoma montaniterrae
  misc_feature (1)..(347): tr|A0A1P9WRU4|A0A1P9WRU4_9BACT S-adenosylmethionine:tRN A ribosyltransferase-isomerase OS=Spirosoma montaniterr ae OX=1178516 GN=queA PE=3 SV=1
MKLSEFKFDLPESLIAKYPVERGEGRLMVVHRKTKTIEHKKFSDILSYFDDGDVMVINNTKVFQARLYGNKEKTGAKIEVFLLRELNREMKLWDVLVDPARKIRVGNKLYFGDSDLVAEVIDNTTSRGRTIRFLFDGNHEEFMKAVDELGETPIPREIQRDVENADRDHYQTVFAQHVGAVAAPTAGLHFTKAMMKRMEIKGVHFAPITLHVGLGTFRQVDVEDLTKHKTDSENYRIGPEAADIVNTALDAGRRVCAVGTTSLKAIESSVSANSRLKPVEGWTDKFIFPPYEFKIANSLLTSLHLPESILIMMTSAFGGHELIKHAYEVAIKEKYRFFSYGDAMLIL

SEQ ID NO: 72368 - protein, 411 aa, Spirosoma montaniterrae
  misc_feature (1)..(411): tr|A0A1P9WXS2|A0A1P9WXS2_9BACT S-adenosylmethionine:tRN A ribosyltransferase-isomerase OS=Spirosoma montaniterr ae OX=1178516 GN=AWR27_13170 PE=3 SV=1
MTDTQILSLQQFQYDLPDDRIARFPLTRRDASKLLVYRAGEISHAHFYDLPDQLPSDSFLFFNNTKVIPARLHFTRATGAIIELFLLNPFPAEQPITQAMEATGSAIWQGMIGNRKRWKPDETLETVIPTPTGDVVLTVAWHDSEQSVVRLSWQPTNLTFAQLIQYAGEIPLPPYLKRDPIDADRDTYQTVYSEKEGAVAAPTAGLHFTEAVFDNLNRRGIGHDYLTLHVGAGTFQPIKTDDVRQHLMHTEQVVYSQQNVRNIVANLGRIIPIGTTSMRALESLYWMGVKLLRDEANPFLLDQEYAYWLPAEYQPTPEEAVQAVLQHLINTRQETIIAHTGIYITPGYAMKLCKGIITNFHQPGSTLILLISALIGNNWRAVYDEALRTNYRFLSYGDSSLLIPKSERAKE

SEQ ID NO: 72369 - protein, 347 aa, Spirosoma oryzae
  misc_feature (1)..(347): tr|A0A2T0SU92|A0A2T0SU92_9BACT S-adenosylmethionine:tRN A ribosyltransferase-isomerase OS=Spirosoma oryzae OX=1 469603 GN=queA PE=3 SV=1
MKLSEFKFDLPDSLIAKYPVERGESRLMVVDRKAKTIEHKQFSDILSYFDDGDVMVINDTKVFPARLYGNKEKTGAKIEVFLLRELNREMKLWDVLVDPARKIRVGNKLYFGDSDLVAEVIDNTTSRGRTIRFLFDGNHDEFMKAVDELGEMPIPREINRDVEEADRDYYQTVFAKHVGAVAAPTAGLHFTRAMMKRMEIKGIHFAPVTLHVGLGTFRQVDVEDLTKHKTDSENYRIGDEAAQIVNTGLDAGKRVCAIGTTALKAIESSVSANSRLKPVEGWTDRFIFPPYDFKIANSLLTNLHLPESILVMMTSAFGGHELIKEAYQQAIKEKYRFFTYGDAMLIL

SEQ ID NO: 72370 - protein, 408 aa, Spirosoma oryzae
  misc_feature (1)..(408): tr|A0A2T0S1R8|A0A2T0S1R8_9BACT S-adenosylmethionine:tRN A ribosyltransferase-isomerase OS=Spirosoma oryzae OX=1 469603 GN=queA PE=3 SV=1
MNELPEIRLDQIQYDLPDDRIARFPLPQRDASKLLVYKGGQIDHGAFTDLPRQLPPDSYLVFNNTRVIPARLYFTRATGALIELFLLNPIDPDTGAVPPISQAMEATGAVVWQAMIGNRKRWKPGETLETRIPMPSGEVTLRADWFDTAQSLIRLSWQPAELPFAQLIEQAGQVPLPPYLNREATTDDRETYQTVYSEKEGAVAAPTAGLHFTPAVFEELAQQGVAYDYLTLHVGAGTFQPIKTDDIRQHFMHTEQVVYTVTNLQNLLPRIGHIIPVGTTSMRALESLYWMGVKVMRQEPEPFTLDQHYAYQLSADQLPSPAQAVQAVLDYMTTRNLDTVTAHTSIYITPGYSLRLCNGIVTNFHQPGSTLILLIAALIGDDWKRVYREALDKGYRFLSYGDSSLLIP

SEQ ID NO: 72371 - protein, 347 aa, Spirosoma pollinicola
  misc_feature (1)..(347): tr|A0A2K8Z4K5|A0A2K8Z4K5_9BACT S-adenosylmethionine:tRN A ribosyltransferase-isomerase OS=Spirosoma pollinicola OX=2057025 GN=queA PE=3 SV=1
MKLSEFKFDLPESLIAKYPVERGESRLMVIDRKAKTIEHKQFSDMLSYFSDGDVMVINNTKVFPARLYGNKEKTGAKIEVFLLRELNREMKLWDVLVDPARKIRVGNKLYFGDSDLVAEVIDNTTSRGRTIRFLFDGNHEEFMKAVDELGETPIPREMNREAEEADRDAYQTVFAQHVGAVAAPTAGLHFTKAMMKRMEIKGIHFAPVTLHVGLGTFRQVDVEDLTKHKTDSENYRIPEESSKIVNTALDAGRRVCAVGTTSLKALESSVSANSRLKPVEGWTDKFIFPPYDFKIANSLLTSLHLPESILIMMTSAFGGHELIKEAYQVAIKEKYRFFSYGDAMLII

SEQ ID NO: 72372 - protein, 409 aa, Spirosoma pollinicola
  misc_feature (1)..(409): tr|A0A2K8Z719|A0A2K8Z719_9BACT S-adenosylmethionine:tRN A ribosyltransferase-isomerase OS=Spirosoma pollinicola OX=2057025 GN=CWM47_29820 PE=3 SV=1
MTEMNELLLSQFQYELPDDRIARFPLAQRDASKLLVYQHGQISHLQFSDLPGLLPQNSFLVFNNTKVIPARLYFTKTTGAIIELFLLNPYPDKESGELPPITSAMEATGSAIWQGMIGNRKRWKLGETLITTFPTPSGDVTLMASWHDYEQSAVRLSWQPAELTFAQLIQYAGEIPLPPYLKRDVTDSDRDTYQTVYSKAEGAVAAPTAGLHFTPAIFDGLTERHIEFDYLTLHVGAGTFQPIKAQDVRQHLMHTEQVVYTRENLHHLLSHSDAIIAVGTTSMRALESLYWIGTKLLRNEADPFQLDQHYAYQLPTDQQPSIADSLRAVLDYLIMADKDSVVAHTGIYITPGYRIRMCKGIVTNFHQPGSTLILLIATLIGDNWKRIYKEALDKDYRFLSYGDSSLLLP

SEQ ID NO: 72373 - protein, 347 aa, Spirosoma radiotolerans
  misc_feature (1)..(347): tr|A0A0E3V6P9|A0A0E3V6P9_9BACT S-adenosylmethionine:tRN A ribosyltransferase-isomerase OS=Spirosoma radiotolera ns OX=1379870 GN=queA PE=3 SV=1
MKLSEFKFDLPESLIAKYPVERGESRLMVVDRKAKTIEHKQFSDMLGYFSDGDVMVINNTKVFPARLYGNKEKTGAKIEVFLLRELNREMKLWDVLVDPARKIRVGNKLYFGDSDLVAEVIDNTTSRGRTIRFLFDGNHEEFMKAVDELGETPIPREMNREAEEADRDAYQTVFAQHVGAVAAPTAGLHFTRAMMKRMEIKGIHFAPVTLHVGLGTFRQVDVEDLTKHKTDSENYRIPEDSAKVVNTALDAGKRVCAVGTTSLKAIESSVSANSRLKPVEGWTDKFIFPPYDFKIANSLLTSLHLPESILIMMTSAFGGHELIKEAYQVAIKEKYRFFSYGDAMLII

SEQ ID NO: 72374 - protein, 404 aa, Spirosoma radiotolerans
  misc_feature (1)..(404): tr|A0A0E3V869|A0A0E3V869_9BACT S-adenosylmethionine:tRN A ribosyltransferase-isomerase OS=Spirosoma radiotolera ns OX=1379870 GN=SD10_17880 PE=3 SV=1
MTEMNELSLSQFQYDLPDDRIARFPLAQRDASKLLVYQGGQISHQQFSDLPALLPENSFLVFNNTKVIPARLHFTKPTGAIIELFLLSPFPTEQPISLAMEATGSAVWQGMIGNRKRWRPNETLETTFSTPAGDVTLTVTWYNYEQSAVQLSWQPAEFTFAQIVQYAGEIPLPPYLKRDATDADRDTYQTIYSKQEGAVAAPTAGLHFTPAIFEAISKRAIGYDYLTLHVGAGTFQPIKTDDVRQHHMHTEQVVYTEQIIRHLLEHRDAIIAVGTTSMRALESLYWMGTKLLRNEPDPFRLDQQYAYQLPADQQPSVADSLNAVLTYFRDTDKASIVAQTGIYITPGYPVKLCRGIITNFHQPGSTLILLIATLIGDNWKRVYNDALENQYRFLSYGDSSLLLP

SEQ ID NO: 72375 - protein, 404 aa, Spirosoma sp.
  misc_feature (1)..(404): tr|A0A327NGC4|A0A327NGC4_9BACT S-adenosylmethionine:tRN A ribosyltransferase-isomerase OS=Spirosoma sp. HMF3257 OX=2183553 GN=queA PE=3 SV=1
MSETKELLLSQFQYDLPDERIARFPLPQRDASKLLVYKNGEIHHEQFMQLPDLLPANSFLVFNNTKVIPARLHFTKPTGAVIELFLLNPFPNSQPISLAMEATGSVVWQGMIGNRKRWKPDETLKTTLTTPDGEVILMVSWFDYEQSTVQLSWQPETLTFAQLIQYAGEIPLPPYLKREATDIDRETYQTVYSKQEGAVAAPTAGLHFTPSVFQALAHRGIDHDYLTLHVGAGTFQPIKTEDVRQHHMHTEEVVYTQENLRNLLDHMDNLIAVGTTSMRALESLYWMGVKLINNEPKPFQLDQHYAYQLAIHQQPKPEESLQAVLDYIIEAKQESIVAYTGIYITPGYQFKLCKGIVTNFHQPGSTLILLIAALIGENWKHIYKEALENDYRFLSYGDSSLLLP

SEQ ID NO: 72376 - protein, 414 aa, Spirosoma sp.
  misc_feature (1)..(414): tr|A0A514ZZ74|A0A514ZZ74_9BACT S-adenosylmethionine:tRN A ribosyltransferase-isomerase OS=Spirosoma sp. KCTC 42 546 OX=2520506 GN=queA PE=3 SV=1
MTKKNELLLSQFQYDLPDERIARFPLPERDASKLLVYKNGQIRHEHFTQLPELLPANSFLVFNNTKVIPARLHFTKPTGAVIELFLLNPVSTSPDLDKSDIESQPISLAMEATGASVWQGMIGNRKRWKPDETLKTTLFTPVGEVILTVSWFDYDQSLVQLSWEPATLSFAQLIQFAGQIPLPPYLKREATDIDRETYQTVYSKREGAVAAPTAGLHFTPAVFEALAQRGLDHDYLTLHVGAGTFQPIKTEDVRQHHMHTEQVVYTQENVRNLLAHIDSIIAVGTTSMRALESLYWIGAKLLHKESNPFRLDQHFAYQLLPPQHPGIEESLNAVLDYLISTNQESIVAHTGIYITPGYQFKLCKGIVTNFHQPGSTLILLIAALIGDDWKRIYKEALENEYRFLSYGDSSLLLP

SEQ ID NO: 72377 - protein, 353 aa, Spongiibacter sp.
  misc_feature (1)..(353): tr|A0A2E9SL86|A0A2E9SL86_9GAMM S-adenosylmethionine:tRN A ribosyltransferase-isomerase OS=Spongiibacter sp. OX= 2024860 GN=queA PE=3 SV=1
  misc_feature (199)..(199): Xaa can be any naturally occurring amino acid
  misc_feature (279)..(279): Xaa can be any naturally occurring amino acid
MQRRDFHFDLPDELIARYPAQQRDGSRLLVLEGDGAVHHRHFPDLLSYLRKGDLLVFNNTRVIPARLFGAKESGGRVEILIERMVDERHALAHVRASKSPKAGSRLFLASDAEAEVSDAGVMVQGRQGALFELEFDASLLSRLEEFGHMPLPPYIDREDEASDQERYQTVYASRDGAVAAPTAGLHFTEAFLAACREKXVEQAFVTLHVGAGTFQPVRADDIRDHEMHAEYIEVSEQVAEQVRATRARGGRVIAVGTTSVRSLESASQGGEIAAFSGDXRIFIYPGYQFKSVDALFTNFHLPESTLIMLVSALAGRDAVMAAYREAVAERYRFFSYGDAMLVFPSQQERDSDD

SEQ ID NO: 72378 - protein, 353 aa, Spongiibacter sp.
  misc_feature (1)..(353): tr|A0A2E2KBT5|A0A2E2KBT5_9GAMM S-adenosylmethionine:tRN A ribosyltransferase-isomerase OS=Spongiibacter sp. OX= 2024860 GN=queA PE=3 SV=1
MQRRDFHFDLPDELIARYPAQQRDGSRLLVLEGDGAVHHRHFPDLLSYLRKGDLLVFNNTRVIPARLFGAKESGGRVEILIERMVDERHALAHVRASKSPKAGSRLFLASDAEAEVSDAGVMVQGRQGALFELEFDASLLSRLEEFGHMPLPPYIDREDEASDQERYQTVYASRDGAVAAPTAGLHFTEAFLAACREKGVERAFVTLHVGAGTFQPVRADDIRDHEMHAEYIEVTEQVAEQVRATRARGGRVITVGTTSVRSLESASQGGEIAAFSGDSRIFIYPGYQFKSVDALFTNFHLPESTLIMLVSALAGRDAVMAAYREAVAERYRFFSYGDAMLVFPSQQERDSDD

SEQ ID NO: 72379 - protein, 352 aa, Spongiibacteraceae bacterium
  misc_feature (1)..(352): tr|A0A2E2JZZ7|A0A2E2JZZ7_9GAMM S-adenosylmethionine:tRN A ribosyltransferase-isomerase OS=Spongiibacteraceae ba cterium OX=2026793 GN=queA PE=3 SV=1
MKTRDFHYELPDELIARYPAAQRDQSRLLVLTGDGSVQHRQFPDILDFLDPGDLLVFNNTRVIPGRLYGNKESGGKLEFLIERVTAEFTALSHVRASKSPKSGARLSVTREHGAAEHSRCTVLGRRGELFELEFDQPVLTVLQAIGHMPLPPYIDRADESLDEERYQTVYAQKPGAVAAPTAGLHFTDDILARAQAKAVETAFVTLHVGAGTFQPVRVENIQDHHMHAEYLEVDQAVCDAVNATRARGGRVVAVGTTSVRSLETASQSGAIEPYTGESDIFIYPGYRFHSVDLLLTNFHLPESTLIMLVSALAGRERLLAAYAEAVEQRYRFFSYGDAMLVFPGDSAIGSGE

SEQ ID NO: 72380 - protein, 349 aa, Spongiibacteraceae bacterium
  misc_feature (1)..(349): tr|A0A2E7IJV1|A0A2E7IJV1_9GAMM S-adenosylmethionine:tRN A ribosyltransferase-isomerase OS=Spongiibacteraceae ba cterium OX=2026793 GN=queA PE=3 SV=1
MKTSDFHFDLPEELIARYPAEQRDQSRLLVLNGQSGALEHKGFKDLVSFVESGDLLVFNNTRVIPGRLYGRKESGGKLELLIERVTGERTALAHIRASKSPKAGSRLHLLRAPGDEPRASCTMRVRQGELFELDFEEPLLPLLAAIGHMPLPPYIDRADEALDEERYQTVYADKPGAVAAPTAGLHFTPEILQKLADKGVNTAYVTLHVGAGTFQPVRVADIREHHMHSEYLEVEESVCDAIKQTRERGGRVIAVGTTSVRSLETASRSGQIEPYAGESDIFIYPGYRFRSVDILLTNFHLPESTLIMLVSAFAGRDNVLKAYAQAIAERYRFFSYGDAMLVFPHNQES

SEQ ID NO: 72381 - protein, 341 aa, Sporanaerobacter acetigenes
  misc_feature (1)..(341): tr|A0A1M5XTY0|A0A1M5XTY0_9FIRM S-adenosylmethionine:tRN A ribosyltransferase-isomerase OS=Sporanaerobacter acet igenes DSM 13106 OX=1123281 GN=queA PE=3 SV=1
MRKEDFYYDLPEELIAQHPILNREDSRLMVLDKATGSVEHRYFRDIIDYLNEGDCLVLNDTRVIPARLFGSRKGKDESIEFLLLKKIDKNRWETLVKPGKKARPGAKVIFGDGELEGNVLSTGEDGTRIVEFEYEGIFEEILDKLGEMPLPPYIKEKLEDKERYQTVYSKKEGSAAAPTAGLHFTKELLQKIENKGIKIVYLTLHVGLGTFRPVKEENIEDHHMHSEYFELSKEAAEIINNTKKSGGRVIAVGTTSTRTLESIWAQENLVVPKSGWTDIFIYPGYKFKVVDCLITNFHLPESTLIMLVSALAGREKILNSYDIAVKEKYRFFSFGDAMFIK

SEQ ID NO: 72382 - protein, 341 aa, Sporanaerobacter sp.
  misc_feature (1)..(341): tr|A0A410QBP2|A0A410QBP2_9FIRM S-adenosylmethionine:tRN A ribosyltransferase-isomerase OS=Sporanaerobacter sp. JN28 OX=2507161 GN=queA PE=3 SV=1
MKRKDFDYYLPEELIAQTPLEDREESRLMVLDRKSGSIEHRHFKDIVDYLNEGDSLVLNDTRVIPARLFGNREGKEEIIEILLLRRVKGNVWETLVRPGKKVKPDVKLVFGGGMLKGNVISIGEEGIRLIEFEYEGIFEEILNSLGEMPLPPYIKKKLKDKERYQTVYSKNLGSAAAPTAGLHFTKELLKRIRDKGVNTVFITLHVGLGTFRPVKEDEIEEHHMHSEYFQVSEDAARIINKTKDEGKRIISVGTTSTRTLESIGDSSGRVSPASGWTDIFIYPGYKFKVIDGLITNFHLPESTLIMLVSAFYSREKILEAYKTAVDEKYRFFSFGDAMFIK

SEQ ID NO: 72383 - protein, 341 aa, Sporanaerobacter sp.; identical to SEQ ID NO: 72382
  misc_feature (1)..(341): tr|A0A1G4FP37|A0A1G4FP37_9FIRM S-adenosylmethionine:tRN A ribosyltransferase-isomerase OS=Sporanaerobacter sp. PP17-6a OX=1891289 GN=queA PE=3 SV=1

SEQ ID NO: 72384 - protein, 340 aa, Sporobacter termitidis
  misc_feature (1)..(340): tr|A0A1M5TF09|A0A1M5TF09_9FIRM S-adenosylmethionine:tRN A ribosyltransferase-isomerase OS=Sporobacter termitidi s DSM 10068 OX=1123282 GN=queA PE=3 SV=1
MKTSDFHYELPPELIAQTPLQRRDASRLMQLNKITGAIAHRHFYELPTLLREGDCLVLNDSRVLPARLFGRRLTGGAVEVVLLRDRGDGVWECLTRPGRKTKTGTQLFFGDDTLSAVVEDEIEGGNRLIRFHYDGIFLEALERLGKMPLPPYIHEELGDAERYQTVYSRVTGSAAAPTAGLHFTKALLREIENSGVIVKYVTLHVGLGTFRPVKAENIEDHEMHAEYCEIPEETAAAVSSAKTEGRRVVSVGTTSCRTLESRALEDGAVKSFSGFTNAFIYPGYRFKCVDALITNFHLPESTLLMLVSALAGRENILHAYEEAVRERYRFFSFGDAMLIE

SEQ ID NO: 72385 - protein, 348 aa, Sporocytophaga myxococcoides
  misc_feature (1)..(348): tr|A0A098L8Q8|A0A098L8Q8_9BACT S-adenosylmethionine:tRN A ribosyltransferase-isomerase OS=Sporocytophaga myxoco ccoides OX=153721 GN=queA PE=3 SV=1
MKLSEFKFTLPSELLALYPAENRDESRLMVVNRADGTIEHRIFKDIVDYFGEGDVMVINNTKVFPARLYGNKEKTGAKIEVFLLRELNQEAHLWDVLVDPARKIRVGNKLYFGDGDLVAEVIDNTTSRGRTIRFLFDGTDEEFYKTIDSLGETPLPKYIKRKAEPADRDRYQTIYAEHTGAVAAPTAGLHFTKQVMKRLEIEGVNFAPITLHVGLGTFRPVDVEDLTKHKMDSENFVVSDETAKLVNTALDNKKRVCAIGTTSVRSLESSTSANNRLKPNQGWTDKFIFPPYDFKIANALLTNFHMPESTLLMLTCAFGGYDLVMKAYKTAIKERYRFFSYGDAMLIL

SEQ ID NO: 72386 - protein, 348 aa, Sporolactobacillus inulinus
  misc_feature (1)..(348): tr|A0A0U1QRH0|A0A0U1QRH0_9BACL S-adenosylmethionine:tRN A ribosyltransferase-isomerase OS=Sporolactobacillus in ulinus CASD OX=1069536 GN=queA PE=3 SV=1
MDLSDFDYDLPEELIAQTPLKDRAASRLMVLNPNKDMINHHHTFSEIIDYLNPGDCLVLNDTKVLPARLIGHKEETGAKIELLLLKQKEGDCWECLAKPAKRVHKGARISFGDGKLVGECAEELDEGRRMITFHYQGIFYEVLDELGKMPLPPYIKEQLDDPDMYQTVYAKHRGSAAAPTAGLHFTKELLVDIEKKGVHLVFITLHVGLGTFRPVKVDKIEEHTMHAEFYQMTAAAADTLTQARMQGKRIIACGTTVIRTLETIAAKHDGKLQESSGWTDIFIYPGFRYRAIDGMITNFHLPKSTLIMLVSAFAGRDFTLKAYREAVKERYRFFSFGDAMFIEEGINH

SEQ ID NO: 72387 - protein, 348 aa, Sporolactobacillus inulinus; identical to SEQ ID NO: 72386
  misc_feature (1)..(348): tr|A0A4Y1ZH96|A0A4Y1ZH96_9BACL S-adenosylmethionine:tRN A ribosyltransferase-isomerase OS=Sporolactobacillus in ulinus OX=2078 GN=queA PE=3 SV=1

SEQ ID NO: 72388 - protein, 348 aa, Sporolactobacillus laevolacticus
  misc_feature (1)..(348): tr|V6J9H4|V6J9H4_9BACL S-adenosylmethionine:tRNA ribosy ltransferase-isomerase OS=Sporolactobacillus laevolacti cus DSM 442 OX=1395513 GN=queA PE=3 SV=1
MDVTDFDYELPEELIAQTPLKDRAASRLMVLNPNKERIAHHTFSEIIDYLNSGDCLVLNDTKVLPARLIGHKEETGAKIELLLLKQKEGDSWECLAKPAKRVHEGARISFGDGMLEAVCTQELDEGRRMVTFNYKGIFYEVLDALGKMPLPPYIKEQLDDPDLYQTVYAKHRGSAAAPTAGLHFTKELLAEIENKGVHIVFITLHVGLGTFRPVKVDKIEEHTMHSEFYQMSAQAADQLTQARKNGKRIIACGTTVIRTLETITAKFDGAFEETSGWTDIFIYPGFRYRAIDGMITNFHLPKSTLIMLVSAFAGHDFILNAYREAVKQRYRFFSFGDAMFIEEGINHS

SEQ ID NO: 72389 - protein, 347 aa, Sporolactobacillus nakayamae
  misc_feature (1)..(347): tr|A0A1I2NSC9|A0A1I2NSC9_9BACL S-adenosylmethionine:tRN A ribosyltransferase-isomerase OS=Sporolactobacillus na kayamae OX=269670 GN=queA PE=3 SV=1
MDVSDFDYELPEELIAQTPLKDRAASRLMVLNPNKDRIVHHTFSEIIDYLNPGDCLVLNDTKVLPARLIGHKEETGAKIELLLLKQTEGDSWECLAKPAKRVHQGARISFGDGMLEAECIKELDEGRRIVTFHYQGIFYEVLDALGKMPLPPYIKEQLDDPDLYQTVYAKHRGSAAAPTAGLHFTKALLAEIEKKGVHLVFITLHVGLGTFRPVKVDKIEEHTMHSEFYQMSAQAAEQLTKTRAEGKRIIACGTTVIRTLETITAKFNGTFEETSGWTDIFIYPGFRYRAIDAMITNFHLPKSTLIMLVSAFAGQDFILKAYREAVKERYRFFSFGDAMFIEEGINH

SEQ ID NO: 72390 - protein, 348 aa, Sporolactobacillus shoreae
  misc_feature (1)..(348): tr|A0A4Z0GQF5|A0A4Z0GQF5_9BACL S-adenosylmethionine:tRN A ribosyltransferase-isomerase OS=Sporolactobacillus sh oreae OX=1465501 GN=queA PE=3 SV=1
MDVSDFDYDLPEELIAQTPLKDRAASRLMVLNPNSDRIAHHHFSEIIDYLNPGDCLVLNDTKVLPARLIGHKEETGAKIELLLLKQTEGDSWECLAKPAKRVHEGEHIQFGDGRLEAVCTQELDEGRRIVTFHYEGIFYEVLEELGKMPLPPYIKEQLDDPDLYQTVYAKHRGSAAAPTAGLHFTKELLAKIEEKGIHLVFITLHVGLGTFRPVKVDKIEEHTMHSEFYQMSAQAADTLTNARAEGHRIIACGTTVIRTLETITAKYDGKYQEASGWTDIFIYPGFQYRAIDGMITNFHLPKSTLIMLVSAFAGRDFILKAYREAVKEKYRFFSFGDAMFIEEGNKNK

SEQ ID NO: 72391 - protein, 348 aa, Sporolactobacillus sp.
  misc_feature (1)..(348): tr|A0A4Q4INC9|A0A4Q4INC9_9BACL S-adenosylmethionine:tRN A ribosyltransferase-isomerase OS=Sporolactobacillus sp . THM19-2 OX=2511171 GN=queA PE=3 SV=1
MDVSDFDYELPKELIAQTPLKDRAASRLMVINPNTGRIAHHHFSDIINYLNPGDCLVLNDTKVLPARLIGHKEETGAKIELLLLKQTEGDTWECLAKPAKRLHQGAHVQFGDGRLEAVCAQELDEGRRLVTFHYEGIFYEVLEALGKMPLPPYIKKQLDDPNMYQTVYAKHRGSAAAPTAGLHFTEELLKAIEKKGVHIVFITLHVGLGTFRPVKVEKIEDHNMHSEFYQMSAQSAEILTKARAEGHRIIACGTTVIRTLETITAKYDGKYQEASGWTDIFIYPGFRYRAIDAMITNFHLPKSTLIMLVAAFAGRDFILKAYQEAVKEKYRFFSFGDAMFIEEGIHNE

SEQ ID NO: 72392 - protein, 349 aa, Sporolactobacillus sp.
  misc_feature (1)..(349): tr|A0A4Q4JIK8|A0A4Q4JIK8_9BACL S-adenosylmethionine:tRN A ribosyltransferase-isomerase OS=Sporolactobacillus sp . THM7-7 OX=2511172 GN=queA PE=3 SV=1
MDITEFDYDLPEELIAQTPLKDRAASRLMVINPNKETFDHHHHFGDIIDYLNPGDCLVLNDTKVLPARLIGHKKETGAKIELLLLKQTEGDSWECLAKPAKRVHAGIHIQFGDGRLEAVCDKELDEGRRIVTFRYNGLFYEILEALGEMPLPPYIKKQLDDPDLYQTVYAKHRGSAAAPTAGLHFTKGLLSRIEKKGIHLVFITLHVGLGTFRPVKVDKIEEHKMHAEFYQMTKDAADTLNKARQEGKRVIACGTTVIRTLETIAAKHDGSFREASGWTDIYIYPGYRYRAVDAMITNFHLPKSTLIMLVSAFAGKDFILKAYREAVKEKYRFFSFGDAMFIEEGIKNR

SEQ ID NO: 72393 - protein, 348 aa, Sporolactobacillus terrae
  misc_feature (1)..(348): tr|A0A410D9Z0|A0A410D9Z0_9BACL S-adenosylmethionine:tRN A ribosyltransferase-isomerase OS=Sporolactobacillus te rrae OX=269673 GN=queA PE=3 SV=1
MDLSDFDYDLPEELIAQTPLKDRAASRLMVLNPNKDMINHHHTFSEIIDYLNPGDCLVLNDTKVLPARLIGHKEETGAKIELLLLKQKEDDCWECLAKPAKRVHKGARVSFGDGKLIGECVEELDEGRRMITFHYQGIFYEVLDELGKMPLPPYIKEQLDDPDMYQTVYAKHRGSAAAPTAGLHFTKELLADIEKKGVHVVFITLHVGLGTFRPVKVDKIEEHTMHAEFYQMTAAAADTLTQARMQGKRIIACGTTVIRTLETIAAKYDGQLRESSGWTDIFIYPGFRYRAIDGMITNFHLPKSTLIMLVSAFAGRDFTLKAYREAVKERYRFFSFGDAMFIEEGINH

SEQ ID NO: 72394 - protein, 339 aa, Sporolituus thermophilus
  misc_feature (1)..(339): tr|A0A1G7IEX4|A0A1G7IEX4_9FIRM S-adenosylmethionine:tRN A ribosyltransferase-isomerase OS=Sporolituus thermophi lus DSM 23256 OX=1123285 GN=queA PE=3 SV=1
MLVTEFDYYLPEELIAQQPCEPRDHSRLLVLDRRTGNIEHRRFYNLPDYLQPGDTLVFNDTKVIPARLIGAKAGTGGKVEVFLLNRLTGDEWETLVKPGKRARPGTQVVFGDELSCEILASTDYGGRIVRFNYSGVFEEILDRLGETPLPPYIKARLADKDRYQTVYAKERGSAAAPTAGLHFTPALLDRIRAKGINLAFITLHVGLGTFRPVTVTDITQHTMHREYYSVSPETAGLINRTKQAGGRIIAVGTTAVRTLETVGAGGSVESGSGWTDIFIYPGYRFKVVDALVTNFHLPQSTLLMLVSALAGRENIMNAYHTAVREKYRFFSFGDAMLIL

SEQ ID NO: 72395 - protein, 339 aa, Sporomusa acidovorans
  misc_feature (1)..(339): tr|A0A259URW6|A0A259URW6_9FIRM S-adenosylmethionine:tRN A ribosyltransferase-isomerase OS=Sporomusa acidovorans DSM 3132 OX=1123286 GN=queA PE=3 SV=1
MLVSDFDYYLPEELIAQQPVEPRDHSRLLVLDRQNGHIEHSKFYNLPQYLQPGDTLVFNDTRVIPARLLGFKPETGGKVEVFLLNRTMKDEWEVLVKPGKKARPGTIIEFSDALRCEVLRDTDFGGRVVRFSYQGVFEEILDILGETPLPPYIKAKLADKERYQTVYARERGSAAAPTAGLHFTRELMNTIKQMGINLTFVTLHVGLGTFRPVSVENISEHVMHREHYSVPEETAAIVNQTLAAGNRVIAVGTTAVRTLETAGASGRLEAKSGWTEIFIYPGYDFKIVKALITNFHLPKSTLLMLVSALASRKHIFNAYQEAVNKRYRFFSFGDAMFIR

SEQ ID NO: 72396 - protein, 339 aa, Sporomusa malonica
  misc_feature (1)..(339): tr|A0A1W2AHG3|A0A1W2AHG3_9FIRM S-adenosylmethionine:tRN A ribosyltransferase-isomerase OS=Sporomusa malonica OX =112901 GN=queA PE=3 SV=1
MLVSDFDYYLPEELIAQQPIEPRDQSRLLMLDRKTGVIEHKQFYNLPQFLQPGDTLVFNDTRVIPARLFGVKPETGGKLEVFLLNRTTKDEWEVLVKPGKRARIGTVIEFGETLRCEVIDTTDFGGRRVRFNYQGIFEEILDTLGETPLPPYIKAQLSDKERYQTVYARERGSAAAPTAGLHFTRELMENIESMGVNLAFVTLHVGLGTFRPVATETITEHIMHREYYSVPEETAAIVNATIAAGKRVIAVGTTAVRTLETAGTSGQLEAKSGWTEIFIYPGYEFKIVKALITNFHLPKSSLLMLVSALSSREHIFNAYREAVDKRYRFFSFGDAMFIS

SEQ ID NO: 72397 - protein, 339 aa, Sporomusa silvacetica
  misc_feature (1)..(339): tr|A0A259UV00|A0A259UV00_9FIRM S-adenosylmethionine:tRN A ribosyltransferase-isomerase OS=Sporomusa silvacetica DSM 10669 OX=1123289 GN=queA PE=3 SV=1
MLVSDFDYYLPEELIAQQPVEPRDQSRLLVLDRETGCIEHNEFHNLLHYLKPGDTLVFNDTRVIPARLFGARQKTGGKVEVFLLSRTTNDDWEVLVKPGKKAKPGTIIEFSDNLRCEVLQSTDFGGRIVRFQYQGIFEEILDSLGETPLPPYIKTKLTDKERYQTVYARERGSAAAPTAGLHFTRQLMDSCKNMGVNLTFVTLHVGLGTFRPVAVDTITDHVMHREYYSVPEKTAVIVNKTLAAGNRVIAVGTTAVRTLETAGTSGQLEAKSGWTQIFIYPGYEFKIVKALITNFHLPKSTLLMLVSALSSREHIFNAYREAVDKRYRFFSFGDAMFIR

SEQ ID NO: 72398 - protein, 339 aa, Sporomusa sp.
  misc_feature (1)..(339): tr|A0A562GQV2|A0A562GQV2_9FIRM S-adenosylmethionine:tRN A ribosyltransferase-isomerase OS=Sporomusa sp. KB1 OX= 943346 GN=queA PE=3 SV=1
MLVSDFDYYLPEELIAQQPVEPRDQSRLLVLDRETGCIEHNEFHNLLHYLKPGDTLVFNDTRVIPARLFGTKQETGGKVEVFLLSRTTNDDWEVLVKPGKKAKPGTVIEFSDNLRCEVLQSTDFGGRVVRFQYQGIFEEILDSLGETPLPPYIKTKLTDKERYQTVYARERGSAAAPTAGLHFTRQLMDSCKSMGVNLTFVTLHVGLGTFRPVAVDTITDHVMHREYYSVPEETAALVNKTLAAGNRVIAVGTTAVRTLETAGTSGQLEAKSGWTQIFIYPGYEFKIVKALITNFHLPKSTLLMLVSALAGREHIFNAYQEAVDKRYRFFSFGDAMFIR

SEQ ID NO: 72399 - protein, 339 aa, Sporomusa sp.
  misc_feature (1)..(339): tr|A0A0U1L3B3|A0A0U1L3B3_9FIRM S-adenosylmethionine:tRN A ribosyltransferase-isomerase OS=Sporomusa sp. An4 OX= 411922 GN=queA PE=3 SV=1
MLVSEFDYYLPEELIAQQPVEPRDQSRLLVLDRETGCIEHNEFHNLLHYLKPGDTLVFNDTRVIPARLFGAKQETGGKVEVFLLSRTTNDDWEVLVKPGKKAKPGTIIEFSGNLRCEVLQSTDFGGRIVRFQYQGIFEEILDSLGETPLPPYIKTKLTDKERYQTVYARERGSAAAPTAGLHFTRELMESCKHRGVNLSFVTLHVGLGTFRPVAVDTIAEHVMHREYYSVPEETAALVNKTLAAGNRVIAVGTTAVRTLETAGTSGQLEAKSGWTQIFIYPGYEFKIVKALITNFHLPKSTLLMLVSALAGREHIFNAYREAVDKRYRFFSFGDAMFIR

SEQ ID NO: 72400 - protein, 339 aa, Sporomusa sphaeroides
  misc_feature (1)..(339): tr|A0A1U7MLW3|A0A1U7MLW3_9FIRM S-adenosylmethionine:tRN A ribosyltransferase-isomerase OS=Sporomusa sphaeroides DSM 2875 OX=1337886 GN=queA PE=3 SV=1
MLVSDFDYYLPEELIAQQPVEPRDHSRLLVLDRKTGTITHNAFYNLPQLLQPGDTLVFNDTRVIPARLLGIKPETGGKVEVFLLNRTTKDDWEVLVKPGKRARPGTVIEFGENLRCEVLSTTDFGGRVVRFTYQGIFEEILDVLGETPLPPYIKAQLSDKERYQTVYARERGSAAAPTAGLHFTRELMENIENMGVNLAYITLHVGLGTFRPVVAENINEHVMHREYYSVPPATAEIVNKTLAAGNRVIAVGTTAVRTLESAGSSGCLEAKSGWTEIFIYPGYEFKIVKALITNFHLPKSTLLMLISALAGREFIFDAYREAVDKRYRFFSFGDAMFIR

SEQ ID NO: 72401 - protein, 339 aa, Sporomusa termitida
  misc_feature (1)..(339): tr|A0A517DU37|A0A517DU37_9FIRM S-adenosylmethionine:tRN A ribosyltransferase-isomerase OS=Sporomusa termitida O X=2377 GN=queA PE=3 SV=1
MLVSDFAYYLPEELIAQHPVEPRDQSRLLLLDRQTGRIEHKQFFNLPQFLQPGDTLVFNDTRVIPARLLGVKPETGGKIEVFLLNRTTKDEWEVLVKPGKRAKPGTVIEFGSALRCEVVSATEFGGRIVRFDYQGIFEEILDVLGETPLPPYIKARLTDKERYQTVYARERGSAAAPTAGLHFTRGLMEKLRAMGVNLAFVTLHVGLGTFRPVAVENITDHVMHKEYYSVPAATAMVVNNTLAAGNRVIAVGTTAVRTLETAGGNGRLEPGSGWTEIFIYPGYKFNIVKAMITNFHLPQSTLLMLISALAGRENIFNAYREAVDKRYRFFSFGDAMFII

SEQ ID NO: 72402 - protein, 340 aa, Sporomusaceae bacterium
  misc_feature (1)..(340): tr|A0A402BPH1|A0A402BPH1_9FIRM S-adenosylmethionine:tRN A ribosyltransferase-isomerase OS=Sporomusaceae bacteri um OX=1917525 GN=queA PE=3 SV=1
MLLSDFDYFLPEELIAQCPHEPRDHSKLLVLDKVTGEFQHQHFFDVLKFLRPGDTLVFNDTKVLPARLIGIKAETGARIEVFLLNRKNGDDWEVLVKPGKRARIGSVISFSSELSCEVIADTDFGGRVVRFSYCGIFEELLDQLGETPLPPYIKEKLDNKERYQTVYARESGSAAAPTAGLHFTDQLMQAIKDKEIKLAFVTLHVGLGTFRPVNVENIQTHVMHKEYYSVPPETAELINSAKAQGNRIIAVGTTSIRTLESAADASGRIEAKSGWTDIFIYPGYDFKIIDGVITNFHLPKSTLLMLISAFAGRDAVMAAYQEAIKQRYRFFSFGDAMLLI

SEQ ID NO: 72403 - protein, 339 aa, Sporomusaceae bacterium
  misc_feature (1)..(339): tr|A0A3C0UBW4|A0A3C0UBW4_9FIRM S-adenosylmethionine:tRN A ribosyltransferase-isomerase OS=Sporomusaceae bacteri um OX=1917525 GN=queA PE=3 SV=1
MLLSDYHYNLPDGLIAQHPYEPRDHSRLMVLNRTTGEVSHQHFYNVPDYLEPGDTLVFNNTRVIPARLIGTRADTGGKVEVFLLNRLNHNEWETLVKPGKRARPGTTISFGEELSCEILDSTEFGGRVVRFTFQGAFEAILDRLGETPLPPYIRERLEDGERYQTVYSCESGSAAAPTAGLHFTEEMLENLKQRGINLAFITLHIGLGTFRPVSVADITQHVMHREYYSISPEAAQIINQTKEKGHRVVAVGTTSVRTLETVGTDGRIEAGSGWTNIFMYPGFEFKMIDAMVTNFHLPESTLLMLISEFAGRENVLAAYEIAVNEDYRFFSFGDAMLIL

SEQ ID NO: 72404 - protein, 342 aa, Sporosarcina globispora
  misc_feature (1)..(342): tr|A0A0M0GBW3|A0A0M0GBW3_SPOGL S-adenosylmethionine:tRN A ribosyltransferase-isomerase OS=Sporosarcina globispo ra OX=1459 GN=queA PE=3 SV=1
MKVDLFDFHLPEELIAQTPLADRTSSRLMVLDKKTGDIQHSVFKDIKNYLKAGDCLVLNDTKVLPARVFGEKTGTGANIEVLLLKQLEGDSWETLVKPAKRVKEGTEITFGNGSLTAVCTGTSDHGGRVLEFRYDGIFYEVLEQLGEMPLPPYIKEQLDDRDRYQTVFARERGSAAAPTAGLHFTEQLLKEIKEMGVHIAFITLHVGLGTFRPVSVEDLNEHDMHAEFYQVTEGTARLLNEVRDQGGRIVSVGTTSTRTLETIASMHNGRFEEASGWTDIFIYPGYEFKAIDGMITNFHLPKSTLIMLVSALAGRENVLNAYNKAVEERYRFFSFGDAMLIM

SEQ ID NO: 72405 - protein, 346 aa, Sporosarcina luteola
  misc_feature (1)..(346): tr|A0A511Z4K3|A0A511Z4K3_9BACL S-adenosylmethionine:tRN A ribosyltransferase-isomerase OS=Sporosarcina luteola OX=582850 GN=queA PE=3 SV=1
MDVNDFDFDLPEHLIAQTPLKDRTASRLMVLDKETGKVEHRQFRQIVDELQPGDVIVLNDTRVLPARLIGVKDDTGASIEVLLLKETGSDEWETLVKPAKRIKVGTFVTFGDGRLKAECTGVLDQGGRIFKFHYEGIFYEILDELGQMPLPPYITESLDDQSRYQTVFAKERGSAAAPTAGLHFTEAILQEIKDKGVGVEFITLHVGLGTFRPVSSDTIEEHTMHSEYYSVNESTANAINEAKANGGNIIAIGTTSARTLETIASQNNGKIISTSGWTSIFIYPGYTFSILDGMLTNFHLPKSTLIMLISAMVSREHILAAYNEAVKENYRFFSFGDAMFIKPSKK

SEQ ID NO: 72406 - protein, 351 aa, Sporosarcina newyorkensis
  misc_feature (1)..(351): tr|F9DVG9|F9DVG9_9BACL S-adenosylmethionine:tRNA ribosy ltransferase-isomerase OS=Sporosarcina newyorkensis 268 1 OX=1027292 GN=queA PE=3 SV=1
MMDVHDFDFDLPEHLIAQTPLLDRTASRLLVMDRQNGEVSHRHFRDLVDELEAGDLLVLNDTKVLPARLIGTKEDTGATIEVLLLKEIGEDRWETLVKPAKRVKVGTVVTFGDGRLQAKCTAIGEQGGREFAFMYDGIFYELLDQLGQMPLPPYITESLEDQSRYQTVFAKERGSAAAPTAGLHFTDEILDALRDKGVKIAFITLHVGLGTFRPVSVDSIEDHTMHAEYYVMTEETAALVRKTKATGGRVIAVGTTSTRTLETIASENGGNVVAASGWTSIFIFPGYAFKAIDGLVTNFHLPKSTLLMLLSAFAGREPILAAYEEAVKEQYRFFSFGDAMFIRPAKRKERD

SEQ ID NO: 72407 - protein, 350 aa, Sporosarcina newyorkensis
  misc_feature (1)..(350): tr|A0A1T4XNB9|A0A1T4XNB9_9BACL S-adenosylmethionine:tRN A ribosyltransferase-isomerase OS=Sporosarcina newyorke nsis OX=759851 GN=queA PE=3 SV=1
MDVHDFDFDLPEHLIAQTPLLDRTASRLLVMDRQNGEVSHRHFRDLVDELEAGDLLVLNDTKVLPARLIGTKEDTGATIEVLLLKEIGEDRWETLVKPAKRVKVGTVVTFGDGRLQAKCTAIGEQGGREFAFMYDGIFYELLDQLGQMPLPPYITESLEDQSRYQTVFAKERGSAAAPTAGLHFTDEILDALRDKGVKIAFITLHVGLGTFRPVSVDSIEDHTMHAEYYVMTEETAALVRKTKATGGRVIAVGTTSTRTLETIASENGGNVVAASGWTSIFIFPGYAFKAIDGLVTNFHLPKSTLLMLLSAFAGREPILAAYEEAVKEQYRFFSFGDAMFIRPAKRKERD

SEQ ID NO: 72408 - protein, 342 aa, Sporosarcina pasteurii
  misc_feature (1)..(342): tr|A0A380BUA5|A0A380BUA5_SPOPA S-adenosylmethionine:tRN A ribosyltransferase-isomerase OS=Sporosarcina pasteuri i OX=1474 GN=queA PE=3 SV=1
MNVEDFDFHLPEHLIAQTPLQDRTASRLLVLDKETGETKHRQFPDFVNELEAGDVLVLNNTRVLPARLIGVKEETGAAIEILLLKENGEDKWETLVKPAKRIKEGNVVSFGNGLLNAECTAVLPQGGREFKFTYNGIFFEILDQLGEMPLPPYITEKLDDEERYQTVFAKERGSAAAPTAGLHFTEEVLQQLKEKGVKIAFITLHVGLGTFRPVSVDTIEDHTMHAEYYSVTEVTANTINQAKASGRKVIAVGTTSARTLETIASENDGKIIEASGWTSIFIYPGYEFRILDGLLTNFHLPKSTLLMLVSAFASQEYIMDAYTSAVENEYRFFSFGDAMFIK

SEQ ID NO: 72409 - protein, 349 aa, Sporosarcina psychrophila
  misc_feature (1)..(349): tr|A0A127VXB3|A0A127VXB3_SPOPS S-adenosylmethionine:tRN A ribosyltransferase-isomerase OS=Sporosarcina psychrop hila OX=1476 GN=queA PE=3 SV=1
MDVNDFDFDLPDNLIAQTPLLDRTASRLMVLDPKTGEVEHRHFRDLLEELESGDMLVLNDTRVLPARLMGVKEDTGAMIEVLLLKQTADDEWETLAKPAKRVKLGTIVTFGDGRLKAECTGILEQGGRTFKFIYDGIFYEILDELGQMPLPPYITETLDDQARYQTVFAKERGSAAAPTAGLHFTDEILESIQNKGVNIAFITLHVGLGTFRPVSADTIEDHTMHSEYYHVTEQTADAINEAKAQGGRVIGVGTTSARTLETIASENAGKIVASSGWTSIFIYPGYTFSILDGLLTNFHLPKSTLIMLISALTTREHILAAYNRAVEEKYRFFSFGDAMFIKPSQRKES

SEQ ID NO: 72410 - protein, 349 aa, Sporosarcina sp.
  misc_feature (1)..(349): tr|A0A135WQZ8|A0A135WQZ8_9BACL S-adenosylmethionine:tRN A ribosyltransferase-isomerase OS=Sporosarcina sp. HYO0 8 OX=1759557 GN=queA PE=3 SV=1
MDVNEFDFELPDHLIAQTPLKDRTASRLMVLDKETGEIRHHQFKALIDELEAGDLLVLNDTRVLPARLMGVKEDTGAAIEVLLLKELDIDEWETLVKPAKRVKVGTVVTFGDGRLKAECTGILEQGGRTFKFSYDGIFYEVLDALGTMPLPPYISETLDDQERYQTVFAKERGSAAAPTAGLHFTDEYLQQIKEKGIDLAFITLHVGLGTFRPVSVDTIENHTMHAEYYQVSEATAESINNTKARGGRVIAVGTTSARTLETIASANDGKIIASSGWTSIFIYPGYPFRVLDGLITNFHLPKSTLVMLVSAFASRDKVLAAYHEAVRQNYRFFSFGDAMFIRSPRRKEL

SEQ ID NO: 72411 - protein, 349 aa, Sporosarcina sp.
  misc_feature (1)..(349): tr|A0A5B0DFI7|A0A5B0DFI7_9BACL S-adenosylmethionine:tRN A ribosyltransferase-isomerase OS=Sporosarcina sp. ANT_ H38 OX=2597358 GN=queA PE=3 SV=1
MDVNDFDFDLPDNLIAQTPLLDRTASRLMVLDPETGEVKHNHFRDLLDELESGDILVLNDTRVLPARLMGVKEETGAMIEVLLLKQTGDDEWETLVKPAKRVKLGTIVTFGDGRLKAECTGILEQGGRIFKFIYEGIFYEILDELGQMPLPPYITETLDDQARYQTVFAKERGSAAAPTAGLHFTDEILASIRNKGVNIAFITLHVGLGTFRPISVDTIEDHTMHSEYYHVTEQTAAAINEAKAQGGRVIAVGTTSARTLETIASENGGKIIPSSGWTSIFIYPGYEFSILDGLLTNFHLPKSTLIMLISALTTRDHILAAYNKAVKEKYRFFSFGDAMFIKPSQRKES

SEQ ID NO: 72412 - protein, 415 aa, Unknown
  misc_feature (1)..(415): tr|A0A328EEW2|A0A328EEW2_9BACT S-adenosylmethionine:tRN A ribosyltransferase-isomerase OS=SR1 bacterium human o ral taxon HOT-345 OX=1540874 GN=BSK20_05425 PE=3 SV=1
MEEDLLLSSYTYILPESCIAQQPKLPEHNAKLMICSLQATGDLLYEDQIFADLPNYLDQHYMLFLNSTKVFKARIPLHNTKIRRKTGQELLLETGELLIYAIHSKTQFECLVSDNKNFRPGSQIFLGEGVVFRSLEFTANGILFEISSENPSETSVQIFDFLEKKGEMPLPPYIRYEKEKEKRYQTFFAEKLGSAAAPTASLHFTPELVKRLEKKGVEFQFPCLHVGLGTFKPVYEEHIQQQKLHFEPMILESDIRKTIADAKLAGKRFLPIGTTMIRYLESLPYIRRFLKKKNLNIAVDHATRDRRDHLTKTIDEKLVEEFIPEQEVCVEKTQFSSIPEKMIIQTRLFIRPGIPFLLTDELITNFHLPKSSLMILISAFIGRKNLLEAYQRAIQAGYKFYSFGDGMRIKKQTNQ

SEQ ID NO: 72413 - protein, 338 aa, Stackebrandtia endophytica
  misc_feature (1)..(338): tr|A0A543B4D0|A0A543B4D0_9ACTN S-adenosylmethionine:tRN A ribosyltransferase-isomerase OS=Stackebrandtia endoph ytica OX=1496996 GN=FB566_5293 PE=3 SV=1
MTTLEAGFEFALDAALHATEPAESTGRSRADVRLLSTDLSTRTTGHHRFEDMPNLLRPGDLLVVNNSATLPAAVWLDRMVVHFSTERDDGTWLVELRRRVGATHKPARLGRPGEWLPLPGGPTLKLIDRHSERLWIARLDASVSRYLEQHGRPIRYDYVDRDWPLETYQTVFSTVPGSAEMPSAGRPFTPELVTSLIGRGIGFAPITLHTGVASPEVDELPYPERFSVSEYTAGAINATKSAGGRVIAVGTTVVRALESAVGAGGVMWADRGVTSLVITPDRGVSIVDGILTGLHEPRSTHLAMLSAIADTSLLADAYRSAIESAYRWHEFGDVHLIA

SEQ ID NO: 72414 - protein, 338 aa, Stackebrandtia nassauensis
  misc_feature (1)..(338): tr|D3PXS8|D3PXS8_STANL S-adenosylmethionine:tRNA ribosy ltransferase-isomerase OS=Stackebrandtia nassauensis (s train DSM 44728 / NRRL B-16338 / NBRC 102104 / LLR-40K- 21) OX=446470 GN=Snas_3751 PE=3 SV=1
MTTLQAGFGFALDAALEAGRPPEDRGSGRDDVRLLYTDKATGRTVSDGFRRLPGLLRPGDLLVVNDSATLPAAVWMRRLVVHFSTDRGDGTWLVELRKRVGGHHEQYSGGIPGELLPLPGGATLRLEARHTGRLWIARMNVSVPRYLGKHGVPIRYSYVDRDWPLDRYQTVFATRPGSAEMPSAARPFTTAIVDRLRERGVTIAPITLHTGVASPEVDETPYPERFRIGASTARAVNAARAAGGRVIAVGTTAVRALETAVDGDGVVKAASGFTEHIVTPAVGVRAVDGILTGLHEPRSTHLSMLSAIVDNDVLASAYHKAIAERYLWHEFGDVHLIA

SEQ ID NO: 72415 - protein, 341 aa, Stakelama pacifica
  misc_feature (1)..(341): tr|A0A4R6FS09|A0A4R6FS09_9SPHN S-adenosylmethionine:tRN A ribosyltransferase-isomerase OS=Stakelama pacifica OX =517720 GN=queA PE=3 SV=1
MRVDDFDFDLPNDRIALRPAAPRDTARMLVVGSDAMLDKSVADLPAMLRAGDCLIFNDTRVIPAQLEGMRGEAKIGATLHKREGPREWRAFIRNAKRLRDGDEIDFSNGVTAVASDRAADGSFRLSFGGIEPVELLLERAGHMPLPPYIASKRPTDERDAQDYQTMFAREAGAVAAPTAALHFTPALIEALADAGVETATLTLHVGAGTFLPVKADDTDDHVMHAEWGRIDPATADRLNAVRAKGGRLIAVGTTSLRLIESATGEDGVVRPFEGDTAIFITPGYRFRGIDGLMTNFHLPRSTLFMLVSALMGLDRMQAAYAHAIANDYRFYSYGDASLLLP

SEQ ID NO: 72416 - protein, 371 aa, Stanieria cyanosphaera
  misc_feature (1)..(371): tr|K9XXV9|K9XXV9_STAC7 S-adenosylmethionine:tRNA ribosy ltransferase-isomerase OS=Stanieria cyanosphaera (strai n ATCC 29371 / PCC 7437) OX=111780 GN=queA PE=3 SV=1
MNLDKLLSSYGYELPSELIAQTPAVPRDSSRLLVVNSPTTQFHSRFSELIDWLLPGDLLVLNNTQVIPARLYGHKATGAPVEILLLEEKKNNCWLALVKPGKRFKLGTEIYFDSVDKSVTKEAEFKAQVIERDEATGGRILQFFCPEGRSFWQMLEEFGQIPLPPYINPDSFPSEPSNSLSLSSQYQTIFAQQPGAIAAPTAGLHFTEELLQKLQAKGINQAYLTLHVGVGTFRPVEVENITDHVMHQEWIELPLATVEQINATKARGGRIIAVGTTVVRALETAAKASQNQTLKPFRGKSDLFIYPGYRWQIVDGLITNFHLPYSSLLMLVSALIGRERLLALYDEAIAKQYRFYSFGDAMLILPEAKLG

SEQ ID NO: 72417 - protein, 371 aa, Stanieria sp.
  misc_feature (1)..(371): tr|A0A140K559|A0A140K559_9CYAN S-adenosylmethionine:tRN A ribosyltransferase-isomerase OS=Stanieria sp. NIES-37 57 OX=1807358 GN=queA PE=3 SV=1
MNPDQLLSSYGYELPSELIAQTPAVPRDSSRLLVVNSPTTELHRRFSDLIDWLLPGDLLVLNNTRVIPARLYGHKATGAPVEILLLEEKKDNCWLALVKPGKRFKLGTEIYFDSVDNSITNKSGFKAQVIERDEATGGRILQFFCPEGTSFWQMLEEFGQVPLPPYINSESSQSESSSLPFLSSQYQTIFAQQPGAIAAPTAGLHFTEELLQKLQAKGIAQAYLTLHVGVGTFRPVEVENITDHVMHQEWIELPLLTVDQINATKARGGRIIAVGTTVVRALEGAAKAAQNQSLKPFRGKTDLFIYPGYRWQVVDGLITNFHLPYSSLLMLVSALIGRERLLALYDEAIAKQYRFYSFGDAMLILPEAKLS

SEQ ID NO: 72418 - protein, 341 aa, Staphylococcus agnetis
  misc_feature (1)..(341): tr|A0A2T4MNN1|A0A2T4MNN1_9STAP S-adenosylmethionine:tRN A ribosyltransferase-isomerase OS=Staphylococcus agneti s OX=985762 GN=queA PE=3 SV=1
MNIEDFNYHLPENLIAQTPLKERDTSKLLYMNRETGDIQDLQFKEVIRFFKPGDTLVLNDTKVMPARLFGLKKETNAKVEMLMLTNIEGDDWEVLLKPAKRIKVGQSISFGDGKIVATCMKELDQGGRVMRLHYEGILQERLDELGEMPLPPYIKERLDDRDRYQTVYAKATGSAAAPTAGLHFTDDLLKKVQDKGVQIAFVTLHVGLGTFRPVSVTDVNAHEMHSEYYTVSKETAQLLNDTKAKGHRIIAVGTTSTRTLETVVRDHGEFTQASGWTNIFIYPGFEFKAIDGLITNFHLPKSTLVMLVSAFSSTQYVLNAYTHAVNAKYRFFSFGDAMIII

SEQ ID NO: 72419 - protein, 131 aa, Staphylococcus agnetis
  misc_feature (1)..(131): tr|A0A2T4MME6|A0A2T4MME6_9STAP S-adenosylmethionine:tRN A ribosyltransferase-isomerase (Fragment) OS=Staphyloco ccus agnetis OX=985762 GN=queA PE=3 SV=1
MRVTDFSFELPESLIAHYPMPERSSCRLLSLDGPTGALTHGTFTDLLDKLNPGDLLVFNNTRVIPARLFGRKASGGKIEVLVERMLDDKRILAHIRASKAPKPGAELLLGDDESINATMTARHGALFEVEF

SEQ ID NO: 72420 - protein, 341 aa, Staphylococcus argensis
  misc_feature (1)..(341): tr|A0A2K4FFT4|A0A2K4FFT4_9STAP S-adenosylmethionine:tRN A ribosyltransferase-isomerase OS=Staphylococcus argens is OX=1607738 GN=queA PE=3 SV=1
MDIEEFDYDLPESLIAQTPLKHRDQSRLLVMGRESGETTHLHFADVIDYLKEGDTLVLNDTRVMPARLFGIKEETGAKVEMLMLTHLEDNDWEVLLKPAKRIKVGQRLSFGEGKIVAECIKELDQGGRIMRLHYEGILQERLDELGEMPLPPYIKERLDDPDRYQTVYAKESGSAAAPTAGLHFTDELLESIKAKGIRIAFITLHVGLGTFRPVSVENIDDHEMHSEYYQISEETTQLLNETRREGGRIISVGTTTTRTLETVRSQHDQFVATSGWTDIFIYPGYQFKAIDGLITNFHLPKSTLVMLVSAFSTRENVLNAYREAVERKYRFFSFGDAMLII

SEQ ID NO: 72421 - protein, 341 aa, Staphylococcus argenteus
  misc_feature (1)..(341): tr|A0A380CDT8|A0A380CDT8_9STAP S-adenosylmethionine:tRN A ribosyltransferase-isomerase OS=Staphylococcus argent eus OX=985002 GN=queA PE=3 SV=1
MNIEEFDYDLPESLIAQTPLKDRDQSRLLVMDRETGEMKHLHFKDIIEYFRAGDTLVLNDTRVMPARLFGLKEETGAKVEMLMLTQIEGNDWEVLLKPAKRIKVGNKLSFGNGKIVAECIKEMDQGGRIMRLHYEGILQERLDELGEMPLPPYIKERLDDPDRYQTVYAKESGSAAAPTAGLHFTDELLAKIKNKGVNIAFVTLHVGLGTFRPVSVNDVNDHEMHSEYYQMTQETADLLNDTKSKGHRIISVGTTSTRTLETIRRDYDQFVATSGWTNIFIYPGFEFKAIDGQITNFHLPKSTLVMLVSAFSTRENVLNAYRTAVSLEYRFFSFGDAMLII

SEQ ID NO: 72422 - protein, 341 aa, Staphylococcus arlettae
  misc_feature (1)..(341): tr|A0A380CEZ5|A0A380CEZ5_9STAP S-adenosylmethionine:tRN A ribosyltransferase-isomerase OS=Staphylococcus arlett ae OX=29378 GN=queA PE=3 SV=1
MDIEQFDYYLPEDLIAQTPLLNRDQSRLLVLGKNNGDIEHHHFKDIIDYLNPGDTLVLNDTRVMPARLFGIKEQTGAKVEMLMLTQIEGNDWEVLLKPAKRIKVGDKLNFGEGKIIAECIETLNQGGRIMRLHFDGILQERLDELGEMPLPPYIKERLDDPDRYQTVYAKEAGSAAAPTAGLHFTDTLLADIKAKGINIAFITLHVGLGTFRPVSVEDINDHEMHSEYYQMTQDTADLLNATQSQGGRIISVGTTSTRTLETIRQTNDQFLAASGWTDIFIYPGFEFKGVDGLITNFHLPKSTLVMLVSAFSTRENILNAYRTAVDERYRFFSFGDAMLII

SEQ ID NO: 72423 - protein, 341 aa, Staphylococcus aureus
  misc_feature (1)..(341): sp|Q2YT90|QUEA_STAAB S-adenosylmethionine:tRNA ribosylt ransferase-isomerase OS=Staphylococcus aureus (strain b ovine RF122 / ET3-1) OX=273036 GN=queA PE=3 SV=2
MNIEEFDYDLPESLIAQTPLKDRDHSRLLVMDRETGEMKHLHFKDIIEYFRPGDTLVLNDTRVMPARLFGLKEETGAKVEMLMLTQIEGNDWEVLLKPAKRIKVGNKLNFGNGKIIAECIKEMDQGGRIMRLHYEGILQERLDELGEMPLPPYIKERLDDPDRYQTVYAKESGSAAAPTAGLHFTDELLTEIKNKGVNIAFVTLHVGLGTFRPVSVDDVNDHEMHSEYYQMTQETADLLNDTKSKGHRIISVGTTSTRTLETIRRDHDKFVETSGWTNIFIYPGFDFKAIDGQITNFHLPKSTLVMLVSAFSTRENVLNAYKTAVNLEYRFFSFGDAMLII

SEQ ID NO: 72424 - protein, 341 aa, Staphylococcus aureus
  misc_feature (1)..(341): tr|A0A1Q8DG24|A0A1Q8DG24_STAAU S-adenosylmethionine:tRN A ribosyltransferase-isomerase OS=Staphylococcus aureus OX=1280 GN=queA PE=3 SV=1
MNVEEFDYDLPESLIAQTPLKDRDQSKLLVLGRKDGHITHKHFKDVIDYLEAGDTLVLNDTRVMPARLFGLKEETGAKVEMLMLTRIEDNDWEVLLKPAKRIKVGNKLSFGDGKIVAECIKELDQGGRIMRLHYEGILEERLNELGEMPLPPYIKERLDDPDRYQTVYAKESGSAAAPTAGLHFTDELLDDIRAKGINIAFITLHVGLGTFRPVSVEDIIDHEMHSEYYQMTQETADLLNQTKKEGHRIISVGTTSTRTLETIRRDYSEFVAVSGWTDIFIYPGFTYKAIDGLITNFHLPKSTLVMLVSAFSSRENILNAYKEAVNLEYRFFSFGDAMLII

SEQ ID NO: 72425 - protein, 357 aa, Staphylococcus auricularis
  misc_feature (1)..(357): tr|A0A2K4BX08|A0A2K4BX08_9STAP S-adenosylmethionine:tRN A ribosyltransferase-isomerase OS=Staphylococcus auricu laris OX=29379 GN=queA PE=3 SV=1
MLTNILVTAKVKRGNKVNIEDFDYPLPESLIAQTPLKERDESRLLVMDRETGEVSHHTFKDIISYLEPGDTLVLNDTRVMPARLFGLKEGTGAKVEMLMLTQLEGNDWEVLLKPAKRIKVGDRLSFGDDKIVAECIEVLEQGGRIMRLHYDGILQERLDELGEMPLPPYIKERLEDPERYQTVYAKENGSAAAPTAGLHFTEALLDEIKDKGVNMAFITLHVGLGTFRPVSVENIDDHEMHSEYYQMSQETADLLNETRAKGNRIIAVGTTSTRTLETIRSSEDQFVAKSGWTDIFIYPGYEFKAIDGLITNFHLPKSTLVMLVSAFSTRENILNAYHEAVQQSYRFFSFGDAMFII

SEQ ID NO: 72426 - protein, 341 aa, Staphylococcus auricularis
  misc_feature (1)..(341): tr|A0A2X5D7B4|A0A2X5D7B4_9STAP S-adenosylmethionine:tRN A ribosyltransferase-isomerase OS=Staphylococcus auricu laris OX=29379 GN=queA PE=3 SV=1
MNIEDFDYPLPESLIAQTPLKERDESRLLVMDRETGEVSHHTFKDIISYLEPGDTLVLNDTRVMPARLFGLKEGTGAKVEMLMLTQLEGNDWEVLLKPAKRIKVGDRLSFGDDKIVAECIEVLEQGGRIMRLHYDGILQERLDELGEMPLPPYIKERLEDPERYQTVYAKENGSAAAPTAGLHFTEALLDEIKDKGVNMAFITLHVGLGTFRPVSVENIDDHEMHSEYYQMSQETADLLNETRAKGNRIIAVGTTSTRTLETIRSSEDQFVAKSGWTDIFIYPGYEFKAIDGLITNFHLPKSTLVMLVSAFSTRENILNAYHEAVQQSYRFFSFGDAMFII

SEQ ID NO: 72427 - protein, 347 aa, Staphylococcus capitis
  misc_feature (1)..(347): tr|A0A0U1E6Q9|A0A0U1E6Q9_STACP S-adenosylmethionine:tRN A ribosyltransferase-isomerase OS=Staphylococcus capiti s OX=29388 GN=queA PE=3 SV=1
MKRGSKLNIEEFDYHLPESLIAQTPLKNRDQNRLLVLQRETGKMTHLHFKDVIDYLNPGDTLVLNDTRVMPARLFGLKEETGAKVEMLMLTQIEGNDWEVLLKPAKRIKVGNRLSFGDGKIVAECIKELEQGGRIMRLHYDGILQERLDELGEMPLPPYIKERLDDPDRYQTVYAKESGSAAAPTAGLHFTDDLLNQIKQKGVNIAFITLHVGLGTFRPVSVDNIDDHEMHSEYYQMTQETADLLNQTKAKGKRIISVGTTSTRTLETIRRDHEQFVEKSGWTDIFIYPGFEYKAIDGLVTNFHLPKSTLVMLVSAFSTRENILNAYHKAVEMEYRFFSFGDAMLII

SEQ ID NO: 72428 - protein, 341 aa, Staphylococcus capitis
  misc_feature (1)..(341): tr|A0A4U9TDY4|A0A4U9TDY4_STACP S-adenosylmethionine:tRN A ribosyltransferase-isomerase OS=Staphylococcus capiti s OX=29388 GN=queA PE=3 SV=1
MNIEEFDYHLPESLIAQTPLKNRDQSRLLVLQRETGKMTHLHFKDVIDYLNPGDTLVLNDTRVMPARLFGLKEETGAKVEMLMLTQIEGNDWEVLLKPAKRIKVGNRLSFGDGKIVAECIKELEQGGRIMRLHYDGILQERLDELGEMPLPPYIKERLDDPDRYQTVYAKESGSAAAPTAGLHFTDDLLNQIKQKGVNIAFITLHVGLGTFRPVSVDNIDDHEMHSEYYQMTQETADLLNQTKAKGKRIISVGTTSTRTLETIRRGHEQFVEKSGWTDIFIYPGFEYKAIDGLITNFHLPKSTLVMLVSAFSTRENILNAYHKAVEMEYRFFSFGDAMLII

SEQ ID NO: 72429 - protein, 347 aa, Staphylococcus caprae
  misc_feature (1)..(347): tr|C5QT26|C5QT26_9STAP S-adenosylmethionine:tRNA ribosy ltransferase-isomerase OS=Staphylococcus caprae M23864: W1 OX=525378 GN=queA PE=3 SV=1
MKRGSKLNIEEFDYHLPESLIAQTPLKNRDQSRLLVLQRETGEMAHLHFKDVIDYLNPGDTLVLNDTRVMPARLFGLKEETGAKVEMLMLTQIEGNDWEVLLKPAKRIKVGNRLSFGDGKIVAECVKELEQGGRIMRLHYEGILQERLDELGEMPLPPYIKERLDDPDRYQTVYAKESGSAAAPTAGLHFTEALLDQIKAKGVNITFITLHVGLGTFRPVSVDNIDDHEMHSEYYQMTSETAELLNQTRANGNRIISVGTTSTRTLETIRRDHEQFVEKSGWTDIFIYPGFEYKAIDGLITNFHLPKSTLVMLVSAFSTRDNILNAYQTAVEMKYRFFSFGDAMLII

SEQ ID NO: 72430 - protein, 341 aa, Staphylococcus carnosus
  misc_feature (1)..(341): tr|A0A431ZK47|A0A431ZK47_STACA S-adenosylmethionine:tRN A ribosyltransferase-isomerase OS=Staphylococcus carnos us subsp. carnosus OX=147448 GN=queA PE=3 SV=1
MNVEEFDYHLPESLIAQTPLKDRDHSRLLVLGRESGEMEHKHFTDVIDYFEAGDTLVLNDTRVMPARLFGLKEETGAKVEMLMLTRIEDNDWEVLLKPAKRIKVGNKLSFGEGKIVAECIKELDQGGRIMRLHYDGILEERLNELGEMPLPPYIKERLDDPDRYQTVYARESGSAAAPTAGLHFTDDLLEKIKAKGVNIAFITLHVGLGTFRPVSVENIDDHEMHSEYYQMTQETADLLNETKAKGHRIISVGTTSTRTLETIRRDYDRFVAVSGWTDIFIYPGFEYKAIDGLITNFHLPKSTLVMLVSAFSSKKNILNAYNKAVELEYRFFSFGDAMLII

SEQ ID NO: 72431 - protein, 341 aa, Staphylococcus carnosus
  misc_feature (1)..(341): tr|B9DNF6|B9DNF6_STACT S-adenosylmethionine:tRNA ribosy ltransferase-isomerase OS=Staphylococcus carnosus (stra in TM300) OX=396513 GN=queA PE=3 SV=1
MNIEEFDYDLPEELIAQTPLKDRDTSRLLVLHKENGELEHRHFKDIIEYINSGDTLVLNDTKVMPARLFGVKQETKAKVEMLMLTQIEGDDWEVLLKPAKRIKVGQKLSFGEGKIEAECIEELDQGGRIMRLSYEGILQERLDELGEMPLPPYIKERLEDQDRYQTVYAKATGSAAAPTAGLHFTDELLDELKAKGVNLAFITLHVGLGTFRPVSVDNIDDHEMHSEYYQMTQETADLLNQTKQNGKRIISVGTTSTRTLETIRRDYDTFTAASGWTDIFIYPGFEFKAIDGLITNFHLPKSTLVMLVSAFSSRQYILNAYRTAVEMKYRFFSFGDAMLII

SEQ ID NO: 72432 - protein, 341 aa, Staphylococcus chromogenes
  misc_feature (1)..(341): tr|A0A2T4M1N2|A0A2T4M1N2_STACR S-adenosylmethionine:tRN A ribosyltransferase-isomerase OS=Staphylococcus chromo genes OX=46126 GN=queA PE=3 SV=1
MNIEEFNYYLPEALIAQTPLKDRDTSRLLYLNRQTGDVKDLHFKDVVSFFEPGDTLVLNDTKVMPARLFGVKTETNAKVEMLMLTNIEGDDWEVLLKPAKRIKVGQSISFGNDKIIATCIKELDQGGRIMRLTYEGILQERLDELGEMPLPPYIKERLDDQDRYQTVYAKASGSAAAPTAGLHFTDELLNEVQQKGVNIAFVTLHVGLGTFRPVSVENIDDHEMHSEYYTMTQETADILNTTKASGHRIISVGTTSTRTLETIMRDFDTFKATSGWTNIFIYPGFEFKAIDGLITNFHLPKSTLVMLVSAFSSRQYVLNAYAHAVESKYRFFSFGDAMIII

SEQ ID NO: 72433 - protein, 341 aa, Staphylococcus cohnii
  misc_feature (1)..(341): tr|A0A3N0HSR7|A0A3N0HSR7_9STAP S-adenosylmethionine:tRN A ribosyltransferase-isomerase OS=Staphylococcus cohnii OX=29382 GN=queA PE=3 SV=1
MDIEAFDYHLPESLIAQTPLKTRDESRLLVLGRKTGNIVHKHFKNIIDYLEAGDTLVLNDTKVMPARLFGLKEETGAKVEMLMLTQLEDNDWEVLLKPAKRIKVGDKLSFGEGKIVAECIETLDQGGRIMRLNYEGILQERLDELGEMPLPPYIKERLDDPDRYQTVYAKASGSAAAPTAGLHFTDKLLEQLQAKGVNIAFITLHVGLGTFRPVSVENIDDHEMHSEYYQMDQDTADLLNHTKSNGHRIISVGTTSTRTLETIMQSRNNFVADSGWTDIFIYPGFKFKAIDGLITNFHLPKSTLVMLVSAFSSRDYILNAYQQAVKLEYRFFSFGDAMLIL

SEQ ID NO: 72434 - protein, 341 aa, Staphylococcus cohnii; identical to SEQ ID NO: 64007
  misc_feature (1)..(341): tr|A0A0M2NZW2|A0A0M2NZW2_STACC S-adenosylmethionine:tRN A ribosyltransferase-isomerase OS=Staphylococcus cohnii subsp. cohnii OX=74704 GN=queA PE=3 SV=1

SEQ ID NO: 72435 - protein, 341 aa, Staphylococcus condimenti
  misc_feature (1)..(341): tr|A0A143P7X1|A0A143P7X1_9STAP S-adenosylmethionine:tRN A ribosyltransferase-isomerase OS=Staphylococcus condim enti OX=70255 GN=queA PE=3 SV=1
MNIEEFDYDLPEELIAQTPLKDRDTSRLLVLHKENGELEHRHFKDIIDYINPGDTLVLNDTKVMPARLFGVKQETKAKVEMLMLTQIEGDDWEVLLKPAKRIKVGQKLSFGEGKIEAECIEELEQGGRIMRLSYDGILQERLDELGEMPLPPYIKERLEDQDRYQTVYAKATGSAAAPTAGLHFTDELLDELKAKGVNLAFITLHVGLGTFRPVSVDNIDDHEMHSEYYQMTQETADLLNQTKQNDKRIISVGTTSTRTLETIRRDYDRFTAASGWTDIFIYPGFEFKAIDGLITNFHLPKSTLVMLVSAFSSRQYILHAYRTAVEMKYRFFSFGDAMLII

SEQ ID NO: 72436 - protein, 341 aa, Staphylococcus delphini
  misc_feature (1)..(341): tr|A0A2A4GXV8|A0A2A4GXV8_9STAP S-adenosylmethionine:tRN A ribosyltransferase-isomerase OS=Staphylococcus delphi ni OX=53344 GN=queA PE=3 SV=1
MNIEEFDYELPESLIAQTPLKQRDQSRLLYLNRDTGETEDLHFKDITRFFQPGDTLVLNDTRVMPARLFGIKEETNAKVEMLMLTQIEGDDWEVLLKPAKRIKLGQTLSFGEGKIKATCIKELDQGGRIMRLSYEGILQERLDELGEMPLPPYIKERLDEKERYQTVYAKAAGSAAAPTAGLHFTDALLDDIRRQGVQIAFITLHVGLGTFRPVSVDNIDDHEMHSEYYQMSQETADILNQTKAAGHRIISVGTTSTRTLETIRSQFDSFQATSGWTNIFIYPGFEFKAIDGLITNFHLPKSTLVMLVSAFSSRQFVLSAYHHAVAEKYRFFSFGDAMIII

SEQ ID NO: 72437 - protein, 341 aa, Staphylococcus delphini
  misc_feature (1)..(341): tr|A0A2A4GT07|A0A2A4GT07_9STAP S-adenosylmethionine:tRN A ribosyltransferase-isomerase OS=Staphylococcus delphi ni OX=53344 GN=queA PE=3 SV=1
MNIEEFDYELPESLIAQTPLKQRDQSRLLYLNRDTGETEDLHFKDITRFFQPGDTLVLNDTRVMPARLFGLKEETNAKVEMLMLTQIEGDDWEVLLKPAKRIKLGQTLSFGEGTIKATCIKELDQGGRIMRLSYEGILQERLDELGEMPLPPYIKERLDEKERYQTVYAKAAGSAAAPTAGLHFTDALLDDIRRQGVQIAFVTLHVGLGTFRPVSVDNIDDHEMHSEYYQMSQETADILNQTKAAGHRIISVGTTSTRTLETIRRQFDSFQATSGWTNIFIYPGFEFKAIDGLITNFHLPKSTLVMLVSAFSSRQFVLSAYHHAVAEKYRFFSFGDAMIII

SEQ ID NO: 72438 - protein, 341 aa, Staphylococcus devriesei
  misc_feature (1)..(341): tr|A0A2K4DMJ1|A0A2K4DMJ1_9STAP S-adenosylmethionine:tRN A ribosyltransferase-isomerase OS=Staphylococcus devrie sei OX=586733 GN=queA PE=3 SV=1
MNVEEFDYDLPESLIAQTPLKDRDHSRLLVLGRQSGEIDHKHFTDIIDYFNPGDTLVLNDTRVMPARLFGLKEETGAKVEMLMLTRIEKNDWEVLLKPAKRIKVGNKLSFGEGKIIAECIEELDQGGRIMRLHYEGILEERLNELGEMPLPPYIKERLDDPERYQTVYAKENGSAAAPTAGLHFTDDLLEKVKAKGVNIAFITLHVGLGTFRPVSVDNIDDHQMHSEYYQMTQQTADLLNQTKEQGNRIISVGTTSTRTLETIRRDNDEFVAVSGWTDIFIYPGFEYKAIDGLITNFHLPKSTLVMLVSAFSSRENILNAYNKAVELKYRFFSFGDAMLII

SEQ ID NO: 72439 - protein, 341 aa, Staphylococcus devriesei
  misc_feature (1)..(341): tr|A0A2T4KA57|A0A2T4KA57_9STAP S-adenosylmethionine:tRN A ribosyltransferase-isomerase OS=Staphylococcus devrie sei OX=586733 GN=queA PE=3 SV=1
MNVEEFDYDLPESLIAQTPLKDRDHSRLLVLGRQSGEIDHKHFTDIIDYFNPGDTLVLNDTRVMPARLFGLKEETGAKVEMLMLTRIEGNDWEVLLKPAKRIKIGNRLSFGEGKIIAECIDELEQGGRIMRLHYEGILEERLDELGEMPLPPYIKERLDDPDRYQTVYAKENGSAAAPTAGLHFTDDLLEKIKAKGVNIAFITLHVGLGTFRPVSVDNIDDHQMHSEYYQMTQQTADLLNQTKEQGHRIISVGTTSTRTLETIRRDYDKFVAVSGWTDIFIYPGFEYKAIDGLITNFHLPKSTLVMLVSAFSSRENILNAYNKAVELKYRFFSFGDAMLII

SEQ ID NO: 72440 - protein, 341 aa, Staphylococcus edaphicus
  misc_feature (1)..(341): tr|A0A2C6UB85|A0A2C6UB85_9STAP S-adenosylmethionine:tRN A ribosyltransferase-isomerase OS=Staphylococcus edaphi cus OX=1955013 GN=queA PE=3 SV=1
MNIEAFDYHLPESLIAQTPLKNRDESRLLILGRQSGNIEHKLFKDVVDYLKSGDTLVLNDTRVMPARLFGMKEETGAKVEMLMLTQIEGDDWEVLLKPAKRVKVGNKLTFGEGKIVAECIETLDQGGRIMRLHYEGILQERLDELGEMPLPPYIKERLDDQNRYQTVYAKETGSAAAPTAGLHFTDGLLERIRAKGVNIAFITLHVGLGTFRPVSVENIDDHEMHSEYYQMDEATAELLNHTKANGKRVISVGTTSTRTLETIMESHDRFVAKSGWTDIFIFPGFEFKAIDGLITNFHLPKSTLVMLVSAFSTRDYVINAYNQAVGSEYRFFSFGDAMLII

SEQ ID NO: 72441 - protein, 341 aa, Staphylococcus epidermidis
  misc_feature (1)..(341): sp|Q8CS92|QUEA_STAES S-adenosylmethionine:tRNA ribosylt ransferase-isomerase OS=Staphylococcus epidermidis (str ain ATCC 12228) OX=176280 GN=queA PE=3 SV=2
MNIEDFDYHLPESLIAQTPLKNRDQSRLLVLSKDTGELTHLHFRDVIHYFEPGDTLVLNDTRVMPARLFGLKEETGAKVEMLMLTQIEGNDWEVLLKPAKRIKKGHRLNFGDGKIVAECIEELEQGGRIMRLHYEGILQERLDELGEMPLPPYIKERLDDPDRYQTVYAKESGSAAAPTAGLHFTDDLLNKIKQKGVHIAFITLHVGLGTFRPVSVENIDDHEMHSEYYQMTQETADLLNKTKESGKRVISVGTTSTRTLETIRRDHPQFVATSGWTDIFIYPGFEFKAIDGLITNFHLPKSTLVMLVSAFSNKKYILNAYHKAVEMEYRFFSFGDAMLII

SEQ ID NO: 72442 - protein, 341 aa, Staphylococcus epidermidis
  misc_feature (1)..(341): sp|Q5HNR1|QUEA_STAEQ S-adenosylmethionine:tRNA ribosylt ransferase-isomerase OS=Staphylococcus epidermidis (str ain ATCC 35984 / RP62A) OX=176279 GN=queA PE=3 SV=1
MNIEDFDYHLPESLIAQTPLKNRDQSRLLVLSKDTGELTHLHFRDVIHYFEPGDTLVLNDTRVMPARLFGLKEETGAKVEMLMLTQIEGNDWEVLLKPAKRIKKGHRLNFGDGKIVAECIEELEQGGRIMRLHYEGILQERLDELGDMPLPPYIKERLDDPDRYQTVYAKESGSAAAPTAGLHFTDDLLNKIKQKGVHIAFITLHVGLGTFRPVSVENIDDHEMHSEYYQMTQETADLLNKTKESGKRVISVGTTSTRTLETIRRDHPQFVATSGWTDIFIYPGFEFKAIDGLITNFHLPKSTLVMLVSAFSNKKYILNAYHKAVEMEYRFFSFGDAMLII

SEQ ID NO: 72443 - protein, 354 aa, Staphylococcus equorum
  misc_feature (1)..(354): tr|A0A432A468|A0A432A468_9STAP S-adenosylmethionine:tRN A ribosyltransferase-isomerase OS=Staphylococcus equoru m subsp. equorum OX=29383 GN=queA PE=3 SV=1
MSTLIIHMKRGNKLNIEEFDYHLPESLIAQTPLKNRDQSRLLVLNKQNGTMEHLYFKDVIQYLNPGDTLVLNDTRVMPALLFGLKEETGAKVEMLMLAQIEGNDWEVLLKPAKRVKVGHRLNFGDGNITAECIKELEHGGRVMRLHYDGILQERLDELGEMPLPPYIKERLDDPDRYQTVYAKESGSAAAPTAGLHFTDDLLKQIKDKGVNIAFITLHVGLGTFRPVSVDNIDDHEMHSEYYQMTKKTADLLNQTRANGKRIISVGTTSTRTLETIRRDHSRFLEKSGWTDIFIYPGFKFKAIDGLITNFHLPKSTLVMLVSAFSTRDYILNAYQTAVQMEYRFFSFGDAMLII

SEQ ID NO: 72444 - protein, 341 aa, Staphylococcus equorum
  misc_feature (1)..(341): tr|A0A1E5TJI4|A0A1E5TJI4_9STAP S-adenosylmethionine:tRN A ribosyltransferase-isomerase OS=Staphylococcus equoru m OX=246432 GN=queA PE=3 SV=1
MDIEAFDYHLPEALIAQTPLKNRDESKLLVLGRQTGDIEHKHFKDVIDYLDKGDTLVLNDTRVMPARLFGLKEETGAKVEMLMLTQISGNDWEVLLKPAKRIKVGNKLSFGDGKIVAECIEELNQGGRIMRLHYEGILQERLDELGEMPLPPYIKERLDDQDRYQTVYAKASGSAAAPTAGLHFTDELLNRIKAKGINIAFITLHVGLGTFRPVSVDNIDDHEMHSEYYQMDQETAKLLNETKSKGHRVISVGTTSTRTLETIMQTNEAFKAQSGWTDIFIFPGYTFKAIDGLITNFHLPKSTLVMLVSAFSSRDYILNAYQQAVKSEYRFFSFGDAMLII

SEQ ID NO: 72445 - protein, 341 aa, Staphylococcus felis
  misc_feature (1)..(341): tr|A0A2K3ZJC9|A0A2K3ZJC9_9STAP S-adenosylmethionine:tRN A ribosyltransferase-isomerase OS=Staphylococcus felis OX=46127 GN=queA PE=3 SV=1
MNIEEFDYHLPEALIAQTPLKNRDTSRLLHLNKVTGKVEDLHFKDIIHFLNKGDTLVLNDTKVMPARLFGIKEDTHAKVEMLMLTQLENDDWEVLLKPAKRIKLGQTLVFGDGKIKATCIEERSQGGRIMRLNYDGILQERLDELGEMPLPPYIKERLDEKDRYQTVYAKESGSAAAPTAGLHFTESLLSDIQEKGVKIAFVTLHVGLGTFRPVSVENIDDHDMHSEYYQMTEETARILRDTRLSGGRVISVGTTSTRTLETIYRDHNDFVASSGWTDIFIYPGFEFKAIDGLITNFHLPKSTLVMLVSAFSSKQYILNAYQHAVNHQYRFFSFGDAMIII

SEQ ID NO: 72446 - protein, 341 aa, Staphylococcus fleurettii
  misc_feature (1)..(341): tr|A0A3S0JXG4|A0A3S0JXG4_9STAP S-adenosylmethionine:tRN A ribosyltransferase-isomerase OS=Staphylococcus fleure ttii OX=150056 GN=queA PE=3 SV=1
MNIEEFDYELPESLIAQTPLKQRDQSRLLYLNRQTGDTEDLHFKDITRFFKQGDTLVLNDTKVMPARLFGVKEETLAKVEMLMLTQIEGDDWEVLLKPAKRIKVGQSLSFGDGKIIATCMKELDQGGRMMRLHYDGILQERLDELGEMPLPPYIKERLDEKDRYQTVYAKASGSAAAPTAGLHFTDQLLQQIRENGVNIAFITLHVGLGTFRPVSVENIDDHEMHSEYYQMSQETADLLNETKAKGHRIISVGTTSTRTLETIRQNNTQFVASSGWTDIFIYPGFEFKAIDGLITNFHLPKSTLVMLVSAFSSRQFVLSAYRHAVAEKYRFFSFGDAMIII

SEQ ID NO: 72447 - protein, 341 aa, Staphylococcus fleurettii
  misc_feature (1)..(341): tr|A0A380FSL3|A0A380FSL3_9STAP S-adenosylmethionine:tRN A ribosyltransferase-isomerase OS=Staphylococcus fleure ttii OX=150056 GN=queA PE=3 SV=1
MNIEDFDFDLPESLIAQTPLLDRESSRLLKCNKKTGELEDLTFKEVVNQLAPGDCLVLNDTKVMPARLFGLKEETGAKVEMLMLTQHEDNEWEVLIKPAKRIKVGQSVSFGEGKIIATCVKELEQGGRIMKLSYEGILQERLDELGEMPLPPYIKERLEDQDRYQTVYAKEVGSAAAPTAGLHFTEHLLQEIAAKGVHIAFITLHVGLGTFRPVSVDNIDDHEMHSEYYQMTAETADLLNRVKSEGNKIISVGTTSTRTLETIRSKNDEFVEASGWTDIFIYPGYEFKAIDGLITNFHLPKSTLIMLVSALSTRENILHAYQHAVDEKYRFFSFGDAMILI

SEQ ID NO: 72448 - protein, 271 aa, Staphylococcus gallinarum
  misc_feature (1)..(271): tr|A0A380FJR9|A0A380FJR9_STAGA S-adenosylmethionine:tRN A ribosyltransferase-isomerase OS=Staphylococcus gallin arum OX=1293 GN=queA_1 PE=3 SV=1
MKEDTGAKVEMLMLTQIEGNDWEVLLKPAKRIKVGNKLSFGDGKIVAECMEELDQGGRIMRLHYEGILQERLDELGEMPLPPYIKERLDDQERYQTVYAKESGSAAAPTAGLHFTDDLLQQIRDKGVNIAFVTLHVGLGTFRPVSVDNIDDHEMHSEYYQINQETADLLNATRAQGKRIISVGTTSTRTLETIMQSNESFVAQSGWTDIFIYPGFEYKAIDGLITNFHLPKSTLVMLVSAFSSRDYIINAYQKAVELEYRFFSFGDAMLII

SEQ ID NO: 72449 - protein, 79 aa, Staphylococcus gallinarum
  misc_feature (1)..(79): tr|A0A380FHG5|A0A380FHG5_STAGA S-adenosylmethionine:tRN A ribosyltransferase-isomerase OS=Staphylococcus gallin arum OX=1293 GN=queA_2 PE=3 SV=1
MDIEAFDYHLPESLIAQTPLKNRDESRLLVLGKDSGDIEHRQFKNVIEYLNEGDTLVLNDTRVMPARFIWFERRYWSQS

SEQ ID NO: 72450 - protein, 341 aa, Staphylococcus haemolyticus
  misc_feature (1)..(341): sp|Q4L6Y5|QUEA_STAHJ S-adenosylmethionine:tRNA ribosylt ransferase-isomerase OS=Staphylococcus haemolyticus (st rain JCSC1435) OX=279808 GN=queA PE=3 SV=1
MNVEEFDYDLPESLIAQTPLKDRDQSRLLVLGRNSGNIEHKHFKDVINYLETGDTLVLNDTRVMPARLFGLKEETGAKVEMLMLTRIENNDWEVLLKPAKRIKVGNKLSFGEGKIIAECIEELDQGGRIMRLHYEGILEERLNELGEMPLPPYIKERLDDPDRYQTVYAKESGSAAAPTAGLHFTDELLDEIRAKGINIAFITLHVGLGTFRPVSVEDINDHEMHSEYYQMTQETANLLNQTKKEGHRIISVGTTSTRTLETIRRDYNEFVAVSGWTDIFIYPGFTYKAIDGLITNFHLPKSTLVMLVSAFSSRENILNAYKEAVKLEYRFFSFGDAMLII

SEQ ID NO: 72451 - protein, 341 aa, Staphylococcus haemolyticus; identical to SEQ ID NO: 72450
  misc_feature (1)..(341): tr|A0A2A1KAX1|A0A2A1KAX1_STAHA S-adenosylmethionine:tRN A ribosyltransferase-isomerase OS=Staphylococcus haemol yticus OX=1283 GN=queA PE=3 SV=1

SEQ ID NO: 72452 - protein, 341 aa, Staphylococcus hominis
  misc_feature (1)..(341): tr|A0A4Q9WQU7|A0A4Q9WQU7_STAHO S-adenosylmethionine:tRN A ribosyltransferase-isomerase OS=Staphylococcus homini s OX=1290 GN=queA PE=3 SV=1
MNVEEFDYHLPESLIAQTPLKNRDQSRLLVLGRKTGNIAHKHFTDIMDYFEPGDTLVLNDTRVMPARLFGLKEETGAKVEMLMLTRIEDNDWEVLLKPAKRIKVGNTLSFGNGKIIAECIKELEQGGRIMRLHYEGILEERLDELGEMPLPPYIKERLDDPDRYQTVYAKENGSAAAPTAGLHFTDELLQKIKDKGVNIAFITLHVGLGTFRPVSVEDIDDHEMHSEYYQMTKETADMLNKTKENGYRIISVGTTSTRTLETIRRDHEQFVATSGWTDIFIYPGFEYKAIDGLITNFHLPKSTLVMLVSAFSSREYILNAYKEAVKLKYRFFSFGDAMLII

SEQ ID NO: 72453 - protein, 341 aa, Staphylococcus hominis
  misc_feature (1)..(341): tr|A0A533IY17|A0A533IY17_STAHO S-adenosylmethionine:tRN A ribosyltransferase-isomerase OS=Staphylococcus homini s OX=1290 GN=queA PE=3 SV=1
MNVEEFDYHLPESLIAQTPLKNRDQSRLLVLGRKTGNIAHKHFTDIMDYFETGDTLVLNDTRVMPARLFGLKEETGAKVEMLMLTRIEDNDWEVLLKPAKRIKVGNTLSFGNGKIIAECIKELEQGGRIMRLHFEGILEERLDELGEMPLPPYIKERLDDPDRYQTVYAKENGSAAAPTAGLHFTDELLQKIKDKGVNIAFITLHVGLGTFRPVSVEDINDHEMHSEYYQMTKETADILNKTKENGNRIISVGTTSTRTLETVRRDHEQFVATSGWTDIFIYPGFEYKAIDGLITNFHLPKSTLVMLVSAFSSREYILNAYKEAVKLKYRFFSFGDAMLII

SEQ ID NO: 72454 - protein, 341 aa, Staphylococcus hyicus
  misc_feature (1)..(341): tr|A0A418JIB5|A0A418JIB5_STAHY S-adenosylmethionine:tRN A ribosyltransferase-isomerase OS=Staphylococcus hyicus OX=1284 GN=queA PE=3 SV=1
MNIEDFNYHLPENLIAQTPLKERDTSKLLYMNRKTGETKDLHFKDVIQFLEPGDTLVLNDTKVMPARLFGLKKETNAKVEMLMLTNIEGDDWEVLIKPAKRIKVGQQVSFGDDKIVATCVKELDQGGRIMRLKYDGILQERLDELGEMPLPPYIKERLDDRDRYQTVYAKETGSAAAPTAGLHFTDELLNVVREKGVNIAFVTLHVGLGTFRPVSVDNVNDHEMHSEYYTVTKETAKLLNDTKSKGKRIISVGTTSTRTLETVVRDYGTFTQASGWTNIFIYPGFEFKAIDGLITNFHLPKSTLVMLVSAFSSTQFVINAYTHAVNEQYRFFSFGDAMIIL

SEQ ID NO: 72455 - protein, 341 aa, Staphylococcus hyicus
  misc_feature (1)..(341): tr|A0A3S5DYE5|A0A3S5DYE5_STAHY S-adenosylmethionine:tRN A ribosyltransferase-isomerase OS=Staphylococcus hyicus OX=1284 GN=queA PE=3 SV=1
MNIEEFDYHLPEELIAQTPLKDRDTSRLLVLNRKNGDIEHRHFKDIIEYFNPGDTLVLNDTKVMPARLFGLKEDTKAKVEMLMLTQIEGNDWEVLLKPAKRIKVGQKLSFGEGKIIAECIKELEQGGRIMRLYYEGILQERLDELGEMPLPPYIKERLDDPDRYQTVYAKETGSAAAPTAGLHFTDELLEQLKAKQVNLAFVTLHVGLGTFRPVSVDNIDDHKMHSEYYQMSQATADLLNETKQKGHRIISVGTTSTRTLETIRRDHDQFTAQSGWTDIFIYPGFEFKAIDALITNFHLPKSTLVMLVSAFSSKQYILNAYQTAVEMKYRFFSFGDAMLII

SEQ ID NO: 72456 - protein, 341 aa, Staphylococcus intermedius
  misc_feature (1)..(341): tr|A0A380G730|A0A380G730_STAIN S-adenosylmethionine:tRN A ribosyltransferase-isomerase OS=Staphylococcus interm edius NCTC 11048 OX=1141106 GN=queA PE=3 SV=1
MNIEEFDYVLPESLIAQTPLKQRDQSRLLYLNRDTGETEDLHFKDITRFFRPGDTLVLNDTRVMPARLFGVKEETNAKVEMLMLTQIEGDDWEVLLKPAKRIKVGQTLSFGEGKIKATCIKELNQGGRVMRLSYDGILQERLDELGEMPLPPYIKERLDEKERYQTVYAKAAGSAAAPTAGLHFTDELLEDIRKQGVHIAFVTLHVGLGTFRPVSVDNIDDHEMHSEYYQMSQETADILNQTKAAGHRIISVGTTSTRTLETIRTQFDSFKATSGWTDIFIYPGYEFKAIDGLITNFHLPKSTLVMLVSAFSSRQFVLSAYRHAVNEKYRFFSFGDAMIII

SEQ ID NO: 72457 - protein, 341 aa, Staphylococcus kloosii
  misc_feature (1)..(341): tr|A0A151A4F6|A0A151A4F6_9STAP S-adenosylmethionine:tRN A ribosyltransferase-isomerase OS=Staphylococcus kloosi i OX=29384 GN=queA PE=3 SV=1
MDIEDFDYHLPEALIAQTPLKDRDQSRLLVLGKNSGDIDHRHFKDVIDYFNQGDTLVLNDTRVMPARLFGIKEETGAKVEMLMLTQLEGNDWEVLLKPAKRIQIGDKLNFGEGKIIAECIETLNQGGRIMRLHFEGILQERLDELGEMPLPPYIKERLDDPERYQTVYAKEIGSAAAPTAGLHFTDELLSQIKQKGVNVAFITLHVGLGTFRPVSVDNIDDHEMHSEYYQMTQETADLLNATKENGGRIISVGTTSTRTLETIRQNNSQFEAESGWTDIFIYPGFDFKGVDGLITNFHLPKSTLVMLVSAFSSRENILNAYNQAVAEQYRFFSFGDAMLII

SEQ ID NO: 72458 - protein, 341 aa, Staphylococcus kloosii
  misc_feature (1)..(341): tr|A0A512QGY6|A0A512QGY6_9STAP S-adenosylmethionine:tRN A ribosyltransferase-isomerase OS=Staphylococcus kloosi i OX=29384 GN=queA PE=3 SV=1
MDIEDFDYHLPEALIAQTPLKDRDQSRLLVLGKNSGDIDHRHFKDVIDYFNQGDTLVLNDTRVMPARLFGIKEETGSKVEMLMLTQLEGNDWEVLLKPAKRIQIGDKLNFGEGKIIAECIETLNQGGRIMRLHFEGILQERLDELGEMPLPPYIKERLDDPERYQTVYAKEIGSAAAPTAGLHFTDELLSQIKQKGVNVAFITLHVGLGTFRPVSVDNIDDHEMHSEYYQMTQETADLLNATKENGGRIISVGTTSTRTLETIRQNNSQFEAESGWTDIFIYPGFDFKGVDGLITNFHLPKSTLVMLVSAFSSRENILNAYNQAVAEQYRFFSFGDAMLII

SEQ ID NO: 72459 - protein, 341 aa, Staphylococcus lentus
  misc_feature (1)..(341): tr|A0A5F0TX70|A0A5F0TX70_STALE S-adenosylmethionine:tRN A ribosyltransferase-isomerase OS=Staphylococcus lentus OX=42858 GN=queA PE=3 SV=1
MNIEDFDFDLPESLIAQTPLLNRESSRLLKCDKVTGELEDLTFKDVIHQLSPGDCLVLNDTKVMPARLFGIKEETGAKVEMLMLTQQENDEWEVLIKPAKRIKINQSVSFGEGKIIATCVKELDQGGRIMKLSYEGILQERLDELGEMPLPPYIKERLDDQERYQTVYAKAVGSAAAPTAGLHFTKNLLQEIRDKGVHVAFITLHVGLGTFRPVSVDNIDEHEMHSEYYQMSEDTAELLNKVKADGKKIISVGTTSTRTLETIRSRNDKFIAESGWTDIFIYPGYEFKAIDGLITNFHLPKSTLIMLVSALSSRENILNAYRHAVESEYRFFSFGDAMIII

SEQ ID NO: 72460 - protein, 341 aa, Staphylococcus lentus
  misc_feature (1)..(341): tr|A0A178PLA4|A0A178PLA4_STALE S-adenosylmethionine:tRN A ribosyltransferase-isomerase OS=Staphylococcus lentus OX=42858 GN=queA PE=3 SV=1
MNIEDFDFDLPESLIAQTPLLNRESSRLLKCDKVTGELEDLTFKDVIHQLSPGDCLVLNDTKVMPARLFGIKEETGAKVEMLMLTQQENDEWEVLIKPAKRIKINQSVSFGEGKIIATCVKELDQGGRIMKLSYEGILQERLDELGEMPLPPYIKERLDDQDRYQTVYAKAVGSAAAPTAGLHFTKNLLQEIRGRGVHVAFITLHVGLGTFRPVSVDNIDEHEMHSEYYQMSEDTAELLNKVKADGKKIISVGTTSTRTLETIRSRNDKFIAESGWTDIFIYPGYEFKAIDGLITNFHLPKSTLIMLVSALSSRENILNAYRHAVESEYRFFSFGDAMIII

SEQ ID NO: 72461 - protein, 341 aa, Staphylococcus lugdunensis
  misc_feature (1)..(341): tr|A0A4Q9W845|A0A4Q9W845_STALU S-adenosylmethionine:tRN A ribosyltransferase-isomerase OS=Staphylococcus lugdun ensis OX=28035 GN=queA PE=3 SV=1
MNIEDFDYHLPESLIAQTPLKNRDQSRLLVLNKETGDMKHQHFKDVINYLNPGDTLVLNDTRVMPARLFGVKEETGAKVEMLMLTQIENNDWEVLLKPAKRIKVGNQLSFGEGKIIAECIKELDQGGRIMRLHYEGILQERLDELGEMPLPPYIKARLDDPDRYQTVYAKENGSAAAPTAGLHFTDNLLKDIKAKGVNIAFITLHVGLGTFRPVSVENINEHEMHSEYYQMTENTAQLLNNTKLQGHRIIAVGTTSTRTLETIRRDHSQFIATSGWTDIFIYPGFEFKAIDALITNFHLPKSTLVMLVSAFSSRQFILTAYRKAVELEYRFFSFGDAMLII

SEQ ID NO: 72462 - protein, 341 aa, Staphylococcus lugdunensis
  misc_feature (1)..(341): tr|A0A133Q2E9|A0A133Q2E9_STALU S-adenosylmethionine:tRN A ribosyltransferase-isomerase OS=Staphylococcus lugdun ensis OX=28035 GN=queA PE=3 SV=1
MNIEDFDYHLPESLIAQTPLKNRDQSRLLVLNKKTGDMKHQHFKDVINYLNPGDTLVLNDTRVMPARLFGVKEETGAKVEMLMLTQIENNDWEVLLKPAKRIKVGNQLSFGEGKIIAECIKELDQGGRIMRLHYEGILQERLDELGEMPLPPYIKARLDDPDRYQTVYAKENGSAAAPTAGLHFTDNLLKDIKAKGVNIAFITLHVGLGTFRPVSVENINEHEMHSEYYQMTENTAQLLNNTKLQGHRIIAVGTTSTRTLETIRRDHSQFIATSGWTDIFIYPGFEFKAIDALITNFHLPKSTLVMLVSAFSSRQFILTAYRKAVELEYRFFSFGDAMLII

SEQ ID NO: 72463 - protein, 341 aa, Staphylococcus lutrae
  misc_feature (1)..(341): tr|A0A1W6BJF4|A0A1W6BJF4_9STAP S-adenosylmethionine:tRN A ribosyltransferase-isomerase OS=Staphylococcus lutrae OX=155085 GN=queA PE=3 SV=1
MNIEEFDYELPESLIAQTPLLQRDQSRLLYLNRTTGEMEDLRFTAISQFFQRGDTLVLNDTRVMPARLFGIKEETNAKVEMLLLTQIEGDDWEVLLKPAKRIKIGQSLSFGDGIIKATCIQELDQGGRVMRLSYDGILQERLDELGEMPLPPYIKTRLDEKERYQTVYAKASGSAAAPTAGLHFTDELLDEIRNKGVNIAFITLHVGLGTFRPVSVNNIDDHEMHSEYYQMTQATADVLNDTKAAGHRIISVGTTSTRTLETIVAQHGTFIETSGWTDIFIYPGFHFKAIDGLITNFHLPKSTLVMLVSAFSTRQYVLNAYRHAVDEKYRFFSFGDAMMII

SEQ ID NO: 72464 - protein, 341 aa, Staphylococcus massiliensis
  misc_feature (1)..(341): tr|K9ARC3|K9ARC3_9STAP S-adenosylmethionine:tRNA ribosy ltransferase-isomerase OS=Staphylococcus massiliensis S 46 OX=1229783 GN=queA PE=3 SV=1
MNIEEFNYDLPESLIAQTPLKNRDESRLLHLNRHTGDVSHHTFKDIISFLKAGDTLVLNDTRVMPARLFGLKEDTLAKIEMLMLTQIEGDDWEVLIKPAKRIKVGQKVSFGEGKIIAECIEEQAQGGRIMRLSYEGILQERLDELGEMPLPPYIKERLDERERYQTVYAKEVGSAAAPTAGLHFTTPLLEAIKAKGVDLAYVTLHVGLGTFRPVSVDNIDDHTMHSEFYQMSEETAALLNETKARGGRIISVGTTSTRTLETIRAKHDTFVSSSGWTDIFIYPGYEFKAIDGLITNFHLPKSTLVMLVSAFSTKQYVLNAYQEAVESKYRFFSFGDAMIII

SEQ ID NO: 72465 - protein, 341 aa, Staphylococcus microti
  misc_feature (1)..(341): tr|A0A0D6XSF9|A0A0D6XSF9_9STAP S-adenosylmethionine:tRN A ribosyltransferase-isomerase OS=Staphylococcus microt i OX=569857 GN=queA PE=3 SV=1
MNIEQFDYDLPESLIAQTPLKDRDTSRLLHLDKQTGAVEDLHFKDILRFFQPGDTLVLNDTKVMPARLIGLKTETNAQVEMLMLNQVEGNDWEVLLKPAKRIKEGQSLSFGDGKIIATCIETREQGGRIMRLQYEGILQERLDELGEMPLPPYIKERLEDRDRYQTVYAKETGSAAAPTAGLHFTDALLEEVQKMGVRIAFVTLHVGLGTFRPVSVDNIDDHEMHSEYYMMSQETADLLNQTKAEGHRIISVGTTSTRTLETIRRDHDAFVATSGWTDIFIYPGFEFKAVDGLITNFHLPKSTLVMLVSAFSSRQFVLNAYEHAVKASYRFFSFGDAMIII

SEQ ID NO: 72466 - protein, 341 aa, Staphylococcus muscae
  misc_feature (1)..(341): tr|A0A240C3R6|A0A240C3R6_9STAP S-adenosylmethionine:tRN A ribosyltransferase-isomerase OS=Staphylococcus muscae OX=1294 GN=queA PE=3 SV=1
MNIEAFDYDLPESLIAQTPLKDRDTSRLLHLDRQTGAVEDLHFKDITKFFKPGDTLVLNDTKVMPARLFGVKVETNAQVEMLMLNQVEGNDWEVLLKPAKRIKVGQSLSFGDGKIIATCIDTLDQGGRIMRLEYEGILQERLDELGEMPLPPYIKERLDDKDRYQTVYAKETGSAAAPTAGLHFTDSLLQDLQAMGVRLAFVTLHVGLGTFRPVSVDNIDDHEMHSEYYMMSQETADLLNQTKAEGHRIISVGTTSTRTLETIRRDHTQFVATSGWTDIFIYPGFEFKAVDGQITNFHLPKSTLVMLVSAFSTRQFVLDAYKHAVKESYRFFSFGDAMIII

SEQ ID NO: 72467 - protein, 341 aa, Staphylococcus nepalensis
  misc_feature (1)..(341): tr|A0A2T4SAF3|A0A2T4SAF3_9STAP S-adenosylmethionine:tRN A ribosyltransferase-isomerase OS=Staphylococcus nepale nsis OX=214473 GN=queA PE=3 SV=1
MDIESFDYHLPESLIAQTPLKNRDESRLLVLGRKTGDIEHKYFKNVIDYLQAGDTLVLTDTRVMPARLFGLKEETGAKVEMLMLTQLEDDDWEVLLKPAKRIKTGDKLSFGDGKIIAECVEELNQGGRIMRLDYDGILQERLDELGEMPLPPYIKERLDDPDRYQTVYAKASGSAAAPTAGLHFTDELLEQIKAKGVNITFITLHVGLGTFRPVSVENIDDHEMHSEYYQMDQETADLLNETKAKGHRVISVGTTSTRTLETIRASHNEFVADSGWTDIFIFPGFEFKAIDGLITNFHLPKSTLVMLVSAFSTKDYILNAYHQAVKSEYRFFSFGDAMLII

SEQ ID NO: 72468 - protein, 162 aa, Staphylococcus nepalensis
  misc_feature (1)..(162): tr|A0A2T4S7A8|A0A2T4S7A8_9STAP S-adenosylmethionine:tRN A ribosyltransferase-isomerase (Fragment) OS=Staphyloco ccus nepalensis OX=214473 GN=BUZ61_13605 PE=3 SV=1
AGLHFTDELLEQLKAKQVNLAFVTLHVGLGTFRPVSVDNIDDHKMHSEYYQMSQATADLLNETKQKGHRIISVGTTSTRTLETIRRDHDQFTAQSGWTDIFIYPGFEFKAIDALITNFHLPKSTLVMLVSAFSSKQYILNAYQTAVEMKYRFFSFGDAMLII

SEQ ID NO: 72469 - protein, 341 aa, Staphylococcus pasteuri
  misc_feature (1)..(341): tr|A0A518NUN5|A0A518NUN5_9STAP S-adenosylmethionine:tRN A ribosyltransferase-isomerase OS=Staphylococcus pasteu ri OX=45972 GN=queA PE=3 SV=1
MNIEDFDYDLPESLIAQTPLKNRDQSRLLVLDRNTGDMEHLHFRDVINYFEPGDTLVLNDTRVMPARLFGLKEETGAKVEMLMLTQIEDNDWEVLLKPAKRIKVGNKLNFGEGKIIAECIEELEQGGRIMRLHYDGILQERLDELGEMPLPPYIKERIDDPNRYQTVYAKESGSAAAPTAGLHFTDSLLEAIKEKGVNIAFITLHVGLGTFRPVSVDNIDDHEMHSEYYQMTQQTADLLNETKAKGHRIISVGTTSTRTLETIRRDHSEFVEKSGWTDIFIYPGFEYKAIDGLITNFHLPKSTLVMLVSAFSSRQYILNAYKKAVEMEYRFFSFGDAMLII

SEQ ID NO: 72470 - protein, 341 aa, Staphylococcus pasteuri
  misc_feature (1)..(341): tr|A0A269XLC1|A0A269XLC1_9STAP S-adenosylmethionine:tRN A ribosyltransferase-isomerase OS=Staphylococcus pasteu ri OX=45972 GN=queA PE=3 SV=1
MNIEDFDYDLPESLIAQTPLKNRDQSRLLVLNRKNGNMEHLHFKDVINYFNPGDTLVLNDTRVMPARLFGLKEETGAKVEMLMLTQIEGNDWEVLLKPAKRIKVGNQLNFGDGKIIAECIEELDQGGRIMRLHYEGILQERLDELGEMPLPPYIKERLDDPDRYQTVYAKESGSAAAPTAGLHFTDELLESIKAKGVNIAFITLHVGLGTFRPVSVDNIDDHEMHSEYYQMMQETADLLNKTRKNGHRIISVGTTSTRTLETIRRDHSEFVEKSGWTDIFIYPGFEYKAIDGLITNFHLPKSTLVMLVSAFSSREYILNAYQKAVEMEYRFFSFGDAMLII

SEQ ID NO: 72471 - protein, 341 aa, Staphylococcus petrasii
  misc_feature (1)..(341): tr|A0A5F1B4F1|A0A5F1B4F1_9STAP S-adenosylmethionine:tRN A ribosyltransferase-isomerase OS=Staphylococcus petras ii subsp. petrasii OX=1276937 GN=queA PE=3 SV=1
MNVEEFDYHLPESLIAQTPLKDRDHSRLLVLGRESGEMEHKHFTDVIDYFEAGDTLVLNDTRVMPARLFGLKEETGAKVEMLMLTRIEDNDWEVLLKPAKRIKVGNKLSFGEGKIVAECIKELDQGGRIMRLHYDGILEERLDELGEMPLPPYIKERLDDPDRYQTVYARESGSAAAPTAGLHFTDELLEKIKAKGVNITFITLHVGLGTFRPVSVENIDDHEMHSEYYQMTQETADLLNETKAKGHRIISVGTTSTRTLETIRRDYDQFVAVSGWTDIFIYPGFEYKAIDGLITNFHLPKSTLVMLVSAFSSKKNILNAYNKAVELEYRFFSFGDAMLII

SEQ ID NO: 72472 - protein, 341 aa, Staphylococcus petrasii
  misc_feature (1)..(341): tr|A0A380G1Y5|A0A380G1Y5_9STAP S-adenosylmethionine:tRN A ribosyltransferase-isomerase OS=Staphylococcus petras ii subsp. jettensis OX=1077965 GN=queA PE=3 SV=1
MNVEEFDYHLPESLIAQTPLKDRDHSRLLVLGRESGEMEHKHFTDVIDYFEAGDTLVLNDTRVMPARLFGLKEETGAKVEMLMLTRIEDNDWEVLLKPAKRIKVGNKLSFGEGKIVAECIKELDQGGRIMRLHYDGILEERLDELGEMPLPPYIKERLDDPDRYQTVYARESGSAAAPTAGLHFTDELLEKIKAKGVNIAFITLHVGLGTFRPVSVENIDDHEMHSEYYQMTQETADLLNETKAKGHRIISVGTTSTRTLETIRRDYDQFVAVSGWTDIFIYPGFEYKAIDGLITNFHLPKSTLVMLVSAFSSKKNILNAYNKAVELEYRFFSFGDAMLII

SEQ ID NO: 72473 - protein, 341 aa, Staphylococcus pettenkoferi
  misc_feature (1)..(341): tr|A0A2N6QJ66|A0A2N6QJ66_9STAP S-adenosylmethionine:tRN A ribosyltransferase-isomerase OS=Staphylococcus petten koferi OX=170573 GN=queA PE=3 SV=1
MNIEEFDYDLPESLIAQTPLKHRDQSRLLVMGRESGKTTHQHFADVIDYFKEGDTLVLNDTRVMPARLFGIKEETGAKVEMLMLTHLEDNDWEVLLKPAKRIKVGQRLSFGDGKIVAECIEELDQGGRIMRLHYEGILQERLDELGEMPLPPYIKERLDDPDRYQTVYAKESGSAAAPTAGLHFTDELLEAIRAKGIRIVFITLHVGLGTFRPVSVDNIDDHEMHSEYYQISEDTAQLLNETRREGGRIISVGTTTTRTLETVRSQHDHFVAASGWTDIFIYPGYEFKAIDGLITNFHLPKSTLVMLVSAFSTRENVLNAYREAVERQYRFFSFGDAMLII

SEQ ID NO: 72474 - protein, 341 aa, Staphylococcus piscifermentans
  misc_feature (1)..(341): tr|A0A239U0I3|A0A239U0I3_9STAP S-adenosylmethionine:tRN A ribosyltransferase-isomerase OS=Staphylococcus piscif ermentans OX=70258 GN=queA PE=3 SV=1
MNIEEFDYDLPEELIAQTPLKDRDTSRLLVLNRENGEIDHRHFKDVIEYINPGDTLVLNDTKVMPARLFGVKQETKAKVEMLMLTQIEGDDWEVLLKPAKRIKVGQKLSFGEGKIEALCIKELDQGGRIMRLSYDGILQERLDELGEMPLPPYIKERLEDQDRYQTVYAKATGSAAAPTAGLHFTDELLDELKAKGVQLAFITLHVGLGTFRPVSVENIDDHEMHSEYYQMTQETADLLNQTKENGKRIISVGTTSTRTLETIRRDYDEFKAVSGWTDIFIYPGFEFKAIDGLITNFHLPKSTLVMLVSAFSSRQYILNAYRTAVEMKYRFFSFGDAMLII

SEQ ID NO: 72475 - protein, 341 aa, Staphylococcus piscifermentans; identical to SEQ ID NO: 72444
  misc_feature (1)..(341): tr|A0A3S0K251|A0A3S0K251_9STAP S-adenosylmethionine:tRN A ribosyltransferase-isomerase OS=Staphylococcus piscif ermentans OX=70258 GN=queA PE=3 SV=1

SEQ ID NO: 72476 - protein, 341 aa, Staphylococcus pseudintermedius
  misc_feature (1)..(341): tr|A0A317ZB77|A0A317ZB77_STAPS S-adenosylmethionine:tRN A ribosyltransferase-isomerase OS=Staphylococcus pseudi ntermedius OX=283734 GN=queA PE=3 SV=1
MNIEEFDYVLPESLIAQTPLKQRDQSRLLYLNRDTGETEDLHFKDITRFFQPGDTLVLNDTRVMPARLFGIKEETNAKVEMLMLTQIEGDDWEVLLKPAKRIKLGQTLSFGEGKIKATCIKELDQGGRIMRLSYEGILQERLDELSEMPLPPYIKERLDEKERYQTVYAKAAGSAAAPTAGLHFTDALLDDIRRQGVQIAFITLHVGLGTFRPVSVDHIDDHEMHSEYYQMSQETADILNQTKAAGHRIISVGTTSTRTLETIRSQFDTFQATSGWTNIFIYPGFEFKAIDGLITNFHLPKSTLVMLVSAFSSRQFVLSAYHHAVAEKYRFFSFGDAMIII

SEQ ID NO: 72477 - protein, 341 aa, Staphylococcus pseudintermedius
  misc_feature (1)..(341): tr|A0A166PV05|A0A166PV05_STAPS S-adenosylmethionine:tRN A ribosyltransferase-isomerase OS=Staphylococcus pseudi ntermedius OX=283734 GN=queA PE=3 SV=1
MNIEEFDYVLPESLIAQTPLKQRDQSRLLYLNRDTGETEDLHFKDITRFFQPGDTLVLNDTRVMPARLFGIKEETNAKVEMLMLTQIEGDDWEVLLKPAKRIKLGQTLSFGEGKIKATCIKELDQGGRIMRLSYEGILQERLDELGEMPLPPYIKERLDEKERYQTVYAKAAGSAAAPTAGLHFTDALLDDIRRQGVQIAFITLHVGLGTFRPVSVDHIDDHEMHSEYYQMSQETADILNQTKAAGHRIISVGTTSTRTLETIRSQFDTFQATSGWTNIFIYPGFEFKAIDGLITNFHLPKSTLVMLVSAFSSRQFVLSAYHHAVAEKYRFFSFGDAMIII

SEQ ID NO: 72478 - protein, 341 aa, Staphylococcus rostri
  misc_feature (1)..(341): tr|A0A2K3YHT7|A0A2K3YHT7_9STAP S-adenosylmethionine:tRN A ribosyltransferase-isomerase OS=Staphylococcus rostri OX=522262 GN=queA PE=3 SV=1
MNIEEFDYDLPESLIAQTPLKNRDTSRLLHLDRETGAVEDLHFKDIVRFFKPGDTLVLNDTKVMPARLIGLKTETNAQVEMLMLNQVEGDDWEVLLKPAKRIKEGQSLSFGDGKIIATCIETRDQGGRIMRLQYDGILQERLDELGEMPLPPYIKERLADKDRYQTVYAKETGSAAAPTAGLHFTDELLAEVQNMGVRLAFVTLHVGLGTFRPVSVDNIDDHEMHSEFYMMSQETADLLNQTQADGHRIISVGTTSTRTLETIRRDNDKFVATSGWTDIFIYPGFEFKAVDGLITNFHLPKSTLVMLVSAFSTRQYVLNAYAHAVEASYRFFSFGDAMIII

SEQ ID NO: 72479 - protein, 341 aa, Staphylococcus saccharolyticus
  misc_feature (1)..(341): tr|A0A380H2N3|A0A380H2N3_9STAP S-adenosylmethionine:tRN A ribosyltransferase-isomerase OS=Staphylococcus saccha rolyticus OX=33028 GN=queA PE=3 SV=1
MNIEEFDYHLPESLIAQTPLKNRDQSRLLVLNKQNGTMEHLYFKDVIQYLNPGDTLVLNDTRVMPALLFGLKEETGAKVEMLMLAQIEGNDWEVLLKPAKRVKVGHRLNFGDGNITAECIKELEHGGRVMRLHYDGILQERLDELGEMPLPPYIKERLDDPDRYQTVYAKESGSAAAPTAGLHFTDDLLKQIKDKGVNIAFITLHVGLGTFRPVSVDNIDDHEMHSEYYQMTKKTADLLNQTRANGKRIISVGTTSTRTLETIRRDHSRFLEKSGWTDIFIYPGFKFKAIDGLITNFHLPKSTLVMLVSAFSTRDYILNAYQTAVQMEYRFFSFGDAMLII

SEQ ID NO: 72480 - protein, 341 aa, Staphylococcus saccharolyticus
  misc_feature (1)..(341): tr|A0A431YL82|A0A431YL82_9STAP S-adenosylmethionine:tRN A ribosyltransferase-isomerase OS=Staphylococcus saccha rolyticus OX=33028 GN=queA PE=3 SV=1
MNIEDFDYDLPESLIAQTPLKNRDQSRLLVLDRNTGDMEHLHFRDVINYFEPGDTLVLNDTRVMPARLFGLKEETGAKVEMLMLTQIEDNDWEVLLKPAKRIKVGNKLNFGEGKIIAECIEELEQGGRIMRLHYDGILQERLDELGEMPLPPYIKERLDDPNRYQTVYAKESGSAAAPTAGLHFTDSLLEAIKEKGVNIAFITLHVGLGTFRPVSVDNIDDHEMHSEYYQMTQQTADLLNETKAKGHRIISVGTTSTRTLETIRRDHSEFVEKSGWTDIFIYPGFEYKAIDGLITNFHLPKSTLVMLVSAFSSRQYILNAYKKAVEMEYRFFSFGDAMLII

SEQ ID NO: 72481 - protein, 341 aa, Staphylococcus saprophyticus
  misc_feature (1)..(341): sp|Q49Y78|QUEA_STAS1 S-adenosylmethionine:tRNA ribosylt ransferase-isomerase OS=Staphylococcus saprophyticus su bsp. saprophyticus (strain ATCC 15305 / DSM 20229 / NCI MB 8711 / NCTC 7292 / S-41) OX=342451 GN=queA PE
MDIEAFDYHLPEALIAQTPLKNRDESRLLILGRQSGYIEHKHFKDVTDYLNEGDTLVLNDTRVMPARLFGMKEETGAKVEMLMLTQIEGNDWEVLLKPAKRIKVGNKLTFGEGKIIAECIEELDQGGRIMRLHYDGILQERLDELGEMPLPPYIKERLDDQERYQTVYAKASGSAAAPTAGLHFTDELLERIKAQGVNIAFITLHVGLGTFRPVSVDNIDDHEMHSEYYQMDEATANLLNSTRDNGNRIISVGTTSTRTLETIMQSSDRFVAKSGWTDIFIFPGFNFKAIDGLITNFHLPKSTLVMLVSAFSSRDYIINAYNQAVASEYRFFSFGDAMLII

SEQ ID NO: 72482 - protein, 341 aa, Staphylococcus saprophyticus
  misc_feature (1)..(341): tr|A0A1D4Q4M7|A0A1D4Q4M7_STASA S-adenosylmethionine:tRN A ribosyltransferase-isomerase OS=Staphylococcus saprop hyticus OX=29385 GN=queA PE=3 SV=1
MDIEAFDYHLPESLIAQTPLKNRDESKLLILGRQSGEIEHKHFKNIIDYFEAGDTLVLNDTRVMPARLFGLKTETGAKVEMLMLTHIEENDWEVLLKPAKRIKVGNKLTFGEGKIVAECVKELDQGGRIMRLHYDGILQERLDELGEMPLPPYIKERLDDPDRYQTVYAKATGSAAAPTAGLHFTDALLDEIKAKGVNIAFITLHVGLGTFRPVSVDNIDDHEMHSEYYQMNEATAELLNQTKANGHRIISVGTTSTRTLETIMQTNEQFVAQSGWTDIFIFPGFTFKAIDGLITNFHLPKSTLVMLVSAFSSRDFILNAYNQAVSSKYRFFSFGDAMLII

SEQ ID NO: 72483 - protein, 341 aa, Staphylococcus schleiferi
  misc_feature (1)..(341): tr|A0A3S0LTR9|A0A3S0LTR9_9STAP S-adenosylmethionine:tRN A ribosyltransferase-isomerase OS=Staphylococcus schlei feri subsp. schleiferi OX=74707 GN=queA PE=3 SV=1
MNIEDFDFDLPESLIAQTPLLDRESSRLLKCNKATGELEDLTFKEVVNQLSPGDCLVLNDTKVMPARLFGIKEETGAKVEMLMLTQQEDNEWEVLIKPAKRIRVGQSVSFGEGKIIATCVKELEQGGRIMKLSYEGILQERLDELGEMPLPPYIKERLDDQDRYQTVYAKAVGSAAAPTAGLHFTEHLLQEIADKGVHIAFITLHVGLGTFRPVSVDNIDDHEMHSEYYQMTAETADLLNRVKASGHKIISVGTTSTRTLETIRSKNDQFVEESGWTDIFIYPGYEFKAIDGLITNFHLPKSTLIMLVSALSTREHILNAYKHAVEEKYRFFSFGDAMILI

SEQ ID NO: 72484 - protein, 341 aa, Staphylococcus schleiferi
  misc_feature (1)..(341): tr|A0A0K0ZU71|A0A0K0ZU71_9STAP S-adenosylmethionine:tRN A ribosyltransferase-isomerase OS=Staphylococcus schlei feri OX=1295 GN=queA PE=3 SV=1
MNIEEFDYELPESLIAQTPLKQRDQSRLLYLNRRTGETEDLHFKDITRFFEQGDTLVLNDTKVMPARLFGVKEETRAKVEMLMLTQIEGDDWEVLLKPAKRIKVGQTLSFGDGKIIATCMKELDQGGRIMRLHYDGILQERLDELGEMPLPPYIKERLDEKDRYQTVYAKASGSAAAPTAGLHFTDQLLQQIRENGVNIAFITLHVGLGTFRPVSVENIDDHEMHSEYYQMSQETADLLNKTKAKGHRIISVGTTSTRTLETIRQNHTQFVASSGWTDIFIYPGFEFKAIDGLITNFHLPKSTLVMLVSAFSSRQFVLSAYRHAVAEKYRFFSFGDAMIII

SEQ ID NO: 72485 - protein, 341 aa, Staphylococcus schweitzeri
  misc_feature (1)..(341): tr|A0A2K4AGQ0|A0A2K4AGQ0_9STAP S-adenosylmethionine:tRN A ribosyltransferase-isomerase OS=Staphylococcus schwei tzeri OX=1654388 GN=queA PE=3 SV=1
MNIEEFDYDLPESLIAQTPLKDRDQSRLLVMDKETGEMKHLHFKDIIEYFSSGDTLVLNDTRVMPARLFGLKEETGAKVEMLMLTQIEGNDWEVLLKPAKRIKVGNKLSFGNGKIVAECVKEMDQGGRIMRLHYEGILQERLDELGEMPLPPYIKERLDDPDRYQTVYAKESGSAAAPTAGLHFTDELLAEIKNKGVNIAFVTLHVGLGTFRPVSVNDVNDHEMHSEYYQMTQETADLLNDTKSKGHRIISVGTTSTRTLETIRRDHNQFVATSGWTNIFIYPGFEFKAIDGQITNFHLPKSTLVMLVSAFSTRENVLNAYRTAVNLEYRFFSFGDAMLII

SEQ ID NO: 72486 - protein, 341 aa, Staphylococcus sciuri
  misc_feature (1)..(341): tr|A0A431YBI2|A0A431YBI2_STASR S-adenosylmethionine:tRN A ribosyltransferase-isomerase OS=Staphylococcus sciuri subsp. rodentium OX=147469 GN=queA PE=3 SV=1
MNIEDFNYHLPENLIAQTPLKERDTSKLLYMNRKTGETKDLHFKDVIQFLEPGDTLVLNDTKVMPARLFGLKKETNAKVEMLMLTNIEGDDWEVLIKPAKRIKVGQQVSFGDDKIVATCVKELDQGGRIMRLQYDGILQERLDELGEMPLPPYIKERLDDRDRYQTVYAKETGSAAAPTAGLHFTDELLNVVREKGVNIAFVTLHVGLGTFRPVSVDNVNDHEMHSEYYTVTKETAKLLNDTKSKGKRIISVGTTSTRTLETVVRDYGTFTQASGWTNIFIYPGFEFKAIDGLITNFHLPKSTLVMLVSAFSSTQFVINAYTHAVNEQYRFFSFGDAMIIL

SEQ ID NO: 72487 - protein, 341 aa, Staphylococcus sciuri
  misc_feature (1)..(341): tr|A0A2T4RX36|A0A2T4RX36_STASC S-adenosylmethionine:tRN A ribosyltransferase-isomerase OS=Staphylococcus sciuri OX=1296 GN=queA PE=3 SV=1
MNIEDFDFDLPESLIAQTPLLDRESSRLLKCNKATGELEDLTFKEVVNQLSPGDCLVLNDTKVMPARLFGLKEETGAKVEMLMLTQQEDNEWEVLIKPAKRIRVGQSVSFGEGKIIATCIKELDQGGRIMKLSYEGILQERLDELGEMPLPPYIKERLDDQDRYQTVYAKAVGSAAAPTAGLHFTEHLLQEIADKGVHIAFITLHVGLGTFRPVSVDNIDDHEMHSEYYQMTAETAELLNCVKASGHKIISVGTTSTRTLETIRSKNDQFVEESGWTDIFIYPGYEFKAIDGLITNFHLPKSTLIMLVSALSTREHILNAYKHAVEEKYRFFSFGDAMILI

SEQ ID NO: 72488 - protein, 341 aa, Staphylococcus simiae
  misc_feature (1)..(341): tr|G5JHN8|G5JHN8_9STAP S-adenosylmethionine:tRNA ribosy ltransferase-isomerase OS=Staphylococcus simiae CCM 721 3 = CCUG 51256 OX=911238 GN=queA PE=3 SV=1
MNIEEFDYDLPESLIAQTPLKDRDHSRLLVMDRHSGELTHSHFKDVIDYFNPGDTLVLNDTRVMPARLFGLKEETGAKVEMLMLTQIEGNDWEVLLKPAKRIKVGNKLTFGEGKIIAECIKELDQGGRIMRLYYDGILQERLDELGEMPLPPYIKERLDDPDRYQTVYAKESGSAAAPTAGLHFTDELLTQIREKGVNIAFITLHVGLGTFRPVSVNNIDDHEMHSEYYQMSQATADLLNETKANHHRIISVGTTSTRTLETIRRDHDQFVATSGWTDIFIYPGFQFKAIDGQITNFHLPKSTLVMLVSAFSSRQHVLNAYRSAVEQQYRFFSFGDAMLII

SEQ ID NO: 72489 - protein, 341 aa, Staphylococcus simulans; identical to SEQ ID NO: 72455
  misc_feature (1)..(341): tr|A0A2X3SDL6|A0A2X3SDL6_STASI S-adenosylmethionine:tRN A ribosyltransferase-isomerase OS=Staphylococcus simula ns OX=1286 GN=queA PE=3 SV=1

SEQ ID NO: 72490 - protein, 347 aa, Staphylococcus simulans
  misc_feature (1)..(347): tr|A0A133QDU4|A0A133QDU4_STASI S-adenosylmethionine:tRN A ribosyltransferase-isomerase OS=Staphylococcus simula ns OX=1286 GN=queA PE=3 SV=1
MERGTILNIEEFDYHLPEELIAQTPLKDRDTSRLLVLNRKNGDIEHRHFKDIIEYFNPGDTLVLNDTKVMPARLFGLKEDTKAKVEMLMLTQIEGNDWEVLLKPAKRIKVGQKLSFGEGKIIAECIKELEQGGRIMRLYYEGILQERLDELGEMPLPPYIKERLDDPDRYQTVYAKETGSAAAPTAGLHFTDELLEQLKVKQVNLAFVTLHVGLGTFRPVSVDNIDDHKMHSEYYQMSQATADLLNETKQKGHRIISVGTTSTRTLETIRRDHDQFTAQSGWTDIFIYPGFEFKAIDALITNFHLPKSTLVMLVSAFSSKQYILNAYQTAVEMKYRFFSFGDAMLII

SEQ ID NO: 72491 - protein, 341 aa, Staphylococcus sp.
  misc_feature (1)..(341): tr|R6UMR3|R6UMR3_9STAP S-adenosylmethionine:tRNA ribosy ltransferase-isomerase OS=Staphylococcus sp. CAG:324 OX =1262969 GN=queA PE=3 SV=1
MRVTDFDYDLPEQLIAQTPLDERSSSRLLVLDKKTGEIEHKHFYDIVDYLDNNDVLVLNDTKVLPSRIYGKKIDTNASIELLLLKEIQNNIWEALARPAKRVKVGTKIIFGDGLLMATCLEEKPDGERVFQMEYQGIFLEILEQIGSMPLPPYIHKKLINQDRYQTVYARDYGSAAAPTAGLHFTKELLQKLKKKGVEIVYVTLNVGLGTFRPVTVDKVEEHHMHSETYQMSKETADTLNLAKKLGKRIISVGTTSTRTLESIMKKYGKFVECYESTNIFIYPPYEFMAVDALITNFHLPKSTLIMLVSAFSSKEVILNAYKIAVEKKYRFFSFGDAMFIK

SEQ ID NO: 72492 - protein, 341 aa, Staphylococcus sp.
  misc_feature (1)..(341): tr|A0A1J4E5H6|A0A1J4E5H6_9STAP S-adenosylmethionine:tRN A ribosyltransferase-isomerase OS=Staphylococcus sp. HM SC067F07 OX=1715185 GN=queA PE=3 SV=1
MNIEEFDYHLPESLIAQTPLKNRDQSRLLVLQRETGKMTHLHFKDVIDYLNPGDTLVLNDTRVMPARLFGLKEETGAKVEMLMLTQIEGNDWEVLLKPAKRIKVGNRLSFGDGKIVAECIKELEQGGRIMRLHYDGILQERLDELGEMPLPPYIKERLDDPDRYQTVYAKESGSAAAPTAGLHFTDDLLNQIKQKGVNIAFITLHVGLGTFRPVSVDNIDDHEMHSEYYQMTQETADLLNQTKAKGKRIISVGTTSTRTLETIRRDHEQFVEKSGWTDIFIYPGFEYKAIDGLITNFHLPKSTLVMLVSAFSTRENILNAYHKAVEMEYRFFSFGDAMLII

SEQ ID NO: 72493 - protein, 341 aa, Staphylococcus stepanovicii
  misc_feature (1)..(341): tr|A0A239Z1T6|A0A239Z1T6_9STAP S-adenosylmethionine:tRN A ribosyltransferase-isomerase OS=Staphylococcus stepan ovicii OX=643214 GN=queA PE=3 SV=1
MNIEDFDFDLPESLIAQTPLLNRESSRLLKCDKNSGSLEDLTFKDVINQFSSGDCLVLNDTKVMPARLFGLKEETGAKVEMLMLTQLEGDEWEVLIKPAKRIKVNQSVSFGEGKIIATCVKELNQGGRIMKLSYEGILQERLDELGEMPLPPYIKERLDDQNRYQTVYAKEIGSAAAPTAGLHFTESLLNEIASKGVHIAFITLHVGLGTFRPVSVDNIDEHEMHSEYYQMDEETADLLNTVKKNGNKIISVGTTSTRTLETICSKHGEFKADSGWTDIFIYPGYKFKAIDGLITNFHLPKSTLIMLVSALSTREHILNAYQHAVEEKYRFFSFGDAMIII

SEQ ID NO: 72494 - protein, 341 aa, Staphylococcus succinus
  misc_feature (1)..(341): tr|A0A2T4Q5X4|A0A2T4Q5X4_9STAP S-adenosylmethionine:tRN A ribosyltransferase-isomerase OS=Staphylococcus succin us OX=61015 GN=queA PE=3 SV=1
MDIEAFDYHLPERLIAQTPLKNRDESRLLVLGRKSGNIEHKQFKNVIDHLESGDTLVLNDTRVMPARLFGLKEDTGAKVEMLMLTQIEGNDWEVLLKPAKRIRIGNKLSFGEGKIVAECIEELDQGGRIMRLHYEGILQERLDELGEMPLPPYIKERLDDPDRYQTVYAKATGSAAAPTAGLHFTDDLLNQIKAKGVHIAFITLHVGLGTFRPVSVDNIDDHEMHSEYYQMDEDTAKLLNETKANGKRIISVGTTSTRTLETIMQSNDQFMPKSGWTDIFIFPGFEYKAIDGLITNFHLPKSTLVMLVSAFSTRDFIINAYQQAVEAEYRFFSFGDAMLII

SEQ ID NO: 72495 - protein, 341 aa, Staphylococcus vitulinus
  misc_feature (1)..(341): tr|A0A2T4PV68|A0A2T4PV68_9STAP S-adenosylmethionine:tRN A ribosyltransferase-isomerase OS=Staphylococcus vituli nus OX=71237 GN=queA PE=3 SV=1
MNIEDFDFDLPESLIAQTPLLDRESSRLLKCNKKTGELEDLTFKDVVNELMPGDCLVLNDTKVMPARLFGLKEETGAKVEMLMLTQHEDNEWEVLIKPAKRIKVGQSVSFGEGKIIATCVKELEQGGRIMKLSYEGILQERLDELGEMPLPPYIKERLDDQDRYQTVYAKEVGSAAAPTAGLHFTEHLLQEIAAKGIHIAFITLHVGLGTFRPVSVDNIDDHEMHSEYYQMTAETAELLNRVKANGHKIISVGTTSTRTLETIRSKNEKFVEQSGWTDIFIFPGYEFKAIDGLITNFHLPKSTLIMLVSALSTRENILNAYNHAVEEKYRFFSFGDAMILI

SEQ ID NO: 72496 - protein, 341 aa, Staphylococcus warneri
  misc_feature (1)..(341): tr|A0A2V3ZCI1|A0A2V3ZCI1_STAWA S-adenosylmethionine:tRN A ribosyltransferase-isomerase OS=Staphylococcus warner i OX=1292 GN=queA PE=3 SV=1
MNIEDFDYDLPESLIAQTPLKNRDQSRLLVLNRKNGNMEHLHFKDVINYFNPGDTLVLNDTRVMPARLFGLKEETGAKVEMLMLTQIEGNDWEVLLKPAKRIKVGNQLNFGDGKIIAECIEELDQGGRIMRLHYEGILQERLDELGEMPLPPYIKERLDDPDRYQTVYAKESGSAAAPTAGLHFTDELLESIKAKSVNIAFITLHVGLGTFRPVSVDNIDDHEMHSEYYQMTQETADLLNETRKKGHRIISVGTTSTRTLETIRRDHSEFVEKSGWTDIFIYPGFEYKAIDGLITNFHLPKSTLVMLVSAFSSREYILNAYQKAVEMEYRFFSFGDAMLII

SEQ ID NO: 72497 - protein, 341 aa, Staphylococcus warneri
  misc_feature (1)..(341): tr|A0A5F0TZJ7|A0A5F0TZJ7_STAWA S-adenosylmethionine:tRN A ribosyltransferase-isomerase OS=Staphylococcus warner i OX=1292 GN=queA PE=3 SV=1
MNIEDFDYDLPESLIAQTPLKNRDQSRLLVLNRKNGNMEHLHFKDVINYFNPGDTLVLNDTRVMPARLFGLKEETGAKVEMLMLTQIEGNDWEVLLKPAKRIKVGNQLNFGDGKIIAECIEELDQGGRIMRLHYEGILQERLDELGEMPLPPYIKERLDDPDRYQTVYAKESGSAAAPTAGLHFTDELLESIKAKGVNIAFITLHVGLGTFRPVSVDNIDDHEMHSEYYQMTQETADLLNKTRKNGHRIISVGTTSTRTLETIRRDHSEFVEKSGWTDIFIYPGFEYKAIDGLITNFHLPKSTLVMLVSAFSSREYILNAYQKAVEMEYRFFSFGDAMLII

SEQ ID NO: 72498 - protein, 341 aa, Staphylococcus xylosus
  misc_feature (1)..(341): tr|A0A418IKR8|A0A418IKR8_STAXY S-adenosylmethionine:tRN A ribosyltransferase-isomerase OS=Staphylococcus xylosu s OX=1288 GN=queA PE=3 SV=1
MDIEAFDYHLPESLIAQTPLKNRDESRLLILGRQSGNIEHQQFKNVIDYLESGDTLVLNDTRVMPARLFGLKEETGAKVEMLMLTQIEGDDWEVLLKPAKRIKVGNRLTFGEGKIVAECIKELDQGGRIMRLHYDGILQERLDELGEMPLPPYIKERLDDQERYQTVYAKASGSAAAPTAGLHFTDELLANIRDKGINIAFITLHVGLGTFRPVSVDNIDDHEMHSEYYQMDRETAELLNETKDNGHRIISVGTTSTRTLETIMQSNDKFVAQSGWTDIFIFPGFTFKAIDGLITNFHLPKSTLVMLVSAFSSRDNILNAYNQAVSSEYRFFSFGDAMLII

SEQ ID NO: 72499 - protein, 341 aa, Staphylococcus xylosus
  misc_feature (1)..(341): tr|A0A418IEC8|A0A418IEC8_STAXY S-adenosylmethionine:tRN A ribosyltransferase-isomerase OS=Staphylococcus xylosu s OX=1288 GN=queA PE=3 SV=1
MDIEAFDYHLPDSLIAQTPLKNRDESRLLILGRQSGNIEHQHFKDVIDYLESGDTLVLNDTRVMPARLFGLKEETGAKVEMLMLTQIEGNDWEVLLKPAKRIKVGNRLTFGEGKIVAECIKELDQGGRIMRLHYDGILQERLDELGEMPLPPYIKERLDDQDRYQTVYAKASGSAAAPTAGLHFTDELLARIRNKGINIAFITLHVGLGTFRPVSVDNIDDHEMHSEYYQMDQETATLLNETKEKGHRIISVGTTSTRTLETIMQSNEEFVAQSGWTDIFIFPGFTFKAIDGLITNFHLPKSTLVMLVSAFSSRDNILNAYNQAVLSEYRFFSFGDAMLII

SEQ ID NO: 72500 - protein, 361 aa, Stappia indica
  misc_feature (1)..(361): tr|A0A285SCN0|A0A285SCN0_9RHOB S-adenosylmethionine:tRN A ribosyltransferase-isomerase OS=Stappia indica OX=538 381 GN=queA PE=3 SV=1
MRVDDFDFELPPERIALRPARPRDAARLLVVRPNGEPVLDDRGVRDLPMLLEPGDALVFNDTRVIPAQLEGTRTRGEAVARIGATLHLRAGDDRWWAFVRPAKKLVVGDRVQFGGEGKACLLGTLDATVAEKRDTGEILFVFDLSGPMLDEAIAAVGHIPLPPYIAAKRGEDEQDRQDYQTIFAEKDGAVAAPTAGLHFTDELLAALDARGIERHRVTLHVGAGTFLPVKADDTDEHRMHAEWGEVSAETVAALRAVRARGNKVVAIGTTSLRILESAAQGEEGLAPFAGETSIFITPGYRFRAIDALMTNFHLPRSTLFMLVSALSGLDTMRAAYAHAIATGYRFYSYGDGSLLFPKDPA

SEQ ID NO: 72501 - protein, 366 aa, Stappia sp.
  misc_feature (1)..(366): tr|A0A2E6Y7W8|A0A2E6Y7W8_9RHOB S-adenosylmethionine:tRN A ribosyltransferase-isomerase OS=Stappia sp. OX=187090 3 GN=queA PE=3 SV=1
MRVDDFDFDLPAENIALRPARPRDSARLLLVRPGAADEGAGADLSDRSVSDLPGLLEPGDALVFNNTRVIPAQLQGTRTRGDAVARIGATLHLRAGPDRWVAFVRPAKKLAVGDRVRFGGEGEMCLAGTLDATVAEKRETGEILFAFDLSGPALDEAIAAVGHIPLPPYIAAKRGEDALDREDYQTIYAEKDGAVAAPTAGLHFTERLLAALDARGIERHTVTLHVGAGTFLPVKADDTADHKMHAEWGEVSAETAAALRAVRARGNKVVAVGTTSLRILESAAQGEAGLAAFSGETSIFITPGYRFRAIDALMTNFHLPRSTLFMLVSAFSGLDTMRAAYAHAIASGYRFYSYGDSSLLFPTVTE

SEQ ID NO: 72502 - protein, 362 aa, Stappia sp.
  misc_feature (1)..(362): tr|A0A1H2FJW4|A0A1H2FJW4_9RHOB S-adenosylmethionine:tRN A ribosyltransferase-isomerase OS=Stappia sp. ES.058 OX =1881061 GN=queA PE=3 SV=1
MRVDDFDFELPPERIALRPARPRDAARMLVVRPGTEPLLDDRGVRDLPALLSPGDALVFNDTKVIPAQLEGTRTRGQAVARIGATLHLKAGDDRWWAFVRPAKKLVPGDRICFGSGKGETCLFGTLDATVAEKRDTGEVLLAFDFAGPDLDQAIAAVGHIPLPPYIAQKRGEDAADRDDYQTIYAEKDGAVAAPTAGLHFTPELMAAIDARGIERHLVTLHVGAGTFLPVKADDTDDHRMHAERGEISGETAEALRNVRARGNRVVAVGTTSLRILESAAQGEGGLSAFSGETSIFITPGYRFHVVDALMTNFHLPRSTLFMLVSALSGLDEMRAAYAHAITQEYRFYSYGDASLLFPKDAP

SEQ ID NO: 72503 - protein, 183 aa, Starkeya novella
  misc_feature (1)..(183): tr|A0A2W5SB84|A0A2W5SB84_STANO S-adenosylmethionine:tRN A ribosyltransferase-isomerase (Fragment) OS=Starkeya n ovella OX=921 GN=DI549_18315 PE=3 SV=1
YQTMFASHEGSVAAPTAGLHFTPELIARLEARGVETHRVTLHVGAGTFLPVKADDTSDHRMHAEWGEVSPETADALNAVKARGGRIVTVGTTATRLIESAASEEGLLAAWRGETDIFITPGSRFRFIDGMLTNFHLPRSTLVMLVAAFIGHDVQKRAYAHAIATGYRFYSYGDACLLLPQARS

SEQ ID NO: 72504 - protein, 361 aa, Starkeya novella
  misc_feature (1)..(361): tr|A0A2W5KM83|A0A2W5KM83_STANO S-adenosylmethionine:tRN A ribosyltransferase-isomerase OS=Starkeya novella OX=9 21 GN=queA PE=3 SV=1
MDVSLFDFDLPEELIALRPAVPRDAARLLVVRPGGSPELEDRVVSDLPDLLRAGDAMVVNATRVIPARLRGRRLRGEASAKVEIMLHQRLDGARWKAFARPAKKLAAGDRVEIGGGGDACLLGRLDATVEARGGEGEVTLRFDLAGPDLDAAIAAAGELPLPPYIAGKRATDGRDAQDYQTMFAREPGAVAAPTAGLHFTPALSEALAARGVGRYETVLHVGAGTFLPVKAEDTDDHRMHSETGFLDAATAEALNAVRDCGGRIVAVGTTSARLLESAAGPDGRLAPFSGETDIFLTPGCRFRAVDALMTNFHLPRSTLMMLISAFAGLDVVKRAYAHAVKERYRFYSYGDACLFLPGEGR

SEQ ID NO: 72505 - protein, 364 aa, Starkeya sp.
  misc_feature (1)..(364): tr|A0A556PB01|A0A556PB01_9RHIZ S-adenosylmethionine:tRN A ribosyltransferase-isomerase OS=Starkeya sp. 3C OX=25 97768 GN=queA PE=3 SV=1
MRVDLFDFELPPERIALRPVSPRDAARMLVVRPGDAPELTDAHVFDLPALLRPGDALVVNDTRVVPARLDGIRRRAASQGEGVRVEAMLHKRVAPDAWLALARPGKRLAPGDRIAFGGEGNTCLLGSLDATVEEKGEGGEVTLRFDLSGAALDEAVAAVGHIPLPPYIAAKRPDDEQDRSDYQTMFAAYEGSVAAPTAGLHFTPDLIHRLEERGVETHRVTLHVGAGTFLPVKADDTTDHRMHAEWGEVSAATAEALNTVKARGGRVVTVGTTATRLIESAASDDGRLAAWRGETDIFITPGYRFRFIDGMLTNFHLPRSTLVMLVAAFIGHESQKRAYAHAIANGYRFYSYGDACLLLPKARA

SEQ ID NO: 72506 - protein, 351 aa, Stella humosa
  misc_feature (1)..(351): tr|A0A3N1MCF2|A0A3N1MCF2_9PROT S-adenosylmethionine:tRN A ribosyltransferase-isomerase OS=Stella humosa OX=94 G N=queA PE=3 SV=1
MPSDIAIADLLTADFDFDLPADRIAQAPARPRDAARLLAIGSTLADHGVRDLPRLLRPCDLLVSNDTRVIPARLTGQRGAAAVEVTLHLQQAPDRWRVFARPAKRLRPGDEVVFAADLSAEVIDKGDGGEVGLHFNVGGADLLAALERHGRMPLPPYIRGGAEGEGDRADYQTLFARREGAVAAPTAGLHFTPDLLEALDAAGIARTVVTLHVGAGTFLPVKADRARDHRMHAEWGEVGQETVDAIAACRARGGRVVAVGTTSLRLLETAAAGGGLVRPFSGTTDIFILPGHRFQVVDLLMTNFHLPRSTLFMLVSALAGLERMKTAYTHAIGSGYRFYSYGDACLIERAA

SEQ ID NO: 72507 - protein, 344 aa, Stenotrophomonas acidaminiphila
  misc_feature (1)..(344): tr|A0A2L0SL23|A0A2L0SL23_9GAMM S-adenosylmethionine:tRN A ribosyltransferase-isomerase OS=Stenotrophomonas acid aminiphila OX=128780 GN=queA PE=3 SV=1
MKKSDFHYDLPEELIAQAPLAERSASRLLVVPPAPAAYDDRHVRDLPELLQPGDLLVFNDTRVIPARLFGHKASGGRVEILIERLLGGQQARAQVGASKSPKPGSRIQLDAGGEAEVLGRDGEFYLLRFDLPEPLEAWLAHAGRLPLPPYIQREPGADDRERYQTVFAREVGAVAAPTAGLHFDDALLQRLRARGVAFGHITLHVGAGTFQPVRVDDLSQHVMHREWLNVGAGLVQQVRRTRAAGGRVIGVGTTVVRALESAMREGELQPFAGETQIFITPGYRIRSVDAMVTNFHLPESTLLMMISAFAGRQRVFDAYAHAIASRYRFFSYGDAMLLFPQPDA

SEQ ID NO: 72508 - protein, 344 aa, Stenotrophomonas acidaminiphila
  misc_feature (1)..(344): tr|A0A0R0E4H2|A0A0R0E4H2_9GAMM S-adenosylmethionine:tRN A ribosyltransferase-isomerase OS=Stenotrophomonas acid aminiphila OX=128780 GN=queA PE=3 SV=1
MKKSDFHYDLPEELIAQAPLAERSASRLLVVPPAPAALEDRHVRDLPELLQPGDLLVFNDTRVIPARLFGHKASGGRVEILIERLLGGQQARAQVGASKSPKPGSRIQLDAGGEAEVLGRDGEFYLLRFDVPESLESWLVHAGRLPLPPYIHREPGADDRERYQTVFARQVGAVAAPTAGLHFDEALLERLRARGVGFGHITLHVGAGTFQPVRVDDLSRHVMHREWLNVGAELVQQVRRTRAAGGRVIGVGTTVVRALESAMREGELHPFAGETQIFITPGYRIRSVDAMVTNFHLPESTLLMMISAFAGKQRVFDAYAHAIAGRYRFFSYGDAMLLFPQPDA

SEQ ID NO: 72509 - protein, 354 aa, Stenotrophomonas chelatiphaga
  misc_feature (1)..(354): tr|A0A0R0CUR5|A0A0R0CUR5_9GAMM S-adenosylmethionine:tRN A ribosyltransferase-isomerase OS=Stenotrophomonas chel atiphaga OX=517011 GN=queA PE=3 SV=1
MRAIADLLLRVPLKKSDFHYDLPAELIAQAPLPERSASRLLLVPPAPGALQDAHVRDLSALLREGDLLVFNDTRVIPARLFGQKATGGRVEILIERLLGAQQARAQVGASKTPKPGGRIALDAGGEVEVLGRDGEFYVLQFHVPEPLEQWLLHAGRLPLPPYIQREPGLDDRERYQTVFAREIGAVAAPTAGLHFDDALLAALQAKGVGFGHVTLHVGAGTFQPVRADDLKDHVMHREWLNVGAELVQQVRRTREAGGRVIGVGTTVVRALESAMRDGELLPFAGETQIFITPGYRIRSVDAMVTNFHLPESTLLMMISAFAGKERVFEAYRHAIEQRYRFFSYGDAMLLFPQG

SEQ ID NO: 72510 - protein, 354 aa, Stenotrophomonas daejeonensis
  misc_feature (1)..(354): tr|A0A0R0E283|A0A0R0E283_9GAMM S-adenosylmethionine:tRN A ribosyltransferase-isomerase OS=Stenotrophomonas daej eonensis OX=659018 GN=queA PE=3 SV=1
MKKSDFNYDLPAELIAQAPLPERSASRLLLVPPAPAAFADRHVRDLPDLLQPGDLLVFNDTRVIPARLFGQKASGGRVEILIERLLGGQQARAQVGASKSPKPGSRIALDAGGEVEVLGRDGEFYLLRFDIPEPLESWLVHAGRLPLPPYIQREPGADDRERYQTVFARQVGAVAAPTAGLHFDEPLLERLRGRGVQFGHITLHVGAGTFQPVRVDDLSQHVMHREWLNVGAELVQQVRRTRAAGGRVIGVGTTVVRALESAMRDGELHPYAGETQIFITPGYRIRSVDAMVTNFHLPESTLLMMISAFAGRERVFEAYAHAIAERYRFFSYGDAMLLWSREGTGAPTDAPIHS

SEQ ID NO: 72511 - protein, 351 aa, Stenotrophomonas ginsengisoli
  misc_feature (1)..(351): tr|A0A0R0DKD2|A0A0R0DKD2_9GAMM S-adenosylmethionine:tRN A ribosyltransferase-isomerase OS=Stenotrophomonas gins engisoli OX=336566 GN=queA PE=3 SV=1
MPALKKSDFDYHLPSELIAQAPLAERSASRLLLVPPAPQAFDDRHVRDLDQLLQPGDLLVFNNTRVIPARLFGAKATGGRVEILIERLLGEHDVRAQVGVSKSPKPGSFIDLDAGGQAEVLGRDGEFYLLRLHVPGDLQDWLEQAGRLPLPPYITRDVENADKQRYQTVFAKEAGAVAAPTAGLHFDQALLERLRVRGVQVGHITLHVGAGTFQPVRVDDLAQHQMHSERAWVSQELVDRIKATRAAGGRVIGVGTTVVRALESATSDGVLSAWQGETRIFITPGYRITSVDAMVTNFHLPESTLLMMISAFAGRSRVFAAYAHAIEQRYRFFSYGDAMLLFPGPQDAQDA

SEQ ID NO: 72512 - protein, 347 aa, Stenotrophomonas humi
  misc_feature (1)..(347): tr|A0A0R0CAB3|A0A0R0CAB3_9GAMM S-adenosylmethionine:tRN A ribosyltransferase-isomerase OS=Stenotrophomonas humi OX=405444 GN=queA PE=3 SV=1
MKKSDFNYELPEALIAQAPLAERSASRLLLVPPAPEAFDDRHVRDLPQLLQPGDLLIFNDTRVIPARLFGQKATGGRVEILIERLLGGQQARAQIGASKSPKPGSRIQLDAGGEAEVLGRDGEFYVLRFDIPEPLESWLVHEGRLPLPPYIHREPGADDRERYQTVFARQVGAVAAPTAGLHFDEALLAQLRERDVQFGHITLHVGAGTFQPVRVDDLTHHVMHREWLNVGAELVDKVRRTRAAGGRVIGVGTTVVRALESAMRDGELHPYAGETQIFITPGYRIRSVDAMVTNFHLPESTLLMMISAFAGKQRVFEAYAHAIEQRYRFFSYGDAMLLFPAQEGAAV

SEQ ID NO: 72513 - protein, 353 aa, Stenotrophomonas koreensis
  misc_feature (1)..(353): tr|A0A0R0BXZ9|A0A0R0BXZ9_9GAMM S-adenosylmethionine:tRN A ribosyltransferase-isomerase OS=Stenotrophomonas kore ensis OX=266128 GN=queA PE=3 SV=1
MELPALKKSDFAYHLPPELIAQAPLPERSASRLLLVPPAPAALEDRQVRDLDQLLQPGDLLVFNDTRVIPARLFGAKATGGRVEILIERLLGAQDVRAQLGVSKSPKAGSVIDLDAGGQAEVLGRDGEFYLLRLHVPGALEDWLEQAGRLPLPPYITRDVDNADKQRYQTVFAREAGAVAAPTAGLHFDQTLLDRLSARGVQFGHVTLHVGAGTFQPVRVEDLSEHRMHSERVRVSAELVEKVRATRAAGGRVIGVGTTVVRALESATSDGVLAAYEGETRIFITPGYTITSVDALLTNFHLPESTLLMMISAFVGRRRVFAAYAHAIAQRYRFFSYGDAMLLFPGPQDEQDT

SEQ ID NO: 72514 - protein, 343 aa, Stenotrophomonas lactitubi
  misc_feature (1)..(343): tr|A0A2M9R1T8|A0A2M9R1T8_9GAMM S-adenosylmethionine:tRN A ribosyltransferase-isomerase OS=Stenotrophomonas lact itubi OX=2045214 GN=queA PE=3 SV=1
MKKSDFHYDLPAELIAQAPLAERSASRLLLVPPAPAAFTDLQVRDLPSLLQPGDLLVFNDTRVIPARLFGQKASGGRVEILIERLLGGQQARAQVGASKSPKPGSRIALDPGGEAEVLGRDGEFYVLQFHVPESLEQWLLHAGRLPLPPYIQREPGVDDRERYQTVFAREVGAVAAPTAGLHFDEALLAALKDKGVDFGHVTLHVGAGTFQPVRADDLKDHVMHREWLNVGAELVQQVRRTRAAGGRVIGVGTTVVRALESAMRDGELLPFAGETQIFITPGYRIRSVDAMVTNFHLPESTLLMMISAFAGKERVFEAYQHAIEQRYRFFSYGDAMLLFPQAG

SEQ ID NO: 72515 - protein, 355 aa, Stenotrophomonas maltophilia
  misc_feature (1)..(355): tr|A0A2R3PZT0|A0A2R3PZT0_STEMA S-adenosylmethionine:tRN A ribosyltransferase-isomerase OS=Stenotrophomonas malt ophilia OX=40324 GN=queA PE=3 SV=1
MRAIVDLLPPTALKKSDFNYDLPAELIAQAPLAERSASRLLLVPPAPDAFTDLQVRDLPSLLQPGDLMVFNDTRVIPARLFGQKASGGRVEILIERLLGGQQARAQVGASKSPKAGSRIALDAGGEAEVLGRDGEFYVLQFHVPESLEQWLLHAGRLPLPPYIQREPGVDDRERYQTVFAREVGAVAAPTAGLHFDEPLLAALKDKGVEFGHVTLHVGAGTFQPVRADDLKDHVMHREWLNVGAELVQQVRRTRAAGGRVIGVGTTVVRALESAMRDGELLRFAGETQIFITPGYRIRSVDAMVTNFHLPESTLLMMISAFAGKDRVFEAYQHAIEQRYRFFSYGDAMLLFPQAG

SEQ ID NO: 72516 - protein, 355 aa, Stenotrophomonas maltophilia
  misc_feature (1)..(355): tr|T5KX94|T5KX94_STEMA S-adenosylmethionine:tRNA ribosy ltransferase-isomerase OS=Stenotrophomonas maltophilia MF89 OX=1333853 GN=queA PE=3 SV=1
MRAIVDLLPPTALKKSDFHYDLPAELIAQAPLAERSASRLMLVPAAPAAFTDLQVRDLPSLLQPGDLLVFNDTRVIPARLFGQKASGGRVEILIERLLGGQQARAQVGASKSPKAGSRIALDAGGEAEVLGRDGEFYVLQFHVPESLEQWLLHAGRLPLPPYIQREPGVDDRERYQTVFAREVGAVAAPTAGLHFDEPLLAALKEKGVDFGHVTLHVGAGTFQPVRADDLKDHVMHREWLNVGAELVQQVRRTRAAGGRVIGVGTTVVRALESAMRDGELLPFAGETQIFITPGYRIRSVDAMVTNFHLPESTLLMMISAFAGKERVFEAYRHAIEQRYRFFSYGDAMLLFPQAG

SEQ ID NO: 72517 - protein, 346 aa, Stenotrophomonas panacihumi
  misc_feature (1)..(346): tr|A0A0R0AXE0|A0A0R0AXE0_9GAMM S-adenosylmethionine:tRN A ribosyltransferase-isomerase OS=Stenotrophomonas pana cihumi OX=676599 GN=queA PE=3 SV=1
MKKSDFHYELPEALIAQAPLAERSASRLMIVPPAPAALQDRHVRDLPELLQPGDLLVFNDTRVIPARLFGQKASGGRVEILIERLLGAQQARAQIGASKSPKAGGRIALDAGGEAEVLGRDGEFYLLRFEVPEPLEQWLLHAGRLPLPPYIRREPGLDDRERYQTVFARETGAVAAPTAGLHFDEPLLARLRERGVEFGHVTLHVGAGTFQPVRVESLSDHVMHREWLNVGAELVEQVRRTRAAGGRVIAVGTTVVRSLESAMRDGELQPFAGETQIFILPGYRIRSVDAMVTNFHLPESTLLMMVSAFAGRERIFEAYHHAIAGQYRFFSYGDAMLLWSADAPTA

SEQ ID NO: 72518 - protein, 355 aa, Stenotrophomonas pavanii
  misc_feature (1)..(355): tr|A0A246L1G7|A0A246L1G7_9GAMM S-adenosylmethionine:tRN A ribosyltransferase-isomerase OS=Stenotrophomonas pava nii OX=487698 GN=queA PE=3 SV=1
MRAIVDLLPPTALKKSDFHYDLPAELIAQAPLAERSASRLLLVPPAPAAFTDLQVRDLPSLLQPGDLLVFNDTRVIPARLFGQKASGGRVEILIERLLGGQQARAQVGASKSPKAGSRIALDAGGEAEVLGRDGEFYVLQFHVPESLEQWLLHAGRLPLPPYIQREPGVDDRERYQTVFAREVGAVAAPTAGLHFDEPLLAALKDRGVEFGHVTLHVGAGTFQPVRADDLKDHVMHREWLNVGAELVQQVRRTRAAGGRVIGVGTTVVRALESAMRDGELLPFAGETQIFITPGYRIRSVDAMVTNFHLPESTLLMMISAFAGKERVFEAYRHAIEQRYRFFSYGDAMLLFPQAG

SEQ ID NO: 72519 - protein, 346 aa, Stenotrophomonas pictorum
  misc_feature (1)..(346): tr|A0A0R0AD02|A0A0R0AD02_9GAMM S-adenosylmethionine:tRN A ribosyltransferase-isomerase OS=Stenotrophomonas pict orum JCM 9942 OX=1236960 GN=queA PE=3 SV=1
MKKSDFHYDLPEALIAQAPLAERSASRLLLVPPVPGAFDDRHVRDLPQLLQPGDLLVFNDTRVIPARLFGQKATGGRVEILIERLLGKQQARAQIGASKSPKPGSRIQLDAGGEAEVLGRDGEFYVLRFEIPEPLESWLVHAGRLPLPPYIQREPGVDDRERYQTVFARQVGAVAAPTAGLHFDEPLLAQLRERGVQFGHVTLHVGAGTFQPVRVDDLSHHVMHREWLNVGAELVEQVRRTRAAGGRVIGVGTTVVRALESAMRDGELYPFAGETQIFITPGYRIRSVDAMVTNFHLPESTLLMMISAFAGRERVFEAYAHAIAQQYRFFSYGDAMLLFPAAYDDA

SEQ ID NO: 72520 - protein, 355 aa, Stenotrophomonas rhizophila
  misc_feature (1)..(355): tr|A0A498CEL9|A0A498CEL9_9GAMM S-adenosylmethionine:tRN A ribosyltransferase-isomerase OS=Stenotrophomonas rhiz ophila OX=216778 GN=queA PE=3 SV=1
MADIAYTLPCAPLKKSDFNYDLPPELIAQAPLAERSASRLMVVPPAPAAFDHRQVRDLPDLLQPGDLLVFNDTRVIPARLFGQKASGGRVEILIERLLGGQQARAQVGASKSPKPGSRIALDAGGEAEVLGRDGEFYVLQFHVPEALEQWLLHAGRLPLPPYIQREPGMDDRERYQTVFAREIGAVAAPTAGLHFDEALLATLKDKGVDFGHVTLHVGAGTFQPVRVDDLKEHVMHREWLNVGAELVQQVRRTRAAGGRVIGVGTTVVRALESAMRDGELLPYAGETQIFITPGYRIRSVDAMVTNFHLPESTLLMMISAFAGQARVIEAYQAAIAEKYRFFSYGDAMLLFPQGE

SEQ ID NO: 72521 - protein, 354 aa, Stenotrophomonas rhizophila
  misc_feature (1)..(354): tr|A0A4U3GN18|A0A4U3GN18_9GAMM S-adenosylmethionine:tRN A ribosyltransferase-isomerase OS=Stenotrophomonas rhiz ophila OX=216778 GN=queA PE=3 SV=1
MADIAYTLPCAALKKSDFNYELPPELIAQAPLAERSASRLMLVPQAPAAFDHRHVRDLPDLLNPGDLLVFNDTRVIPARLFGQKASGGRVEILIERLLGAQQARAQVGASKSPKPGSRIALDAGGEAEVLGRDGEFYVLQFHVPEALEQWLLHAGRLPLPPYIQREPGLDDRERYQTVFAREVGAVAAPTAGLHFDEALLAALKDKGVDFGHVTLHVGAGTFQPVRVDDLTDHVMHREWLNVGAELVQQVRRTRAAGGRVIGVGTTVVRALESAMRDGELLPYAGETQIFITPGYRIRSVDAMVTNFHLPESTLLMMISAFAGQARVFEAYRAAIAEKYRFFSYGDAMLLFPQG

SEQ ID NO: 72522 - protein, 357 aa, Stenotrophomonas sp.
  misc_feature (1)..(357): tr|A0A4R4IDI2|A0A4R4IDI2_9GAMM S-adenosylmethionine:tRN A ribosyltransferase-isomerase OS=Stenotrophomonas sp. ATCM1_4 OX=2259330 GN=queA PE=3 SV=1
MKKSDFHYDLPEALIAQAPLAERSASRLMLVPPAPAAFDDRHVRDLPTLLQPGDLLVFNDTRVIPARLFGQKATGGRVEILIERLLGGQQARAQIGASKSPKPGSRIQLDAGGEAEVLGRDGEFYVLRFDIPEPLESWLVHEGRLPLPPYIHREPGLDDRERYQTVFARQVGAVAAPTAGLHFDEGLLAQLRERGVQFGHITLHVGAGTFQPVRVDDLSQHVMHREWLNVGAELVEQVRRTRAAGGRVIGVGTTVVRALESAMREGELQPYAGETQIFITPGYRIRSVDAMVTNFHLPESTLLMMISAFAGKARVFEAYAHAIAQEYRFFSYGDAMLLFPQGGEGTGDGGDAASRPG

SEQ ID NO: 72523 - protein, 355 aa, Stenotrophomonas sp.
  misc_feature (1)..(355): tr|A0A3R8T439|A0A3R8T439_9GAMM S-adenosylmethionine:tRN A ribosyltransferase-isomerase OS=Stenotrophomonas sp. 278 OX=2479851 GN=queA PE=3 SV=1
MRGIPDLLLHAALKKSDFHYDLPPELIAQAPLAERSASRLMLVPPAPAAFEHRRIRDLPDLLQPGDLLVFNDTRVIPARLFGQKASGGRVEILIERLLGGQQARAQVGASKSPKAGSRIALDAGGEAEVLGRDGEFYVLQFHVPENLEQWLLHAGRLPLPPYIQREPGMDDRERYQTVFAREVGAVAAPTAGLHFDENLLAALKARGVSTGHVTLHVGAGTFQPVRVDDLKDHVMHREWLNVGAELVQQVRQTRAAGGRVIGVGTTVVRALESAMRDGELLPYAGETQIFITPGYRIGSVDAMITNFHLPESTLLMMISAFAGQERVFEAYRAAIAEKYRFFSYGDAMLLFPKGE

SEQ ID NO: 72524 - protein, 347 aa, Stenotrophomonas terrae
  misc_feature (1)..(347): tr|A0A0R0C449|A0A0R0C449_9GAMM S-adenosylmethionine:tRN A ribosyltransferase-isomerase OS=Stenotrophomonas terr ae OX=405446 GN=queA PE=3 SV=1
MKKSDFTYDLPEELIAQAPLAERSASRLLLVPPAPGAFDDRHVSDLPTLLQPGDLLVFNDTRVIPARLFGQKASGGRVEILIERLLGGQQARAQIGASKSPKPGSRIQLDAGGEAEVLGRDGEFYVLRFDIPESLESWLVHEGRLPLPPYIHREPGVDDRERYQTVFAKQVGAVAAPTAGLHFDEPLLARLREGGVQFGHITLHVGAGTFQPVRVDDLSQHVMHREWLNVGAELVEQVRRTRAAGGRVIGVGTTVVRALESAMREGELHPYAGETQIFITPGYRIRSVDAMVTNFHLPESTLLMMISAFAGKARVFEAYAHAIEQKYRFFSYGDAMLLFPAGEGAAV

SEQ ID NO: 72525 - protein, 368 aa, Steroidobacter denitrificans
  misc_feature (1)..(368): tr|A0A127FAY4|A0A127FAY4_STEDE S-adenosylmethionine:tRN A ribosyltransferase-isomerase OS=Steroidobacter denitr ificans OX=465721 GN=queA PE=3 SV=1
MRRGDFDYFLPDELIAQRPPVRRGTSRLLHLPPEGGVVDLSFQDFPALLRPDDVLILNDTRVVPARLRGTKPTGGQVEILLERVLDGSRILAQVHASNPLRIGVPLALPGGVQAHYLGRQGELFEMELTLAANESPLAYFERHGTLPLPPYIERTADAQDAARYQTVFARTPGAVAAPTAGLHFDTAMLERCRERGASIAYVTLHVGAGTFQPVRVEALAEHRMHAERVSVNAETCEAIARARSRGGRVLAVGTTVVRSLEAAASASSQTAPSAPGEPARLAPFHGDTRLFITPGFRFQVVDALLTNFHLPQSTLLMLVCAFGGHAAVMQAYRHAVQRRYRFFSYGDAMFLERMTNQTASGLSFADPT

SEQ ID NO: 72526 - protein, 361 aa, Stigmatella aurantiaca
  misc_feature (1)..(361): tr|A0A1H7VMV4|A0A1H7VMV4_STIAU S-adenosylmethionine:tRN A ribosyltransferase-isomerase OS=Stigmatella aurantiac a OX=41 GN=queA PE=3 SV=1
MSSRLSDYDFELPEAQIAQTPLGARDASRLMTLSRSTQACEHRRFSDLPSLLRPGDVLVVNDARVIPARLLGAKAGTGGRVELLVVRPAAPTMTSAALSQAPEALEWICLGQASKGLKPGARVDFTGGLTAEVLEGLGGGEYRVRFQAPPGGSLQALLEQAGRLPLPPYITREPEAADAERYQTLYARAPGAVAAPTAGLHFSEAIFAALAERGIRRVTVTLDVGPGTFLPVREEELDRHKMHPERYGIPEETAAEVNAARAEGRRVVAVGTTVVRTLESATDPATGRLSAGTGETVLFIRPGFAFRQVDLLLTNFHLPRSTLVMLVSALLGRERTLAAYAEAVREGYRFFSYGDAMLVTE

SEQ ID NO: 72527 - protein, 361 aa, Stigmatella aurantiaca
  misc_feature (1)..(361): tr|E3FSL7|E3FSL7_STIAD S-adenosylmethionine:tRNA ribosy ltransferase-isomerase OS=Stigmatella aurantiaca (strai n DW4/3-1) OX=378806 GN=queA PE=3 SV=1
MSSRLSDYDFELPEAQIAQAPLGARDASRLMTVSRSTKACEHLRFADLPSLLRPGDVLVVNDARVIPARLLGAKVGTGGRVELLVVRPAASTMTSAALSLAAEAMDWICLGQASKGLKPGAQVAFGGGLVGEVLEGLGGGEYRVRFQAPPGGSLQALLEQAGRLPLPPYITREPDAADAERYQTLYARAPGAVAAPTAGLHFSEAIFEALDARGVRRVTVTLDVGPGTFLPVREEELDRHKMHPERYGVPEQTAAEVNAARAEGRRVVAVGTTVVRTLEAATDPATGLLRAGTGETVLFIRPGYAFRQVDLMLTNFHLPRSTLVMLVSALLGREHTLAAYQEAVREGYRFFSYGDAMLVTE

SEQ ID NO: 72528 - protein, 361 aa, Stigmatella erecta
  misc_feature (1)..(361): tr|A0A1I0K383|A0A1I0K383_9DELT S-adenosylmethionine:tRN A ribosyltransferase-isomerase OS=Stigmatella erecta OX =83460 GN=queA PE=3 SV=1
MSSRLSDYDFALPEAQIAQTPLGARDASRLMTLSRSTQACEHRRFADLPSLLRPGDVLVVNDARVIPARLLGAKAGTGGRVELLVVRPAAPTMTSAALSQAPEALEWICLGQASKGLKPGARVDFNGGLTAEVLEGLGGGEYRVRFQAPPGGSLQALLEQAGRLPLPPYITREPEAADAERYQTLYARAPGAVAAPTAGLHFSEAIFAALAERGIRRVTVTLDVGPGTFLPVREEALDRHKMHPERYGIPEETAAEVNAARAEGRRVVAVGTTVVRTLESATDPATGRLRAGTGETVLFIRPGFAFRQVDLLLTNFHLPRSTLVMLVSALLGRERTLAAYAEAVREGYRFFSYGDAMLVTE

SEQ ID NO: 72529 - protein, 341 aa, Stomatobaculum longum
  misc_feature (1)..(341): tr|H1HUE3|H1HUE3_9FIRM S-adenosylmethionine:tRNA ribosy ltransferase-isomerase OS=Stomatobaculum longum OX=7969 42 GN=queA PE=3 SV=1
MELKDFYYELPEELIAQDPLEDRASSRLMVLHRESGEIEHRHFRDIAEYLKSGDCLVLNDTKVIPARLIGEKVGTGAKIEVLLLTRKEDRTWETLVKPGRKCPIGTKISFGEGKLIGEIVGQTEDGNRFVRFSYEGVFEEILDELGQMPLPPYIHHQLKDKNRYQTVYAAHEGSAAAPTAGLHFTEALLKSLEEKGVIIVRITLHVGLGTFRPVKEQDILKHHMHEEFYVVSEEAAETVNRAKAAGGRIVCVGTTSCRTLESAANEDGTLRAESGYTKIFIYPGYRFRILDCLITNFHLPESTLVMLVSALAGREKILNAYREAVQERYRFFSFGDAMLIE

SEQ ID NO: 72530 - protein, 397 aa, Streptacidiphilus jiangxiensis
  misc_feature (1)..(397): tr|A0A1H7VVK2|A0A1H7VVK2_STRJI S-adenosylmethionine:tRN A ribosyltransferase-isomerase OS=Streptacidiphilus jia ngxiensis OX=235985 GN=SAMN05414137_11917 PE=3 SV=1
MTGRTEVAVGGTAADEDGGFVDDGFVDDGFVDGLGDWQLPPELEADAPPEERGGSGRDDVRLLVARQPTNSTPLVTHHAFRELPALLRPGDVLVVNTSPTLSAAVDGRITETGEPVVAHFSTRQRESEWVVELRSPDGRGSTRRRPHDGSLVTVRLTGGARLSLVAPVDGQDGGSRRLWRACFAAAEPLAYLARYGRPIRYAYTSADRPSDAYQTVFAEPLASATAGSAEMPSAARPFTTELVTRLVARGVLVVPITLHTGVASIESHEPPYAEWFTVPEVTARVVNGARAAGSRVVAVGTTAVRALESAADPDGTVRARSGWTELVITPERGVRVVDGLLTGFHEPRASHLMMLEAVAGRALLDRSYAEALREGYLWHEFGDLHLILAEERAASTG

SEQ ID NO: 72531 - protein, 360 aa, Streptacidiphilus pinicola
  misc_feature (1)..(360): tr|A0A2X0IE53|A0A2X0IE53_9ACTN S-adenosylmethionine:tRN A ribosyltransferase-isomerase OS=Streptacidiphilus pin icola OX=2219663 GN=DN069_30475 PE=3 SV=1
MGDWELPPELEADAPPEERGADGRDDVRLLTARRVPGAAPVVTHHAFRELPDLLQPGDVLVVNTSATLPAALDGRITETGEPVVVHFSTRRGESEWVVELRSPDGHGSTRQRHHDGSLVTVRVTGGARLTLLSRVGDRAGGSSRLWRACFGAAEPLAYLARYGRAIRYAYTSADRPLAAYQTVFAEPVATAGAGSAEMPSAARPFTAELVTRLVSRGVLVVPITLHTGVASVESHEPPYAEWFDVPEATARVVNNARAAGSHVIAVGTTAVRALESAVDTEGTDDTVRARSGWTELVITPERGVRAVDGLLTGFHEPRASHLMMLEAVGGRPLLDRSYAEALREGYLWHEFGDLHLILAR

SEQ ID NO: 72532 - protein, 342 aa, Streptobacillus moniliformis
  misc_feature (1)..(342): tr|D1AXR9|D1AXR9_STRM9 S-adenosylmethionine:tRNA ribosy ltransferase-isomerase OS=Streptobacillus moniliformis (strain ATCC 14647 / DSM 12112 / NCTC 10651 / 9901) OX= 519441 GN=queA PE=3 SV=1
MRVEDYDFELPLEFIAQHAIEPRDHSKLLVLNKNNGAIEDKKFYNIIDYLTPNDILVINRTKVIPARLFGKKENGVILECFLLKRIDLKKWEVLLKPAKKLKINDKLIFSEKLSAKLLEIKEDGNRIMEFEFEGVFEEILDELAEMPLPPYITEKLENKNRYQTVYAKSGESVAAPTAGLHFTTELLEKIEKKGITIVEVYLTVGLGTFRPVQVENVEDHIMHSEEYIVPEKTAEIINQGKKDGKRIIAVGTTSIRTLESSLDDNNNLIAQKSETSIFIHGEYKFKIVDALITNFHLPKSTLIMLVSSFANKEYVMNAYQHAIKNNYRFFSFGDAMFIQGEL

SEQ ID NO: 72533 - protein, 342 aa, Streptococcus acidominimus
  misc_feature (1)..(342): tr|A0A4Y9FMV3|A0A4Y9FMV3_STRAI S-adenosylmethionine:tRN A ribosyltransferase-isomerase OS=Streptococcus acidomi nimus OX=1326 GN=queA PE=3 SV=1
MNTADFDFHLPEHLIAQVPLEQRDASRLLILDRKTETLTDGHFDQIIDELEAGDALVMNNTRVLPARLYGEKPETGGHVELLLLKNTHGDQWEVLAKPAKRLKIGSKISFGDGRLSATIVQELEHGGRIVEFSYEGIFLEVLESLGEMPLPPYIHEKLENRERYQTVYAKENGSAAAPTAGLHFTQELLERIEAKGVKLVYLTLHVGLGTFRPVSTSNLDEHEMHSEFYSLSEEAAATLREVKASGHRIIAVGTTSIRTLETIGNKFKGDIQADSGWTNIFIKPGYQFKVIDAFSTNFHLPKSTLVMLVSAFAGREFVLKAYQHAIESDYRFFSFGDAMFIK

SEQ ID NO: 72534 - protein, 342 aa, Streptococcus acidominimus
  misc_feature (1)..(342): tr|A0A1Q8EEC2|A0A1Q8EEC2_STRAI S-adenosylmethionine:tRN A ribosyltransferase-isomerase OS=Streptococcus acidomi nimus OX=1326 GN=queA PE=3 SV=1
MNTADFDFHLPEHLIAQVPLEQRDASRLLILDRKTETLTDGHFDQIIDELEAGDALVMNNTRVLPARLYGEKPETGGHVELLLLKNTQGDQWEVLAKPAKRLKIGSKISFGDGRLSATIVQELEHGGRIVEFSYEGIFLEVLESLGEMPLPPYIHEKLEDRERYQTVYAKENGSAAAPTAGLHFTQELLERIEAKGVKLVYLTLHVGLGTFRPVSTSNLDEHEMHSEFYSLSEEAAATLREVKAAGHRIIAVGTTSIRTLETIGNKFKGDIQADSGWTNIFIKPGYQFKVIDAFSTNFHLPKSTLVMLVSAFAGREFVLEAYQHAIESDYRFFSFGDAMFIK

SEQ ID NO: 72535 - protein, 342 aa, Streptococcus agalactiae
  misc_feature (1)..(342): sp|Q8E0D7|QUEA_STRA5 S-adenosylmethionine:tRNA ribosylt ransferase-isomerase OS=Streptococcus agalactiae seroty pe V (strain ATCC BAA-611 / 2603 V/R) OX=208435 GN=queA PE=3 SV=1
MNTNDFDFYLPEELIAQTPLEKRDASKLLVIDHKNKTMTDSHFDHILDELKPGDALVMNNTRVLPARLYGEKQDTHGHVELLLLKNTEGDQWEVLAKPAKRLRVGTKVSFGDGRLIATVTKELEHGGRIVEFSYDGIFLEVLESLGEMPLPPYIHEKLEDRDRYQTVYAKENGSAAAPTAGLHFTKELLEKIETKGVKLVYLTLHVGLGTFRPVSVDNLDEHEMHSEFYQLSKEAADTLNAVKESGGRIVAVGTTSIRTLETIGSKFNGELKADSGWTNIFIKPGYQFKVVDAFSTNFHLPKSTLVMLVSAFAGRDFVLEAYNHAVEERYRFFSFGDAMFVK

SEQ ID NO: 72536 - protein, 342 aa, Streptococcus agalactiae
  misc_feature (1)..(342): sp|Q8E611|QUEA_STRA3 S-adenosylmethionine:tRNA ribosylt ransferase-isomerase OS=Streptococcus agalactiae seroty pe III (strain NEM316) OX=211110 GN=queA PE=3 SV=1
MNTNDFDFYLPEELIAQTPLEKRDASKLLVIDHKNKTMTDSHFDHILDELKPGDALVMNNTRVLPARLYGEKPDTHGHIELLLLKNTEGDQWEVLAKPAKRLRVGTKVSFGDGRLIATVTKELEHGGRIVEFSYDGIFLEVLESLGEMPLPPYIHEKLEDRDRYQTVYAKENGSAAAPTAGLHFTKELLEKIETKGVKLVYLTLHVGLGTFRPVSVDNLDEHEMHSEFYQLSKEAADTLNAVKESGGRIVAVGTTSIRTLETIGSKFNGELKADSGWTNIFIKPGYQFKVVDAFSTNFHLPKSTLVMLVSAFAGRDFVLEAYNHAVEERYRFFSFGDAMFVK

SEQ ID NO: 72537 - protein, 342 aa, Streptococcus anginosus
  misc_feature (1)..(342): tr|I0SBF5|I0SBF5_STRAP S-adenosylmethionine:tRNA ribosy ltransferase-isomerase OS=Streptococcus anginosus subsp . whileyi CCUG 39159 OX=1095729 GN=queA PE=3 SV=1
MNTADFDFHLPEELIAQTPLEKRDASRLLVVNHETGQLEDTHFDAIIDQLHPGDALVMNDTRVLPARLHGEKPETGGHVELLLLKNIAGDNWEVLAKPAKRLKVGVAISFGDGRLTATVLEELEHGGRIVRFHYQGIFLEVLESLGEMPLPPYIHEKLKDRERYQTVYAKENGSAAAPTAGLHFTKELLAQIEAKGVKLVYLTLHVGLGTFRPVSVDNVDKHEMHSEFYTLSEEAANTLRQVKASGKRVIAVGTTSIRTLETIGSKFNGEIKADSGWTNIFIKPGYDWKIVDAFSTNFHLPKSTLVMLVSAFAGRELVLSAYQHAIDEKYRFFSFGDAMFIK

SEQ ID NO: 72538 - protein, 342 aa, Streptococcus anginosus
  misc_feature (1)..(342): tr|A0A412PPB9|A0A412PPB9_STRAP S-adenosylmethionine:tRN A ribosyltransferase-isomerase OS=Streptococcus anginos us OX=1328 GN=queA PE=3 SV=1
MNTADFDFHLPEELIAQTPLEKRDASRLLIVNHETGQMEDTHFDAIIDQLHPGDALVMNDTRVLPARLHGEKSETGGHVELLLLKNIAGDDWEVLAKPAKRLKVGAAISFGDGRLTATVLEELEHGGRIVRFHYQGIFLEVLESLGEMPLPPYIHEKLKDRERYQTVYAKENGSAAAPTAGLHFTKELLAQIEAKGVKLVYLTLHVGLGTFRPVSVDNVDEHEMHSEFYTLSEEAANTLRQVKASGHHVVAVGTTSIRTLETIGSKFNGEIKADSGWTNIFIKPGYDWKIVDAFSTNFHLPKSTLVMLVSAFAGRELVLSAYQHAIDEKYRFFSFGDAMFIK

SEQ ID NO: 72539 - protein, 342 aa, Streptococcus australis
  misc_feature (1)..(342): tr|A0A4V0BWX9|A0A4V0BWX9_9STRE S-adenosylmethionine:tRN A ribosyltransferase-isomerase OS=Streptococcus austral is OX=113107 GN=queA PE=3 SV=1
MNTADFDFHLPEELIAQTPLEKRDASKLLIVNRETGEFQDKHFHSIIDMLEPGDALVMNDTRVLPARLYGQKEETGGHVELLLLKNTAGDEWEVLAKPAKRLKVGTRVSFGDGRLSAVVTEELTHGGRIVRFEYQGIFLEVLESLGEMPLPPYIHEKLDDRERYQTVYAKESGSAAAPTAGLHFTKELLAEIQAKGVHLVYLTLHVGLGTFRPVSVDNLDEHEMHSEFYQLSEEAAATLRSVKENGGRVIAVGTTSIRTLETIGSKFDGQIQADSGWTNIFIKPGYEWKVVDAFSTNFHLPKSTLVMLVSAFAGRDLVLDAYQHAIQEHYRFFSFGDAMFIY

SEQ ID NO: 72540 - protein, 342 aa, Streptococcus australis
  misc_feature (1)..(342): tr|A0A4V1PN92|A0A4V1PN92_9STRE S-adenosylmethionine:tRN A ribosyltransferase-isomerase OS=Streptococcus austral is OX=113107 GN=queA PE=3 SV=1
MNTNDFDFHLPEELIAQTPLEKRDASKLLILNRQTGQMEDQHFDAIINELEPGDALVMNNTRVLPARLHGVKPDTGGHVELLLLKNIEGDQWEVLAKPAKRLKEGGVVSFGDGRLQATLIKKLEHGGCIVEFSYQGIFLEVLESLGEMPLPPYIHEKLEDQERYQTVYAKENGSAAAPTAGLHFTPELLQKIEDKGVHLVYLTLHVGLGTFRPVSVDDLDQHEMHSEFYQLSEEAAQTLRQVKARGHRIVAVGTTSIRTLETIGNKFNGELQADSGWTNIFIKPGYQWQVVNAFSTNFHLPKSTLVMLVSAFAGRELTLDAYQHAIDQGYRFFSFGDAMFIK

SEQ ID NO: 72541 - protein, 342 aa, Streptococcus bovimastitidis
  misc_feature (1)..(342): tr|A0A1L8MMX9|A0A1L8MMX9_9STRE S-adenosylmethionine:tRN A ribosyltransferase-isomerase OS=Streptococcus bovimas titidis OX=1856638 GN=queA PE=3 SV=1
MNTNDFDFELPEELIAQTPLEQRDSSKLLIIDHENKTMVDSHFDQIIDQLNPGDALVMNNTRVLPARLHGEKPDTHGHVELLLLKNTQGDDWEVLAKPAKRLKVGSQISFGDGRLKATVLEELEHGGRIVTFSYEGIFLEVLESLGEMPLPPYIHEKLEDSERYQTVYAKENGSAAAPTAGLHFTQELLEKIQAKGVHLVYLTLHVGLGTFRPVSVDNVDAHEMHSEFYHLSEESAQILRDVKKAGGRVVAVGTTSIRTLETIGSKFKGDIQADSGWTNIFIKPGYQFTVVDAFSTNFHLPKSTLVMLVSAFAGREFVLEAYKHAVDEKYRFFSFGDAMFVK

SEQ ID NO: 72542 - protein, 342 aa, Streptococcus canis
  misc_feature (1)..(342): tr|A0A2D4DRC0|A0A2D4DRC0_STRCB S-adenosylmethionine:tRN A ribosyltransferase-isomerase OS=Streptococcus canis O X=1329 GN=queA PE=3 SV=1
MNTNDFDFDLPEELIAQTPLEKRDSSKLLIIDHRQKTMVDSHFDHIIDQLNPGDALVMNNTRVLPARLYGEKPDTHGHVELLLLKNTQGDQWEVLAKPAKRLKVGSQVSFGDGRLKATIIDELEHGGRIVEFSYDGIFLEVLESLGEMPLPPYIHEKLEDAERYQTVYAKENGSAAAPTAGLHFTTDLLKKIQAKGVHLVYLTLHVGLGTFRPVSVDNLDDHDMHSEFYSLSEEAAQTLREVKQAGGRVIAVGTTSIRTLETIGSKFNGEIRADSGWTNIFIKPGYQFKVVDAFSTNFHLPKSTLVMLVSAFAGREFVLEAYKHAVDEKYRFFSFGDAMFVN

SEQ ID NO: 72543 - protein, 342 aa, Streptococcus canis; identical to SEQ ID NO: 72542
  misc_feature (1)..(342): tr|I7WFT5|I7WFT5_STRCB S-adenosylmethionine:tRNA ribosy ltransferase-isomerase OS=Streptococcus canis FSL Z3-22 7 OX=482234 GN=queA PE=3 SV=1

SEQ ID NO: 72544 - protein, 342 aa, Streptococcus constellatus
  misc_feature (1)..(342): tr|A0A139QI23|A0A139QI23_STRCV S-adenosylmethionine:tRN A ribosyltransferase-isomerase OS=Streptococcus constel latus OX=76860 GN=queA PE=3 SV=1
MNTADFDFHLPEELIAQTPLEKRDASRLLVVNHKTGQMEDTHFDAIIDQLHPGDALVMNDTRVLPARLHGEKPETGGHVELLLLKNIEGDDWEVLAKPAKRLKVGATISFGDGRLTATVLEELEHGGRIVRFHYQGIFLEVLESLGEMPLPPYIHEKLKDRERYQTVYAKENGSAAAPTAGLHFTKELLAKIEAKGVKLVYLTLHVGLGTFRPVSVNNVDEHEMHSEFYTLSDEAAETLRQVKASGKRVIAVGTTSIRTLETIGSKFNGEIKADSGWTNIFIKPGYDWKVVDAFSTNFHLPKSTLVMLVSAFAGRELVLSAYQHAIDEKYRFFSFGDAMFIK

SEQ ID NO: 72545 - protein, 342 aa, Streptococcus constellatus; identical to SEQ ID NO: 72537
  misc_feature (1)..(342): tr|F9P521|F9P521_STRCV S-adenosylmethionine:tRNA ribosy ltransferase-isomerase OS=Streptococcus constellatus su bsp. pharyngis SK1060 = CCUG 46377 OX=1035184 GN=queA P E=3 SV=1

SEQ ID NO: 72546 - protein, 342 aa, Streptococcus criceti
  misc_feature (1)..(342): tr|G5JT64|G5JT64_STRCG S-adenosylmethionine:tRNA ribosy ltransferase-isomerase OS=Streptococcus criceti HS-6 OX =873449 GN=queA PE=3 SV=1
MNTQDFDFHLPEELIAQTPLEKRDSSKLLVIDHKNHTMVDSHFDHILDELNPGDALVMNNTRVLPARLHGEKSETHGHVEFLLLKNTQDDQWEVLARPAKRLHVGTEISFGDGRLTATIVQELDHGGRIVEFHYDGIFLEVLESLGEMPLPPYIHEKLEDQERYQTVYAKENGSAAAPTAGLHFTQELLEKIEAKGVKLVYLTLHVGLGTFRPVSVNNIEDHEMHSEFYQLSEEAAQTLRQVKASGGRIVAVGTTSIRTLETIGNKFSGDIQADSGWTNIFIKPGYEFKIVDAFSTNFHLPKSTLVMLVSAFAGREFVLEAYKHAVDKHYRFFSFGDAMFVK

SEQ ID NO: 72547 - protein, 342 aa, Streptococcus cristatus
  misc_feature (1)..(342): tr|A0A428APR8|A0A428APR8_STRCR S-adenosylmethionine:tRN A ribosyltransferase-isomerase OS=Streptococcus cristat us OX=45634 GN=queA PE=3 SV=1
MNTADFDFYLPEELIAQTPLEKRDSSRLLIVDRETGQFSDQHFDNIIDQLEPGDALVMNNTRVLPARLYGTKTETGGHVELLLLKNTQGDFWEVLAKPAKRLRVGTRVSFGDGRLTATVTEELEHGGRIVRFDYQGIFLEVLESLGEMPLPPYIHEKLEDRERYQTVYAKENGSAAAPTAGLHFTEELLDKIAAKGVKLVYLTLHVGLGTFRPVSVDNLEEHEMHSEFYSLSEEAAETLRQVKERGHRIVAVGTTSIRTLETIGSKFDGQIQADSGWTNIFIKPGYQWKIVDAFSTNFHLPKSTLVMLVSAFAGRQLTLQAYEHAIAERYRFFSFGDAMFIK

SEQ ID NO: 72548 - protein, 342 aa, Streptococcus cristatus
  misc_feature (1)..(342): tr|A0A5B0D9S3|A0A5B0D9S3_STRCR S-adenosylmethionine:tRN A ribosyltransferase-isomerase OS=Streptococcus cristat us OX=45634 GN=queA PE=3 SV=1
MNTADFDFHLPEELIAQTPLEKRDSSRLLIVDRETGQFSDQHFDNIIDQLEPGDALVMNNTRVLPARLYGTKPETGGHVELLLLKNTQGDFWEVLAKPAKRLRVGTRVSFGDGRLTATVTEELEHGGRIVRFDYQGIFLEVLESLGEMPLPPYIHEKLEDRERYQTVYAKENGSAAAPTAGLHFTEELLDKIAAKGVKLVYLTLHVGLGTFRPVSVDNLEEHEMHSEFYSLSEEAAETLRQVKASGHRIIAVGTTSIRTLETIGSKFDGQIQADSGWTNIFIKPGYQWKIVDAFSTNFHLPKSTLVMLVSAFAGRQLTLQAYEHAIAERYRFFSFGDAMFIK

SEQ ID NO: 72549 - protein, 342 aa, Streptococcus cuniculi
  misc_feature (1)..(342): tr|A0A4Y9J7L8|A0A4Y9J7L8_9STRE S-adenosylmethionine:tRN A ribosyltransferase-isomerase OS=Streptococcus cunicul i OX=1432788 GN=queA PE=3 SV=1
MNTADFDFHLPEHLIAQVPLEQRDASRLLILDREKQTMVDAHFDQIIDELEPGDALVMNNTRVLPARLYGEKPETGGHVELLLLKNTQGDQWEVLAKPAKRLKVGSQISFGDGRLTATIIQELEHGGRIVEFAYDSIFLEVLESLGEMPLPPYIHEKLDDRERYQTVYAKENGSAAAPTAGLHFTKDLLKKIEAKGVKLVYLTLHVGLGTFRPVSVDNVDEHEMHSEFYSLSKEAATTLREVKDSGHRIVAVGTTSIRTLETIGNKFEGDIQADSGWTNIFIKPGYQFKVVDAFSTNFHLPKSTLVMLVSAFAGRDFVLEAYQHAIDNEYRFFSFGDAMFIK

SEQ ID NO: 72550 - protein, 342 aa, Streptococcus cuniculi
  misc_feature (1)..(342): tr|A0A1Q8EAP6|A0A1Q8EAP6_9STRE S-adenosylmethionine:tRN A ribosyltransferase-isomerase OS=Streptococcus cunicul i OX=1432788 GN=queA PE=3 SV=1
MNTADFDFHLPEHLIAQVPLEQRDASRLLILDREKQTMVDGHFDQIIDELEPGDALVMNNTRVLPARLYGEKPETGGHVELLLLKNTQGDQWEVLAKPAKRLKVGSQISFGDGRLTATIIQELEHGGRIVEFAYNGIFLEVLESLGEMPLPPYIHEKLDDRERYQTVYAKENGSAAAPTAGLHFTQDLLKKIEAKGVKLVYLTLHVGLGTFRPVSVDNVDEHEMHSEFYSLSEEAAATLREVKASGHRIIAVGTTSIRTLETIGNKFEGDIQADTGWTNIFIKPGYQFKVVDAFSTNFHLPKSTLVMLVAAFAGRDFVLEAYQHAIEEEYRFFSFGDAMFIK

SEQ ID NO: 72551 - protein, 342 aa, Streptococcus downei
  misc_feature (1)..(342): tr|A0A380JD48|A0A380JD48_STRDO S-adenosylmethionine:tRN A ribosyltransferase-isomerase OS=Streptococcus downei MFe28 OX=764290 GN=queA PE=3 SV=1
MNTEDFNFHLPEDLIAQTPLEKRDSSKLLVIDHNKHTMLDSHFDHILEELNPGDALVMNNTRVLPARLHGEKPETHGHVEFLLLKNTQGDQWEVLAKPAKRLHVGTEVSFGDGRLRATVLEELEHGGRIVQFHYEGIFLEVLESLGEMPLPPYIHEKLEDQERYQTVYAKENGSAAAPTAGLHFTQELLEKIEAKGVKLVYLTLHVGLGTFRPVSVDNIEDHEMHSEFYQFSEEAAQTLRQVKASGGRIVAVGTTSIRTLETIGNKFNGQIQADSGWTNIFIKPGYQFKLVDAFSTNFHLPKSTLVMLVSAFAGRDFVLEAYKHAVEEHYRFFSFGDAMFVK

SEQ ID NO: 72552 - protein, 342 aa, Streptococcus dysgalactiae
  misc_feature (1)..(342): tr|M4YYT3|M4YYT3_STREQ S-adenosylmethionine:tRNA ribosy ltransferase-isomerase OS=Streptococcus dysgalactiae su bsp. equisimilis RE378 OX=617121 GN=queA PE=3 SV=1
MNTNDFDFDLPEELIAQTPLEKRDSSKLLIIDHEQKIMIDSHFDHIIDQLNPGDALVMNNTRVLPARLYGEKPDTHGHVELLLLKNTHGDQWEVLAKPAKRLKVGSQVSFGDGRLTATIVEELEHGGRIVEFNYEGIFLEVLESLGEMPLPPYIHEKLDDAERYQTVYAKENGSAAAPTAGLHFTTDLLSKIEAKGVHLVYLTLHVGLGTFRPVSVDNLDDHDMHSEFYSLSEEAAQTLRDVKKAGGRVVAVGTTSIRTLETIGSKFQGDIQADSGWTNIFIKPGYQFKVVDAFSTNFHLPKSTLVMLVSAFAGRDFVLDAYKHAVDEKYRFFSFGDAMFVK

SEQ ID NO: 72553 - protein, 342 aa, Streptococcus dysgalactiae
  misc_feature (1)..(342): tr|A0A380KCA1|A0A380KCA1_STREQ S-adenosylmethionine:tRN A ribosyltransferase-isomerase OS=Streptococcus dysgala ctiae subsp. equisimilis OX=119602 GN=queA PE=3 SV=1
MNTNDFDFDLPEELIAQTPLEKRDSSKLLIIDHEQKIMIDSHFDHIIDQLNPGDALVMNNTRVLPARLYGEKPDTHGHVELLLLKNTHGDQWEVLAKPAKRLKVGSQVSFGDGRLTATIVEELEHGGRIVEFNYEGIFLEVLESLGEMPLPPYIHEKLDDAERYQTVYAKENGSAAAPTAGLHFTTDLLSKIDAKGVHLVYLTLHVGLGTFRPVSVDNLDDHDMHSEFYSLSEEAAQTLRDVKKAGGHVVAVGTTSIRTLETIGSKFQGDIQADSGWTNIFIKPGYQFKVVDAFSTNFHLPKSTLVMLVSAFAGRDFVLDAYKHAVDEKYRFFSFGDAMFVK

SEQ ID NO: 72554 - protein, 342 aa, Streptococcus equi
  misc_feature (1)..(342): tr|C0MCU2|C0MCU2_STRS7 S-adenosylmethionine:tRNA ribosy ltransferase-isomerase OS=Streptococcus equi subsp. zoo epidemicus (strain H70) OX=553483 GN=queA PE=3 SV=1
MNTNDFDFELPEELIAQTPLEQRDRSKLLIIDHQEHTMTDSHFDHIIDQLEPGDALVMNNTRVLPARLYGEKMETHGHVELLLLKNIQGDQWEVLAKPAKRLKAGAQISFGDGLLKARVIQELEHGGRIVEFSYDGIFLEILETLGEMPLPPYIHEKLADAERYQTVYAKENGSAAAPTAGLHFTQELLQKIEAKGVHLVYLTLHVGLGTFRPVSVDNIDEHDMHSEFYLLSEEAAQTLRKVKAAGGRIVAVGTTSIRTLETIGSKFQGQILADSGWTNIFIKPGYQFKVVDAFSTNFHLPKSTLVMLVSAFAGRDFVLEAYKHAIDEHYRFFSFGDAMFVK

SEQ ID NO: 72555 - protein, 342 aa, Streptococcus equi
  misc_feature (1)..(342): tr|A0A2X3SWJ8|A0A2X3SWJ8_STRSZ S-adenosylmethionine:tRN A ribosyltransferase-isomerase OS=Streptococcus equi su bsp. zooepidemicus OX=40041 GN=queA PE=3 SV=1
MNTNDFDFELPEELIAQTPLEQRDRSKLLIIDHQEHTMTDSHFDHIIDQLEPGDALVMNNTRVLPARLYGEKMETHGHVELLLLKNIQGDQWEVLAKPAKRLKAGAQISFGDGRLKARVIQELEHGGRIVEFSYDGIFLEILETLGEMPLPPYIHEKLADAERYQTVYAKENGSAAAPTAGLHFTQELLQKIEAKGVHLIYLTLHVGLGTFRPVSVDNIDEHDMHSEFYLLSEEAAQTLRKVKAAGGRIVAVGTTSIRTLETIGSKFQGQILADSGWTNIFIKPGYQFKVVDAFSTNFHLPKSTLVMLVSAFAGRDFVLEAYKHAIDEHYRFFSFGDAMFVK

SEQ ID NO: 72556 - protein, 342 aa, Streptococcus equinus
  misc_feature (1)..(342): tr|A0A239RFH3|A0A239RFH3_STREI S-adenosylmethionine:tRN A ribosyltransferase-isomerase OS=Streptococcus equinus OX=1335 GN=queA PE=3 SV=1
MNTNDFDFNLPEELIAQTPLEKRDSSKLLVIDRNTHEMVDAHFDHILDELNPGDALVMNNTRVLPARLYGEKPETHGHVELLLLKNTEGDKWEVLAKPAKRLRVGAKVSFGDGRLTATVVEELDHGGRIVEFDYDGIFLEVLESLGEMPLPPYIHEKLDDPDRYQTVYAKENGSAAAPTAGLHFTKELLKKIEAKGVKLVYVTLHVGLGTFRPVSVDNVEEHEMHSEFYRLSEEAAQTLRDVKAAGGRIVAVGTTSIRTLETIGSKFNGEIKADSGWTNIFIKPGYKFKVVDAFSTNFHLPKSTLVMLVSAFAGREFVLEAYQHAIDERYRFFSFGDAMFVK

SEQ ID NO: 72557 - protein, 342 aa, Streptococcus equinus
  misc_feature (1)..(342): tr|A0A1G9J3Z6|A0A1G9J3Z6_STREI S-adenosylmethionine:tRN A ribosyltransferase-isomerase OS=Streptococcus equinus OX=1335 GN=queA PE=3 SV=1
MNTNDFDFNLPEELIAQTPLEKRDSSKLLVIDRNTHEMVDAHFDHILDELNPGDALVMNNTRVLPARLYGEKPETHGHVELLLLKNTEGDKWEVLAKPAKRLRVGAKVSFGDGRLTATVVEELDHGGRIVEFDYDGIFLEVLESLGEMPLPPYIHEKLDDPDRYQTVYAKENGSAAAPTAGLHFTKELLEKIEAKGVKLVYVTLHVGLGTFRPVSVDNVEEHEMHSEFYRLSEEAAQTLRDVKAAGGRIVAVGTTSIRTLETIGSKFNGEIKADSGWTNIFIKPGYEFKVVDAFSTNFHLPKSTLVMLVSAFAGREFVLEAYQHAIDERYRFFSFGDAMFVK

SEQ ID NO: 72558 - protein, 342 aa, Streptococcus ferus
  misc_feature (1)..(342): tr|A0A2X3XZE1|A0A2X3XZE1_9STRE S-adenosylmethionine:tRN A ribosyltransferase-isomerase OS=Streptococcus ferus O X=1345 GN=queA PE=3 SV=1
MNTNDFDFALPEELIAQTPLEQRDASKLLIIDRAKQTMSDSHFDHIIDELEAGDALVMNNTRVLPARLYGQKAETLGHVELLLLKNTQADQWEVLAKPAKRLKVGSQILFGDGRLKATVLEELDHGGRIVDFSYDGIFLEVLESLGEMPLPPYIHEKLEDKERYQTVYAKENGSAAAPTAGLHFTTDLLDRIQAKGVKLVYLTLHVGLGTFRPVSVDNVDEHEMHSEFYSLSEEAAQTLNAVKRSGGRIVAVGTTSIRTLETIGHKFNGKLEADSGWTNIFIKPGYQFKIVDAFSTNFHLPKSTLVMLVAAFAGREFVLEAYKHAVQEKYRFFSFGDAMFIK

SEQ ID NO: 72559 - protein, 342 aa, Streptococcus gallolyticus
  misc_feature (1)..(342): tr|A0A0E1XJ23|A0A0E1XJ23_STRGY S-adenosylmethionine:tRN A ribosyltransferase-isomerase OS=Streptococcus galloly ticus subsp. gallolyticus TX20005 OX=545774 GN=queA PE= 3 SV=1
MNTNDFDFNLPEELIAQTPLEKRDSSKLLVIDHKTHEMVDAHFDHILDELNPGDALVMNNTRVLPARLYGEKPDTHGHVELLLLKNTQGDQWEVLAKPAKRLRVGAKVSFGDGRLTATVVEELDHGGRIVEFAYDGIFLEVLESLGEMPLPPYIHEKLDDPDRYQTVYAKENGSAAAPTAGLHFTQDLLAKIEAKGVKLVYLTLHVGLGTFRPVSVDNIEEHEMHSEFYTLSEEAAQTLRDVKAAGRRVVAVGTTSIRTLETIGSKFNGDIKADSGWTNIFIKPGYEFKVVDAFSTNFHLPKSTLVMLVSAFAGREFVLDAYQHAIDERYRFFSFGDAMFVK

SEQ ID NO: 72560 - protein, 342 aa, Streptococcus gallolyticus
  misc_feature (1)..(342): tr|A0A139QKT8|A0A139QKT8_9STRE S-adenosylmethionine:tRN A ribosyltransferase-isomerase OS=Streptococcus galloly ticus OX=315405 GN=queA PE=3 SV=1
MNTNDFDFNLPEELIAQTPLEKRDSSKLLVIDHKTHEMVDAHFDHILDELNPGDALVMNNTRVLPARLYGEKPDTHGHVELLLLKNTQGDQWEVLAKPAKRLRVGAKVSFGDGRLTATVVEELDHGGRIVEFAYDGIFLEVLESLGEMPLPPYIHEKLDDPDRYQTVYAKENGSAAAPTAGLHFTQDLLAKIEAKGVKLVYLTLHVGLGTFRPVSVDNIEEHEMHSEFYTLSEETAQTLRDVKAAGGRVVAVGTTSIRTLETIGSKFNGDIKADSGWTNIFIKPGYEFKVVDAFSTNFHLPKSTLVMLVSAFAGREFVLDAYQHAIDERYRFFSFGDAMFVK

SEQ ID NO: 72561 - protein, 342 aa, Streptococcus gordonii
  misc_feature (1)..(342): sp|A8AYK5|QUEA_STRGC S-adenosylmethionine:tRNA ribosylt ransferase-isomerase OS=Streptococcus gordonii (strain Challis / ATCC 35105 / BCRC 15272 / CH1 / DL1 / V288) O X=467705 GN=queA PE=2 SV=1
MNTADFDFHLPEELIAQTPLEKRDASRLLVVDRSSGEFSDQHFDSIIDQLQPGDALVMNNTRVLPARLYGEKPGTGGHVELLLLKNTEGDQWEVLAKPAKRLKVGAQVSFGDGRLTATVVDELEHGGRIVRFDYQGIFLEVLESLGEMPLPPYIHEKLADRERYQTVYAKENGSAAAPTAGLHFTKELLAQIEAKGVKLVYLTLHVGLGTFRPVSVDNLDDHEMHSEFYTLSEEAAATLREVKANGHRVIAVGTTSIRTLETIGNKFKGDIQADSGWTNIFIKPGYQWQIVDAFSTNFHLPKSTLVMLVSAFAGRDLTLKAYEHAIAERYRFFSFGDAMFIK

SEQ ID NO: 72562 - protein, 342 aa, Streptococcus gordonii
  misc_feature (1)..(342): tr|A0A0M5KEV5|A0A0M5KEV5_STRGN S-adenosylmethionine:tRN A ribosyltransferase-isomerase OS=Streptococcus gordoni i OX=1302 GN=queA PE=3 SV=1
MNTADFDFHLPEELIAQTPLEKRDASRLLVVDRSSGEFSDQHFDSIIDQLQPGDALVMNNTRVLPARLYGEKPGTGGHVELLLLKNTEGDQWEVLAKPAKRLKVGAQVSFGDGRLTATVVDELEHGGRIVRFDYQGIFLEVLESLGEMPLPPYIHEKLADRERYQTVYAKENGSAAAPTAGLHFTKELLAQIEAKGVKLVYLTLHVGLGTFRPVSVDNLEEHEMHSEFYTLSEEAAATLREVKANGHRVIAVGTTSIRTLETIGNKFQGDIQADSGWTNIFIKPGYQWQIVDAFSTNFHLPKSTLVMLVSAFAGRELTLKAYEHAIAERYRFFSFGDAMFIK

SEQ ID NO: 72563 - protein, 342 aa, Streptococcus halitosis
  misc_feature (1)..(342): tr|A0A3R8NV82|A0A3R8NV82_9STRE S-adenosylmethionine:tRN A ribosyltransferase-isomerase OS=Streptococcus halitos is OX=2172545 GN=queA PE=3 SV=1
MNTADFDFHLPEELIAQTPLEKRDASKLLIVNRETGEMQDKHFHSIIDMLEPGDALVMNDTRVLPARLYGQKEETGGHVELLLLKNTSGDEWEVLAKPAKRLKVGTRVNFGDGRLSAVVTEELTHGGRIVRFEYQGIFLEVLESLGEMPLPPYIHEKLDDRERYQTVYAKESGSAAAPTAGLHFTRELLAEIQAKGVHLVYLTLHVGLGTFRPVSVDNLDEHEMHSEFYQLSEEAAATLRSVKENGGRVIAVGTTSIRTLETIGSKFDGQIQADSGWTNIFIKPGYEWKVVDAFSTNFHLPKSTLVMLVSAFAGRELVLDAYQHAIQERYRFFSFGDAMFIY

SEQ ID NO: 72564 - protein, 342 aa, Streptococcus henryi
  misc_feature (1)..(342): tr|A0A1G6B6A7|A0A1G6B6A7_9STRE S-adenosylmethionine:tRN A ribosyltransferase-isomerase OS=Streptococcus henryi OX=439219 GN=queA PE=3 SV=1
MNTEDFNFHLPEELIAQTPLEQRDSSKLLVIDRESHEMVDAHFDHILDELNPGDALVMNNTRVLPARLYGEKPDTHGHVELLLLKNTEGDQWEVLAKPAKRLRVGAQVSFGDGRLMATVVQELDHGGRIVEFSYDGIFLEVLESLGEMPLPPYIHEKLQDRERYQTVYAKENGSAAAPTAGLHFTQELLAKIEAKGVKLVELTLHVGLGTFRPVSVDNLDEHDMHSEFYSLSEEAAQTLRQVKANGGRVVAVGTTSIRTLETIGSKFDGQIKADSGWTKIFIKPGYTFKVVDAFSTNFHLPKSTLVMLVSAFAGREFVLEAYKHAVDQHYRFFSFGDAMFVK

SEQ ID NO: 72565 - protein, 342 aa, Streptococcus hyointestinalis
  misc_feature (1)..(342): tr|A0A380K6W2|A0A380K6W2_9STRE S-adenosylmethionine:tRN A ribosyltransferase-isomerase OS=Streptococcus hyointe stinalis OX=1337 GN=queA PE=3 SV=1
MNTNDFDFDLPEELIAQTPLKQRDSSKLLVIDHKKHTMVDTHFDHIIDELNPGDALVMNNTRVLPARLYGEKPDTHGHVELLLLKNIENDDWEVLAKPAKRLRVGAQISFGDGRLTAVVKEELEHGGRIVTFSYEGIFLEVLESLGEMPLPPYIHEKLEDRERYQTVYAKENGSAAAPTAGLHFTQDLLDKIAAKGVKLVYLTLHVGLGTFRPVSVDNVDEHEMHSEFYQLAEEAADTLNQVRSNGGRIVAVGTTSIRTLETIGTKFDGDIKADSGWTNIFIKPGYQFKVVDAFSTNFHLPKSTLVMLVSAFAGREFVLEAYKHAVDENYRFFSFGDAMFVK

SEQ ID NO: 72566 - protein, 342 aa, Streptococcus ictaluri
  misc_feature (1)..(342): tr|G5K5Y8|G5K5Y8_9STRE S-adenosylmethionine:tRNA ribosy ltransferase-isomerase OS=Streptococcus ictaluri 707-05 OX=764299 GN=queA PE=3 SV=1
MNTNDFDFDLPEELIAQTPLEKRDSSKLLIIDRDKKTMTDSHFDHIIDQLAPGDTLVMNNTRVLPARLYGEKEETHGHVELLLLKNLQGDQWEVLAKPAKRLKVGASISFGDGRLKATVLDELEHGGRIVSFSYEGIFLEVLESLGEMPLPPYIHEKLEDSERYQTVYAKENGSAAAPTAGLHFTQELLQKIEAKGVHLVYLTLHVGLGTFRPVSVENVDQHDMHSEFYSLSEEAAQTLREVKASGGRVVAVGTTSIRTLETIGSKFNGQIQADSGWTNIFIKPGYDFKVVDAFSTNFHLPKSTLVMLVSAFAGREFVLEAYKHAVDEKYRFFSFGDAMFVK

SEQ ID NO: 72567 - protein, 342 aa, Streptococcus infantarius
  misc_feature (1)..(342): tr|A0A380KMR9|A0A380KMR9_9STRE S-adenosylmethionine:tRN A ribosyltransferase-isomerase OS=Streptococcus infanta rius OX=102684 GN=queA PE=3 SV=1
MHTDDFDFNLPEELIAQTPLEKRDSSKLLVIDHKTHEMVDAHFDHILDELNSGDALVMNNTRVLPARLYGEKPDTHGHVELLLLKNTEGDQWEVLAKPAKRLHVGVKVSFGDGRLTATVVEELDNGGRIVEFDYDGIFLEVLESLGEMPLPPYIHEKLDDPNRYQTVYAKENGSAAAPTAGLHFTKELLEKIEAKGVKLVYVTLHVGLGTFRPVSVDNVEEHEMHSEFYRLSEEAAQTLRDVKATGGRVVAVGTTSIRTLETIGSKFNGEIKADSGWTNIFIKPGYDFKVVDAFSTNFHLPKSTLVMLVSAFAGREFVLEAYQHAIDERYRFFSFGDAMFVK

SEQ ID NO: 72568 - protein, 345 aa, Streptococcus infantis
  misc_feature (1)..(345): tr|E8K2M4|E8K2M4_9STRE S-adenosylmethionine:tRNA ribosy ltransferase-isomerase OS=Streptococcus infantis ATCC 7 00779 OX=889204 GN=queA PE=3 SV=1
MTTLNTNDFDFHLPEELIAQTPLEKRDASKLLMVNRKTGEFQDRHFHSIIEMLEPGDALVMNDTRVLPARLHGQKEETGGHVELLLLKNTAGDEWEVLAKPAKRLKVGTRVIFGDGRLSAVVTEELTHGGRIVRFEYEGIFLEVLESLGEMPLPPYIHEKLDDRERYQTVYAKESGSAAAPTAGLHFTKELLEEIQQKGVHLVYLTLHVGLGTFRPVSVDNLDEHEMHSEFYQLSEEAAATLRQVKENGGRVIAVGTTSIRTLETIGSKFDGQIQADSGWTNIFIKPGYDWKVVDAFSTNFHLPKSTLVMLVSAFAGRELVLKAYQHAIDEKYRFFSFGDAMFIY

SEQ ID NO: 72569 - protein, 345 aa, Streptococcus infantis
  misc_feature (1)..(345): tr|A0A0F2E6S5|A0A0F2E6S5_9STRE S-adenosylmethionine:tRN A ribosyltransferase-isomerase OS=Streptococcus infanti s OX=68892 GN=queA PE=3 SV=1
MTTLNTNDFDFHLPEELIAQTPLEKRDASKLLMVNRKTGEFQDRHFHSIIEMLEPGDALVMNDTRVLPARLHGQKEETGGHVELLLLKNTAGDEWEVLAKPAKRLKVGTRVIFGDGRLSAVVTEELTHGGRIVRFEYEGIFLEVLESLGEMPLPPYIHEKLDDRERYQTVYAKESGSAAAPTAGLHFTKELLEEIQQKGVHLVYLTLHVGLGTFRPVSVDNLDEHEMHSEFYQLSEEAAATLRQVKENGGRVIAVGTTSIRTLETIGSKFDGQIQADSGWTNIFIKPGYDWKVVDAFSTNFHLPKSTLVMLVSAFAGRELVLEAYQHAIDQKYRFFSFGDAMFIY

SEQ ID NO: 72570 - protein, 342 aa, Streptococcus iniae
  misc_feature (1)..(342): tr|A0A3L8GLE7|A0A3L8GLE7_STRIN S-adenosylmethionine:tRN A ribosyltransferase-isomerase OS=Streptococcus iniae O X=1346 GN=queA PE=3 SV=1
MNTNDFDFDLPEELIAQTPLEQRDSSKLLLLNTKDKSMKDSHFDHLIDYLNPGDALVMNNTRVLPARLHGEKIDTHGHVELLLLKNTEADQWEVLAKPAKRLKVGSQITFGDGRLQATVVKELEHGGRIVSFSYQGIFLEVLESLGEMPLPPYIHEKLDDSERYQTVYAKENGSAAAPTAGLHFTNDLLDRIKAKGVHLVYLTLHVGLGTFRPVSVDDVDNHEMHSEFYSLSQEAAQTLREVKAKGGRVVAVGTTSIRTLETIGSKFNGDIKADSGWTNIFIKPGYHFTVVDAFSTNFHLPKSTLVMLVSAFAGREFVLEAYKHAVNEKYRFFSFGDAMFVH

SEQ ID NO: 72571 - protein, 342 aa, Streptococcus intermedius
  misc_feature (1)..(342): tr|G6A456|G6A456_STRIT S-adenosylmethionine:tRNA ribosy ltransferase-isomerase OS=Streptococcus intermedius F03 95 OX=857292 GN=queA PE=3 SV=1
MNTADFDFHLPEELIAQTPLEKRDASRLLVVNHKTGQMEDTHFDAIIDQLHPGDALVMNDTRVLPARLHGEKPETGGHVELLLLKNTEGDNWEVLAKPAKRLKVGAAISFGDGRLTATVLEELEHGGRIVRFHYQGIFLEVLESLGEMPLPPYIHEKLKDRERYQTVYAKENGSAAAPTAGLHFTKELLAKIEAKGVKLVYLTLHVGLGTFRPVSVDNVDEHEMHSEFYTLSDEAAETLRQVKASGKRVIAVGTTSIRTLETIGSKFNGEIKAESGWTNIFIKPGYDWKVVDAFSTNFHLPKSTLVMLVSAFAGRELVLSAYQHAIDEKYRFFSFGDAVFIK

SEQ ID NO: 72572 - protein, 342 aa, Streptococcus intermedius
  misc_feature (1)..(342): tr|A0A428EXZ5|A0A428EXZ5_STRIT S-adenosylmethionine:tRN A ribosyltransferase-isomerase OS=Streptococcus interme dius OX=1338 GN=queA PE=3 SV=1
MNTADFDFHLPEELIAQTPLEKRDASRLLIVNHKTGQMEDTHFDAIIDQLHPGDALVMNDTRVLPARLHGEKIETGGHVELLLLKNTEGDDWEVLAKPAKRLKVGAQISFGDGRLTATILEELKHGGRIVRFHYQGIFLEVLESLGEMPLPPYIHEKLKDRERYQTVYAKENGSAAAPTAGLHFTKELLAKIKAKGVKLVYLTLHVGLGTFRPVSVDNVDEHEMHSEFYTLSEEAAETLRQVKVSGKRVIAVGTTSIRTLETIGSKFNGEIKADSGWTNIFIKPGYDWKVVDAFSTNFHLPKSTLVMLVSAFAGRELVLSAYQHAINEKYRFFSFGDAMFIK

SEQ ID NO: 72573 - protein, 342 aa, Streptococcus lutetiensis
  misc_feature (1)..(342): tr|S5RH68|S5RH68_9STRE S-adenosylmethionine:tRNA ribosy ltransferase-isomerase OS=Streptococcus lutetiensis 033 OX=1076934 GN=queA PE=3 SV=1
MHTDDFDFNLPEELIAQTPLEKRDSSKLLIIDHKTHEMVDTHFDHILDELNPGDALVMNNTRVLPARLYGEKPDTHGHVELLLLKNTEGDQWEVLAKPAKRLRVGAKVSFGDGRLTATVVEELDHGGRIVEFNYDGIFLEILESLGEMPLPPYIHEKLDDPDRYQTVYAKENGSAAAPTAGLHFTKELLEKIEAKGVKLVYVTLHVGLGTFRPVSVDNVEKHEMHSEFYRLSEEAAQTLRDVKAAGGRVVAVGTTSIRTLETIGSKFNGEIKADSGWTNIFIKPGYEFKVVDAFSTNFHLPKSTLVMLVSAFAGREFVLEAYQHAIDERYRFFSFGDAMFVK

SEQ ID NO: 72574 - protein, 342 aa, Streptococcus lutetiensis; identical to SEQ ID NO: 72573
  misc_feature (1)..(342): tr|A0A2X3VKF0|A0A2X3VKF0_9STRE S-adenosylmethionine:tRN A ribosyltransferase-isomerase OS=Streptococcus lutetie nsis OX=150055 GN=queA PE=3 SV=1

SEQ ID NO: 72575 - protein, 342 aa, Streptococcus macacae
  misc_feature (1)..(342): tr|G5JUV0|G5JUV0_9STRE S-adenosylmethionine:tRNA ribosy ltransferase-isomerase OS=Streptococcus macacae NCTC 11 558 OX=764298 GN=queA PE=3 SV=1
MNTSDFDFDLPEELIAQTPLKQRDSSKLLVIDHHHKTMKDTHFDHIIDELNPGDALVMNDTRVLPARLHGEKIATHGHVEFLLLKNTQGDQWEVLAKPAKRLKIGSQISFGDGRLKATVKEELEHGGRIVEFSYDGIFLEVLESLGEMPLPPYIHEKLKDRDRYQTVYAKENGSAAAPTAGLHFTEDLLSKIEAKGVNLVYLTLHVGLGTFRPVSVDNVDEHQMHSEFYSLSQEAAQTLKNVKASGGRIVAVGTTSIRTLETIGNKFAGHIEADSGWTNIFIKPGYQFKIVDAFSTNFHLPKSTLVMLVSAFAGRDFVLEAYKHAVDSHYRFFSFGDAMFVK

SEQ ID NO: 72576 - protein, 342 aa, Streptococcus macedonicus
  misc_feature (1)..(342): tr|H2A5D7|H2A5D7_STRMD S-adenosylmethionine:tRNA ribosy ltransferase-isomerase OS=Streptococcus macedonicus (st rain ACA-DC 198) OX=1116231 GN=queA PE=3 SV=1
MNINDFDFNLPEELIAQTPLEKRDSSKLLVIDHKTHEMVDAYFDHILDELNPGDALVMNNTRVLPARLYGEKTDTHGHVELLLLKNTQGDQWEVLAKPAKRLRVGAKVSFGDGRLTATVVEELDHGGRIVEFTYDGIFLEVLESLGEMPLPPYIHEKLDDPDRYQTVYAKENGSAAAPTAGLHFTQDLLAQIEAKGVKLVYLTLHVGLGTFRPVSVDNIEEHEMHSEFYTLSEEAAQTLRDVKAAGGRIVAVGTTSIRTLETIGSKFNGDIKADSGWTNIFIKPGYEFKVVDAFSTNFHLPKSTLVMLVSAFAGREFILDAYQHAIDERYRFFSFGDAMFVK

SEQ ID NO: 72577 - protein, 342 aa, Streptococcus macedonicus
  misc_feature (1)..(342): tr|A0A2G3NZ80|A0A2G3NZ80_STRMC S-adenosylmethionine:tRN A ribosyltransferase-isomerase OS=Streptococcus macedon icus OX=59310 GN=queA PE=3 SV=1
MNINDFDFNLPEELIAQTPLEKRDSSKLLVIDHKTHEMVDAYFDHILDELNPGDALVMNNTRVLPARLYGEKTDTHGHVELLLLKNTQGDQWEVLAKPAKRLRVGAKVSFGDGRLTATVVEELDHGGRIVEFTYDGIFLEVLESLGEMPLPPYIHEKLDDPDRYQTVYAKENGSAAAPTAGLHFTQDLLAQIEAKGIKLVYLTLHVGLGTFRPVSVDNIEEHEMHSEFYTLSEEAAQTLRDVKAAGGRIVAVGTTSIRTLETIGSKFNGDIKADSGWTNIFIKPGYEFKVVDAFSTNFHLPKSTLVMLVSAFAGREFILDAYQHAIDERYRFFSFGDAMFVK

SEQ ID NO: 72578 - protein, 342 aa, Streptococcus massiliensis
  misc_feature (1)..(342): tr|A0A380L0F8|A0A380L0F8_9STRE S-adenosylmethionine:tRN A ribosyltransferase-isomerase OS=Streptococcus massili ensis OX=313439 GN=queA PE=3 SV=1
MNTADFDFDLPEELIAQTPLEKRDASRLLIVNRQTGEFSDQHFDNIIDQLEPGDALVMNNTRVLPARLYGQKPETGGHVELLLLKNITGDEWEVLAKPAKRLHIGTKISFGDGRLNAVVIEELDHGGRIVRFDYEGIFLEVLESLGEMPLPPYIHEKLEDRERYQTVYAKENGSAAAPTAGLHFTPELLEKIAAKGVHLVHLTLHVGLGTFRPVSVDNLDEHEMHSEFYQLSEEAAATLRQVKAAGKRIIAVGTTSIRTLETIGNKFNGAIQADSGWTNIFIYPGYEWKIVDAFSTNFHLPKSTLVMLVSAFAGRKLTLSAYQHAIEERYRFFSFGDAMFVK

SEQ ID NO: 72579 - protein, 342 aa, Streptococcus merionis
  misc_feature (1)..(342): tr|A0A239SSR7|A0A239SSR7_9STRE S-adenosylmethionine:tRN A ribosyltransferase-isomerase OS=Streptococcus merioni s OX=400065 GN=queA PE=3 SV=1
MNTADFDFNLPEELIAQTPLLKRDSSRLLVLDRKTGTMSDQHFDQIIDQLNPGDALVMNNTRVLPARLYGQKPETGGHVELLLLKNTKGDEWEVLAKPAKRLKKGTVISFGDGRLTATITRELEHGGRIVQFDYDGIFLEVLESLGEMPLPPYIHEKLDDRERYQTVYAKENGSAAAPTAGLHFTEDLLNKIAAKGVKLVELTLHVGLGTFRPVSVDNVDEHDMHSEFYSLSEEAAQVLRDVKAAGGRIVAVGTTSIRTLETIGAKFDGEIVADSGWTNIFIKPGYHFKIVDAFSTNFHLPKSTLVMLVAAFAGREFILDAYKHAVDEQYRFFSFGDAMFVK

SEQ ID NO: 72580 - protein, 342 aa, Streptococcus milleri
  misc_feature (1)..(342): tr|A0A448D1C9|A0A448D1C9_9STRE S-adenosylmethionine:tRN A ribosyltransferase-isomerase OS=Streptococcus milleri OX=33040 GN=queA PE=3 SV=1
MNTADFDFHLPEELIAQTPLEKRDASRLLVVNHKTGQMEDTHFDAIIDQLHPGDALVMNDTRVLPARLHGEKPETGGHVELLLLKNTEGDNWEVLAKPAKRLKVGAAISFGDGRLTATVLEELEHGGRIVRFHYQGIFLEVLESLGEMPLPPYIHEKLKDRERYQTVYAKENGSAAAPTAGLHFTKELLAKIEAKGVKLVYLTLHVGLGTFRPVSVNNVDEHEMHSEFYTLSDEAAETLRQVKASGKRVIAVGTTSIRTLETIGSKFNGEIKADSGWTNIFIKPGYDWKVVDAFSTNFHLPKSTLVMLVSAFAGRELVLSAYQHAIDEKYRFFSFGDAMFIK

SEQ ID NO: 72581 - protein, 342 aa, Streptococcus milleri; identical to SEQ ID NO: 72544
  misc_feature (1)..(342): tr|A0A380L3C2|A0A380L3C2_9STRE S-adenosylmethionine:tRN A ribosyltransferase-isomerase OS=Streptococcus milleri OX=33040 GN=queA PE=3 SV=1

SEQ ID NO: 72582 - protein, 342 aa, Streptococcus minor
  misc_feature (1)..(342): tr|A0A3P1VG25|A0A3P1VG25_9STRE S-adenosylmethionine:tRN A ribosyltransferase-isomerase OS=Streptococcus minor O X=229549 GN=queA PE=3 SV=1
MNTTDFDFDLPEELIAQTPLEVRDSSRLLILDKKQKTLTDSHFDAILDQLKPGDALVMNNTRVLPARLYGEKPDTHGHVELLLLKNTQADQWEVLAKPAKRLRVDARISFGDGRLMATVLEELEHGGRIVEFSYDGIFLEVLESLGEMPLPPYIHEKLEDRERYQTVYAKENGSAAAPTAGLHFTKELLEQIEAKGVHLVYLTLHVGLGTFRPVSVDNVEEHEMHSEYYQLSQEAADTLNQVKKNGGRVVAVGTTSIRTLETIGNKFDGQLEADSGWTNIFIKPGYEFKVVDAFSTNFHLPKSTLVMLVAAFAGREFVLEAYRHAVEERYRFFSFGDAMFLS

SEQ ID NO: 72583 - protein, 342 aa, Streptococcus mitis
  misc_feature (1)..(342): tr|A0A1X1JIN5|A0A1X1JIN5_STRMT S-adenosylmethionine:tRN A ribosyltransferase-isomerase OS=Streptococcus mitis O X=28037 GN=queA PE=3 SV=1
MNTADFDFHLPEELIAQTPLEKRDASKLLIVNRETGEMQDKHFHSIIDMLEPGDALVMNDTRVLPARLYGQKEETGGHVELLLLKNISGDEWEVLAKPAKRLKIGTRVSFGDGRLSAVVTEELTHGGRIVRFEYQGIFLEVLESLGEMPLPPYIHEKLDDRERYQTVYAKESGSAAAPTAGLHFTKELLAEIQAKGVHLVYLTLHVGLGTFRPVSVDNLDEHEMHSEFYQLSEEAAATLRSVKENGGRVIAVGTTSIRTLETIGSKFDGQIQADSGWTNIFIKPGYEWKVVDAFSTNFHLPKSTLVMLVSAFAGRELVLDAYHHAIQEHYRFFSFGDAMFIY

SEQ ID NO: 72584 - protein, 342 aa, Streptococcus mitis
  misc_feature (1)..(342): tr|F9HQ43|F9HQ43_STRMT S-adenosylmethionine:tRNA ribosy ltransferase-isomerase OS=Streptococcus mitis SK1080 OX =1008453 GN=queA PE=3 SV=1
MNTADFDFYLPEELIAQTPLEKRDASKLLIVNRETGEMQDKHFHSIIDMLEPGDALVMNDTRVLPARLYGQKEETGGHVELLLLKNTAGDEWEVLAKPAKRLKVGTRVSFGDGRLSAVVTEELTHGGRIVRFEYQGIFLEVLESLGEMPLPPYIHEKLDDRERYQTVYAKESGSAAAPTAGLHFTKELLAEIQAKGVHLVYLTLHVGLGTFRPVSVDNLDEHEMHSEFYQLSEEAAATLRSVKENGGRVIAVGTTSIRTLETIGSKFEGQIQADSGWTNIFIKPGYEWKVVDAFSTNFHLPKSTLVMLVSAFAGRELVLDAYHHAIQEHYRFFSFGDAMFIY

SEQ ID NO: 72585 - protein, 342 aa, Streptococcus mutans
  misc_feature (1)..(342): sp|Q8DV72|QUEA_STRMU S-adenosylmethionine:tRNA ribosylt ransferase-isomerase OS=Streptococcus mutans serotype c (strain ATCC 700610 / UA159) OX=210007 GN=queA PE=3 SV =1
MNTSDFDFNLPEALIAQTPLKKRDSSKLLVVDHQKKTMKDTHFDHIIDELNSGDALVMNDTRVLPARLHGEKTVTHGHVELLLLKNIQGDQWEVLAKPAKRLKVGSHISFGDGRLKAIIKEELDHGGRIVEFSYEGIFLEVLESLGEMPLPPYIHEKLEDRDRYQTVYAKENGSAAAPTAGLHFTEELLSKIEAKGVKLVYLTLHVGLGTFRPVSVDNVEEHQMHSEFYSLSPEAAQTLKDVKANGGRIVAVGTTSIRTLETIGNKFAGQIEADSGWTNIFIKPGYQFKIVDAFSTNFHLPKSTLVMLVSAFAGRDFILDAYKHAVDKHYRFFSFGDAMFVK

SEQ ID NO: 72586 - protein, 342 aa, Streptococcus mutans
  misc_feature (1)..(342): tr|A0A2J9QFB5|A0A2J9QFB5_STRMG S-adenosylmethionine:tRN A ribosyltransferase-isomerase OS=Streptococcus mutans OX=1309 GN=queA PE=3 SV=1
MNTSDFDFNLPEALIAQTPLKQRDSSKLLVVDHQKKTMKDTHFDHIIDELNSGDALVMNDTRVLPARLHGEKTVTHGHVELLLLKNIQGDQWEVLAKPAKRLKVGSHISFGDGRLKAIIKEELDHGGRIVEFSYEGIFLEVLESLGEMPLPPYIHEKLEDRDRYQTVYAKENGSAAAPTAGLHFTEELLSKIEAKGVKLVYLTLHVGLGTFRPVSVDNVEEHQMHSEFYSLSPEAAQTLKDVKANGGRIVAVGTTSIRTLETIGNKFAGQIEADSGWTNIFIKPGYQFKIVDAFSTNFHLPKSTLVMLVSAFAGRDFILDAYKHAVDKHYRFFSFGDAMFVK

SEQ ID NO: 72587 - protein, 342 aa, Streptococcus oralis
  misc_feature (1)..(342): tr|A0A428ISA9|A0A428ISA9_STROR S-adenosylmethionine:tRN A ribosyltransferase-isomerase OS=Streptococcus oralis OX=1303 GN=queA PE=3 SV=1
MNTADFDFHLPEELIAQTPLEKRDASKLLIVNRETGEMQDKHFHSIIDMLEPGDALVMNDTRVLPARLYGQKEETGGHVELLLLKNTSGDEWEVLAKPAKRLKVGTRVSFGDGRLSAVVTEELTHGGRIVRFEYQGIFLEVLESLGEMPLPPYIHEKLDDRERYQTVYAKESGSAAAPTAGLHFTKELLAEIQAKGVHLVYLTLHVGLGTFRPVSVDNLDEHEMHSEFYQLSEEAAATLRSVKENGGRVIAVGTTSIRTLETIGSKFEGQIQADSGWTNIFIKPGYEWKVVDAFSTNFHLPKSTLVMLVSAFAGRELVLDAYHHAIQEHYRFFSFGDAMFIY

SEQ ID NO: 72588 - protein, 342 aa, Streptococcus oralis
  misc_feature (1)..(342): tr|A0A1X1HDD7|A0A1X1HDD7_STROR S-adenosylmethionine:tRN A ribosyltransferase-isomerase OS=Streptococcus oralis subsp. oralis OX=1891914 GN=queA PE=3 SV=1
MNTADFDFHLPEELIAQTPLEKRDSSKLLIVNRETGEFQDKHFHSIIDMLEPGDALVMNDTRVLPARLYGQKEETGGHVELLLLKNTSGDEWEVLAKPAKRLKVGTRVNFGDGRLSAVVTEELTHGGRIVRFEYRGIFLEVLESLGEMPLPPYIHEKLDDRERYQTVYAKESGSAAAPTAGLHFTKELLAEIQAKGVHLVYLTLHVGLGTFRPVSVDNLDEHEMHSEFYQLSEEAAATLRSVKENGGRVIAVGTTSIRTLETIGSKFNGQIQSDSGWTNIFIKPGYDWKVVDAFSTNFHLPKSTLVMLVSAFAGRDLVLDAYHHAIQEHYRFFSFGDAMFIY

SEQ ID NO: 72589 - protein, 342 aa, Streptococcus pantholopis
  misc_feature (1)..(342): tr|A0A172Q8C9|A0A172Q8C9_9STRE S-adenosylmethionine:tRN A ribosyltransferase-isomerase OS=Streptococcus panthol opis OX=1811193 GN=queA PE=3 SV=1
MKTDSFDFNLPEELIAQTPLKKRDASKLLIINRQTHKILDSHFDHIIDELNPGDALVMNDTRVLPARLHGEKKETHGHVELLLLKNIQGDQWEVLAKPAKRLKTGSEISFGDGRLTASVVKELPEGGRLVEFSYNGIFLEVLESLGEMPLPPYIHEKLSDRERYQTVYAKENGSAAAPTAGLHFTQELLQKIKDKGVKLVYLTLHVGLGTFRPVAADDIKEHKMHSEFYTLSEEAAQTLRQVKAEGGRIVAVGTTSIRTLETIGQKYKGQIQADSGWTDIFIKPGYQFQIVDAFSTNFHLPKSTLIMLVSAFAGQEFVLEAYHHAIEENYRFFSFGDAMFVK

SEQ ID NO: 72590 - protein, 342 aa, Streptococcus parasanguinis
  misc_feature (1)..(342): tr|A0A414CIT6|A0A414CIT6_STRPA S-adenosylmethionine:tRN A ribosyltransferase-isomerase OS=Streptococcus parasan guinis OX=1318 GN=queA PE=3 SV=1
MNTNDFDFDLPEELIAQTPLEKRDASKLLILDRKTGQFQDRHFDAILDELEPGDALVMNNTRVLPARLHGVKPETGGHVEFLLLKNTQDDCWEVLAKPAKRLKVGATVIFGDGRLTATVEEELEHGGRIVRFHYQGIFLEVLESLGEMPLPPYIHEKLADRERYQTVYAKENGSAAAPTAGLHFTQELLQKIEAKGVHLVYLTLHVGLGTFRPVSVDNLEDHEMHSEFYQLSEEAAATLRQVKAAGKRIVAVGTTSIRTLETIGNKFDGDIQADSGWTNIFIKPGYEWKVVDAFSTNFHLPKSTLVMLVSAFAGRELTLEAYHHAIQERYRFFSFGDAMFIK

SEQ ID NO: 72591 - protein, 342 aa, Streptococcus parasanguinis
  misc_feature (1)..(342): tr|A0A0F3H3R9|A0A0F3H3R9_STRPA S-adenosylmethionine:tRN A ribosyltransferase-isomerase OS=Streptococcus parasan guinis OX=1318 GN=queA PE=3 SV=1
MNTNDFDFDLPEELIAQTPLEKRDASKLLILDRKTGQFQDRHFDAILDELEPGDALVMNNTRVLPARLHGVKPETGGHVEFLLLKNTQDDCWEVLAKPAKRLKVGATVSFGDGRLTATVEEELEHGGRIVRFHYQGIFLEVLESLGEMPLPPYIHEKLADRERYQTVYAKENGSAAAPTAGLHFTQELLQKIEAKGVHLVYLTLHVGLGTFRPVSVDNLEDHEMHSEFYQLSEEAAATLRQVKAAGKRIVAVGTTSIRTLETIGNKFDGDIQADSGWTNIFIKPGYEWKVVDAFSTNFHLPKSTLVMLVSAFAGRELTLEAYHHAIQERYRFFSFGDAMFIK

SEQ ID NO: 72592 - protein, 342 aa, Streptococcus parasuis
  misc_feature (1)..(342): tr|A0A4Q8L1L9|A0A4Q8L1L9_9STRE S-adenosylmethionine:tRN A ribosyltransferase-isomerase OS=Streptococcus parasui s OX=1501662 GN=queA PE=3 SV=1
MNTADFDFDLPEELIAQVPLEKRDSSKLLILDREKHSMVDSRFDHIIDQLHPGDALVMNNTRVLPARLYGYKPETNGHVELLLLKNTQGDQWEVLAKPAKRLKVGTTVAFGDGRLTATIVEELEHGGRIVEFTYDGIFLEVLESLGEMPLPPYIHEKLEDRERYQTVYAKENGSAAAPTAGLHFTQELLEKIEAKGVKLVYLTLHVGLGTFRPVSVENVDEHEMHSEFYNLTAEAAQTLNQIKENGGRIVAVGTTSIRTLETIGNKFDGRLEADSGWTNIFIKPGYTFRIVDAFSTNFHLPKSTLVMLVSAFAGREFTLEAYKHAVEERYRFFSFGDAMFIQ

SEQ ID NO: 72593 - protein, 342 aa, Streptococcus parauberis
  misc_feature (1)..(342): tr|F1Z1Z3|F1Z1Z3_9STRE S-adenosylmethionine:tRNA ribosy ltransferase-isomerase OS=Streptococcus parauberis NCFD 2020 OX=873447 GN=queA PE=3 SV=1
MNTNDFDFDLPEELIAQTPLEKRDSSKLLIIDHKKETMVDSHFDHIIKELNPGDALVMNNTRVLPARLYGEKPDTKGHVELLLLKNTSGDQWEVLAKPAKRLRVGSQVSFGDGRLSATVIEELEHGGRIVEFSYDGIFLEVLESLGEMPLPPYIHEKLEDSERYQTVYAKENGSAAAPTAGLHFTQELLEKIEAKGVKLVYLTLHVGLGTFRPVSVDNVDEHDMHSEFYSLSEEAATTLRQVKADGGRVIAVGTTSIRTLETIGSKFKGEIVADSGWTNIFIKPGYQFTIVDAFSTNFHLPKSTLVMLVSAFAGRDFVLEAYKHAVNEKYRFFSFGDAMFVK

SEQ ID NO: 72594 - protein, 342 aa, Streptococcus parauberis
  misc_feature (1)..(342): tr|A0A1S1ZP44|A0A1S1ZP44_9STRE S-adenosylmethionine:tRN A ribosyltransferase-isomerase OS=Streptococcus paraube ris OX=1348 GN=queA PE=3 SV=1
MNTNDFDFDLPEELIAQTPLEKRDSSKLLIIDHKKETMVDSHFDHIIKELNPGDALVMNNTRVLPARLHGEKPDTKGHVELLLLKNTSGDQWEVLAKPAKRLRVGSQVSFGDGRLSATVIEELEHGGRIVEFSYDGIFLEVLESLGEMPLPPYIHEKLEDSERYQTVYAKENGSAAAPTAGLHFTQELLEKIEAKGVKLVYLTLHVGLGTFRPVSVDNVDEHDMHSEFYSLSEEAATTLRQVKADGGRVIAVGTTSIRTLETIGSKFKGKIVADSGWTNIFIKPGYQFTIVDAFSTNFHLPKSTLVMLVSAFAGRDFVLEAYKHAVNEKYRFFSFGDAMFVK

SEQ ID NO: 72595 - protein, 342 aa, Streptococcus pasteurianus
  misc_feature (1)..(342): tr|F5X5G6|F5X5G6_STRPX S-adenosylmethionine:tRNA ribosy ltransferase-isomerase OS=Streptococcus pasteurianus (s train ATCC 43144 / JCM 5346 / CDC 1723-81) OX=981540 GN =queA PE=3 SV=1
MNTNDFDFNLPEELIAQTPLEKRDSSKLLVIDHKTHEMVDAHFDHILDELNPGDALVMNNTRVLPARLYGEKPDTHGHVELLLLKNTQGDQWEVLAKPAKRLRVGVKVSFGDGRLTATVVEELDHGGRVVEFAYDGIFLEVLESLGEMPLPPYIHEKLDDPDRYQTVYAKENGSAAAPTAGLHFTQDLLAKIEAKGVKLVYLTLHVGLGTFRPVSVDNIEEHEMHSEFYTLSEEAAQTLRDVKAAGGRVVAVGTTSIRTLETIGSKFNGDIKADSGWTNIFIKPGYEFKVVDAFSTNFHLPKSTLVMLVSAFAGREFVLDAYQHAIDEHYRFFSFGDAMFVK

SEQ ID NO: 72596 - protein, 342 aa, Streptococcus pasteurianus
  misc_feature (1)..(342): tr|A0A4P7WHT3|A0A4P7WHT3_9STRE S-adenosylmethionine:tRN A ribosyltransferase-isomerase OS=Streptococcus pasteur ianus OX=197614 GN=queA PE=3 SV=1
MNTNDFDFNLPEELIAQTPLEKRDSSKLLVIDHKTHEMVDAHFDHILDELNPGDALVMNNTRVLPARLYGEKPDTHGHVELLLLKNTQGDQWEVLAKPAKRLRVGVKVSFGDGRLTATVVEELDHGGRVVEFAYDGIFLEVLESLGEMPLPPYIHEKLDDPDRYQTVYAKENGSAASPTAGLHFTQDLLAKIEAKGVKLVYLTLHVGLGTFRPVSVDNIEEHEMHSEFYTLSEEAAQTLRDVKAAGGRVVAVGTTSIRTLETIGSKFNGDIKADSGWTNIFIKPGYEFKVVDAFSTNFHLPKSTLVMLVSAFAGREFVLDAYQHAIDEHYRFFSFGDAMFVK

SEQ ID NO: 72597 - protein, 342 aa, Streptococcus penaeicida
  misc_feature (1)..(342): tr|A0A2N8LC85|A0A2N8LC85_9STRE S-adenosylmethionine:tRN A ribosyltransferase-isomerase OS=Streptococcus penaeic ida OX=1765960 GN=queA PE=3 SV=1
MNTNDFDFELPEELIAQTPLEQRDSSKLLIIDHEKKTMVDSHFDHIIDQLNPGDALVMNNTRVLPARLHGEKPDTHGHVELLLLKNTQGDDWEVLAKPAKRLKVGSQISFGDGRLKATVLEELEHGGRIVSFSYEGIFLEVLESLGEMPLPPYIHEKLEDSERYQTVYAKENGSAAAPTAGLHFTQELLEKIQAKGVHLVYLTLHVGLGTFRPVSVDNVDAHEMHSEFYHLSEESAQILRDVKKAGGRVVAVGTTSIRTLETIGSKFKGEIQADSGWTNIFIKPGYKFTVVDAFSTNFHLPKSTLVMLVSAFAGREFVLEAYKHAVDEKYRFFSFGDAMFVK

SEQ ID NO: 72598 - protein, 342 aa, Streptococcus peroris
  misc_feature (1)..(342): tr|E8KDF0|E8KDF0_9STRE S-adenosylmethionine:tRNA ribosy ltransferase-isomerase OS=Streptococcus peroris ATCC 70 0780 OX=888746 GN=queA PE=3 SV=1
MNTNDFDFDLPEELIAQTPLEQRDASRLLIVNRKTGEFQDRHFHSIIEMLEPGDALVMNDTRVLPARLHGEKEETGGHVELLLLKNTVGDEWEVLAKPAKRLKVGARVIFGDGRLSAVVTEELTHGGRIVRFEYEGIFLEVLESLGEMPLPPYIHEKLDDQERYQTVYAKESGSAAAPTAGLHFTKELLEEIQQKGVHLVYLTLHVGLGTFRPVTVDNLDEHEMHSEFYQLSEEAAATLRQIKENGGRVIAVGTTSIRTLETIGSKFDGQIQADSGWTNIFIKPGYDWKVVDAFSTNFHLPKSTLVMLVSAFAGRELVLEAYQHAIEERYRFFSFGDAMFIY

SEQ ID NO: 72599 - protein, 342 aa, Streptococcus pharyngis
  misc_feature (1)..(342): tr|A0A5C5SF47|A0A5C5SF47_9STRE S-adenosylmethionine:tRN A ribosyltransferase-isomerase OS=Streptococcus pharyng is OX=1562651 GN=queA PE=3 SV=1
MNVNDFDFYLPERLIAQTPLEKRDASKLLVLDREQGSMTDGHFHDIIDHLNPGDALVMNNTRVLPARLYGEKPDTHGHVEFLLLKNTQDNQWEVLAKPAKRLKVGSKVSFGDGRLMATVIEELEHGGRIVEFDYQGIFLEVLESLGEMPLPPYIHEKLADRERYQTVYAKENGSAAAPTAGLHFTPELLAAIEAKGVKLVYLTLHVGLGTFRPVSVDNIEDHDMHSEFYHLSAQAAKTLNQVKAKGGRIVAVGTTSIRTLETIGAKYDGQLQADSGWTNIFIKPGYQFKVVDAFSTNFHLPKSTLVMLVAAFAGRDFTLEAYQHAVEQDYRFFSFGDAMFVK

SEQ ID NO: 72600 - protein, 342 aa, Streptococcus phocae
  misc_feature (1)..(342): tr|A0A0P6S2B8|A0A0P6S2B8_9STRE S-adenosylmethionine:tRN A ribosyltransferase-isomerase OS=Streptococcus phocae OX=119224 GN=queA PE=3 SV=1
MNTNDFDFELPEELIAQTPLEKRDSSKLLIIDHKKKTMVDSHFDHIIDQLNPGDALVMNNTRVLPARLYGEKRETHGHVELLLLKNTQGDQWEVLAKPAKRLKVGAEVSFGDGRLTARIIEELEHGGRIVEFSYDGIFLEVLESLGEMPLPPYIHEKLDDSERYQTVYAKENGSAAAPTAGLHFTKDLLKQIEEKGVHLVYLTLHVGLGTFRPVSVDNLEEHDMHSEFYSLSEDSARTLRQVKASGGRIVAVGTTSIRTLETIGSKFNGAIQADSGWTSIFIKPGYQFTVVDAFSTNFHLPKSTLVMLVSAFAGRDFVLDAYQHAVEEKYRFFSFGDAMFVQ

SEQ ID NO: 72601 - protein, 348 aa, Streptococcus pluranimalium
  misc_feature (1)..(348): tr|A0A2L0D363|A0A2L0D363_9STRE S-adenosylmethionine:tRN A ribosyltransferase-isomerase OS=Streptococcus plurani malium OX=82348 GN=queA PE=3 SV=1
MNTKDFDFDLPEELIAQTPLEKRDSSKLLVLDPVTTEMTDTHFDHIIDQLNPGDALVMNNTRVLPARLYGEKPDTHGHVEFLLLKNTSGDNWEVLAKPAKRLKVGSTVSFGDGRLMAEVIEELEHGGRIVRFSYDGIFLEVLESLGEMPLPPYIHEKLDDRDRYQTVYAKENGSAAAPTAGLHFTPELLEKIEAKGVKLVYLTLHVGLGTFRPVSVDNVDEHEMHSEFYQLSQEAASTLNQVKQEGGRIVAVGTTSIRTLETIGNKFNGKLEADSGWTNIFIKPGYHFTVVDAFSTNFHLPKSTLVMLVAAFAGRDFILDAYKHAVENKYRFFSFGDAMFLKRSYKED

SEQ ID NO: 72602 - protein, 348 aa, Streptococcus pluranimalium
  misc_feature (1)..(348): tr|A0A345VIR3|A0A345VIR3_9STRE S-adenosylmethionine:tRN A ribosyltransferase-isomerase OS=Streptococcus plurani malium OX=82348 GN=queA PE=3 SV=1
MNTKDFDFDLPEELIAQTPLEKRDSSKLLVLDPVTKEMTDTHFDHIIDQLNPGDALVMNNTRVLPARLYGEKPDTHGHVEFLLLKNTSGDNWEVLAKPAKRLKVGSTVSFGDGRLMAEVIEELEHGGRIVRFSYDGIFLEVLESLGEMPLPPYIHEKLDDRDRYQTVYAKENGSAAAPTAGLHFTPELLEKIEAKGVKLVYLTLHVGLGTFRPVSVDNVDEHEMHSEFYQLSQEAASTLNQVKQEGGRVVAVGTTSIRTLETIGNKFNGKLEADSGWTNIFIKPGYDFTVVDAFSTNFHLPKSTLVMLVSAFAGRDFILDAYKHAVDNKYRFFSFGDAMFLKRSYKED

SEQ ID NO: 72603 - protein, 342 aa, Streptococcus pneumoniae
  misc_feature (1)..(342): sp|Q8DPA0|QUEA_STRR6 S-adenosylmethionine:tRNA ribosylt ransferase-isomerase OS=Streptococcus pneumoniae (strai n ATCC BAA-255 / R6) OX=171101 GN=queA PE=3 SV=2
MNTADFDFHLPEELIAQTPLEKRDASKLLIVNRETGEMQDKHFHSIIDMLEPGDALVMNDTRVLPARLYGQKVETGSHVELLLLKNTSGDEWEVLAKPAKRLKVGTRISFGDGRLSAVVTEELTHGGRIVRFEYQRIFLEVLESLGEMPLPPYIHEKLDDRERYQTVYAKESGSAAAPTAGLHFTKELLAEIQAKGVHLVYLTLHVGLGTFRPVSVDNLDEHEMHSEFYQLSEEAAATLRSVKENGGRVIAVGTTSIRTLETIGSKFDGQIQADSGWTNIFIKPGYEWKVVDAFSTNFHLPKSTLVMLVSAFAGRELVLDAYHHSIQEHYRFFSFGDAMFIY

SEQ ID NO: 72604 - protein, 342 aa, Streptococcus pneumoniae
  misc_feature (1)..(342): sp|B5E5S4|QUEA_STRP4 S-adenosylmethionine:tRNA ribosylt ransferase-isomerase OS=Streptococcus pneumoniae seroty pe 19F (strain G54) OX=512566 GN=queA PE=3 SV=1
  misc_feature (91)..(91): Xaa can be any naturally occurring amino acid
MNTADFDFHLPEELIAQTPLEKRDASKLLIVNRETGEMQDKHFHSIIDMLEPGDALVMNDTRVLPARLYGQKVETGGHVELLLLKNTSGDXWEVLAKPAKRLKVGTRISFGDGRLSAVVTEELTHGGRIVRFEYQGIFLEVLESLGEMPLPPYIHEKLDDRERYQTVYAKESGSAAAPTAGLHFTKELLAEIQAKGVHLVYLTLHVGLGTFRPVSVDNLDEHEMHSEFYQLSEEAAATLRSVKENGGRVIAVGTTSIRTLETIGSKFDGQIQADSGWTNIFIKPGYEWKVVDAFSTNFHLPKSTLVMLVSAFAGRELVLDAYHHAIQEHYRFFSFGDAMFIY

SEQ ID NO: 72605 - protein, 342 aa, Streptococcus porcinus
  misc_feature (1)..(342): tr|A0A4U9XJ37|A0A4U9XJ37_STRPO S-adenosylmethionine:tRN A ribosyltransferase-isomerase OS=Streptococcus porcinu s OX=1340 GN=queA PE=3 SV=1
MNTNDFDFELPEELIAQTPLEQRDRSKLLIIDYKTKTMVDSHFDHIIDQLNPGDALVMNNTRVLPARLHGEKPDTHGHVELLLLKNIQGDDWEVLAKPAKRLKVGSSISFGDGRLTATVIKELEHGGRIVSFSYQGIFLEVLESLGEMPLPPYIHEKLDDSERYQTVYAKENGSAAAPTAGLHFTQALLQKIQEKGVHLVYLTLHVGLGTFRPVSVDNVDEHEMHSEFYQLSEEAADTLRQVKKAGGRVVAVGTTSIRTLETIGNKFNGNIQADSGWTNIFIKPGYRFTVVDAFSTNFHLPKSTLVMLVSAFAGREFVLEAYKHAINEHYRFFSFGDAMFVK

SEQ ID NO: 72606 - protein, 342 aa, Streptococcus porcinus
  misc_feature (1)..(342): tr|A0A4U9Y437|A0A4U9Y437_STRPO S-adenosylmethionine:tRN A ribosyltransferase-isomerase OS=Streptococcus porcinu s OX=1340 GN=queA PE=3 SV=1
MNTNDFDFELPEELIAQTPLEQRDSSKLLVIDHKTKKMVDSHFDHIIDQLNPGDALVMNNTRVLPARLHGEKPDTHGHVELLLLKNTKGDEWEVLAKPAKRLKVGSTISFGDGRLKATVIKELDHGGRIVSFSYQGIFLEVLESLGEMPLPPYIHEKLDDSERYQTVYAKENGSAAAPTAGLHFTQELLQRIQEKGVHLVYLTLHVGLGTFRPVSVDNVDEHEMHSEFYQLSEEAANTLRQVKKAGGRVVAVGTTSIRTLETIGNKFNGGIQADSGWTNIFIKPGYRFTVVDAFSTNFHLPKSTLVMLVSAFAGRDFVLEAYKHAISEHYRFFSFGDAMFVK

SEQ ID NO: 72607 - protein, 342 aa, Streptococcus pseudopneumoniae
  misc_feature (1)..(342): tr|V8IBF3|V8IBF3_9STRE S-adenosylmethionine:tRNA ribosy ltransferase-isomerase OS=Streptococcus pseudopneumonia e 5247 OX=1415761 GN=queA PE=3 SV=1
MNTADFDFHLPEELIAQTPLEKRDASKLLIVNRETGKMQDKHFHSIIDMLEPGDALVMNDTRVLPARLYGQKEETGGHVELLLLKNTAGDEWEVLAKPAKRLKVGTRISFGDGRLSAVITEELTHGGRIVHFEYHGIFLEVLESLGEMPLPPYIHEKLDDRERYQTVYAKESGSAAAPTAGLHFTKELLAEIQAKGVHLVYLTLHVGLGTFRPVSVDNLDEHEMHSEFYQLSEEAAATLRSVKENGGRVIAVGTTSIRTLETIGSKFDGQIQADSGWTNIFIKPGYEWKVVDAFSTNFHLPKSTLVMLVSAFAGRELVLDAYHHAIQEHYRFFSFGDAMFIY

SEQ ID NO: 72608 - protein, 342 aa, Streptococcus pseudopneumoniae
  misc_feature (1)..(342): tr|A0A3A4WU06|A0A3A4WU06_9STRE S-adenosylmethionine:tRN A ribosyltransferase-isomerase OS=Streptococcus pseudop neumoniae OX=257758 GN=queA PE=3 SV=1
MNTADFDFHLPEELIAQTPLEKRDASKLLIVNRETGKMQDKHFHSIIDMLEPGDALVMNDTRVLPARLYGQKEETGGHVELLLLKNTAGDEWEVLAKPAKRLKVGTRISFGDGRLSAVITEELTHGGRIVRFEYHGIFLEVLESLGEMPLPPYIHEKLDDRERYQTVYAKESGSAAAPTAGLHFTKELLAEIQAKGVHLVYLTLHVGLGTFRPVSVDNLDEHEMHSEFYQLSEEAAATLRSVKENGGRVIAVGTTSIRTLETIGSKFDGQIQADSGWTNIFIKPGYEWKVVDAFSTNFHLPKSTLVMLVSAFAGRELVLDAYHHAIQEHYRFFSFGDAMFIY

SEQ ID NO: 72609 - protein, 342 aa, Streptococcus pseudoporcinus
  misc_feature (1)..(342): tr|G5K8W9|G5K8W9_9STRE S-adenosylmethionine:tRNA ribosy ltransferase-isomerase OS=Streptococcus pseudoporcinus LQ 940-04 OX=875093 GN=queA PE=3 SV=1
MNTNDFDFELPEELIAQTPLEQRDSSKLLIIDHKAKTMVDSHFDHIIDQLNPGDALVMNNTRVLPARLHGEKPDTHGHVELLLLKNIQGDDWEVLAKPAKRLKVGSSISFGDGRLTATVIKELEHGGRIVSFSYQGIFLEVLESLGEMPLPPYIHEKLDDSERYQTVYAKENGSAAAPTAGLHFTQALLQKIQEKGVHLVYLTLHVGLGTFRPVSVDNVDEHEMHSEFYQLSEEAADTLRQVKKAGGRVVAVGTTSIRTLETIGNKFNGDIQADSGWTNIFIKPGYRFTVVDAFSTNFHLPKSTLVMLVSAFAGREFVLEAYKHAINEHYRFFSFGDAMFVK

SEQ ID NO: 72610 - protein, 342 aa, Streptococcus pyogenes
  misc_feature (1)..(342): sp|P0DD77|QUEA_STRPQ S-adenosylmethionine:tRNA ribosylt ransferase-isomerase OS=Streptococcus pyogenes serotype M3 (strain SSI-1) OX=193567 GN=queA PE=3 SV=1
MNTNDFDFELPEELIAQTPLEKRDSSKLLIIDHRQKTMVDSHFDHIIDQLNPGDALVMNNTRVLPARLYGEKPDTHGHVELLLLKNTQGDQWEVLAKPAKRLKVGSQVNFGDGHLKATIIDELEHGGRIVEFSYDGIFLEVLESLGEMPLPPYIHEKLEDAERYQTVYAKENGSAAAPTAGLHFTTDLLKKIEAKGVHLVYLTLHVGLGTFRPVSVDNLDEHDMHSEFYSLSEEAAQTLRDVKQAGGRVVAVGTTSIRTLETIGSKFQGDIQADSGWTNIFIKPGYQFKVVDAFSTNFHLPKSTLVMLVSAFAGRDFVLEAYRHAVDEKYRFFSFGDAMFVN

SEQ ID NO: 72611 - protein, 342 aa, Streptococcus pyogenes
  misc_feature (1)..(342): sp|Q48SR6|QUEA_STRPM S-adenosylmethionine:tRNA ribosylt ransferase-isomerase OS=Streptococcus pyogenes serotype M28 (strain MGAS6180) OX=319701 GN=queA PE=3 SV=1
MNTNDFDFELPEELIAQTPLEKRDSSKLLIIDHRQKTMVDSHFDHIIDQLNPGDALVMNNTRVLPARLYGEKPDTHGHVELLLLKNTQGDQWEVLAKPAKRLKVGSQVNFGDGRLKATIIDELEHGGRIVEFSYDGIFLEVLESLGEMPLPPYIHEKLEDAERYQTVYAKENGSAAAPTAGLHFTTDLLKKIEAKGVHLVYLTLHVGLGTFRPVSVDNLDEHDMHSEFYSLSEEAAQTLRDVKQAGGRVVAVGTTSIRTLETIGGKFQGDIQADSGWTNIFIKPGYQFKVVDAFSTNFHLPKSTLVMLVSAFAGRDFVLEAYRHAVDEKYRFFSFGDAMFVN

SEQ ID NO: 72612 - protein, 342 aa, Streptococcus ratti
  misc_feature (1)..(342): tr|J3JPU7|J3JPU7_STRRT S-adenosylmethionine:tRNA ribosy ltransferase-isomerase OS=Streptococcus ratti FA-1 = DS M 20564 OX=699248 GN=queA PE=3 SV=1
MNTTDFDFDLPENLIAQTPLKQRDSSKLLVIDHKTKAMKDTHFDHIIDELNPDDALVMNDTRVLPARLHGEKVQTHGHVELLLLKNTQGDQWEVLAKPAKRLKVGSQISFGDGRLKATIKEELNHGGRIVEFSYDGIFLEVLESLGEMPLPPYIHEKLEDRDRYQTVYAKENGSAAAPTAGLHFTEDLLNKIEAKGVKLVYLTLHVGLGTFRPVSVDNVDEHQMHSEFYSLSPEAAQTLKDVKAQGGRIVAVGTTSIRTLETIGNKFAGQIEADSGWTNIFIKPGYQFKIVDAFSTNFHLPKSTLVMLVSAFAGREFVLDAYQHAIDEHYRFFSFGDAMFVK

SEQ ID NO: 72613 - protein, 342 aa, Streptococcus ratti; identical to SEQ ID NO: 72612
  misc_feature (1)..(342): tr|A0A5J6NJI7|A0A5J6NJI7_STRRT tRNA preQ1(34) S-adenosy lmethionine ribosyltransferase-isomerase QueA OS=Strept ococcus ratti OX=1341 GN=queA PE=4 SV=1

SEQ ID NO: 72614 - protein, 342 aa, Streptococcus rubneri
  misc_feature (1)..(342): tr|A0A4Z1DXI0|A0A4Z1DXI0_9STRE S-adenosylmethionine:tRN A ribosyltransferase-isomerase OS=Streptococcus rubneri OX=1234680 GN=queA PE=3 SV=1
MNTQDFDFYLPEELIAQTPLEKRDASKLLILNHKTGEMVDEHFDAIIDELEPGDALVMNNTRVLPARLHGVKPETGGHVELLLLKNIQGDQWEVLAKPAKRLKEGSVVSFGDGRLEATLIKKLEHGGCIVEFSYQGIFLEVLESLGEMPLPPYIHEKLEDKERYQTVYAKENGSAAAPTAGLHFTAELLQKIKEKGVKLVYLTLHVGLGTFRPVSVDNLDQHEMHSEFYQLSEEAAQTLREVKAKGHRIVAVGTTSIRTLETIGNKFEGDIQADSGWTNIFIKPGYQWQVVDAFSTNFHLPKSTLVMLVSAFAGRELTLQAYQHAIDERYRFFSFGDAMFIK

SEQ ID NO: 72615 - protein, 348 aa, Streptococcus ruminantium
  misc_feature (1)..(348): tr|A0A2Z5TP01|A0A2Z5TP01_9STRE S-adenosylmethionine:tRN A ribosyltransferase-isomerase OS=Streptococcus ruminan tium OX=1917441 GN=queA PE=3 SV=1
MIQGENMNTADFDFELPEELIAQVPLEKRDSSRLLILNREHKSMVDSHFDHIIDQLNPGDALVMNNTRVLPARLYGYKPETNGHVELLLLKNIHGDQWEVLAKPAKRLKIGATIAFGDGRLTATIVEELEHGGRIVEFSYDGIFLEVLESLGEMPLPPYIHEKLEDRERYQTVYAKENGSAAAPTAGLHFTQELLKKIERKGVKLVYLTLHVGLGTFRPVSVDNVEEHEMHSEFYNLPAEAAQILNQVKDNGGRIIAVGTTSIRTLETIGNKFNGRLEADSGWTNIFIKPGYTFQIVDAFSTNFHLPKSTLVMLVSAFAGREFTLEAYKHAVEEGYRFFSFGDAMFIQ

SEQ ID NO: 72616 - protein, 347 aa, Streptococcus salivarius
  misc_feature (1)..(347): tr|J7SID2|J7SID2_STRSL S-adenosylmethionine:tRNA ribosy ltransferase-isomerase OS=Streptococcus salivarius K12 OX=1200793 GN=queA PE=3 SV=1
MNTNDFDFELPEELIAQTPLEQRDASKLLVIDPVTKEMTDTHFDHIIDQLNPGDALVMNNTRVLPARLYGEKPDTHGHVEFLLLKNIQGDQWEVLAKPAKRLKVGAKVSFGDGRLTATVTEELDHGGRIVEFCYDGIFLEVLESLGEMPLPPYIHEKLEDRDRYQTVYAKENGSAAAPTAGLHFTPELLQKIEAKGVKLVYLTLHVGLGTFRPVSVENVDEHEMHSEFYTLSQDAADTLNSVKAAGGRIIAVGTTSIRTLETIGNKYDGQLQADSGWTNIFIKPGYQFTVVDAFSTNFHLPKSTLVMLVSAFAGREFVLDAYKHAVQERYRFFSFGDAMFVTRPAEK

SEQ ID NO: 72617 - protein, 347 aa, Streptococcus salivarius
  misc_feature (1)..(347): tr|A0A2A5QBE3|A0A2A5QBE3_STRSL S-adenosylmethionine:tRN A ribosyltransferase-isomerase OS=Streptococcus salivar ius OX=1304 GN=queA PE=3 SV=1
MNTNDFDFELPEELIAQTPLEQRDASKLLVIDPVTKEMTDTHFDHIIDQLNPGDALVMNNTRVLPARLYGEKPDTHGHVEFLLLKNTQGDQWEVLAKPAKRLKVGAKVSFGDGRLTATVTEELDHGGRIVEFSYDGIFLEVLESLGEMPLPPYIHEKLEDRDRYQTVYAKENGSAAAPTAGLHFTPELLQKIEAKGVKLVYLTLHVGLGTFRPVSVENVDEHEMHSEFYTLSQDAADTLNSVKAAGGRIIAVGTTSIRTLETIGNKYDGQLQADSGWTNIFIKPGYQFTVVDAFSTNFHLPKSTLVMLVSAFAGREFVLDAYKHAVQERYRFFSFGDAMFVTRPAEK

SEQ ID NO: 72618 - protein, 342 aa, Streptococcus sanguinis
  misc_feature (1)..(342): sp|A3CLX2|QUEA_STRSV S-adenosylmethionine:tRNA ribosylt ransferase-isomerase OS=Streptococcus sanguinis (strain SK36) OX=388919 GN=queA PE=3 SV=1
MNTADFDFDLPEELIAQTPLEKRDASRLLVVDKETGAFSDQHFDQIIDQLQPGDALVMNNTRVLPARLYGIKPETGGHVELLLLKNTQGDDWEVLAKPAKRLRVGAQISFGDGRLTATVIEELEHGGRIVRFSYEGIFLEVLESLGEMPLPPYIHEKLADRERYQTVYAKENGSAAAPTAGLHFTEELLEQIAAKGVKLVYLTLHVGLGTFRPVSVDSLDDHEMHSEFYSLSEEAAQTLRQVKANGGRVIAVGTTSIRTLETIGSKFQGQIQADSGWTNIFIKPGYNWKVVDAFSTNFHLPKSTLVMLVSAFAGRSLTLEAYEHAIAERYRFFSFGDAMFIK

SEQ ID NO: 72619 - protein, 342 aa, Streptococcus sanguinis
  misc_feature (1)..(342): tr|F3UR26|F3UR26_STRSA S-adenosylmethionine:tRNA ribosy ltransferase-isomerase OS=Streptococcus sanguinis SK355 OX=888816 GN=queA PE=3 SV=1
MNTADFDFDLPEELIAQTPLEKRDASRLLVVDKETGTFSDQHFDQIIDQLQPGDALVMNNTRVLPARLYGIKPETGGHVELLLLKNTQGDDWEVLAKPAKRLRVGAQISFGDGRLTATVVDELEHGGRIVCFGYEGIFLEVLESLGEMPLPPYIHEKLSDRERYQTVYAKENGSAAAPTAGLHFTEELLEQIAAKGVKLVYLTLHVGLGTFRPVSVDSLDDHEMHSEFYSLSEEAAQILRQVKAKGGRVIAVGTTSIRTLETIGSKFQGQIQADSGWTNIFIKPGYDWKVVDAFSTNFHLPKSTLVMLVSAFAGRSLTLKAYEHAIAERYRFFSFGDAMFIK

SEQ ID NO: 72620 - protein, 342 aa, Streptococcus sinensis
  misc_feature (1)..(342): tr|A0A0A0DJ27|A0A0A0DJ27_9STRE S-adenosylmethionine:tRN A ribosyltransferase-isomerase OS=Streptococcus sinensi s OX=176090 GN=queA PE=3 SV=1
MNTADFDFHLPEELIAQTPLEKRDSSRLLIVDRKTGQFSDQHFDNIIDQLEPGDALVMNNTRVLPARLYGTKPETGGHVELLLLKNTQGDFWEVLAKPAKRLRVGAHVSFGDGRLTATVTEELEHGGRIVRFDYQGIFLEVLESLGEMPLPPYIHEKLEDRERYQTVYAKENGSAAAPTAGLHFTEELLDKIGAKGIKLVYLTLHVGLGTFRPVSVDNLDEHEMHSEFYTLSEEAAETLRQVKASGHRVVAVGTTSIRTLETIGSKFDGQIQADSGWTNIFIKPGYQWKIVDAFSTNFHLPKSTLVMLVSAFAGRQLTLQAYEHAIAEYYRFFSFGDAMFIK

SEQ ID NO: 72621 - protein, 342 aa, Streptococcus sobrinus
  misc_feature (1)..(342): tr|U2J1M3|U2J1M3_9STRE S-adenosylmethionine:tRNA ribosy ltransferase-isomerase OS=Streptococcus sobrinus W1703 OX=1227275 GN=queA PE=3 SV=1
MNTQDFDFHLPEELIAQTPLEKRDSSKLLVIDHKKHTMLDTHFDHILDELNPGDALVMNNTRVLPARLHGEKPETHGHVEFLLLKNTQGDQWEVLAKPAKRLHVGTEVSFGDGRLTATILEELDHGGRIVEFHYEGIFLEVLESLGEMPLPPYIHEKLEDQERYQTVYAKENGSAAAPTAGLHFTQELLEKIEAKGVKLVYLTLHVGLGTFRPVSVDMIEDHEMHSEFYQFSEEAAETLRQVKAAGGRIVAVGTTSIRTLETIGNKFDGQIQADSGWTNIFIKPGYQFKIVDAFSTNFHLPKSTLVMLVSAFAGREFVLEAYKHAVEEHYRFFSFGDAMFVK

SEQ ID NO: 72622 - protein, 347 aa, Streptococcus sp.
  misc_feature (1)..(347): tr|A0A1F0BPG0|A0A1F0BPG0_9STRE S-adenosylmethionine:tRN A ribosyltransferase-isomerase OS=Streptococcus sp. HMS C078H03 OX=1715086 GN=queA PE=3 SV=1
MNTNDFDFELPEELIAQTPLEQRDASKLLVIDPVTKEMTDTHFDHIIDQLNPGDALVMNNTRVLPARLYGEKPDTHGHVEFLLLKNTQGDQWEVLAKPAKRLKVGAKVSFGDGRLTATVTEELDHGGRIVEFSYDGIFLEVLESLGEMPLPPYIHEKLEDRDRYQTVYAKENGSAAAPTAGLHFTPELLQKIEAKGVKLVYLTLHVGLGTFRPVSVDNVDEHEMHSEFYTLSQDAADTLNSVKAAGGRIIAVGTTSIRTLETIGNKYDGQLQADSGWTNIFIKPGYQFTVVDAFSTNFHLPKSTLVMLVSAFAGREFVLDAYKHAVQERYRFFSFGDAMFVTRPAEK

SEQ ID NO: 72623 - protein, 342 aa, Streptococcus sp.
  misc_feature (1)..(342): tr|D2EQ92|D2EQ92_9STRE S-adenosylmethionine:tRNA ribosy ltransferase-isomerase OS=Streptococcus sp. M143 OX=563 037 GN=queA PE=3 SV=1
MNTADFDFHLPEELIAQTPLEKRDASKLLIVNRETGEFQDKHFHSIIDMLEPGDALVMNDTRVLPARLYGQKEETGGHVELLLLKNTAGDEWEVLAKPAKRLKVGTRVSFGDGRLSAVVTEELTHGGRIVRFEYQGIFLEVLESLGEMPLPPYIHEKLDDRERYQTVYAKESGSAAAPTAGLHFTKELLAEIQAKGVHLVYLTLHVGLGTFRPVSVDNLDEHEMHSEFYQLSDEAAATLRSVKENGGRVIAVGTTSIRTLETIGSKFDGQIQADSGWTNIFIKPGYEWKVVDAFSTNFHLPKSTLVMLVSAFAGRDLVLDAYHHAIQEHYRFFSFGDAMFIY

SEQ ID NO: 72624 - protein, 342 aa, Streptococcus suis
  misc_feature (1)..(342): tr|A0A0Z8GRS5|A0A0Z8GRS5_STRSU S-adenosylmethionine:tRN A ribosyltransferase-isomerase OS=Streptococcus suis OX =1307 GN=queA PE=3 SV=1
MNTADFDFDLPEELIAQVPLEKRDSSKLLILDREKRSMVDSHFDHIIDQLNPGDALVMNNTRVLPARLYGYKPETMGHVELLLLKNTQGDQWEVLAKPAKRLKVGTTVAFGDGRLTATIVEELEHGGRIVEFSYEGIFLEVLESLGEMPLPPYIHEKLEDRERYQTVYAKENGSAAAPTAGLHFTQELLEKIEAKGVKLVYLTLHVGLGTFRPVSVDNVDEHEMHSEFYNLSAEAAQTLNQVKDSGGRIIAVGTTSIRTLETIGNKFDGRLEADSGWTNIFIKPGYTFRIVDAFSTNFHLPKSTLVMLVSAFAGREFTLDAYKHAVEERYRFFSFGDAMFIQ

SEQ ID NO: 72625 - protein, 342 aa, Streptococcus suis
  misc_feature (1)..(342): tr|U5UJC1|U5UJC1_STRSU S-adenosylmethionine:tRNA ribosy ltransferase-isomerase OS=Streptococcus suis T15 OX=134 0847 GN=queA PE=3 SV=1
MNTADFDFDLPEELIAQVPLEKRDSSKLLILDREKRSMVDSHFDHIIDQLNPGDALVMNNTRVLPARLYGYKPETMGHVELLLLKNTQGDQWEVLAKPAKRLKVGTTVAFGDGRLTATIVEELEHGGRIVEFSYEGIFLEVLESLGEMPLPPYIHEKLEDRERYQTVYAKENGSAAAPTAGLHFTQELLEKIEAKGVKLVYLTLHVGLGTFRPISVDNVDEHEMHSEFYNLSAEAAQTLNQVKDSGGRIVAVGTTSIRTLETIGNKFDGRLEADSGWTNIFIKPGYNFRIVDAFSTNFHLPKSTLVMLVSAFAGREFTLDAYKHAVEERYRFFSFGDAMFIQ

SEQ ID NO: 72626 - protein, 347 aa, Streptococcus thermophilus
  misc_feature (1)..(347): sp|Q5M5E8|QUEA_STRT2 S-adenosylmethionine:tRNA ribosylt ransferase-isomerase OS=Streptococcus thermophilus (str ain ATCC BAA-250 / LMG 18311) OX=264199 GN=queA PE=3 SV =1
MNTNDFDFELPEELIAQTPLEQRDASKLLVIDPVTREMTDTHFDHIIDQLNPGDALVMNNTRVLPARLYGEKTDTHGHVEFLLLKNTQGDQWEVLAKPAKRLKVGAKVSFGDGRLTATVTEELDHGGRIVEFSYNGIFLEVLESLGEMPLPPYIHEKLEDRDRYQTVYAKENGSAAAPTAGLHFTPELLQKIEAKGVKLVYLTLHVGLGTFRPVSVDNVDEHEMHSEFYTLSQEAADTLNSVKAAGGRIVAVGTTSIRTLETIGNKYDGQLQADSGWTNIFIKPGYQFTVVDAFSTNFHLPKSTLVMLVSAFAGREFVLEAYKHAIQERYRFFSFGDAMFVTRPSEK

SEQ ID NO: 72627 - protein, 347 aa, Streptococcus thermophilus
  misc_feature (1)..(347): sp|Q5M0W1|QUEA_STRT1 S-adenosylmethionine:tRNA ribosylt ransferase-isomerase OS=Streptococcus thermophilus (str ain CNRZ 1066) OX=299768 GN=queA PE=3 SV=1
MNTNDFDFELPEELIAQTPLKQRDASKLLVIDPVTREMTDTHFDHIIDQLNPRDALVMNNTRVLPARLYGEKTDTHGHVEFLLLKNTQGDQWEVLAKPAKRLKVGAKVSFGYGRLTATVTEELDHGGRIVEFSYDGIFLEVLESLGEMPLPPYIHEKLEDRDRYQTVYAKENGSAAAPTAGLHFTPELLQKIEAKGVKLVYLTLHVGLGTFRPVSVDNIDEHEMHSEFYTLSQEAADTLNSVKTAGGRIVAVGTTSIRTLETIGNKYDGQLQADSGWTNIFIKPGYQFTVVDAFSTNFHLPKSTLVMLVSAFAGREFVLEAYKHAVQERYRFFSFGDAMFVTRPSEK

SEQ ID NO: 72628 - protein, 342 aa, Streptococcus troglodytae
  misc_feature (1)..(342): tr|A0A1L7LKK0|A0A1L7LKK0_9STRE S-adenosylmethionine:tRN A ribosyltransferase-isomerase OS=Streptococcus troglod ytae OX=1111760 GN=queA PE=3 SV=1
MNTSDFDFNLPEALIAQTPLKQRDSSRLLVVDHQKKTMKDTHFDHIIDELNSGDALVMNDTRVLPARLHGEKTVTHGHVELLLLKNIQGDQWEVLAKPAKRLKVGSHISFGDGRLKATIKEELDHGGRIVEFSYEGIFLEVLESLGEMPLPPYIHEKLEDRDRYQTVYAKENGSAAAPTAGLHFTEELLSKIEAKGVKLVYLTLHVGLGTFRPVSVDNVEEHQMHSEFYSLSPEAAQTLKDVKANGGRIVAVGTTSIRTLETIGNKFAGQIEADSGWTNIFIKPGYQFKIVDAFSTNFHLPKSTLVMLVSAFAGRDFILKAYKHAVDKHYRFFSFGDAMFVK

SEQ ID NO: 72629 - protein, 342 aa, Streptococcus uberis
  misc_feature (1)..(342): tr|A0A380MJT1|A0A380MJT1_STRUB S-adenosylmethionine:tRN A ribosyltransferase-isomerase OS=Streptococcus uberis OX=1349 GN=queA PE=3 SV=1
MHTNDFDFDLPEELIAQTPLEKRDSSRLLIIDHQTKEMTDSHFDQIIDQLNPGDALVMNNTRVLPARLHGEKPDTHGHVELLLLKNTKEDQWEVLAKPAKRLKVGSQVSFGDGRLTATVIEELDHGGRIVEFSYSGIFLEVLESLGEMPLPPYIHEKLEDSERYQTVYAKENGSAAAPTAGLHFTEALLKKIKDKGVHLVYLTLHVGLGTFRPVSVDSVDEHEMHSEFYHLSEEAAQTLRQVKANGGRVVAVGTTSIRTLETIGTKFDGDIQADSGWTNIFIKPGYQFKVVDAFSTNFHLPKSTLVMLVSAFAGREFVLEAYQHAVDEKYRFFSFGDAMFVK

SEQ ID NO: 72630 - protein, 342 aa, Streptococcus uberis
  misc_feature (1)..(342): tr|B9DUQ3|B9DUQ3_STRU0 S-adenosylmethionine:tRNA ribosy ltransferase-isomerase OS=Streptococcus uberis (strain ATCC BAA-854 / 0140J) OX=218495 GN=queA PE=3 SV=1
MHTNDFDFDLPEELIAQTPLEKRDSSRLLIIDHQTKEMTDSHFDQIVDQLNPGDALVMNNTRVLPARLHGEKPDTHGHVELLLLKNTKEDQWEVLAKPAKRLKVGSKVSFGDGRLTATVIEELDHGGRIVEFSYSGIFLEVLESLGEMPLPPYIHEKLEDSERYQTVYAKENGSAAAPTAGLHFTEALLKKIKDKGVHLVYLTLHVGLGTFRPVSVDSVDEHEMHSEFYHLSEEAAQTLRQVKANGGRLVAVGTTSIRTLETIGTKFDGDIQADSGWTNIFIKPGYQFKVVDAFSTNFHLPKSTLVMLVSAFAGREFVLEAYQHAVNEKYRFFSFGDAMFVK

SEQ ID NO: 72631 - protein, 342 aa, Streptococcus urinalis
  misc_feature (1)..(342): tr|G5KDK6|G5KDK6_9STRE S-adenosylmethionine:tRNA ribosy ltransferase-isomerase OS=Streptococcus urinalis 2285-9 7 OX=764291 GN=queA PE=3 SV=1
MNTNDFDFFLPEELIAQTPLEKRDSSKLLVIDHQTHEMTDSHFDHIIDQLNPGDALVMNNTRVLPARLYGEKPDTHGHVELLLLKNTSGDKWEVLAKPAKRLRVGATISFGDGRLSATVCDELEHGGRIVEFSYQGIFLEVLESLGEMPLPPYIHEKLEDQERYQTVYAKENGSAAAPTAGLHFTKELLERIEEKGVKLVYLTLHVGLGTFRPVSVDNVDNHQMHSEFYQLTEDAADTLNEVKRSGGRIVAVGTTSIRTLETIGTKFNGGIKADSGWTDIFIKPGYQFKVVDAFSTNFHLPKSTLVMLVSAFAGRDFVLDAYKHAVDEKYRFFSFGDAMFVK

SEQ ID NO: 72632 - protein, 342 aa, Streptococcus varani
  misc_feature (1)..(342): tr|A0A0E4CSM1|A0A0E4CSM1_9STRE S-adenosylmethionine:tRN A ribosyltransferase-isomerase OS=Streptococcus varani OX=1608583 GN=queA PE=3 SV=1
MNTNDFDFELPDELIAQTPLEVRDSSRLLILDRKNKSMTDSHFDSILDQLQPGDALVMNNTRVLPARLYGEKPETHGHVELLLLKNTQADQWEVLAKPAKRLRVGAQISFGDGRLMATVLEELEHGGRIVEFSYDGIFLEVLESLGEMPLPPYIHEKLKDRDRYQTVYAKENGSAAAPTAGLHFTKELLEQIEAKGVKLVYLTLHVGLGTFRPVSVDNLDEHEMHSEYYQLSQEGADTLNQVKENGGRVVAVGTTSIRTLETIGNKFDGKLVADSGWTSIFIKPGYQFKVVDAFSTNFHLPKSTLVMLVSAFAGKDFVLEAYRHAVHEKYRFFSFGDAMFLS

SEQ ID NO: 72633 - protein, 347 aa, Streptococcus vestibularis
  misc_feature (1)..(347): tr|A0A3S4MNJ0|A0A3S4MNJ0_STRVE S-adenosylmethionine:tRN A ribosyltransferase-isomerase OS=Streptococcus vestibu laris OX=1343 GN=queA PE=3 SV=1
MNTNDFDFELPEELIAQTPLEQRDASKLLVIDPVTKEMTDTHFDHIIDQLNPGDALVMNNTRVLPARLYGEKPDTHGHVEFLLLKNTQGDQWEVLAKPAKRLKVGAKVSFGDGRLTATVTEELDHGGRIVEFSYNGIFLEVLESLGEMPLPPYIHEKLEDRDRYQTVYAKENGSAAAPTAGLHFTPELLQKIEAKGVKLVYLTLHVGLGTFRPVSVDNVDEHEMHSEFYTLSQEAADTLNSVKATGGRIVAVGTTSIRTLETIGNKYNGRLQADSGWTNIFIKPGYQFTVVDAFSTNFHLPKSTLVMLVSAFAGREFVLDAYKHAVQERYRFFSFGDAMFVTRRAGK

SEQ ID NO: 72634 - protein, 347 aa, Streptococcus vestibularis
  misc_feature (1)..(347): tr|E8KW86|E8KW86_STRVE S-adenosylmethionine:tRNA ribosy ltransferase-isomerase OS=Streptococcus vestibularis AT CC 49124 OX=889206 GN=queA PE=3 SV=1
MNTNDFDFELPEELIAQTPLEQRDASKLLVIDPVTKEMTDTHFDHIIDQLNPGDALVMNNTRVLPARLYGEKNDTHGHVEFLLLKNTQGDQWEVLAKPAKRLKVGAKVSFGDGRLTATVTEELDHGGRIVEFSYDGIFLEVLESLGEMPLPPYIHEKLEDRDRYQTVYAKENGSAAAPTAGLHFTPELLQNIEAKGVKLVYLTLHVGLGTFRPVSVDNVDEHEMHSEFYTLSQEAADTLNSVKATGGRIVAVGTTSIRTLETIGNKYNGRLQADSGWTNIFIKPGYQFTVVDAFSTNFHLPKSTLVMLVSAFAGREFVLDAYKHAVQERYRFFSFGDAMFVTQRAGK

SEQ ID NO: 72635 - protein, 342 aa, Streptococcus viridans
  misc_feature (1)..(342): tr|A0A447Z3R4|A0A447Z3R4_9STRE S-adenosylmethionine:tRN A ribosyltransferase-isomerase OS=Streptococcus viridan s OX=78535 GN=queA PE=3 SV=1
MNTNDFDFHLPEELIAQTPLEKRDASKLLILNRQTGQMEDQHFDAIINELEPGDALVMNNTRVLPARLHGVKPDTGGHVELLLLKNIEGDQWEVLAKPAKRLKEGGVVSFGDGRLQATLIKKLEHGGCIVEFSYQGIFLEVLESLGEMPLPPYIHEKLEDQERYQTVYAKENGSAAAPTAGLHFTPELLQKIEDKGVHLVYLTLHVGLGTFRPVSVDDLDQHEMHSEFYQLSEEAAQTLRQVKASGHRIVAVGTTSIRTLETIGNKFNGELQADSGWTNIFIKPGYQWQVVDAFSTNFHLPKSTLVMLVSAFAGRELTLDAYQHAIDQGYRFFSFGDAMFIK

SEQ ID NO: 72636 - protein, 342 aa, Streptococcus viridans
  misc_feature (1)..(342): tr|A0A380M4A3|A0A380M4A3_9STRE S-adenosylmethionine:tRN A ribosyltransferase-isomerase OS=Streptococcus viridan s OX=78535 GN=queA PE=3 SV=1
MNTADFDFHLPEELIAQTPLEKRDASRLLVVNHETGQMEDTHFDAIIDQLNPGDALVMNDTRVLPARLHGEKPETGGHVELLLLKNIAGDDWEVLAKPAKRLKVGAAISFGDGRLTATVLEELEHGGRTVRFHYQGIFLEVLESLGEMPLPPYIHEKLKDRERYQTVYAKENGSAAAPTAGLHFTKELLAQIEAKGVKLVYLTLHVGLGTFRPVSVDNVDEHEMHSEFYTLSEEAANTLRQVKASGHRVVAVGTTSIRTLETIGSKFNGEIKADSGWTNIFIKPGYDWKVVDAFSTNFHLPKSTLVMLVSAFAGRELVLSAYQHAIDEKYRFFSFGDAMFIK

SEQ ID NO: 72637 - protein, 342 aa, Streptohalobacillus salinus
  misc_feature (1)..(342): tr|A0A2V3W9V6|A0A2V3W9V6_9BACI S-adenosylmethionine:tRN A ribosyltransferase-isomerase OS=Streptohalobacillus s alinus OX=621096 GN=queA PE=3 SV=1
MNIEDFDFDLPEELIAQTPLLDRTASRLLVMDRASRTIEHRHFKDILDYLNAGDCLVLNNTKVLPARLYGIKEDTGAKVEMLLLTQKQDDAWEVLVKPAKKVKVGTKISFGQGKLMATCTDVLEHGGRLVRFSYEGIFLEVLTELGEMPLPPYIKEQLEDQDRYQTVYAKEEGSAAAPTAGLHFTNALLEQAQQQGIEIAFVTLHVGLGTFRPVSVTDPEKHDMHSEFYLVTAEEAAKIQAVKNRGNRVFAVGTTSTRTLETIARDHEGKIVEASGWTDIFIYPPYQFKAIDGLITNFHLPKSTLVMLVSALSDRDFIMEAYHAAITEKYRFFSFGDAMFIK

SEQ ID NO: 72638 - protein, 378 aa, Streptomyces actuosus
  misc_feature (1)..(378): tr|A0A2U9NZH9|A0A2U9NZH9_STRAS S-adenosylmethionine:tRN A ribosyltransferase-isomerase OS=Streptomyces actuosus OX=1885 GN=DMT42_08195 PE=3 SV=1
MTLAQRVPEQLSARVPAEQRGPGLDRDAVRLLVSRGTEVAHHAFRELPALLRAGDVLVVNTSPTLAAAVDGWLGHARVVVHFSTRGDDGRWAVELREPDGRGTTRARAGTYAGEEVRLPGRLRLLLQEPVSAGSGRLWWARVSGGAAGAAEAAGRAVPGLLREYGRPIRYSYTERDQPLPVYQTVFAVPSPDGAGSAEMPSAGRPFTARTVLELVRRGVQFAPVTLHTGVASAEAHEPPYPERFAVPEASARAVNVARAGGGRVVAVGTTAVRAVESAAGADGVVRARAGWTDLVVTPERGVRVVDGLLTGLHEPEASHLLMLEAVAGAAAVRRAYEEALRGRYLWHEFGDVHLVLPEEALTQSIAPATGGETATGPM

SEQ ID NO: 72639 - protein, 347 aa, Streptomyces afghaniensis
  misc_feature (1)..(347): tr|S4MZY9|S4MZY9_9ACTN S-adenosylmethionine:tRNA ribosy ltransferase-isomerase OS=Streptomyces afghaniensis 772 OX=1283301 GN=STAFG_3362 PE=3 SV=1
MTLAVRIPEELSARVPVEQREPGLDRDAVRMLVSRGVEVAHHTFPELPRLLRAGDLLVVNTSATLAAAVDGWIGHARVVVHFSTRGDDGRWAVELREPDGRGTTRARAGGPAGTGVCLPGGGWLVLEEPLSGRSRRLWWARVAGPGVPGLLREHGRPIRYSYTERDQPLSVYQTVFALPSEDGAGSAEMPSAARPFTGRLVAELVSRGVQFAPVTLHTGVASAEAHEPPYPERFAVSETSARLINAVRAGGGRIVAVGTTAVRAVESAAGADGVVRPRSGWTDLVVTPERGVLVVDGLLTGLHEPEASHLLMLEAVAGREAIRRGYEAAVRGRYLWHEFGDVHLVLP

SEQ ID NO: 72640 - protein, 354 aa, Streptomyces agglomeratus
  misc_feature (1)..(354): tr|A0A1E5PJM4|A0A1E5PJM4_9ACTN S-adenosylmethionine:tRN A ribosyltransferase-isomerase OS=Streptomyces agglomer atus OX=285458 GN=AS594_26760 PE=3 SV=1
MPGGLVARVPAEERGSGRDDVRLLVSRGAEVSHHRFRELGALLRAGDVLVVNTSPTLAAAVDGWVEPAGAGPGERVVVHFSTRGDDRRWAVELRGPLESGATRPRAGGPAGTVVRLPGGGLLVLEEPLAPGGERLWWARVSGGEVPELMRAHGRPIRYAYTERDQPLSAYQTVFARPSPDGSGSAEMPSAGRPFTAAAVAELVNRGVRFAPLTLHTGVASAEAHEPPYPERFEVPASTAGMVNAARAAGGRVVAVGTTAVRALESAAGPGGVVREAGGWTGLVVTPERGVRVVDGLLTGLHEPRASHLLMLEAVAGRAALGRAYTEALSLLYLWHEFGDVHLVLPEEAPGRGSR

SEQ ID NO: 72641 - protein, 365 aa, Streptomyces albidoflavus
  misc_feature (1)..(365): tr|A0A5C6I3M5|A0A5C6I3M5_9ACTN S-adenosylmethionine:tRN A ribosyltransferase-isomerase OS=Streptomyces albidofl avus OX=1886 GN=FRZ02_18005 PE=3 SV=1
MSARAVVGRVPGELSARVPVEEREPGRGRDGVRLLVSAGEREPRVGWFTELPGLLRAGDLLVVNTSATLPAAADGRLGGEPVVVHFSTRADGAGPGERWAVELRSPDGRGTTGPRPGGPAGAVVTLTDGARLELVEPLAPGAERLWWARAGGFGAADGSGSAVVAWLRRLGRPIRYAYTERDQPLAAYRTVFAAAGEDGGGSAEMPSAGRPFTARTVTELVRAGVQFAPVTLHTGVASAEAHEPPYPERYAVSPHAAWLVNAVRAGGGRVIAVGTTAVRALESAVGPDGRVRAASGWTGLVVTPERGVRVVDGLLTGLPEPEASHLLMLEAVAGAAAVERGYAAAVRARLLWHEFGDVHLLTRRG

SEQ ID NO: 72642 - protein, 267 aa, Streptomyces albidoflavus
  misc_feature (1)..(267): tr|A0A126Y9M2|A0A126Y9M2_9ACTN S-adenosylmethionine:tRN A ribosyltransferase-isomerase OS=Streptomyces albidofl avus OX=1886 GN=Salbus254_5283 PE=3 SV=1
MGGRAALAGRARDDGAAPGGPAGAVVALADGARLELVEPLAPGAERLWWARAGGFGAADGSGSAVVAWLRRHGRPIRYAYTERDQPLAAYRTVFAAAGEDGGGSAEMPSAGRPFTARTVTELVRAGVQFAPVTLHTGVASAEAHEPPYPERYAVSPHAAWLVNAVRAGGGRVIAVGTTAVRALESAVGPDGRVRAASGWTGLVVTPERGVRVVDGLLTGLHEPEASHLLMLEAVAGAAAVERGYAAAVRARLLWHEFGDVHLLTRRG

SEQ ID NO: 72643 - protein, 357 aa, Streptomyces albulus
  misc_feature (1)..(357): tr|A0A1A9QG83|A0A1A9QG83_STRA9 S-adenosylmethionine:tRN A ribosyltransferase-isomerase OS=Streptomyces albulus OX=68570 GN=A4V12_30165 PE=3 SV=1
MSVPTALRVPAELSARVPAEQRGSGRDDVRLMVSRGTAVSHHAFRELPGLLRAGDVLVVNTSPTLAAAVTGRLGGDGGETVVVHFSTWGDDGRWSVELRNPDGRGTTRPRRGGPAGAVVRLPGGAQLVLEESLVAGPSGGGRLWWASVSVGVPGLLAGYGRPIRYGYTDRDQSPAAYQTVFARPARDGAGSAEMPSAARPFTAGLVTELVSRGVQVAPVVLHTGVASAEAHEPPYPERFEVPESTAWLVGAARAGGGRIVAVGTTAVRALESAAGEDGVVRPAGGWTDLVVTPRRGVRAVDGLLTGLHEPEASHLLLLEAVAGREALGLAYAEALRRRYLWHEFGDVHLVLPEEAPH

SEQ ID NO: 72644 - protein, 371 aa, Streptomyces albus
  misc_feature (1)..(371): tr|A0A0X7JM26|A0A0X7JM26_9ACTN S-adenosylmethionine:tRN A ribosyltransferase-isomerase OS=Streptomyces albus su bsp. albus OX=67257 GN=ADL21_14800 PE=3 SV=1
MTAEVLRVPPELSAREPAEQRAPGRGRDAVRLLVSRGTAEPSHHTFKELPRLLSAGDVLVVNTSRTLPAALDGRLGDGRGRGEPVVVHFSTRADRQHPRPEAAAGDWAVELRTPDGCGSTRQRAGGPAGTVVRLPGGARLELRAPVERGSVRLWWARVSGAPVADLLPRYGRPIRYGYTDRDQPLDAYQTVFAVGSPDGGGSAEMPSAARPFTASLVARLVSRGVQIAPVTLHTGVASAEAYEPPYPERFAVPPSTAWQINAARAGGGKVVAVGTTAVRALETAADADGRIRAASGWTELVVTPEHGVRAVDGLLTGLHEPQASHLLMLEAVGQVAAGADFGDALCRAYAEAVRRRYLWHEFGDLHLILPS

SEQ ID NO: 72645 - protein, 347 aa, Streptomyces albus
  misc_feature (1)..(347): tr|A0A0B5F7L1|A0A0B5F7L1_STRA4 S-adenosylmethionine:tRN A ribosyltransferase-isomerase OS=Streptomyces albus (s train ATCC 21838 / DSM 41398 / FERM P-419 / JCM 4703 / NBRC 107858) OX=1081613 GN=SLNWT_6076 PE=3 SV=1
MSLGLRVPEELSARIPAEQRGPGRDQGSVRLLVSYGTRVTHHRFAELPGLLRRGDVLVVNTSPTLAAAVDGRADGEAVVVHFSTRGDDGRWAVEIREPDGTGATRRRPGPGPARVRLPGGALLALEEPLDPAGGRLRWARLRGAGVPALLRVHGRPIRYGYTARDQPLSAYQSVFSLPAADGTGSAEMPSAARPFTAPLVAELVSRGVQFAPVRLDTGVASAEVQEPPYPERFEVSGASARLINAARRERGGRVVAVGTTAVRAVESAVGPDGLVRALHGWTPLVVTPGRGVRAVDGLLTGMHEPEASHLLMLEAIAGAPALRGAYAAALRERYLWHEFGDSHLLFP

SEQ ID NO: 72646 - protein, 363 aa, Streptomyces alfalfae
  misc_feature (1)..(363): tr|A0A1P8TMZ5|A0A1P8TMZ5_9ACTN S-adenosylmethionine:tRN A ribosyltransferase-isomerase OS=Streptomyces alfalfae OX=1642299 GN=A7J05_27910 PE=3 SV=1
MSVVGAWPRVPEGLHARVPAEQRGPGLGRDSVRLLLSRGTEVSHHAFRELPALLRAGDLLVVNTSRTLPAAVDGRLGHARVVVHFSTRGADGRWAVELRDPDGRGTTRARAGGPAGATVRFPGSVSLVWEEPLAAESRRLWWVRVAGDVPALLRRHGRPIRYRYTDRDQPLAAHQTVFALPSADGAGSAEMPSAGRPFTAAMVAELVSRGVQFAPVTLHTGVASQEAHEPPYPEPFEVPGTSAALINAARAGGGRVIAVGTTAVRAVESAAGADGVVRAASGRTELVVTPERGVRVVDGLLTGLHEPEASHLLMLEAVAGRAAIERGYAEAVRRLYLWHEFGDVHLILRSENTDREHCKGNVQ

SEQ ID NO: 72647 - protein, 374 aa, Streptomyces alni
  misc_feature (1)..(374): tr|A0A1I2GGG4|A0A1I2GGG4_9ACTN S-adenosylmethionine:tRN A ribosyltransferase-isomerase OS=Streptomyces alni OX= 380248 GN=SAMN05216251_10916 PE=3 SV=1
MSAAPRTVGTKQAAHIKGTRVSNKDIGRGTGGLAGLRVPDSLLATAPAARRDAVRLLVGERRTGAVAQHAFRALPELLRAGDVLVVNTSRTLPAAVDGRLDGAPVVVHFSTRGADGRWVVEVRDPDGHGSTVRRTGGPAGAVVELAGGTRLVLAEPLDPAADRLWVARPTDWDPIAYMRRHGRPIRYGYTERDQPLAAYQTVFAVPSPDGTGSAEMPSAGRPFTRALVTELVSRGVQIAPITLHTGVASVESHEPPYAEPFAVSAATARQVNAARAGGGRVVAVGTTAVRALESVADERGVVRPGGGWTELVVTPERGVRAVDGLLTGLHEPEASHLLMLRALSGDRLLERVYAEALRGGYRWHEFGDVNLLLP

SEQ ID NO: 72648 - protein, 370 aa, Streptomyces ambofaciens
  misc_feature (1)..(370): tr|A0A0K2AP80|A0A0K2AP80_STRA7 S-adenosylmethionine:tRN A ribosyltransferase-isomerase OS=Streptomyces ambofaci ens (strain ATCC 23877 / 3486 / DSM 40053 / JCM 4204 / NBRC 12836 / NRRL B-2516) OX=278992 GN=SAM23877_
MTLVLRVPEELSARVPVEQRGPGLDRDGVRLLVSRGTEVSHHGFRELPGLLRAGDLLVVNTSVTLAAAVDGHIGRAPVVVHFSTRGDDGRWAVELRDPDGRGTTRPRARAGTRAGKERQAPPPADGGGGRAGSLRGTEVRLPEGARLVLEEPLSARGERLWWARVSGADVPVVLREHGRPIRYSYTERDQPLSVYRTVFALPSEDGAGSAEMPSAARPFTARLVAELVSRGVQFAPVTLHTGVASAEAHEPPYPERFVVPEASAQLVNAARAGGGRVVAVGTTAVRAVESAAGADGVVRARAGWTDLVVTPERGVRAVDGLLTGLHDPEASHLLMLEAVAGRAAIDRGHEAAMKGRYLWHEFGDAHLLLP

SEQ ID NO: 72649 - protein, 361 aa, Streptomyces antibioticus
  misc_feature (1)..(361): tr|A0A1S9NWZ3|A0A1S9NWZ3_STRAT S-adenosylmethionine:tRN A ribosyltransferase-isomerase OS=Streptomyces antibiot icus OX=1890 GN=AFM16_09375 PE=3 SV=1
MGVPPREPVRAWGSVPEELSARVPAEQRGPGRGRDDVRLLVSWGTEVAHRGFRELPELLRAGDVLVVNTSMTLAAAVDGWIGHARVVVHFSTRGDDGRWAVELRDPDGKGTTRARAGGPAGARVRLPGGVRLVPAEALSPGSGRLWWARVSGGEVPELLREHGRPIRYAYTERDQPLSAYRTVFALPSADGAGSAEMPSAARPFTAGLVAELVSRGVRFAPVVLHTGVASAEAHEPPYPERFAVPEASARLIEATRAGRGRVIAVGTTAVRAVESAAGADGVVRARAGWTDLVVTPERGVRVVDGLLTGLHEPQASHLLMLEAVAGRAAIDRGYEEALRGRYLWHEFGDAHLLLPAEERSR

SEQ ID NO: 72650 - protein, 365 aa, Streptomyces antibioticus
  misc_feature (1)..(365): tr|A0A101PXK7|A0A101PXK7_STRAT S-adenosylmethionine:tRN A ribosyltransferase-isomerase OS=Streptomyces antibiot icus OX=1890 GN=AQJ23_36900 PE=3 SV=1
MTLALRVPAELSARVPAEQRGPGLDRDAVRLLVSRGTEVAHHAFAELPCLLRAGDLLVVNTSPTLAAAVDGRIGHARVVVHFSTRGDDGRWAVELREPDGRGTTRARAGGPAGTEVRLPEGVRLTLEEPLSARGERLWWARVAGAGVPGLLREYGRPIRYSYTERDQPLSAYQTVFALPQPGGAGSAEMPSAARPFTARLVAELVSRGVQFAPITLHTGVASAEAHEPPYPERFAVPEASARLINAVKAGDGRVVAVGTTAVRAVESATGGDGIVRAREGWTDLVVTPERGVRVVDGLLTGLHEPEASHLLMLRAVAGRAAVDRGYEEAVRGLYLWHEFGDVHLLLPEEAGPEGPHAEHCFSNCR

SEQ ID NO: 72651 - protein, 347 aa, Streptomyces asterosporus
  misc_feature (1)..(347): tr|A0A514JWU5|A0A514JWU5_9ACTN S-adenosylmethionine:tRN A ribosyltransferase-isomerase OS=Streptomyces asterosp orus OX=285570 GN=CD934_26650 PE=3 SV=1
MTLTVRVPEELSARVPVEQRGPGLDRDSVRLLVSRGTAVSHHAFVELPRLLRAGDLLVVNTSPTLAAAVDGWLGGTRVVVHFSTRGDDGRWAVELRDPDGRGTTRARAGVRAGDEVRLVGGAGLVVEEPLSTRGERLWRARVTRDVLGVLREHGRPVRYAYTERDQPLSAYQTVFALPSPDGAGSAEMPSAGRPFTGRTVAELVSRGVQFAPVTLHAGLASGEAHEPPYPERFVVPEASARLVGAVRAGGGRVIAVGTTAVRAVESAAGADGVVRAAAGWTGLVVTPERGVRVVDGLLTGLHEPEASHLLMLEAVAGRAAVDRGYEEALRGRYLWHEFGDVHLVLPG

SEQ ID NO: 72652 - protein, 389 aa, Streptomyces aurantiacus
  misc_feature (1)..(389): tr|S3ZUY1|S3ZUY1_9ACTN S-adenosylmethionine:tRNA ribosy ltransferase-isomerase OS=Streptomyces aurantiacus JA 4 570 OX=1286094 GN=STRAU_0374 PE=3 SV=1
MTVAVRVPEGLHAALPVEQRGRGLRRDSVRLLVSRGTQVSHHGFGELPHLLRAGDLLVVNTSPTLAAAVDGRLLDARGDQDKGHVRVHARVVVHFSTLGEDGRWAVELRDPDERGTTRARAGGPAGTEVELPGGVRLVCEEPLSADSARLWWARVPTDVPRLLRRHGRPIRYAYTERDQPLSVYQTVFALPSADGTGSAEMPSAARPFTARLVARLVSRGVQFAPVRLHTGVASPEVHEPPYPERFEVPEASARLINAVRAGRERARSASLEGRWRETGGRVVAVGTTAVRAVESAAGPDGVVRAAAGRTDLVVTPERGVRVVDGLLTGLHEPEASHLLMLEAVAGRAAVERGYAEAVRHLYLWHEFGDVHLLLPDEFAHREHCCSNSW

SEQ ID NO: 72653 - protein, 369 aa, Streptomyces auratus
  misc_feature (1)..(369): tr|J2JW90|J2JW90_9ACTN S-adenosylmethionine:tRNA ribosy ltransferase-isomerase OS=Streptomyces auratus AGR0001 OX=1160718 GN=SU9_24547 PE=3 SV=1
MTAALRVPQELSAGVPAEQRGPGLDRDAVRLLVSRGTAEPGHHDFGALPELLAAGDVLIVNTSRTLPAAVDGRVGDGRGRGEPVVVHFSTRADRWHPAGRAMAGHWAVELRSPDGRGSTRPRAGGPAGAVVRLPGGGRLVLEAPVDPGSARLWWARVTGVGVPELMRRHGRPIRYGYTERDQPLAAYQTVFALDGPGGSAEMPSAARPFTAELVTRLVSKGVQCAPVSLHTGVASAEAFEPPYPERFVVPPATAWLVNAVRARRRTAQGGTGGRIVAVGTTAVRALESAAGADGRVRAAAGWTDLVVTPRRGVRAVDGLLTGLHEPTASHLLMLEAVADADVLRRAYAAAVERRYLWHEFGDLHLVLPD

SEQ ID NO: 72654 - protein, 410 aa, Streptomyces avermitilis
  misc_feature (1)..(410): tr|Q829D7|Q829D7_STRAW S-adenosylmethionine:tRNA ribosy ltransferase-isomerase OS=Streptomyces avermitilis (str ain ATCC 31267 / DSM 46492 / JCM 5070 / NBRC 14893 / NC IMB 12804 / NRRL 8165 / MA-4680) OX=227882 GN=qu
MGVPPVGRGRAWGKVPEELSARVPAEQRGPGLDRDSVRLLVSRGTEVSHHDFVELPRQLRAGDLLVVNTSPTLAAAVDGRIGHARVVVHFSTRGEDGRWAVELRDPDGRGTTRARTGGPAGTEVRLPDGVRLVLEEPLAGRSERLWWARVSAPGDADVTVLLRGHGRPIRYSYTERDQPLSVYQTVFALPSADGAGSAEMPSAARPFTARLVAELVSRGVQFAPITLHTGVASAEAHEPPYPERFAVPEASARLINAARAHRTPREASSSRGGDGSREGGRVIAVGTTAVRAVESATGTDGVVRPAEGWTDLVVTPERGVRAVDGLLTGLHEPEASHLLMLEALAGRTAIDRSYEEALAGLYLWHEFGDLHLILPDGESSHSALLPQPNVRLPLGRCDPAHRAHITYEEG

SEQ ID NO: 72655 - protein, 388 aa, Streptomyces avermitilis
  misc_feature (1)..(388): tr|A0A4D4M4C4|A0A4D4M4C4_STRAX S-adenosylmethionine:tRN A ribosyltransferase-isomerase OS=Streptomyces avermiti lis OX=33903 GN=SAV14893_061140 PE=3 SV=1
MPAEQRGPGLDRDSVRLLVSRGTEVSHHDFVELPRQLRAGDLLVVNTSPTLAAAVDGRIGHARVVVHFSTRGEDGRWAVELRDPDGRGTTRARTGGPAGTEVRLPDGVRLVLEEPLAGRSERLWWARVSAPGDADVTVLLRGHGRPIRYSYTERDQPLSVYQTVFALPSADGAGSAEMPSAARPFTARLVAELVSRGVQFAPITLHTGVASAEAHEPPYPERFAVPEASARLINAARAHRTPREASSSRGGDGSREGGRVIAVGTTAVRAVESATGTDGVVRPAEGWTDLVVTPERGVRAVDGLLTGLHEPEASHLLMLEALAGRTAIDRSYEEALAGLYLWHEFGDLHLILPDGESSHSALLPQPNVRLPLGRCDPAHRAHITYEEG

SEQ ID NO: 72656 - protein, 347 aa, Streptomyces azureus
  misc_feature (1)..(347): tr|A0A0K8PX16|A0A0K8PX16_STRAJ S-adenosylmethionine:tRN A ribosyltransferase-isomerase OS=Streptomyces azureus OX=146537 GN=SAZU_7231 PE=3 SV=1
MTPALRVPAELSARVPVEQRGPGVDRDVVRMLVSRGVEVAHHTFTELPRLLRAGDLLVVNTSATLAAAVDGWIGHARVVVHFSTRGDDGRWAVELREPDGRGTTRARAGGPVGTEVCLPGGVRLVLDQPLSGRSERLWWSRVSGPGVPGLLREHGRPIRYAYTERDQPLSVYQTVFAVPSADGAGSAEMPSAARPFTARLVTELVSRGVQFAPVTLHAGVASAEAHEPPYPERFVVPEASARLINAAKAGGGRVVAVGTTAVRAVESAVGGDGVVHGRAGWTDLVVTPERGVRVVDGLLTGLHEPEASHLLMLEAVAGREAIERGYGAAFQGRYLWHEFGDVHLVLP

SEQ ID NO: 72657 - protein, 403 aa, Streptomyces badius
  misc_feature (1)..(403): tr|A0A328JK33|A0A328JK33_STRBA S-adenosylmethionine:tRN A ribosyltransferase-isomerase OS=Streptomyces badius O X=1941 GN=A3838_26840 PE=3 SV=1
MTARGRCEGGDVALAAPGRGGAQPGAADSPALDARPGRAGEATALEALRVPDALSARVPAEQRGAGRDDVRLLVSRGRAVAHHAFRELPEQLRAGDVLVVNTSMTLPAAVNGRVGGERVVVHFSTRGADGRWAVELRAPRGAGVTGPRPGGPAGAVVRLPGGRALVLEEPLGPAAGARLWWARAPERVPELLRGYGRPIRYGYTDRDQPLSAYRTVFAVDSPDGSGSAEMPSAARPFTVPLVAELVRRGVLFAPLSLHTGVASAEAHEPPYPERFAVPAATAWLVNAVRAAGSGRVVAVGTTAVRALESAVGEDGVVRPAEGWTDLVVTPRRGVRVVDGLLTGLHEPQASHLLMLEAVAGREALRRGYEAALQERYLWHEFGDVHLILPDEEHNAPDCFSNEW

SEQ ID NO: 72658 - protein, 367 aa, Streptomyces bottropensis
  misc_feature (1)..(367): tr|M3DEI9|M3DEI9_9ACTN S-adenosylmethionine:tRNA ribosy ltransferase-isomerase OS=Streptomyces bottropensis ATC C 25435 OX=1054862 GN=SBD_2370 PE=3 SV=1
MSTVAVGVPEELHARVPAEQRGPGLDRDGVRLLVSCGTRVSHHAFAALPGLLRAGDLLVVNTSPTLAAAVDGTVGHARVVVHFSTRGDDGRWAVELRDPDGRGTTRARAGGPAGTEVVLPGGARLVLEEPLSARGERLWWARVSAPDVAGVLREHGRPIRYSYTERDQPLSVYQTVFALPSRDGAGSAEMPSAGRPFTARLVAELVSRGVQFAPVTLHTGVASAEAHEPPYPERFAVPEASARLINAARANGGRRPGGRVVAVGTTAVRAVESATGPDGVVRARRGWTDLVVTPERGVRVVDGLLTGLHEPEASHLLMLEAVAGRAAVDRSYEAAAEGRYLWHEFGDVHLILPEETPHAEHCASNCR

SEQ ID NO: 72659 - protein, 347 aa, Streptomyces caelestis
  misc_feature (1)..(347): tr|A0A0M8QLK0|A0A0M8QLK0_9ACTN S-adenosylmethionine:tRN A ribosyltransferase-isomerase OS=Streptomyces caelesti s OX=36816 GN=ADK41_16600 PE=3 SV=1
MTVVVEVPEELSARVPVEQRGPGLDRDSVRLLVSRGTAVSHHAFVELPRLLRAGDLLVVNTSPTLAAAVGGWIGPTRVVVHFSTRGDDGRWAVELRDPDGRGTTRARAGGPAGTEVRLTGGTRLVLEEPLSARGERLWWARVAGDVLGVLREHGRAVRYAYTERDQPLSAYQTVFALPSPDGAGSAEMPSAGRPFTARTVVGLVSRGVQFAPVTLHTGVASGEAHEPPYPERFVVPETSARLIGAVRAGGGRVIAVGTTAVRAVESAAGADGVVRARAGWTDLVVTPERGVRVVDGLLTGLHEPEASHLLMLEAVAGRAAIDRGYEEALRGRYLWHEFGDVHLVLPE

SEQ ID NO: 72660 - protein, 433 aa, Streptomyces caeruleatus
  misc_feature (1)..(433): tr|A0A101TED1|A0A101TED1_9ACTN S-adenosylmethionine:tRN A ribosyltransferase-isomerase OS=Streptomyces caerulea tus OX=661399 GN=AQJ67_43725 PE=3 SV=1
MTLAVRVPEELSARVPAEQRGPGLGRDAVRLLVSRGTDVSHHAFGELPRLLRAGDVLVVNTSQTLAAAVDGWVGHARVVVHFSTRGDDGRWAVELRDPDGRGTTRARTGGPAGTEVRLPGGAGLVLEEPLGPGSGRLWWARASSAGVGRGWGAGEGSGGVWGVGRGGARTGAEGVGGAGAEGVGGAGTEGPGGVGAEGLWGAHPQADGPAAAEEDGTGILRVMREYGRPIRYSYTERDQPLSVYQTVFALPSGDGAGSAEMPSAARPFTMRTVTELVSRGVQFAPVTLHTGVASAEAHEPPYPERFAVPEASARLINAVRAGGGRVVAVGTTAVRAVESAVDADGVVRARAGWTDLVVTPERGVRAVDGLLTGLHEPQASHLLMLEAVAGRAAIERSYEAALQGLYLWHEFGDVHLILPAEGPHAEHCCSNCR

SEQ ID NO: 72661 - protein, 358 aa, Streptomyces canus
  misc_feature (1)..(358): tr|A0A101SCH8|A0A101SCH8_9ACTN S-adenosylmethionine:tRN A ribosyltransferase-isomerase OS=Streptomyces canus OX =58343 GN=AQJ46_16710 PE=3 SV=1
MTLAVRVPEELSARLPAEQRGPGLDRDAVRLLVSRGTAVSHHSFGELPRLLRAGDLLVVNTSPTLAAAVDGRIGHVRVVVHFSTRGDDGRWAVELRDPDGRGTTRARAGGPAGTEVRLPGGGRLVLEEAVSERLWWARVCGGEVPGLLREHGRPIRYSYTERDQPLSVYQTVFALPSPDGSGSAEMPSAARPFTARLVAELVSRGVQFAPVSLHTGVASAEAHEPPYPERFSVPEASARLINAVRAGGGRVVAVGTTAVRAVESAAGADGVVRAREGWTDLVVTPERGVRVVDGLLTGLHEPEASHLLMLEAVAGRAAIDRGYEEALRRLYLWHEFGDLHLFLPREEAHAEHCSSNCR

SEQ ID NO: 72662 - protein, 358 aa, Streptomyces canus
  misc_feature (1)..(358): tr|A0A101PMT2|A0A101PMT2_9ACTN S-adenosylmethionine:tRN A ribosyltransferase-isomerase OS=Streptomyces canus OX =58343 GN=AQI96_07105 PE=3 SV=1
MTLAVRVPEELSARLPAEQRGPGLDRDAVRLLVSRGTAVSHHSFGELPGLLRAGDLLVVNTSPTLAAAVDGRIGHARVVVHFSTRGDDGRWAVELRDPDERGTTRARAGGPAGTEVRLPGGGRLVLEEAVSERLWWARAGGGDVPGLLREHGRPIRYSYTERDQPLSVYQTVFALPSSDGSGSAEMPSAARPFTARLVAELVSRGVQFAPVSLHTGVASAEAHEPPYPERFSVPEASARLINAVRAGGGRVVAVGTTAVRAVESAAGADGVVRAREGWTDLVVTPERGVRVVDGLLTGLHEPEASHLLMLEAVAGRAAIDRGYEEALRRLYLWHEFGDVHLLLPREEAHAEHCSSNCR

SEQ ID NO: 72663 - protein, 347 aa, Streptomyces cattleya
  misc_feature (1)..(347): tr|F8JXY8|F8JXY8_STREN S-adenosylmethionine:tRNA ribosy ltransferase-isomerase OS=Streptomyces cattleya (strain ATCC 35852 / DSM 46488 / JCM 4925 / NBRC 14057 / NRRL 8057) OX=1003195 GN=SCATT_09980 PE=3 SV=1
MTASAVRTVRVPPELSARVPPARRDAVRLITGRRSTGEVSHHAFRALPRLLCAGDVLVVNTSPTLPAAVDGVLAGEAVVVHFSTRRDDGRWAVELRTPDGRGTTRARPGGPAGAVVALAGGGRLVLDAPLAAGSDRLWLATVAPADTVAYLRRNGRPIRYGYTERDQPLAAYRTVFSVPSADGLGSAEMPGAGRPFTAGMVAALVSRGVQVAPLTLHTGVASAQAHEPPYPERFAVPESTARLVNAARAGGGRVIAVGTTAVRALESAADEGGRVRAARGWTDLVVTPERGTRVVDGLLTGLHEPEASHLLMLAAVAGVELLDRVYAEAVRERYRWHEFGDVNLLLP

SEQ ID NO: 72664 - protein, 402 aa, Streptomyces cavourensis
  misc_feature (1)..(402): tr|A0A543VIS5|A0A543VIS5_9ACTN S-adenosylmethionine:tRN A ribosyltransferase-isomerase OS=Streptomyces cavouren sis OX=67258 GN=FHX79_111162 PE=3 SV=1
MSSLEALRVPPELSARVPAEQRGSGRDDVRLLVTRGTDVSHHAFRELPGQVRAGDVLVVNTSATLPAAVNGRVGGERVVVHFSTRGEDGRWAVELRAPGASGATVPRPGGPAGAAVRLPGGRELVLEEPMGGALSAGGGLPTGPGRAPGRTPALAPGTAEAGPVERRPVGAEPSEGARLWWARVPEGVPGLLRRYGRPIRYGYTERDQPLSAYQTVFAVAAPDGSGSAEMPSAARPFTAALVAELVSRGVQFAPLSLDTGVASAEAHEPPYPERFSVPPTTAWLVNAARAAGGRVIAVGTTAVRALESAVDAEGVVRPVAGWTDLVVTPRRGVRVVDGLLTGLHEPEASHLLMLEAVAGREALRRGYEAALERHYLWHEFGDVHLILPDEERNAPDCSSNVR

SEQ ID NO: 72665 - protein, 361 aa, Streptomyces cellostaticus
  misc_feature (1)..(361): tr|A0A101NRW3|A0A101NRW3_9ACTN S-adenosylmethionine:tRN A ribosyltransferase-isomerase OS=Streptomyces cellosta ticus OX=67285 GN=AQI88_03645 PE=3 SV=1
MTVVVRVPEELSARVPAEQRGPGLDRDAVRLLVSRGTEVSHHGFAELPRLLRAGDLLVVNTSSTLAAAVDGRIGHARVVVHFSTRGDDGRWAVELRDPDGRGTTRARAGRPAGTEVGLPGGARLVLEEPLSGHGERLWWARASGAEVLGVLREHGRPIRYSYTERDQPLSVYQTVFALPSPDGTGSAEMPSAARPFTARLVAELVSRGVQFAPVTLHTGVASAEAHEPPYPERFTVPEASARLINAVGAGDGRVIAVGTTAVRAVESATGPDRVVRAADGWTDLVVTPERGVRTVDGLLTGLHEPKASHLLMLEAVAGRTAVDRAYEEALRGLYLWHEFGDVHLILPEEAPHAERCDGNSW

SEQ ID NO: 72666 - protein, 359 aa, Streptomyces chartreusis
  misc_feature (1)..(359): tr|A0A2N9BHJ9|A0A2N9BHJ9_STRCX S-adenosylmethionine:tRN A ribosyltransferase-isomerase OS=Streptomyces chartreu sis NRRL 3882 OX=1079985 GN=queA PE=3 SV=1
MTLAMGVPPHEPVRAWASVPEELSARVPVEQRRPGLDRDAVRMLVSRGVEVAHHTFPELPRLLRAGDLLVVNTSATLAAAVDGWIGHARVVVHFSTRGDDGRWAVELREPDGRGTTRARAGGPAGTEVCLPGGGWLVLEEPLSGRSGRLWWARVTGPGVPGLLREHGRPIRYSYTERDQPLSVYQTVFALPSADGAGSAEMPSAARPFTARLVTELVSRGVQFAPVTLHTGVASAEAHEPPYPERFVVPEASARVINAVRAGGGRIVAVGTTAVRAVESAAGADGVVGARAGWTDLVVTPERGVRVVDGLLTGLHEPEASHLLMLEAVAGREAIRRGYEAAVRGRYLWHEFGDVHFVLP

SEQ ID NO: 72667 - protein, 369 aa, Streptomyces clavuligerus
  misc_feature (1)..(369): tr|B5H0W6|B5H0W6_STRC2 S-adenosylmethionine:tRNA ribosy ltransferase-isomerase OS=Streptomyces clavuligerus (st rain ATCC 27064 / DSM 738 / JCM 4710 / NBRC 13307 / NCI MB 12785 / NRRL 3585 / VKM Ac-602) OX=443255 GN=
MRVRTMAERADAPVALRVPDELSAGVPAEVRGAGRDDVRLLVSRGERVSHRVFGELPGLLRAGDVLVVNTSRTLPAAVNGRVQGEPVVVHFSTRGDDGRWAVELRTPDGRGSSLPRAGGPVGAVVRLPGGERLVQEAPLSPGSGRLWWAWVSTPVPELLGRCGRPIRYGYTAGDQPLSAYQTVFARRSPDGSGSAEMPSAARPFTERTVAALVRRGVQFAPVVLHTGVASAEAHEPPYPERFAVPAASAWLVNAARAGGGRILAVGTTAVRALESATGADGVVREASGWTDLVIGPKRGVRAVDGLLTGLHEPAASHLLMLEAIAGRPALSRAYDEALRGLYLWHEFGDVHLVLPDDYPYSLNCWSNAS

SEQ ID NO: 72668 - protein, 366 aa, Streptomyces coelicoflavus
  misc_feature (1)..(366): tr|H1Q8A7|H1Q8A7_9ACTN S-adenosylmethionine:tRNA ribosy ltransferase-isomerase OS=Streptomyces coelicoflavus ZG 0656 OX=1120227 GN=SMCF_1091 PE=3 SV=1
MRAPAVRVPEELSARVPVEQRGPGLDRDGVRLLVSHGTEVSHHVFGELPGLLRAGDLLVVNTSPTLAAAVDGRVGHARVVVHFSTRGDDGRWAVELREPDGRGTTRARADAAGITRARADAVEGRGCGGPAGTKVRLPGGARLVLEEPLSARGERLWWARVSRAEVPALLREHGRPIRYSYTERDQPLSVYQTVFAVPPGDGTGSAEMPSAARPFTARLVAELVSRGVQFAPVTLHTGVASAESHEPPYPERFAVPEASARLINAVRAGDGRVVAVGTTAVRAVESAVGSDGVVRARAGWTDLVVTPERGVRVVEGLLTGLHEPEASHLLMLEAVAGRAAIDRGYDAAVRGRYLWHEFGDVHLLLP

SEQ ID NO: 72669 - protein, 358 aa, Streptomyces coelicolor
  misc_feature (1)..(358): tr|A0A4R8NN53|A0A4R8NN53_STRCH S-adenosylmethionine:tRN A ribosyltransferase-isomerase OS=Streptomyces coelicol or OX=1902 GN=C7986_12213 PE=3 SV=1
MSPLAVRVPEELSARVPAEQRGPGLDRDDVRLLVSRGTEVSHHGFAELPGLLRAGDLLVVNTSPTLAAAVDGRVGHARVVVHFSTRGDDDRWAVELREPDGRGATRARAEAEGVEGRGCGGLAGTKVRLPGGARLVLEEPLSARGERLWWARVSGAEVPALLREHGRPIRYSYTERDQPLSVYQTVFALPYADGTGSAEMPSAARPFTARLVAELVSRGVQFAPVTLHTGVASAESHEPPYPERFAVPEASARLINAVRAGDGRVVAVGTTAVRAVESAAGADGVVRARAGWTDLVVTPERGVRVVDGLLTGLHEPEASHLLMLEAVAGQAAIDRGYEAAVRRRYLWHEFGDVHLLLP

SEQ ID NO: 72670 - protein, 358 aa, Streptomyces coelicolor; identical to SEQ ID NO: 72669
  misc_feature (1)..(358): tr|Q9AJX3|Q9AJX3_STRCO S-adenosylmethionine:tRNA ribosy ltransferase-isomerase OS=Streptomyces coelicolor (stra in ATCC BAA-471 / A3(2) / M145) OX=100226 GN=SCO1804 PE =3 SV=1

SEQ ID NO: 72671 - protein, 347 aa, Streptomyces collinus
  misc_feature (1)..(347): tr|S5US45|S5US45_STRC3 S-adenosylmethionine:tRNA ribosy ltransferase-isomerase OS=Streptomyces collinus (strain DSM 40733 / Tu 365) OX=1214242 GN=B446_09340 PE=3 SV=1
MRVPEELSARVPAEQRGPGLDRDSVRLLVSRGTEVTHHAFAELPRLLRAGDLLVVNTSPTLAAAVDGRIGHARVVVHFSTRGDDGRWAVELRDPDGAGTTRARTGTRAGTEVVLPGAGALVLEEPLSARGERLWWARAAGDVRQALRVHGRPIRYSYTERDQPLPVYQTVFALPSADGAGSAEMPSAARPFTARLVTELVSRGVQFAPVTLHTGVASMEAHEPPYPERFAVPEASARAVEAARAGGGRVIAVGTTAVRALESAAGPDGAVGAARGWTDLVVTPGRGVQVVDGLLTGLHEPEASHLLMLEAVAGRAAVERAYAEALRGRYLWHEFGDVHLILPAEAAH

SEQ ID NO: 72672 - protein, 383 aa, Streptomyces corchorusii
  misc_feature (1)..(383): tr|A0A117QFR0|A0A117QFR0_STRCK S-adenosylmethionine:tRN A ribosyltransferase-isomerase OS=Streptomyces corchoru sii OX=1903 GN=AQJ11_21045 PE=3 SV=1
MTVSTGVCPLGPRKRGEVPAELSARVPAEQRGPGLGRDAVRLMVSRGTEVAHHAFSELPGLLRAGDLLVVNTSPTLAAAVDGRIGHARVVVHFSTRGDDGRWAVELREPDGRGTTRARAGSPAGTEVSLPGGGRLLLEEPLSARGERLWWARVAGADVREVLGGHGRPIRYSYTERDQPLSAYQTVFALPSPDGAGSAEMPSAARPFTARLVAELVSRGVWFAPVTLHTGVSSAEAHEPPYPERFSVPEASARLINQVRTRREGLHAPPRAEGGRVIAVGTTAVRAVESAAGPDGVVRAAEGWTDLVVTPERGVRAVDGLLTGLHEPEASHLLMLEAVAGRAAVDRAYEEALRALYLWHEFGDVHLILPVENPHPEHCDGNKK

SEQ ID NO: 72673 - protein, 379 aa, Streptomyces curacoi
  misc_feature (1)..(379): tr|A0A117PLC0|A0A117PLC0_9ACTN S-adenosylmethionine:tRN A ribosyltransferase-isomerase OS=Streptomyces curacoi OX=146536 GN=AQI70_00065 PE=3 SV=1
MVTVSLRVPEELSARIPAEQRGPGLDRDAVRLLVSRGTEVSHHAFGELPRVLRSGDLLVVNTSETLAAAVDGRIGHGDVVVHFSTRGDDGRWAVELRDPDERGTTRARAGGSAGTEVRLPGGVRLVLEEPLSAGSERLWWARVGRVRGAGGAGLEERADNPGAVILGLMREHGRPIRYSYTERDQPLSVYRTVFALPSADGTGSAEMPSAARPFTVRMVTELVSRGVQFAPITLHTGVASAEAQEPPYPERFAVSEASARLINAVQAGDGRVVAVGTTAVRAVESAAGADGVVRAHEGWTDLVVTPERGVRVVDGLLTGLHEPQASHLLMLEAVAGRAAIDRSYEAALRGLYLWHEFGDVHLILPADNPHSAHCSSNRR

SEQ ID NO: 72674 - protein, 361 aa, Streptomyces davaonensis
  misc_feature (1)..(361): tr|K4RC08|K4RC08_STRDJ S-adenosylmethionine:tRNA ribosy ltransferase-isomerase OS=Streptomyces davaonensis (str ain DSM 101723 / JCM 4913 / KCC S-0913 / 768) OX=121410 1 GN=BN159_6729 PE=3 SV=1
MTLALQVPEELSARVPAEQRGPGLGRDSVRLLVSRGTEVAHHAFRELPGLLRAGDLLVVNTSPTLAAAVDGEIGHARVVVHFSTRGDDGRWAVELRDPDGRGTTRARAGGPAGTGVRLPGGMRLVLEEPLSAGGERLWWARASGPEVLGMLREYGRPIRYSYTERDQPLSAYQTVFALESGDGAGSAEMPSAARPFTARMVAELVSRGVQFAPVTLHTGVASAEAHEPPYPERFAVPEVSARLINAVRAGGGRVIAVGTTAVRAVESAAGAEGTVRARAGWTDLVVTPERGGRVVDGLLTGLHEPEASHLLMLEAVAGRAAVGRGYEEALRGRYLWHEFGDLHLLLPAENPHTEHCSRNCQ

SEQ ID NO: 72675 - protein, 389 aa, Streptomyces dengpaensis
  misc_feature (1)..(389): tr|A0A2L2MSG6|A0A2L2MSG6_9ACTN S-adenosylmethionine:tRN A ribosyltransferase-isomerase OS=Streptomyces dengpaen sis OX=2049881 GN=C4B68_31395 PE=3 SV=1
MTTAMGVPPFERSRAWGRVPEELSARVPAEQRGPGLDRDSVRLLVSRGTEVSHHAFVELPRQLRAGDVLVVNTSPTLAAAVDGRVGHARVVVHFSTRGDDGRWAVELRDPDGTGTTRARAGGPAGTEVCLPGDVGLVLEEPLTSRSPRLWWGRVPGADVLGLLRRHGRPIRYSYTERDQPLSAYQTVFALPSADGAGSAEMPSAARPFTSRLVAELVSRGVQFAPVTLHTGVASAEAHEPPYPEKYEVPWASARLINAAKGEQRRAALAWKSGDGSRADGRIVAVGTTAVRAVESATGPDGLVRAAKGWTDLVVTPERGVRVIDGLLTGLHEPEASHLLMLEAIAGGAAIDRSYEEALRGHYLWHEFGDVHLIVPDESTHSEHCDSNCW

SEQ ID NO: 72676 - protein, 361 aa, Streptomyces diastatochromogenes
  misc_feature (1)..(361): tr|A0A233SV07|A0A233SV07_9ACTN S-adenosylmethionine:tRN A ribosyltransferase-isomerase OS=Streptomyces diastato chromogenes OX=42236 GN=BEK98_02215 PE=3 SV=1
MSVRVRVPEGLSARVPAEQRGPGLDRDDVRLLVSRGTEVTHHVFAELPRLLRAGDLLVVNTSPTLAAAVDGRIGHARVVVHFSTRGDDGRWAVELREPDGRGTTRARAGTPAGTEVGLPGGARLVLEEPLSGRGERLWWARVSGAEVLRVLGEHGRPIRYSYTERDQPLSVYQTVFALPSPDGAGSAEMPSAARPFTARLVAELVSRGVQFAPITLHTGVASAEAHEPPYPERFAVPVASARLINAVKAGDGRVIAVGTTAVRAVESATGPDGVVRAAEGWTDLVVTPERGVRAVDGLLTGLHEPEASHLLMLEAVAGRAAVDRAYEEALRGLYLWHEFGDVHLILPEEAPHSERCDGNSW

SEQ ID NO: 72677 - protein, 391 aa, Streptomyces filamentosus
  misc_feature (1)..(391): tr|D6AP51|D6AP51_STRFL S-adenosylmethionine:tRNA ribosy ltransferase-isomerase OS=Streptomyces filamentosus NRR L 15998 OX=457431 GN=SSGG_00933 PE=3 SV=1
MTARGRYEGGDVALAVPGAGGDGAGPVDEVTALEALRVPEELSARVPAEQRGAGRDDVRLLVSRGRSVAHQAFRELPEQLRGGDVLVVNTSMTLPAAVNGRVGGERVVVHFSTRGADGRWAVEVRAPAGAGVTGPRPGGPAGAVVRLPGGRALVLEDPLGPSAGARLWWARVPEAVPELLRRYGRPIRYGYTDRDQPLSAYRTVFAVDSPDGGGSAEMPSAARPFTVPLVAELVRRGVLFAPLFLHTGVASAESHEPPYPERFAVPAATAWLVNAVRAAGSGRVIAVGTTAVRALESAAGADGVVRPAEGWTDLVVTPRRGVRVVDGLLTGLHEPRASHLLMLEAVAGREALRHGYEAALQERYLWHEFGDVHLILPDEERNAPNCSSNEW

SEQ ID NO: 72678 - protein, 391 aa, Streptomyces filamentosus; identical to SEQ ID NO: 72677
  misc_feature (1)..(391): tr|W9FMZ9|W9FMZ9_STRFL S-adenosylmethionine:tRNA ribosy ltransferase-isomerase OS=Streptomyces filamentosus NRR L 11379 OX=457430 GN=SSIG_01127 PE=3 SV=1

SEQ ID NO: 72679 - protein, 358 aa, Streptomyces formicae
  misc_feature (1)..(358): tr|A0A291Q5E4|A0A291Q5E4_9ACTN S-adenosylmethionine:tRN A ribosyltransferase-isomerase OS=Streptomyces formicae OX=1616117 GN=KY5_1708 PE=3 SV=1
MSMLGAARHVPAALLARVPAEQRGPGLGRDAVRLLVSRGTAVSHHAFAELPTLLRAGDLLVVNTSRTLPAAVDGRLGHARVVVHFSTRGEGGRWAVELRDPDGKGTTRARAGGPAGAVVRLPGDVPLVCEERLAEGSGRLWWVRVSADVPGLLRRHGRPIRYSYTDRDQPLSAHQTVFALPSPDGAGSAEMPSAGRPFTAALVAELVSRGVQFAPVTLHTGVASQEAHEPPYPELFEVPLPSARLINAAKAGGGRVVAVGTTAVRAVESAAGSDGVVRAAAGRTDLLVTPERGVRVVDGLLTGLHEPAASHLLMLEAVAGRAAVDRGYAEAVRRLYLWHEFGDAHLILREDAPHCERC

SEQ ID NO: 72680 - protein, 363 aa, Streptomyces fradiae; identical to SEQ ID NO: 72646
  misc_feature (1)..(363): tr|A0A3B7R0R5|A0A3B7R0R5_STRFR S-adenosylmethionine:tRN A ribosyltransferase-isomerase OS=Streptomyces fradiae OX=1906 GN=D3X13_27095 PE=3 SV=1

SEQ ID NO: 72681 - protein, 408 aa, Streptomyces fulvissimus
  misc_feature (1)..(408): tr|N0CJL4|N0CJL4_9ACTN S-adenosylmethionine:tRNA ribosy ltransferase-isomerase OS=Streptomyces fulvissimus DSM 40593 OX=1303692 GN=SFUL_1377 PE=3 SV=1
MRAVGAARGDGGGAPSAGAGDSLLEGLRVPAELSARVPAEQRGAGRDDVRLLVTRGAAVSHHAFRELTGQLRAGDVLVVNTSATLPAAVNGRVGGERVVVHFSTRGEDGRWAVELRAPGASGAGVPRPGGPAGCVVRLPGGRELVLEEPLGGGLSAGPDQGAVPGTASPAGPAGSPLAPAAGARLWWARVPERVPELLRRYGRPIRYAYTERDQPLSAYQTVFAVRAPDGSGSAEMPSAARPFTAALVAELVSRGVQFAPLSLDTGVASAEAHEPPYPERFAVPSTTAWLVNAARAAGGRVVAVGTTAVRALESAADADGVVRPAAGWTDLVVTPRRGVRVVDGLLTGLHEPEASHLLMLEAVAGREALRRGYEAALERRYLWHEFGDVHLILPKEERNTPDCFSNEW

SEQ ID NO: 72682 - protein, 347 aa, Streptomyces fungicidicus
  misc_feature (1)..(347): tr|A0A494UXT9|A0A494UXT9_9ACTN S-adenosylmethionine:tRN A ribosyltransferase-isomerase OS=Streptomyces fungicid icus OX=68203 GN=CNQ36_07705 PE=3 SV=1
MTVIAGVPEELSARVPVEQRGPGLDRDSVRLLVSRGTAVSHHAFVELPRLLRAGDLLVVNTSPTLAAAVGGWIGHGRVVVHFSTRGDDGRWAVELRDPDGHGTTRARAGAPAGTEVRLAGGVRLVLEEPLSARGERLWWARASGDVRGALREYGRPIRYAYTERDQPLSAYQTVFALPSPDGAGSAEMPSAGRPFTARMVTELVSRGVQFAPVTLHCGVASQEAHEPPYAERFVVPEASARLIGAVRAGGGRVIAVGTTAVRAVESAAGADGVVRARAGWTDLVVTPERGVRVVDGLLTGLHEPEASHLLMLEAVAGRAAVGRGYEEALGGRYLWHEFGDVHLVLPG

SEQ ID NO: 72683 - protein, 389 aa, Streptomyces galbus
  misc_feature (1)..(389): tr|A0A4U5X331|A0A4U5X331_STRGB S-adenosylmethionine:tRN A ribosyltransferase-isomerase OS=Streptomyces galbus O X=33898 GN=E4U92_16360 PE=3 SV=1
MTAALRVPRELSARVPAEQRGPGLGRDDVRLLVSRGTRVTHHAFRELPHLLRAGDVLVVNTSCTLAAAVDGWAGDARVVVHFSTRGDDGRWAVELRDPDGRGTTRARAGGPAGTRVRLPGAVLVLEEPLSGRGERLWWARVSVPDAPARTPGRGSARTAPARGAVADVPALLREHGRPIRYSYTERDQPLSVYQTVFALPAPDGSGSAEMPSAARPFTAGLVTELVSRGVQFAPVTLHTGVASAEAHEPPYPERFSVPEASARLVNAARAGGGRVIAVGTTAVRALESAAGADGVVRAREGWTDLVVTPQRGVRVVDGLLTGLHEPEASHLLMLRAVAGRAVVERSYEEALNGRYLWHEFGDVHLLLPGKDLTHGIASATLGENAVSAV

SEQ ID NO: 72684 - protein, 385 aa, Streptomyces gancidicus
  misc_feature (1)..(385): tr|M3DQB5|M3DQB5_9ACTN S-adenosylmethionine:tRNA ribosy ltransferase-isomerase OS=Streptomyces gancidicus BKS 1 3-15 OX=1284664 GN=H114_29006 PE=3 SV=1
MTVTFRVPEELSARVPAEVRAPGGDRDAVRLLVSRGVEVSHLAFAELPSLLRAGDVLVVNTSPTLAAAVDGRIGDARVVVHFSTRGDDGRWAVELREPDGRGTTRVRAGTRAGTGVRLAGGARLGIEEPLSPGASRLWWARVSRDVPGLLREHGRPIRYAYTERDQPLSAYQTVFALPARDGSGSAEMPSAGRPFTARTVTELVSRGVQFAPVRLDTGVASAEAHEPPYPERFAVPEASARVIGAVRAGGGRVIAVGTTAVRALESAAGPDGAVRARAGWTDLVVTPERGVRVVDGLLTGLHEPEASHLLMLEAVAGREAVARATRRRCAGGTCGTSSGTCTCCCRADPAREISSPSALRQQHAVRSEGVRCEAAHRAHITYEAE

SEQ ID NO: 72685 - protein, 363 aa, Streptomyces gilvosporeus
  misc_feature (1)..(363): tr|A0A1V0TP19|A0A1V0TP19_9ACTN S-adenosylmethionine:tRN A ribosyltransferase-isomerase OS=Streptomyces gilvospo reus OX=553510 GN=B1H19_11110 PE=3 SV=1
MPVAIVTGASKGPGRAPDRDAVRLLVSRGGAAPAHHAFGELPGLLARGDVLVVNTSRTLPAAVDGRTGDGRGRGEPVVVHFSTRADRWHPAGREVAGCWAVELRTPDGRGGTRPRAGGPEGAVVRLPGGARLTLWAPVEPGGVRLWWGRVTGGCAMQVMRHHGRPIRYGYPEREQPPGAQQSVFAVDSPGAGSARMPGAARPFTAGLVARLVGAGVQFAPISLHTGVASAEAFEPPDAERFAVPAATAWLVNAARARRRAASRAAGGRVVAVGATAVRALESATGPDGRVRAAAGWTDLVVTPKRGVRAVDGLLTGLHEPTASTLLMLGAMAEPDVLERAYAAAGARRRLWQECGDLHLVLPG

SEQ ID NO: 72686 - protein, 369 aa, Streptomyces glaucescens
  misc_feature (1)..(369): tr|A0A089X8Z6|A0A089X8Z6_STRGA S-adenosylmethionine:tRN A ribosyltransferase-isomerase OS=Streptomyces glaucesc ens OX=1907 GN=SGLAU_07985 PE=3 SV=1
MRAPALRVPEALSARVPAEQRGPGLDRDAVRLLVSRGTRVSHHAFGELPRLLRAGDLLVVNTSPTLAAAVDGLLGHARVVVHFSARGDDGRWAVELREPDGRGTTRARAGGPAGAVLCLPAGARLLVEEPLGEGGGRLWWARAEGADVRAVLREHGRPIRYSYTERDQPLSAYQTVFALPSPDGEGSAEMPSAARPFTHRMVTELVSRGVRFAPVVLHAGVASAEAHEPPAAERFAVPETSARLIDATRAAGGRVIAVGTTAVRAVESAVDAGGVVRARAGWTDLVVTPERGVRGVDGLLTGLHEPEASHLLMLRAVAGRAAVERGYEEAVRGRCLWHEFGDVHLVLPDKPLTQSVARATLGESAARVM

SEQ ID NO: 72687 - protein, 352 aa, Streptomyces glauciniger
  misc_feature (1)..(352): tr|A0A239A4P0|A0A239A4P0_9ACTN S-adenosylmethionine:tRN A ribosyltransferase-isomerase OS=Streptomyces glaucini ger OX=235986 GN=SAMN05216252_101775 PE=3 SV=1
MTALDALRVPEELAARVPVEQRAGGAAGRDGVRLLVGRRAGGEVAHHAFGDLPELLRAGDVLVVNTSRTLPAAVDATLGESPVVVHFSGLLDDGRWVVELRTPDGRGTTRPRTGGPAGVAVALPGGERLVPQEPLSPCGERLWVARASVADAMAFLHRHGRPIRYAYTERDQPAAAYRTVFSLPSADGLGSAEMPSAARPFTTGLVTALVSRGVQIAPVVLHTGVSSGEAHEPPYPERFSVPESTAWLVNAARAGGGRVVAVGTTAVRALETAADARGRVAAAGGWTDLVVTPERGVRTVDGLLTGLHDPAASHVLMLEAVAGRELLERVYDAAVGAGYLWHEFGDVNLLLP

SEQ ID NO: 72688 - protein, 244 aa, Streptomyces globisporus
  misc_feature (1)..(244): tr|A0A423V496|A0A423V496_STRGL S-adenosylmethionine:tRN A ribosyltransferase-isomerase (Fragment) OS=Streptomyc es globisporus OX=1908 GN=D3105_05770 PE=3 SV=1
AGAPAPVLEEPLGPAAGARLWWARVPERVPELLRRYGRPIRYGYTDRDQPLSAYRTVFAVDSPDGSGSAEMPSAARPFTAPLVAELVRRGVLFAPLSLHTGVASAEAHEPPYPERFAVPAATAWLVNAVRAAGRARVVAVGTTAVRALETAVGADGVVRPAEGWTDLVVTPRRGVRVVDGLLTGLHEPQASHLLMLEAVAGREALRRGYEAALQERYLWHEFGDVHLILPDEERNAPDCFSNDW

SEQ ID NO: 72689 - protein, 410 aa, Streptomyces globisporus
  misc_feature (1)..(410): tr|A0A0U3BTH2|A0A0U3BTH2_STRGL S-adenosylmethionine:tRN A ribosyltransferase-isomerase OS=Streptomyces globispo rus C-1027 OX=1172567 GN=WQO_06865 PE=3 SV=1
MTARGRCEGGDVALAVPGAGGAEPATAAADPPALDERPGRAGTAVVAEVTALEALRVPDALSARVPAEQRGAGRDDVRLLVSRGRAVTHHAFRELPEQLRAGDVLVVNTSMTLPAAVNGRVGGERVVVHFSTRGADGRWAVELRAPRGAGVTGPRPGGPAGAVVRLPGGRALVLEEPLGPAAGARLWWAQAPERVPELLRRYGRPIRYGYTDRDQPLSAYRTVFAVDSPDGSGSAEMPSAARPFTVPLVAELVRRGVLFAPLSLHTGVASAEAHEPPYPERFAVPAATAWLVNAVRAAGSGRVVAVGTTAVRALESAVGADGVVRPAEGWTDLVVTPRRGVRVVDGLLTGLHEPQASHLLMLEAVAGREALRRGYEAALQERYLWHEFGDVHLILPDEERNAPDCFSNEW

SEQ ID NO: 72690 - protein, 415 aa, Streptomyces griseoaurantiacus
  misc_feature (1)..(415): tr|F3NQR4|F3NQR4_9ACTN S-adenosylmethionine:tRNA ribosy ltransferase-isomerase OS=Streptomyces griseoaurantiacu s M045 OX=996637 GN=SGM_5478 PE=3 SV=1
MRALARGRAWSVPEELSARVPAERRGPGLGRDAVRLLVSRGTEVTHHAFPELPGLLRAGDLLLVNTSPTLAAAADGRLGSDRVVVHFSTRGEDGRWAVELRAPDGRGTTRPRAGGPAGAVVELAEGVRLVLEEPLAAGSERLWWARAVAPWARDGRVRGGNALGGGPHDGGARDGEATGADATGTDARDGGTADAGTRDGGAAGRVVHPSGVADVPGLLRRHGRPIRYAYTERDQPLSAYQTVFALPGADGAGSAEMPSAARPFTPRLVAELVSRGVQFAPLTLHTGVASAEAHEPPYPERFAVPEASARLVNAARAGGGRVVAVGTTAVRAVESAAGADGIVRACAGWTDLVVTPGRGVRVVDGLLTGLHEPEASHLLMLEAVAGREAVERGYEEALAGRYLWHEFGDTHLLLR

SEQ ID NO: 72691 - protein, 378 aa, Streptomyces griseochromogenes
  misc_feature (1)..(378): tr|A0A1B1B5X6|A0A1B1B5X6_9ACTN S-adenosylmethionine:tRN A ribosyltransferase-isomerase OS=Streptomyces griseoch romogenes OX=68214 GN=AVL59_35790 PE=3 SV=1
MTIALGVPGELSARVPAEQRGPGLDRDAVRLLVSRGTEVSHHGFAELPRLLRAGDLLVVNTSPTLAAAVDGRIGHARVVVHFSTRGDDGRWAVELREPDGRGTTRARRESGARSAPRKGGDGRRAGIPAGTEVRLPGGARLVLEEPLSGRGERLWWARASGAEVLQVLGEHGRPIRYSYTERDQPLSVYQTVFALPSPDGSGSAEMPSAARPFTARLVAELVSRGIQIVPVTLHTGVASAEAHEPPYPERFAVPEASARSINAVKAGEGRVIAVGTTAVRAVESATGPDGVVRAARGWTDLVVTPERGVRTVDGLLTGLHEPEASHLLMLEAVAGRAAVDRAYEEALRGLYLWHEFGDVHLILPEESPHPERCDGNSW

SEQ ID NO: 72692 - protein, 347 aa, Streptomyces griseoflavus
  misc_feature (1)..(347): tr|D9XS21|D9XS21_9ACTN S-adenosylmethionine:tRNA ribosy ltransferase-isomerase OS=Streptomyces griseoflavus Tu4 000 OX=467200 GN=SSRG_04922 PE=3 SV=1
MTVIAGVPEELSARVPVEQRGPGLDRDSVRLLVSRGTAVSHHAFMELPRLLRAGDLLVVNTSPTLAAAVGGWIGHGRVVVHFSTRGDDGRWAVELRDPDGHGTTRARAGAPAGTEVRLAGGVRLVLEEPLSARGERLWWARASGDVRGALREYGRPIRYAYTERDQPLSAYQTVFALPSPDGAGSAEMPSAGRPFTARMVTELVSRGVQFAPVTLHCGVASQEAHEPPYAERFVVPEASARLIGAVRAGGGRVIAVGTTAVRAVESAAGADGVVRARAGWTDLVVTPERGVRVVDGLLTGLHEPEASHLLMLEAVAGRAAVGRGYEEALGGRYLWHEFGDVHLVLPG

SEQ ID NO: 72693 - protein, 371 aa, Streptomyces griseoflavus
  misc_feature (1)..(371): tr|A0A0L8MQA8|A0A0L8MQA8_9ACTN S-adenosylmethionine:tRN A ribosyltransferase-isomerase OS=Streptomyces griseofl avus OX=35619 GN=ADK76_31835 PE=3 SV=1
MTAEVLRVPPELSAREPAEQRAPGRGRDAVRLLVSRGTAEPSHHTFKELPRLLSAGDVLVVNTSRTLPAALDGRLGDGRGRGEPVVAHFSTRADRQHPRPEAAAGDWAVELRTPDGCGSTRQRAGGPAGTVVRLPGGARLELRAPVERGSVRLWWARVSGAPVADLLRRYGRPIRYGYTDRDQPLDAYQTVFAVGSPDGGGSAEMPSAARPFTASLVARLVSRGVQIAPVTLHTGVASAEAYEPPYPERFAVPPSTAWQINAARAGGGKVVAVGTTAVRALETAAGADGRIRAASGWTELVVTPERGVRAVDGLLTGLHEPQASHLLMLEAVGQVAAGADFGDALCRAYAEAVRRRYLWHEFGDLHLILPS

SEQ ID NO: 72694 - protein, 368 aa, Streptomyces griseofuscus
  misc_feature (1)..(368): tr|A0A426SDK0|A0A426SDK0_9ACTN S-adenosylmethionine:tRN A ribosyltransferase-isomerase OS=Streptomyces griseofu scus OX=146922 GN=CQW44_00070 PE=3 SV=1
MTTIVRVPEELSARVPAEQRGPGRARDDVRLLVSRGTRVTHHAFRELPGLLRAGDLLVVNTSPTLAAAVDGRIGDAPVVVHFSTRGDDGRWAVELREPDGRGTTRARPGTRAGTEVRLPEGVRLVVEEPVGGPEPVGGQPLGGHPVGRYRERLWWGRVEGGAVLGLLRGHGRPIRYSYTTRDQPLSAYQTLFSLPSPDGAGSAEMPSAGRPFTERVVAELVRGGVGFARVTLHTGVASAEAHEPPYPEWFTVPEASARAIGAAAAGGGRVIAVGTTAVRAVESAVGADGAVRACQGWTDLVVTPERGVRVVDGLLTGLHEPEASHLLMLRAVAGRAAVDRAYEEALRGLYLWHEFGDVHLLLGKETPR

SEQ ID NO: 72695 - protein, 379 aa, Streptomyces griseoruber
  misc_feature (1)..(379): tr|A0A117RF53|A0A117RF53_9ACTN S-adenosylmethionine:tRN A ribosyltransferase-isomerase OS=Streptomyces griseoru ber OX=1943 GN=AQJ64_04410 PE=3 SV=1
MTLAVRVPEELSARVPAEQRGPGRQRDDVRLLVSRGTEPAHHAFRELPCLLRAGDLLVVNTSPTLAAAVNGRIAHARVVVHFSTRGDAAYGGAARWAVELRDPDGRGTTRARAGGPAGTEVRLPGGVRLTLEEPLSPGSGRLWWARAAGGAGAGGRGAADVPGLLREHGRPIRYSYTERDQPLSVHQTVFALPSADGAGSAEMPSAARPFTAGLVAELVSRGVQFAPVALHTGVASAEVHEPPYPERFSVPEASARLINAVRAGDGRVIAVGTTAVRAVESAMGPDGVVRAREGWTDLVVTPGRGVRVVDGLLTGLHEPEASHLLMLEAVAGRAAIDRGYEEALRGRYLWHEFGDVHLLLPEEGPAEGPHGEHCFSNCP

SEQ ID NO: 72696 - protein, 368 aa, Streptomyces griseorubiginosus
  misc_feature (1)..(368): tr|A0A385ZV48|A0A385ZV48_9ACTN S-adenosylmethionine:tRN A ribosyltransferase-isomerase OS=Streptomyces griseoru biginosus OX=67304 GN=queA PE=3 SV=1
MTVATGVPAFGRRGYRVPEELSARVPAEQRGPGLDRDAVRLLVSRGTEVSHHSFAELPRLLRAGDLLVVNTSPTLAAAVDGRIGHTRVVVHFSTRGDDGRWTVELRDPDGRGTTRARAGGPAGTEVRLPGGLRLVLEEAVSERLWWARVSGGEVFGLLREHGRPVRYSYTERDQPLSVYQTVFALPSADGSGSAEMPSAARPFTGRTVAELVSRGVGFAPVRLDAGVASVEAHEPPYPERFAVPETSARLINAVKAGDGRVLAVGTTSVRAVESAAGADGVVRARAGWTELVVTPERGVRVVDGLLTGLHEPEASHLLMLEAVAGRAAIDRGYEEALRGRYLWHEFGDVHLLLPPEDPHAEHCFSNCS

SEQ ID NO: 72697 - protein, 362 aa, Streptomyces griseorubiginosus
  misc_feature (1)..(362): tr|A0A101S7E5|A0A101S7E5_9ACTN S-adenosylmethionine:tRN A ribosyltransferase-isomerase OS=Streptomyces griseoru biginosus OX=67304 GN=AQJ54_12630 PE=3 SV=1
MPAFGRRGYRVPEELSARVPAEQRGPGLDRDAVRLLVSRGTEVSHHSFAELPRLLRAGDLLVVNTSPTLAAAVDGRIGHTRVVVHFSTRGDDGRWTVELRDPDGRGTTRARAGGPAGTEVRLPGGPRLVLEEAVSERLWWARVSGGEVFGLLREHGRPVRYSYTERDQPLSVYQTVFALPSSDGAGSAEMPSAARPFTGRTVAELVSRGVGFAPVRLHAGVASVEAHEPPYPEWFAVPETSARLINAVRAGDGRVLAVGTTSVRAVESAAGADGVVRARAGWTDLVVTPGRGVRVVDGLLTGLHEPEASHLLMLEAVAGRAAIDRGYEEALRGRYLWHEFGDVHLLLPPEDPHAEHCFSNCS

SEQ ID NO: 72698 - protein, 427 aa, Streptomyces griseoviridis
  misc_feature (1)..(427): tr|A0A3S9ZHH6|A0A3S9ZHH6_STRGD S-adenosylmethionine:tRN A ribosyltransferase-isomerase OS=Streptomyces griseovi ridis OX=45398 GN=ELQ87_25485 PE=3 SV=1
MVQLPPLPGWLRRMRMLWVCDGCGWRTAFLSGASCPVPGTGAPRANVDGDRRAVVVAEVPDREDYAFDLPVELLAQEPQEARGGKRSDARLAVLHRSGGRVEHRVFTDIVEYVGAGDVLVVNNARFVPSLLPGVDEEGRAVAVSIHSPQGEGTWHCLVAPQAACRPGARFVLGAGLQVTGQLLDETAAGRWRIALDPCDPATLYALAEPAYSPYLKQAPADPEYYQNTYASVPGAVGNPAAGRHFTPALLDLLRERAVSVAEVTHFLAARTRREVTRMLRNLIAQGGAGDLAAEDLVDGTRLSDEFDFPPAERYRISEHAADLINDRRASGGRILVVGTSALRALETVTGPDGRTQPGSGSTSLRIMPGHRFRACDAFLTNLHEPRSSELILVAALTGRDFLLDTYRNELIPRGYRFNYFGDSMLIA

SEQ ID NO: 72699 - protein, 356 aa, Streptomyces griseoviridis
  misc_feature (1)..(356): tr|A0A3S9ZK61|A0A3S9ZK61_STRGD S-adenosylmethionine:tRN A ribosyltransferase-isomerase OS=Streptomyces griseovi ridis OX=45398 GN=ELQ87_30570 PE=3 SV=1
MTLTVEVPTELSARVPAEQRGPGLGRDAVRLLVSRGTEVSHHAFRELPGLLRAGDLLVVNTSATVAAAVDGRVGHARVVVHFSTRGDDGRWAVELREPSGDGSTRARAGGPAGTEVRLAGGARLVLEEPLSARGERLWWARVSGAGVPGLLRERGRPIRYAYTDRDQPLSAYQTVFALPSGDGTGSAEMPSAARPFTARLVTELVSRGVWFAPIALDTGVASAEAHEPPYPERFSVPEASARLVNAVRAGGGRVVAVGTTTVRAVESAAGPDGVVRARAGWTDLVVTPERGVRVVDGLLTGLHEPQASHLLMLAAVAGRAAVERGYAAAVRGRYLWHEFGDVHLLLPAEDLTESIA

SEQ ID NO: 72700 - protein, 440 aa, Streptomyces griseus
  misc_feature (1)..(440): tr|B1W1X4|B1W1X4_STRGG S-adenosylmethionine:tRNA ribosy ltransferase-isomerase OS=Streptomyces griseus subsp. g riseus (strain JCM 4626 / NBRC 13350) OX=455632 GN=queA PE=3 SV=1
MTGRERYPERVATGGARDGGPGPGSAGAGGAPVDGTARPGAGGDGPEAPEAWRGSESPVAPRGPEAPAASRGPESPVAWRVPDALSARVPAEQRGSGRDDVRLLVSRGCAVSHHAFRELPGQVRAGDVLVVNTSMTLPAAVNGRVGGERVVVHFSTRGADGRWAVELRAPGRAGATGPRPGGPAGAVVRLPGGRALVLEEPLGPVAGARLWWARTPERVPELLRRYGRPIRYGYTERDQPLSAYRTVFATPSQDGSGSAEMPSAGRPFTAALVAGLVRRGVLFAPLSLHTGVASAEAHEPPYPERFAVPAATAWLVNAVRAARGGDRAAGGRVIAVGTTAVRALESAAGADGVVRQAEGWTDLVVTPRRGVRVVDGLLTGLHEPEASHLLMLEAVAGREALRLGYEAALQERYLWHEFGDVHLILPDEERDAPNCFSNEW

SEQ ID NO: 72701 - protein, 403 aa, Streptomyces griseus; identical to SEQ ID NO: 72657
  misc_feature (1)..(403): tr|A0A2P5JVH4|A0A2P5JVH4_STRGR S-adenosylmethionine:tRN A ribosyltransferase-isomerase OS=Streptomyces griseus OX=1911 GN=BF14_027430 PE=3 SV=1

SEQ ID NO: 72702 - protein, 359 aa, Streptomyces hundungensis
  misc_feature (1)..(359): tr|A0A387HN59|A0A387HN59_9ACTN S-adenosylmethionine:tRN A ribosyltransferase-isomerase OS=Streptomyces hundunge nsis OX=1077946 GN=queA PE=3 SV=1
MTAPLVVRVPEALLASVPAEVRGAGRDDVRLMVSRGTAVTHHRFRELAGQLRAGDVLVVNTSRTLPAAVDGRVGGRPVVVHFSTLGPDGRWAVELRRPTASGSTERRTGDRAGTRVVLPDGERLVLDEALSPDRLWWARVSAADVPGLMRRHGRPIRYSYTERDQPLAAYQTVFARPAPGGLGSAEMPSAARPFTEGLVAELVRRGVRFAPVVLHTGVASAEAHEPPYPERFEVSAATARLVNAARADGARIVAVGTTAVRALESAAGPGRVVRAAAGWTDLVVTPERGVRVVDGLLTGLHEPEASHLLMLEAIAGREALAVAYDQALSRLYLWHEFGDVHLILAEENPHAAHCSSNVR

SEQ ID NO: 72703 - protein, 338 aa, Streptomyces hyalinus
  misc_feature (1)..(338): tr|A0A401Z446|A0A401Z446_9ACTN S-adenosylmethionine:tRN A ribosyltransferase-isomerase OS=Streptomyces hyalinus OX=516124 GN=EHYA_09386 PE=3 SV=1
MTTATVHEATEPAEARGLARDGVRLLVHAGERVEHTVFRDLGRHLGPGDLLVVNTSATLPAAVDGYRADGSPVTVHFATRLDEETWILELRHTDGTPGPVAGVRRFEAVRFPGTRCGMALLLDPYPHEHTPQRLWKARITVPHARVETFLADRGRPISYAHVRERWPLTAYQTIFARDEGSAEMPSAGRPFTHELVVDLITRGVTVAPIVLHTGVSSQEVGEPPLREWFAVPESTAHLVRRARRVIAVGTTVTRALESAVGPDGEIAATSGWTDLMLGPDRPARVVDGVISGLHAPEATHLLLLEAVVGRAAVRRAYDAALAEDYLWHEFGDSSLLLP

SEQ ID NO: 72704 - protein, 383 aa, Streptomyces hygroscopicus
  misc_feature (1)..(383): tr|A0A0S2NXQ1|A0A0S2NXQ1_STRHL S-adenosylmethionine:tRN A ribosyltransferase-isomerase OS=Streptomyces hygrosco picus subsp. limoneus OX=264445 GN=SHL15_1796 PE=3 SV=1
MTVSTGVCPLGPRKRGEVPAELSARVPAEQRGPGLGRDAVRLMVSRGTEVAHHAFSELPELLRAGDLLVVNTSPTLAAAVDGRIGHARVVVHFSTRGDDGRWAVELREPDGRGTTRARAGSPAGTEVSLPGGGRLLLEEPLSARGERLWWARVAGADVREVLGGHGRPIRYSYTERDQPLSAYQTVFALPSPDGAGSAEMPSAARPFTARLVAELVSRGVWFAPVTLHTGVSSAEAHEPPYPERFSVPEASARLINQVRTRREGLHAPPLAEGGRVIAVGTTAVRAVESAAGPDGVVRAAEGWTDLVVTPERGVRAVDGLLTGLHEPEASHLLMLEAAAGRAAVDRAYEEALRALYLWHEFGDVHLILPVEKPHSEHCDGNKK

SEQ ID NO: 72705 - protein, 384 aa, Streptomyces hygroscopicus
  misc_feature (1)..(384): tr|H2JRB7|H2JRB7_STRHJ S-adenosylmethionine:tRNA ribosy ltransferase-isomerase OS=Streptomyces hygroscopicus su bsp. jinggangensis (strain 5008) OX=1133850 GN=SHJG_325 5 PE=3 SV=1
MTVSTGVCPLGPRKRWEVPAELSARVPAEQRGPGLGRDAVRLMVSRGTEVAHHAFSELPELLRAGDLLVVNTSPTLAAAVDGRIGHARVVVVHFSTRGDDGRWAVELREPDGRGTTRARAGSPAGTEVSLPGGGRLLLEEPLSARGERLWWARVAGADVREVLGGHGRPIRYSYTERDQPLSAYQTVFALPSPDGAGSAEMPSAARPFTARLVAELVSRGVWFAPVTLHTGVSSAEAHEPPYPERFSVPEASARLINQVRTRREGLHAPPRAEGGRVIAVGTTAVRAVESAAGPDGVVRAAEGWTDLVVTPERGVRAVDGLLTGLHEPEASHLLMLEAVAGRAAVDRAYEEALRALYLWHEFGDVHLILPVENPHPEHCDGNKK

SEQ ID NO: 72706 - protein, 360 aa, Streptomyces incarnatus
  misc_feature (1)..(360): tr|A0A0G3ANP1|A0A0G3ANP1_9ACTN S-adenosylmethionine:tRN A ribosyltransferase-isomerase OS=Streptomyces incarnat us OX=665007 GN=ABB07_29525 PE=3 SV=1
MTVLVRVPPELSARVPVEQRAPGLDRDAVRMLVSRGTEVTHHGFRELPRLLRAGDLLVVNTSPTLAAAVDGRIGHARVVVHFSTRGDDGRWAVELREPDGRGTTRARTGTRAGTEVVLPGTGRLVVEEPLSPRGERLRWARAEGDVLAMLRVHGRPIRYSYTERDQPLSVYQTVFALPQPDGAGSAEMPSAARPFTAPLVAELVSRGVQFAPVTLHTGVASAEAHEPPYPERFSVPEASARQVNAAKAGGRRVIAVGTTAVRAVESAAGPDGVVRAAEGWTDLVVTPERGVRVVDGLLTGLHEPEASHLLMLRAVAGRAAVGRAYEEALRGLYLWHEFGDVHLILPEEGTHTERCDGNSW

SEQ ID NO: 72707 - protein, 366 aa, Streptomyces indicus
  misc_feature (1)..(366): tr|A0A1G9JVP7|A0A1G9JVP7_9ACTN S-adenosylmethionine:tRN A ribosyltransferase-isomerase OS=Streptomyces indicus OX=417292 GN=SAMN05421806_13711 PE=3 SV=1
MSVDEAVRLAGLRVPEELSAREPAEQRGPGRDRDSVRLLVSRGTAVSHHDFRALPGLLRAGDLLIVNTSPTLAAALDGRIGRTRVVVHFSTRGDDGRWAVELRDPDRAGTTRARAGQPGAVLLRGGARLVLEEPLDPAGTRLWWARVSVADVPGLLQRYGRPIRYSYTKEDQPLAAYQTVFALPQPGGAGSAEMPSAGRPFTARLVAELVSRGVQFAPVTLHTGVASGEAHEPPYPERFEVPAASARLINAAKAGGGRIIAVGTTGVRAVESAAGPDGIVRPAAGWTDLVVTPERGVRVVDGLLTGLHEPEASHLLMLEAIAGKPALERAYAAAVRGLYLWHEFGDSHLILREETDYGSNCSGNCW

SEQ ID NO: 72708 - protein, 393 aa, Streptomyces ipomoeae
  misc_feature (1)..(393): tr|A0A540P700|A0A540P700_9ACTN S-adenosylmethionine:tRN A ribosyltransferase-isomerase OS=Streptomyces ipomoeae OX=103232 GN=SipoB123_31740 PE=3 SV=1
MTTATVRVPEELHARVPAEQRGPGLDRDAVRLLVSCGTEVSHHEFVELPLLLRAGDLLIVNTSPTLAAAVDGAIGHARVVVHFSTRGDDGRWAVELRDPDGRGTTRARAGGPAGTEVQLPGGVRLVLEEPLSERGERLWWARVSAPGGVRSRGASGAPSAAGEPVPGALAPSGAPVCVVEALLREHGRPIRYSYTERDQPLPVYQTVFALPSADGSGSAEMPSAARPFTTRLVAELVSRGVRFAPVTLHTGVASAEAHEPPYPERFAVPEASARLINAAVAGDGRVIAVGTTAVRAVESAAGPDGVVRACAGWTDLVVTPERGVRVVDGLLTGLHEPEASHLLMLEAIAGRAAIERAYDEAIGGRYLWHEFGDVHLILPEEAPHTEHCDSNRQ

SEQ ID NO: 72709 - protein, 388 aa, Streptomyces ipomoeae
  misc_feature (1)..(388): tr|L1L6W2|L1L6W2_9ACTN S-adenosylmethionine:tRNA ribosy ltransferase-isomerase OS=Streptomyces ipomoeae 91-03 O X=698759 GN=STRIP9103_01886 PE=3 SV=1
MRVPEELHARVPAEQRGPGLDRDAVRLLVSRGTEVSHHEFVELPLLLRAGDLLIVNTSPTLAAAVDGAIGHARVVVHFSTRGDDGRWAVELRVPDGRGTTRARAGGPAGTEVQLPGGVRLVLEEPLSERGERLWWARVSAPGGVRSRGASGAPSAAGEPVPGAPAPSGAPVCVVEALLREHGRPIRYSYTERDQPLPVYQTVFALPSADGSGSAEMPSAARPFTTRLVAELVSRGVRFAPVTLHTGVASAEAHEPPYPERFAVPEASARLINAAVAGDGRVIAVGTTAVRAVESAAGPDGVVRACAGWTDLVVTPERGVRVVDGLLTGLHEPEASHLLMLEAIAGRAAIERAYDEAIGGRYLWHEFGDVHLILPEEAPHTERCDSNRR

SEQ ID NO: 72710 - protein, 137 aa, Streptomyces jeddahensis
  misc_feature (1)..(137): tr|A0A177HHX3|A0A177HHX3_9ACTN S-adenosylmethionine:tRN A ribosyltransferase-isomerase OS=Streptomyces jeddahen sis OX=1716141 GN=queA PE=3 SV=1
MPSAARSFTPLFVAGLVSRGVQFAPITLHTGVASAEVHEPPDGRVIAVGTAAVRAVESATGPDGVRAASGWTDLVVTPERGVRVVDGLLIGLHEPEASHLLMLEAIAGRQAISGGYGKALRHGYLWHEFGDTHLVMP

SEQ ID NO: 72711 - protein, 415 aa, Streptomyces jietaisiensis
  misc_feature (1)..(415): tr|A0A1G7V818|A0A1G7V818_9ACTN S-adenosylmethionine:tRN A ribosyltransferase-isomerase OS=Streptomyces jietaisi ensis OX=235987 GN=SAMN05216260_122103 PE=3 SV=1
MRALARGRAWSVPEELSARVPAERRGPGLGRDAVRLLVSRGTEVTHHAFPELPGLLCAGDLLLVNTSPTLAAAADGRLGSDRVVVHFSTRGEDGRWAVELRAPDGRGTTRPRAGGPAGAVVELAEGVRLVLEEPLAAGSERLWWARAVASGARDGRVRGGNALGGGPHDGGARDGEATGADATGTDARDGGTADAGTRDGGAAGRVVRPSGVADVPGLLRRHGRPIRYAYTERDQPLSAYQTVFALPGADGAGSAEMPSAARPFTPRLVAELVSRGVQFAPLTLHTGVASAEAHEPPYPERFAVPEASARLVNAARAGGGRVVAVGTTAVRAVESAAGADGIVRACAGWTDLVVTPGRGVRVVDGLLTGLHEPEASHLLMLEAVAGREAVERGYEEALAGRYLWHEFGDTHLLLR

SEQ ID NO: 72712 - protein, 365 aa, Streptomyces koyangensis
  misc_feature (1)..(365): tr|A0A385DHI8|A0A385DHI8_9ACTN S-adenosylmethionine:tRN A ribosyltransferase-isomerase OS=Streptomyces koyangen sis OX=188770 GN=D0C37_27100 PE=3 SV=1
MSARAVVGRVPEELSARVPVEEREPGRGRDGVRLLVSAGEREPRVGWFTELPGLLRAGDLLVVNTSATLPAAADGRLGGEPVVVHFSTRADGPGPGERWAVELRAPDGRGTTGPRPGGPAGAVVALAGGARLELVEPLAPGAERLWWAQTGGFGAADGSGSAVVAWLRRHGRPIRYAYTERDQPLAAYRTVFAAAGEEGGGSAEMPSAGRPFTTRTVTELVRAGVQFAPVTLHTGVASAEAHEPPYPERYTVSAHAAWLVNAVRAGGGRVIAVGTTAVRALESAAGPDGRVRAASGWTGLVVTPERGVRVVDGLLTGLHEPEASHLLMLEAVAGAAAVERGYEAAVRARLLWHEFGDVHLLTRRE

SEQ ID NO: 72713 - protein, 389 aa, Streptomyces lasaliensis
  misc_feature (1)..(389): tr|A0A4U5WHV3|A0A4U5WHV3_STRLS S-adenosylmethionine:tRN A ribosyltransferase-isomerase OS=Streptomyces lasalien sis OX=324833 GN=E4U91_07955 PE=3 SV=1
MTPALRVPEELSARVPAEQRGPGLRRDDVRLLVSRGTEVAHHAFRELPGLLRAGDVLVVNTSSTLAAAVDGWVGSARVVVHFSTRGDDGRWAVELRDPDGRGTTRARAGGPAGTRVRLPGAVLVLEEPQSGRGERLWWARVSAPDAPARTAGRGPAAAAPARGAVADVPALLREHGRPIRYSYTERDQPLSVYQTVFALPSPDGSGSAEMPSAARPFTAALVAELVSRGVQFAPVTLHTGVASAEAHEPPYPERFSVPEASARLVDAVRAGGGRVIAVGTTAVRAVESAAGADGVVRAREGWTDLVVTPERGVRAVDGLLTGLHEPEASHLLMLRAVAGRAVVERSYEAALNGRYLWHEFGDVHLLLPGNPLTHRIAPATRGENAVSAV

SEQ ID NO: 72714 - protein, 363 aa, Streptomyces lavendulae
  misc_feature (1)..(363): tr|A0A5C8GRD0|A0A5C8GRD0_STRLA S-adenosylmethionine:tRN A ribosyltransferase-isomerase OS=Streptomyces lavendul ae OX=1914 GN=E2C11_29685 PE=3 SV=1
MNTIVRVPEERSARVPAEQRGPGRARDDVRLLVSHGTRVTHHAFRELPGLLRAGDLLVVNTSPTLAAAVDGRIGDAPVVVHFSTRGDDGRWAVEPREPDGRGTTRARAGTRAGTEVRLAGGVRLVLAEPVGGRAPAGGHRERLWWARVEGGAVPGLLREHGRPIRYSYTTRDQPLSAYQTLFSVPSPDGTGSAEMPSAGRPFTERVVAELARRGVGLARVTLHTGVASAQAHEPPYPEWFSVPRASARAINAAAAGAGRVIAVGTTVVRAVESAAGADGIVRAGEGWTDLVVTPGRGVRVVDGLLTGLHEPEASHLLMLRAVAGRAAVDRAYEEALRGLYLWHEFGDVHLLLREETARRALTE

SEQ ID NO: 72715 - protein, 361 aa, Streptomyces lincolnensis
  misc_feature (1)..(361): tr|A0A1B1M6M9|A0A1B1M6M9_STRLN S-adenosylmethionine:tRN A ribosyltransferase-isomerase OS=Streptomyces lincolne nsis OX=1915 GN=SLCG_6345 PE=3 SV=1
MTLALRVPEELSARVPAEQRGPGRGRDAVRLLVSRGTAVSHHAFVELPRLLRAGDLLVVNTSSTLAAAVDGRIGPARVVVHFSTRGDDGRWAVELRDPDGKGTTRARAGGPAGTRVRLPGGVRLTLEEPVAAASERLWWARVAGAGVLGLLREYGRPIRYSYTERDQPLSVYRTVFALPSPDGSGSAEMPSAARPFTARLVAELVSRGVQFAPVTLHTGVASVEAHEPPYPERFSVPEASARLINAVRAGDGRVVAVGTTAVRAVESAAGCDGVVRARAGWTDLVVTPERGVRVVDGLLTGLHEPEASHLLMLEAVAGRAAIDRGYEAALRGLYLWHEFGDVHLLLPEEGPHAEHCGSNSW

SEQ ID NO: 72716 - protein, 358 aa, Streptomyces lividans; identical to SEQ ID NO: 72669
  misc_feature (1)..(358): tr|A0A076M880|A0A076M880_STRLI S-adenosylmethionine:tRN A ribosyltransferase-isomerase OS=Streptomyces lividans TK24 OX=457428 GN=SLIV_28700 PE=3 SV=1

SEQ ID NO: 72717 - protein, 372 aa, Streptomyces lunaelactis
  misc_feature (1)..(372): tr|A0A2R4SZI2|A0A2R4SZI2_9ACTN S-adenosylmethionine:tRN A ribosyltransferase-isomerase OS=Streptomyces lunaelac tis OX=1535768 GN=SLUN_08680 PE=3 SV=1
MSVLETLWVPEELSARVPAEERGSGRDDVRLMVSRGTEVSHHAFRDLPGQLLAGDVLVVNTSVTLPAAVNGRVGGDAVVVHFSTRGDDHRWAVELRRPDGSGSTLPRAGGPVGALVRLPGGEKLVLEEPLTPGADRLWWASVSTDVAGLMRRCGRPIRYRYTVRDQPLSAYQTVFALPSPDGAGSAEMPSAARPFTARLVAELVSRGVQFAPVTLHTGVASAEAYEPPYPERFEVPPTTAWLVNAARAKRAGRGALPWKGGGGRRAGGRIVAVGTTAVRALESAAGPDGVVHAASGWTDLVITPGRGARAVDGLLTGLHEPEASHLLMLEAIAGREALYRGYAEALRRLYLWHEFGDVHLILPDDNPHSLHC

SEQ ID NO: 72718 - protein, 375 aa, Streptomyces lydicus
  misc_feature (1)..(375): tr|A0A1D7VIL4|A0A1D7VIL4_9ACTN S-adenosylmethionine:tRN A ribosyltransferase-isomerase OS=Streptomyces lydicus OX=47763 GN=SL103_10165 PE=3 SV=1
MIADTLRVPAELSARVPAEQRGPGLGRDAVRLLVSRGTAEPAHHAFGELPELLAPGDVLVVNTSSTLPAAVDGRVGDGRGRGEPVVVHFSTRADRWHPAGRAVAGRWAVELRSPDGRGSTRPRAGGPPGAVVRMPGGARLALEAPVDPGGVRLWWARLRGARADELMRRHGRPIRYGYTDRDQPLAAYRTVFAVDSPGGGSAEMPSAARPFTAELVARLVSKGVQFAPISLDTGVASAEAFEPPYPERFVVPAATAWLVNAARARRRAAPRAVGGRIVAVGTTAVRALESAAGADGRIRAAAGWTDLVVTPERGVRAVDGLLTGLHEPTASHLLMLRAVASATADGEALGRAYAAAVRRRYLWHEFGDLHLLLPG

SEQ ID NO: 72719 - protein, 382 aa, Streptomyces lydicus
  misc_feature (1)..(382): tr|A0A3S9Y800|A0A3S9Y800_9ACTN S-adenosylmethionine:tRN A ribosyltransferase-isomerase OS=Streptomyces lydicus OX=47763 GN=DDE74_09305 PE=3 SV=1
MIVDLLQVPDELSARVPAEQRGPGLGRDAVRLLVSRGATEVGHHTFGDLPDLLAAGDVLVVNTSRTLPAAVDGRVGDGRGRGEPVVVHFSTRADRWHPAGRAVAGRWAVELRSPDGHGSTRPRAGGPAGTVVRLPGGARLVLEGPVDPGSVRLWWARVTGARVTELMRRHGRPIRYGYTDRDQPLAAYQTVFAVDAPGGGSAEMPSAARPFTPELVARLVSKGVQFAPVALHTGVASAEAFEPPYPERFVVPPVTAWLVNAARARRRAAARRHPAAGSAPSGRIVAVGTTAVRALESAAGADGRVRAAAGWTDLVVTPERGVRAVDGLLTGLHEPTASHLLMLEAVASVTADGEALRRAYAAAVRGRYLWHEFGDLHLVLPD

SEQ ID NO: 72720 - protein, 388 aa, Streptomyces malaysiense
  misc_feature (1)..(388): tr|A0A1J4Q223|A0A1J4Q223_9ACTN S-adenosylmethionine:tRN A ribosyltransferase-isomerase OS=Streptomyces malaysie nse OX=1428626 GN=VT52_015330 PE=3 SV=1
MTMIARVPEERSARVPAEQRGPGRTRDDVRLLVSRGTRVAHHTFRELPALLRAGDLLVVNTSPTLAAAVDGRTGGAPVVVHFSIRGDDGRWAVELREPDGRGTTRARAGTRAGTEVRLAEGVRLVLEEPVGGRAPGSVGAAVSGRERPTGRVPRSGRPPGYGREPEDGRGERLWWVRVAGGPVPGLLQRHGRPIRYSYTARDQPLSAYQTLFSLPCPDGAGSAEMPSAGRPFTERVVAELVRSGVGFARVTLHTGVASAEAHEPPAPEWFAVPEASARAINAVAAGEGRVIAVGTTAVRAVESAVAADGAVRAGEGSTDLVVTPERGVRVVDGLLTGLHEPEASHLLMLRAVAGRAAVDRAYEEALRGLYLWHEFGDVHLLLRDESPH

SEQ ID NO: 72721 - protein, 353 aa, Streptomyces mangrovisoli
  misc_feature (1)..(353): tr|A0A1J4NLI4|A0A1J4NLI4_9ACTN S-adenosylmethionine:tRN A ribosyltransferase-isomerase OS=Streptomyces mangrovi soli OX=1428628 GN=WN71_035715 PE=3 SV=1
MTLAIRVPAELSARVPAEQRGPGLDRDAVRMLVSHGTAVSHHAFPELPRLLRAGDLLVVNTSPTLAAAVDGWIGRARVVVHFSTRGDDGRWAVELREPDGGGTTRPRAGGPAGTGVRLPGGGRLVLEEPLAPGGARLWWARADGPAVGGLLRRHGRPIRYAYTERDQPLAAYQTVFALPQPGGAGSAEMPSAARPFTARLVAELVSRGVQFAPITLHTGVASAEAHEPPYPERFAVPEASARLVNAARAGGGRVVAVGTTAVRAVESATGADGTVRAARGWTDLVVTPGRGVRAVDGLLTGLHEPEASHLLMLEAVAGRAAVDRAYGEALRGRYLWHEFGDVHLILPGLSGPS

SEQ ID NO: 72722 - protein, 361 aa, Streptomyces mirabilis
  misc_feature (1)..(361): tr|A0A1I2C389|A0A1I2C389_9ACTN S-adenosylmethionine:tRN A ribosyltransferase-isomerase OS=Streptomyces mirabili s OX=68239 GN=SAMN02787118_10213 PE=3 SV=1
MTTTVRVPEERSARVPAEQRGPGRDRDSVRLLVSCGTEVSHHAFAELPRRLRAGDLLIVNTSPTLAAAVDGRIGHARVVVHFSTRGDDGRWAVELRDPDGRGTTRARAGEPAGTEVRLAGDVRLVLEEPLTPYGSRLWWGRVSDPDVLGLLRRHGRPIRYSYTQRDQPLSVYQTVFALPSADGSGSAEMPSAARPFTARLVAELVSRGVQFAPITLHTGVASAEAHEPPYPERYEVPEASARLINAARAGEGRILAVGTTAVRAVESAVDAGGAVRARKGWTDLVVTPERGVRVVDGLLTGLHEPEASHLLMLEAIAGRAAIERSYGEASTGPYLWHEFGDVHLILPEEGPHTEHCSSNYR

SEQ ID NO: 72723 - protein, 86 aa, Streptomyces misionensis
  misc_feature (1)..(86): tr|A0A5C6JGQ4|A0A5C6JGQ4_9ACTN S-adenosylmethionine:tRN A ribosyltransferase-isomerase (Fragment) OS=Streptomyc es misionensis OX=67331 GN=FRZ03_24080 PE=3 SV=1
VVRAAEGWTDLVVTPERGVRVVDGLLTGLHEPEASHLLMLRAVAGRAAVDRAYEEALRGPYLWHEFGDVHLLLPEEGTHRARCDGN

SEQ ID NO: 72724 - protein, 359 aa, Streptomyces misionensis
  misc_feature (1)..(359): tr|A0A1H4TBU1|A0A1H4TBU1_9ACTN S-adenosylmethionine:tRN A ribosyltransferase-isomerase OS=Streptomyces misionen sis OX=67331 GN=SAMN04490357_2244 PE=3 SV=1
MSTVVRVPRERSARVPAEQRGPGLDRDDVRLLVSRGTRVAHHAFGELPSLLRAGDLLVVNTSPTLAAAVDGRIGPGRVVVHFSTRGDDGRWAVELREPDGRGTTRARTGTRAGMEVALAGGARLVVEEPVSARGERLWWARAVGGRVLELLREHGRPIRYSYTERDQPLSAYQTLFALPSPDGAGSAEMPSAARPFTARLVAELVRRGVGFARVTLHTGVASAEAHEPPYPERFSVPESSARLVNAVTAGEGRVIAVGTTAVRALESAAGPDGVVRAAAGWTDLVVTPERGVRVVDGLLTGLHEPEASHLLMLRAIAGRAAVDRAYEEALRGPYLWHEFGDVHLLLPEEDTHSTRCDGN

SEQ ID NO: 72725 - protein, 141 aa, Streptomyces nanshensis
  misc_feature (1)..(141): tr|A0A1E7LU78|A0A1E7LU78_9ACTN S-adenosylmethionine:tRN A ribosyltransferase-isomerase (Fragment) OS=Streptomyc es nanshensis OX=518642 GN=AN221_15530 PE=3 SV=1
MSAVGAVRRDGRSGAPVEEGCGVSSLEALRVPPELSARVPAEQRGSGRDDVRLLVTRGTDVSHHAFRELPGQVRAGDVLVVNTSATLPAAVNGRVGGERVVVHFSTRGEDGRWAVELRAPGASGATVPRPGGPAGAGGRLP

SEQ ID NO: 72726 - protein, 363 aa, Streptomyces natalensis
  misc_feature (1)..(363): tr|A0A0D7CQ06|A0A0D7CQ06_9ACTN S-adenosylmethionine:tRN A ribosyltransferase-isomerase OS=Streptomyces natalens is ATCC 27448 OX=1240678 GN=SNA_11230 PE=3 SV=1
MPVAVMTGASKGPGPAPALDAVRLLVSRGGAAPAHHAFGELPGLLAPGDVLVVNTSRTLPAAVDGRTGDGRGRGEPVVVHFSTRADRWHPGGREVAGCWAVELRTPDGRGGTRPRAGGPEGRVVRLPGGARLTLRAPVDPGGVRLWWGRVTGATAMQVMHHHGRPIRYGPPDQEQPPAAYQSVFAEDSPGAGSAELPGAARPFTAGLVARLVGAGVRFAPLSLHTGVASAEAFEPPYAERFAVPAATARLVNAARARRRAAPRAPGGRVVAVGTTAVRALESAAGPDGRVRAASGWTDLVVTPKRGVRAVDGLLTGLHEPTASPALMLAAVAEPDALERAYAAAVARRYRWRECGDLHLVLPG

SEQ ID NO: 72727 - protein, 373 aa, Streptomyces nigra
  misc_feature (1)..(373): tr|A0A2S1IA99|A0A2S1IA99_9ACTN S-adenosylmethionine:tRN A ribosyltransferase-isomerase OS=Streptomyces nigra OX =1827580 GN=DC008_07215 PE=3 SV=1
MRVAVRVPPELSARVPAEQRGPGLDRDAVRLLVSRGTEVTHHGFRELPGLLRAGDVLVVNTSETLPAAVDGAVGHARVVVHFSTRGDDGRWAVELRDPDGRGTTRARAGGPAGTEVSLPGGLRLLLEEPLDRAGGRLWWARPLVDDGGSGPAPAGPGRVLGVMRAHGRPIRYSYTARDQPLSVYRTVFALPSADGAGSAEMPSAARPFTVRMVTELVSRGVQFAPIELHTGVASAEAHEPPYPERFRVPEVSARLIRAARAAGGRVVAVGTTAVRAVESAVDADGVVRAREGWTDLVITPERGVRVVDGPLTGLHEPEASHLLMLEAVAGWAAVERGYAQALHGRYLWHEFGDVHLVLPPEGPHAERCVSNCA

SEQ ID NO: 72728 - protein, 268 aa, Streptomyces niveus
  misc_feature (1)..(268): tr|V6JM57|V6JM57_STRNV S-adenosylmethionine:tRNA ribosy ltransferase-isomerase (Fragment) OS=Streptomyces niveu s NCIMB 11891 OX=1352941 GN=M877_32875 PE=3 SV=1
TSVRAGGPAGAVVRLPGGGHLVLEEPLDPAGTRLWWARVAGGDVAGLLARYGRPIRYEYTERDQPLSAYQTVFALPSPDGSGSAEMPSAGRPFTARLVAELVSRGVQFAPIRLDTGVASAEAHEPPYPERFEVPATTARLVNAAVAGAGLVDQAGPGGGRVVAVGTTAVRALESAAGPGGGVRAAAGWTDLVVTPGRGVRVVDGLLTGLHEPAASHLLMLEAIAGRPALERAYTEAVQHLYLWHEFGDVHLVLPDETAHSPSCASNFR

SEQ ID NO: 72729 - protein, 397 aa, Streptomyces olivaceus
  misc_feature (1)..(397): tr|A0A1D8SLN6|A0A1D8SLN6_STROV S-adenosylmethionine:tRN A ribosyltransferase-isomerase OS=Streptomyces olivaceu s OX=47716 GN=BC342_06775 PE=3 SV=1
MTGPALRVPEELSARVPAEQRGAGRDRDGVRLLVSHGTEVSHHVFGELPGLLRAGDLLVVNTSPTLAAAVDGRVGHTRVVVHFSTRGDDGRWAVELREPDGRGTTRARAGAPGTTRARASAPGTPRARAEVTEAAEETSRTRARAGVRGRGALPAAAGGGPAGAQVRLPGGARLVLEEPLSARGDRLWWARVSGAEVPAVLREHGRAIRYSYTERDQPLSAYQTVFALPSADGTGSAEMPSAARPFTARLVAELVSRGVQFAPVTLHTGVASAEVHEPPYPERFSVPEASARLINAAGAGDGRVIAVGTTAVRAVESAAGAGGVVRAAAGWTDLVVTPERGVRVVDGLLTGLHEPEASHLLMLEAVAGRAAIDRGYDAAVRGRYLWHEFGDVHLLLP

SEQ ID NO: 72730 - protein, 361 aa, Streptomyces olivochromogenes
  misc_feature (1)..(361): tr|A0A250V877|A0A250V877_STROL S-adenosylmethionine:tRN A ribosyltransferase-isomerase OS=Streptomyces olivochr omogenes OX=1963 GN=SO3561_01859 PE=3 SV=1
MTTTVRVPEERSARVPAEQRGPGRDRDSVRLLVSCGTEVSHHAFVELPRRLRAGDLLIVNTSPTLAAAVDGRIGHARVVVHFSTRGDDGRWAVELRDPDGRGTTRARGGGPAGTEVRLAGDVRLVLEEPLTPHGSRLWWGRVSDPDVLGLLRRHGRPIRYSYTRRDQPLSAYQTVFALPSADGGGSAEMPSAARPFTARLVAELVSRGVQFAPITLHTGVASAEAHEPPYPERYEVPEASARLINAARAGEGRILAVGTTAVRAVESAVDADGVVRARKGWTDLVVTPERGVRVVDGLLTGLHEPEASHLLMLEAIAGGAAIERSYGEALSGPYLWHEFGDVHLILPEEGPHTERCVSNCR

SEQ ID NO: 72731 - protein, 361 aa, Streptomyces ossamyceticus
  misc_feature (1)..(361): tr|A0A3N1M586|A0A3N1M586_9ACTN S-adenosylmethionine:tRN A ribosyltransferase-isomerase OS=Streptomyces ossamyce ticus OX=249581 GN=EDD87_6631 PE=3 SV=1
MTTALKVPGDRSARVPVEQRGPGLDRDSVRLLVSRGTEVSHHAFAELPRLLRAGDLLVVNTSSTLAAAVDGVIGHARVVVHFSTRGDDGRWAVELRDPDGRGTTRARAGGPAGAAVRLAGGAGLVLEEPLSGRGGRLWWARVSSPDVLGLLREHGRPIRYSYTERDQPLSVYQTVFALPSEDGAGSAEMPSAARPFTPRLVAELVSRGVQFAPVTLHAGVASAEAHEPPYPERFAVPEASARLINAVGAGDGRVVAVGTTAVRAVESAAGADGVVRAGAGWTDLVVTPERGVRVVDGLVTGLHEPEASHLLMLEAVAGRAAVERAYGEAVAGDYLWHEFGDVHLILPPQTPHPAHCASNCT

SEQ ID NO: 72732 - protein, 363 aa, Streptomyces pactum
  misc_feature (1)..(363): tr|A0A1S6JEY8|A0A1S6JEY8_9ACTN S-adenosylmethionine:tRN A ribosyltransferase-isomerase OS=Streptomyces pactum O X=68249 GN=B1H29_28500 PE=3 SV=1
MTLALRVLEELSARVPVEQRGPGRDRDGVRLLVSRGTEVSHHGFRELPGLLRAGDLLIVNTSATLAAAVDGRVGHARVVVHFSTRGDDGRWAVELRDPDGRGTTRARAEGEREGLPSKGGGRGAGGPRGTEVRLPGGARLVLEEPLSPRGERLWWARMSGAEVPVVLREHGRPIRYSYTERDQPLSAYQTVFALPSADGTGSAEMPSAARPFTARLVAELVSRGVQFAPVTLHTGVASAQAHEPPYPERFRVPEASARLINAARAGDGRVLAVGTTAVRAVESAAGADGTVRARAGWTDLVVTPERGVRVVDGLLTGLHEPEASHLLMLEAVAGRAAIDRGYEAAVRGRYLWHEFGDVHLLLP

SEQ ID NO: 72733 - protein, 347 aa, Streptomyces parvulus
  misc_feature (1)..(347): tr|A0A191UVM9|A0A191UVM9_9ACTN S-adenosylmethionine:tRN A ribosyltransferase-isomerase OS=Streptomyces parvulus OX=146923 GN=Spa2297_07165 PE=3 SV=1
MTPAPRVPEGLSARVPAEQREPGLDRDGVRLLVSRGTEVSHHAFGELPGLLRAGDLLVVNTSPTLAAAVDGSVGHTRVVVHFSTRGDDARWAVEVREPDGRGTTRARACVDKGTVVRLPGGGRLVAEEPLSPRGDRLWWARVSGAEVTALLREHGRPIRYAYTDRDQPLCAYQTVFALPVPDGTGSAEMPSAARPFTARLVTELVSRGVQFAPVTLHTGVASAESHEPPYPERFSVPGESARLINAARAAGRRVVAVGTTAVRAVESAAGADGVVRPRAGWTDLVVTPERGVRVVDGLLTGLHEPEASHLLMLEAVAGRAAIDRGYDAAVRGRYLWHEFGDVHLLLR

SEQ ID NO: 72734 - protein, 348 aa, Streptomyces parvulus
  misc_feature (1)..(348): tr|A0A369UUU8|A0A369UUU8_9ACTN S-adenosylmethionine:tRN A ribosyltransferase-isomerase OS=Streptomyces parvulus OX=146923 GN=DVZ84_34830 PE=3 SV=1
MMTLAVRVPEELSARVPAEQRGPGLDRDGVRLLVSRGTEVSHHVFGELPGLLRAGDLLVVNTSPTLAAAVDGAVGHTRVVVHFSTRGDDGRWAVEVREPDGRGTTRARACVDKGTVVRLPGGGRLVAEEPLSPRGDRLWWARVSGAEVTAVLREHGRPIRYAYTERDQPLSVYQTVFALPAPDGSGSAEMPSAARPFTARLVAELVSRGVQFAPVTLHTGVASAESHEPPYPERFSVPGESARLINAARAAGRRVVAVGTTAVRAVESAAGADRVVRAREGWTDLVVTPERGVRVVDGLLTGLHEPEASHLLMLEAVAGRAAIDRGYDAAVRGRYLWHEFGDVHLLLR

SEQ ID NO: 72735 - protein, 104 aa, Streptomyces parvus
  misc_feature (1)..(104): tr|A0A5D4JIT6|A0A5D4JIT6_9ACTN S-adenosylmethionine:tRN A ribosyltransferase-isomerase (Fragment) OS=Streptomyc es parvus OX=66428 GN=FY004_08340 PE=3 SV=1
GTTAVRALESAVGADGVVRPAEGWTDLVVTPRRGVRVVDGLLTGLHEPQASHLLMLEAVAGREALRHGYEAALQERYLWHEFGDVHLLLPDEERNAPNCSSNEW

SEQ ID NO: 72736 - protein, 352 aa, Streptomyces paucisporeus
  misc_feature (1)..(352): tr|A0A1M7DAT9|A0A1M7DAT9_9ACTN S-adenosylmethionine:tRN A ribosyltransferase-isomerase OS=Streptomyces paucispo reus OX=310782 GN=SAMN05216499_10616 PE=3 SV=1
MTDTSRTADILCDFRVPPESLAAAPPARRDGVRLLVGRQGAGEVAHHAFRELPGLLRAGDVLVVNTSRTLPAAVDGSLGGDPVVVHFSTRRDDGRWVVEIRDPDGRGSTVRRPGGPAGAVVRLAGGERLALDEPLDPCGDRLWVASPSMADPLRHLHRHGRPIRYAYTERDQPLAAHQTVFATASPDGAGSAEMPSAGRPFTAPLVTELVSRGVQIAPIVLHTGVASAEAYEPPYAEPYTVPAATAWQVNAARAAGGRVIAVGTTAVRALESAADPRGVVRPARGWTELVITPERGVRAVDGLLTGLHEPEASHLLMLRAVSGDGLLERVYAEALQHRYLWHEFGDVNLLLP

SEQ ID NO: 72737 - protein, 367 aa, Streptomyces peucetius
  misc_feature (1)..(367): tr|A0A2D3U630|A0A2D3U630_STRC0 S-adenosylmethionine:tRN A ribosyltransferase-isomerase OS=Streptomyces peucetiu s subsp. caesius ATCC 27952 OX=316280 GN=CGZ69_07710 PE =3 SV=1
MRPGPGAVPALETLRVPDELSARVPAEQRGAGRDDVRLLVSRGSEVSHHRFGELPGRLRAGDVLVVNTSATLAAAVDGRLGGQAVVVHFSTRGDGGRWAVELRRPDGSGSTAPLAGGPAGAVVRLPGGGELVLEEPLAPGADRLWWASVSGDVARLLRRYGRPIRYGYTARNQPLSAYQTVFALPSPDGSGSAEMPSAARPFTARMVAELVSRGVQFAPLVLHTGVASAEAHEPPYPERFGVPAATAWLVNAARAAGGRIVAVGTTAVRALESAADPGGLVRPASGWTDLVVTPRRGVRAVDGLLTGLHEPEASHLLMLEAIAGRAALTCAYSEALGHRYLWHEFGDVHLVLPEEKPHSLHCSRNTW

SEQ ID NO: 72738 - protein, 371 aa, Streptomyces phaeoluteigriseus
  misc_feature (1)..(371): tr|A0A1V6MQ19|A0A1V6MQ19_9ACTN S-adenosylmethionine:tRN A ribosyltransferase-isomerase OS=Streptomyces phaeolut eigriseus OX=114686 GN=BM536_021110 PE=3 SV=1
MTLALRVPAELSARVPAEQRGQGRDRDSVRLLVSRGSEPTHHGFRELPSLLRAGDLLVVNTSPTLAAAVDGRIGHARVVVHFSTLGDDGRWAVELREPDGRGTTRPRAAEPAGTEVRLPAGMRLVLEEGLGGPGGRLWWARVTAGAVPGLLREHGRAIRYSYTERDQPLSAYQTVFALPSADGSGSAEMPSAARPFTARLVAELVSRGVQFAPVTLHTGVASAEAHEPPYPERFAVPEASARLINAARAGAGRVIAVGTTAVRAVESAGADGVVRARAGWTDLVVTPERGVRVVDGLLTGLHEPEASHLLMLEAVAGRAAIDRGYAEALRGLYLWHEFGDVHLLLPEEPTHSPLTQCIASATVGEKTSAPL

SEQ ID NO: 72739 - protein, 361 aa, Streptomyces populi
  misc_feature (1)..(361): tr|A0A2I0SCE5|A0A2I0SCE5_9ACTN S-adenosylmethionine:tRN A ribosyltransferase-isomerase OS=Streptomyces populi O X=2058924 GN=CW362_39725 PE=3 SV=1
MGATRAGRGRKRGGVPEELSARVPAEQRGAGRDRDSVRLLVSRGTEVSHHAFVELPRLLRAGDLLIVNTSATLAAAVDGRIGHARVVVHFSTRGDDGRWAVELRDPDGRGTTRARAGGPAGTVVRLPGDVRLVLEEPLSERGARLWWGRVPDTDVPALLRRYGRPIRYSYTERDQPLSVYQTVFALPSDDGSGSAEMPSAARPFTSRLVAELVSRGVQFAPVTLHTGVASAEAHEPPYPERFEVPAVSARLINAARAGGGRIVAVGTTAVRAVESAVSEDGLVRAAKGWTGLVVTPERGVRAVDGLLTGLHEPEASHLLMLEAIAGDAAVDRGYAEALRRRYLWHEFGDVHLILPPEKPSL

SEQ ID NO: 72740 - protein, 415 aa, Streptomyces pristinaespiralis
  misc_feature (1)..(415): tr|B5HGW1|B5HGW1_STRE2 S-adenosylmethionine:tRNA ribosy ltransferase-isomerase OS=Streptomyces pristinaespirali s (strain ATCC 25486 / DSM 40338 / CBS 914.69 / JCM 450 7 / NBRC 13074 / NRRL 2958 / 5647) OX=457429 GN=
MERRPGRHADGPLRGSGAGGRRSPPLPRIRGSRVPAPARGAARQWPVRGPVAAGDPMMTGRRAEAVLESLRVPEELSARVPAEERGSGRDDVRLLVSRGTEVSHHGFRDLPGRLRAGDVLVVNTSATLAAAVDGRLGGDAVVVHFSTRGDLGRWAVELRRPDGAGSTLPRPGGPAGAVVRVPGGGELVLEAPLVAGGERLWWARASVDVPTLLRRYGRPIRYRYTQRDQPLSAYQTVFALPSPDGSGSAEMPSAARPFTAGVVADLVSRGVQFAPLVLHTGVASAEAHEPPYPERFEVPATTAWLVNAARAAGGRIVAVGTTAVRALESAADGEGVVRPVSGWTDLVVTPRRGVRAVDGLLTGLHEPEASHLLMLAAVAGRDALTCAYEEALRHRYLWHEFGDVHLILPGEGLTE

SEQ ID NO: 72741 - protein, 359 aa, Streptomyces pristinaespiralis
  misc_feature (1)..(359): tr|A0A0M4DGD6|A0A0M4DGD6_STRPR S-adenosylmethionine:tRN A ribosyltransferase-isomerase OS=Streptomyces pristina espiralis OX=38300 GN=SPRI_5720 PE=3 SV=1
MMTGRRAEAVLESLRVPEELSARVPAEERGSGRDDVRLLVSRGTEVSHHGFRDLPGRLRAGDVLVVNTSATLAAAVDGRLGGDAVVVHFSTRGDLGRWAVELRRPDGAGSTLPRPGGPAGAVVRVPGGGELVLEAPLVAGGERLWWARASVDVPTLLRRYGRPIRYRYTQRDQPLSAYQTVFALPSPDGSGSAEMPSAARPFTAGVVADLVSRGVQFAPLVLHTGVASAEAHEPPYPERFEVPATTAWLVNAARAAGGRIVAVGTTAVRALESAADGEGVVRPVSGWTDLVVTPRRGVRAVDGLLTGLHEPEASHLLMLAAVAGRDALTCAYEEALRHRYLWHEFGDVHLILPGEGLTE

SEQ ID NO: 72742 - protein, 370 aa, Streptomyces pseudovenezuelae
  misc_feature (1)..(370): tr|A0A101NAQ0|A0A101NAQ0_9ACTN S-adenosylmethionine:tRN A ribosyltransferase-isomerase OS=Streptomyces pseudove nezuelae OX=67350 GN=AQI94_07260 PE=3 SV=1
MRLATGVPPLEPVRKRASVPEELSARVPAEQRGAGLDRDAVRLLVSRGTEVSHHCFGELPRLLRSGDLLVVNTSPTLAAAVDGRIGHARVVVHFSTRGDDGRWAVELRDPDGRGTTRARAGGPAGTEVRLPGGGRLVLEEAVSGRLWWARVCEADVVGLLREHGRPIRYSYTERDQPLSVYQTVFALPSPDGAGSAEMPSAARPFTARLVAELVSRGVQFAPVTLHTGVASAEAHEPPYPERFSVPEASARLINAVRAGDGRVIAVGTTAVRAVESAAGADGAVRACAGWTDLVVTPERGVRVVDGLLTGLHEPEASHLLMLEAVAGRAAVDRGYEEALRRNYLWHEFGDVHLLLPREDPHTEHCVRNCW

SEQ ID NO: 72743 - protein, 360 aa, Streptomyces puniciscabiei
  misc_feature (1)..(360): tr|A0A542UM39|A0A542UM39_9ACTN S-adenosylmethionine:tRN A ribosyltransferase-isomerase OS=Streptomyces punicisc abiei OX=164348 GN=FB563_5130 PE=3 SV=1
MTVLVRVPPELSARVPVEQRGPGLDRDAVRLLVSRGTEVTHHGFRELPRLLRAGDLLVVNTSPTLAAAVDGRTGHARVVVHFSTRGDDGRWAVELREPDGRGTTRARTGTRASTEVVLPGAGRLVLQEPLSPRGERLRWARAEGDVLAMLRAHGRPIRYSYTESDQPLSVYQTVFALPSPDGAGSAEMPSAARPFTASLVAELVSRGVQFAPVTLHTGVASAEAHEPPYPERFSVPETSARLVNAARAGDGRVIAVGTTAVRAVESAAGPDGVVRAAEGWTDLVVTPGRGVRVVEGLLTGLHEPEASHLLMLRAVAGPAAVDRAYEEALRGLYLWHEFGDVHLILPEEGTHAERCDGNSW

SEQ ID NO: 72744 - protein, 360 aa, Streptomyces puniciscabiei
  misc_feature (1)..(360): tr|A0A1D7YHR1|A0A1D7YHR1_9ACTN S-adenosylmethionine:tRN A ribosyltransferase-isomerase OS=Streptomyces punicisc abiei OX=164348 GN=BFF78_32380 PE=3 SV=1
MTVTVRVPEELSARVPAEQRGPGLDRDAVRLLVSRGTEVTHHVFPELPRLLRAGDLLVVNTSPTLAAAVDGRIGHARVVVHVSTRGDDGRWAVELREPDGRGTTRARAGTHAGTEVVLPGAGRLVLEEPLSPRGERLWWARPAGDVLAVLRAYGRPIRYSYTERDQPLSAYQTVFALPSPDGSGSAEMPSAARPFTARLVAELVSRGVQFAPVTLHTGVASAQAHEPPYPERFAVPEASARLINAVRAGDGRVLAVGTTAVRAVESAAGPDGVVRAASGWTDLVVTPERGVRVVDGLLTGLHEPEASHLLMLEAVAGRAGVDRAYEEALRGLYLWHEFGDIHLILPDEGPHTERCDGNSW

SEQ ID NO: 72745 - protein, 347 aa, Streptomyces qaidamensis
  misc_feature (1)..(347): tr|A0A143BXQ7|A0A143BXQ7_9ACTN S-adenosylmethionine:tRN A ribosyltransferase-isomerase OS=Streptomyces qaidamen sis OX=1783515 GN=A4E84_09100 PE=3 SV=1
MTSAVRVPAELSARVPVEQRGPGLERDAVRMLVSRGAEVAHHTFTELPLLLRAGDLLVVNTSATLAAAVDGWSGHARVVVHFSTRGDDGRWAVELREPDGRGTTRARTGGPPGSEVCLPGGGRLVLEEPLSGRSERLWWARVSGPEVPGLLREYGRPIRYAYTERDQPLSVYQTVFALPSADGAGSAEMPSAARPFTARLVTELVSRGVQFAPVTLHTGVASAEAHEPPCAERFVVPGASAWLINAAKAGGGRVVAVGTTAVRAVESAVGADGAVRARAGWTDLVVTPERGVRVVDGLLTGLHEPEASHLLMLEAVAGRVAVGRAYTAALQHRYQWHEFGDVHLVLP

SEQ ID NO: 72746 - protein, 364 aa, Streptomyces regalis
  misc_feature (1)..(364): tr|A0A0X3VAE4|A0A0X3VAE4_9ACTN S-adenosylmethionine:tRN A ribosyltransferase-isomerase OS=Streptomyces regalis OX=68262 GN=ADL12_11495 PE=3 SV=1
MTLTVRVPEELSARIPAEQRGPGLDRDAVRLLVSRGTEVSHHAFGELPRLLRAGDLLVVNTSETLAAAVDGRIGHAHVVVHFSTRGDDGRWAVELRDPDERGTTRARAGGPAGTGVRLPGGVRMVLEEPLGAGSERLWWARVGGPRGSGVLGLMREHGRPIRYSYTERDQPLSVYQTVFALPSADGTGSAEMPSAARPFTLRMVTELVSRGVQFAPITLHTGVASAEAHEPPYPERFAVPEASARLINAAKAGGRRIVAVGTTAVRAVESAAGADGVVRAREGWTDLVVTPERGVRVVDGLLTGLHEPEASHLLMLEAVAGRAAIDRSYEAALRGLYLWHEFGDVHLILPAEGPHAEHCASNCR

SEQ ID NO: 72747 - protein, 387 aa, Streptomyces resistomycificus
  misc_feature (1)..(387): tr|A0A0L8LXA5|A0A0L8LXA5_9ACTN S-adenosylmethionine:tRN A ribosyltransferase-isomerase OS=Streptomyces resistom ycificus OX=67356 GN=ADK37_04285 PE=3 SV=1
MTLAVRVPQELSARVPAEQRGPGLDRDAVRLLVSRGTEVSHHAFAELPGLLRAGDLLVVNTSPTLAAAVDGRIGHARVVVHFSTLGDDGRWAVELREPDGKGTTRARAGGPVGTEVRVPGGGRLVMEEPMGADAGRLGLEEPVGANGGRLVMEEPVGADGGRLWWARVLGTAVPGLLREHGRPIRYSYTERDQPLSVYQTVFALPSPDGSGSAEMPSAARPFTARLVAELVSRGVQFAPVTLHTGVASAEAHEPPYPERFAVPEASARLINAARAGDGRVVAVGTTAVRAVESAAGPDGVVRARAGWTDLVITPQRGVRVVDGLLTGLHEPEASHLLMLEAVGGRAAMDRAYGEALRGLYLWHEFGDVHLVLPEEMPHTEHCVSNSW

SEQ ID NO: 72748 - protein, 372 aa, Streptomyces rimosus
  misc_feature (1)..(372): tr|A0A401WBV4|A0A401WBV4_STRRY S-adenosylmethionine:tRN A ribosyltransferase-isomerase OS=Streptomyces rimosus subsp. paromomycinus OX=92743 GN=GKJPGBOP_06559 PE=3 SV =1
MTAEVLRVPAELSAREPAEQRAPGRGRDAVRLLVSRGTAEPAHHAFRELPELLSAGDVLVVNTSRTLPAAVDGRIGDGRGRGEPVVVHFSTRADGRYPRPEAAAGDWAVELRTPDGRGSTRQRAGGPAGTVVRLPGGARLTLRAPVDPGSVRLWWARVSGAPVADVLHRYGRPIRYGYTDRDQPLSAYQTVFAVGSPDGGGSAEMPSAARPFTASLVARLVSRGVQIAPVTLHTGVASAEAYEPPYPERFAVPPSTAWQINAARAGGGRTVAVGTTAVRALESAADGAGRIRAASGWTDLVVTPERGVRAVDGLLTGLHEPEASHLLMLAAVGRAAAGGAAFGDALCRAYAEAVRQRYLWHEFGDLHLVLPV

SEQ ID NO: 72749 - protein, 371 aa, Streptomyces rimosus; identical to SEQ ID NO: 67659
  misc_feature (1)..(371): tr|L8EEY1|L8EEY1_STRR1 S-adenosylmethionine:tRNA ribosy ltransferase-isomerase OS=Streptomyces rimosus subsp. r imosus (strain ATCC 10970 / DSM 40260 / JCM 4667 / NRRL 2234) OX=1265868 GN=SRIM_37787 PE=3 SV=1

SEQ ID NO: 72750 - protein, 368 aa, Streptomyces rochei
  misc_feature (1)..(368): tr|A0A510DBK2|A0A510DBK2_STRRO S-adenosylmethionine:tRN A ribosyltransferase-isomerase OS=Streptomyces rochei O X=1928 GN=SRO_5664 PE=3 SV=1
MTTIVRVPEELSARVPAEQRGPGRARDDVRLLVSRGTRVTHHAFRELPGLLRAGDLLVVNTSPTLAAAVDGRIGDAPVVVHFSTRGDDGRWAVELREPDGRGTTRARPGTRAGTEVRLPEGVRLVVEEPVGGPEPVGGHPLGGHPVGRYRDRLWWARVEGGAVLGLLRGHGRPIRYSYTTRDQPLSAYQTLFSLPSPDGAGSAEMPSAGRPFTERVVAELVRGGVGFARVTLHTGVASAEAHEPPYPEWFTVPEASARAIGAAAAGGGRVIAVGTTAVRAVESAVGADGAVRACQGWTDLVVTPERGVRVVDGLLTGLHEPEASHLLMLRAVAGRAAVDRAYEEALRGLYLWHEFGDVHLLLGEETPR

SEQ ID NO: 72751 - protein, 383 aa, Streptomyces roseochromogenus
  misc_feature (1)..(383): tr|V6JSV0|V6JSV0_STRRC S-adenosylmethionine:tRNA ribosy ltransferase-isomerase OS=Streptomyces roseochromogenus subsp. oscitans DS 12.976 OX=1352936 GN=M878_35355 PE= 3 SV=1
MSTVVRLPGGLSARVPAEQRGPGLDRDAVRLLVSRGEEVTHHAFPELPLLLRAGDLLVVNTSPTLAAAVDGRIGHARAVVHFSTLGDDGRWAVELREPDGRGTTRARTGTRAGTEVVLPGAGRLVLEEPLSPRGERLWWARAAGDALGVLRAYGRPIRYSYTERDQPLSAYQTVFALPSPDGAGSAEMPSAARPFTARLVAELVSRGVRFAPVTLHTGVASAEAHEPPYPERFAVPEASARLINAVKGNQGSQGNQKRREALPWKGGGGKRAGGRVVAVGTTAVRAVESAAGPDGVVRAAEGWTDLVVTPERGVRVVDGLLTGLHEPEASHLLMLEAVAGRAGVGRAYDEALRGLYLWHEFGDVHLILPAESPHTERCDGNSW

SEQ ID NO: 72752 - protein, 363 aa, Streptomyces rubidus
  misc_feature (1)..(363): tr|A0A1H8S8X3|A0A1H8S8X3_9ACTN S-adenosylmethionine:tRN A ribosyltransferase-isomerase OS=Streptomyces rubidus OX=310780 GN=SAMN05216267_104015 PE=3 SV=1
MTAVITCETCDAEADRVDAAGLAGLRVPSELLARVPAPRRDAVRLLVGRREGGAVTHHGFRELPRLLRAGDVLVVNTSRTLPAAVDGRLPGEDVVVHFSTRRDDGRWVVEVRSPDGRGSTERRAGGPAGGVVRLRGGAELRLVAALDASGDRLWVAEPSVPAVERYLHRHGRPIRYSYTERDQPLSAYQTVFATGPAGGAGSAEMPSAGRPFTAPLVTELVSRGVQVAPIVLHTGVASAEAHEPPYAEPFAVPASTAWQVNAARAAGGRVVAVGTTAVRALESAADARGVVRAARGWTELVVTPERGVGVVDGLLTGLHEPEASHLLMLRAISGDALLERVYAEALRARYLWHEFGDVNLLLP

SEQ ID NO: 72753 - protein, 384 aa, Streptomyces scabiei
  misc_feature (1)..(384): tr|C9YZW6|C9YZW6_STRSW S-adenosylmethionine:tRNA ribosy ltransferase-isomerase OS=Streptomyces scabiei (strain 87.22) OX=680198 GN=SCAB_71451 PE=3 SV=1
MTTAAVRVPEGLHARVPAEQRGPGLDRDGVRLMVSRGTEVSHHVFAELPRLLGAGDLLVVNTSPTLAAAVDGTVGDARVVVHFSTRGDDGRWAVELRDPDGHGTTRVRAGGPAGTRVRLPCEVRLVLEEPLSARGERLWWARVSLPSPEFPASPASSASPGPSEAVAEVLREHGRPIRYSYTERDQPLSVYQTVFALPSQDGAGSAEMPSAGRPFTARMVAELVSRGVQFAPVTLHTGVASAEAHEPPYPERFSVPEASARLVNAARAGGRRVIAVGTTAVRAVESAAGPDGVVRARDGWTDLVVTPERGVRVVDGLLTGLHEPEASHLLMLEAVAGRAAIDRSYEAAVEGRYLWHEFGDVHLVLPGIPPAHGPHGVHCDSNCP

SEQ ID NO: 72754 - protein, 385 aa, Streptomyces scabiei
  misc_feature (1)..(385): tr|A0A100JL67|A0A100JL67_STRSC S-adenosylmethionine:tRN A ribosyltransferase-isomerase OS=Streptomyces scabiei OX=1930 GN=queA PE=3 SV=1
MTTAAVRVPEGLHARVPAEQRGPGLDRDGVRLMVSRGTEVSHHAFAALPRLLGAGDLLVVNTSPTLAAAVDGTVGDARVVVHFSTRGDDGRWAVELRDPDGHGTTRVRVGGPAGTRVRLPCEVRLVLEEPLSARGERLWWARVSLPSSEFPASPASSASPGPSAASEAVAEVLREHGRPIRYSYTERDQPLSVYQTVFALPSQDGAGSAEMPSAGRPFTARMVAELVSRGVQFAPVTLHTGVASAEAHEPPYPERFSVPEASARLVNAARAGGRRVIAVGTTAVRAVESAAGPDGLVRARDGWTDLVVTPERGVRVVDGLLTGLHEPEASHLLMLEAVAGRAAIDRAYEAAVEGRYLWHEFGDVHLVLPGIPPAHSPDGAHCGSN

SEQ ID NO: 72755 - protein, 338 aa, Streptomyces scabrisporus
  misc_feature (1)..(338): tr|A0A1T3P1L0|A0A1T3P1L0_9ACTN S-adenosylmethionine:tRN A ribosyltransferase-isomerase OS=Streptomyces scabrisp orus OX=159449 GN=B4N89_19505 PE=3 SV=1
MTTATVHEATEPAEARGLARDGVRLLVHAGERVEHTVFRDLGRHLGAGDLLVVNTSATLPAAVDGYRADGSPVTAHFATRLDEETWILELRHTDGTPGPVAGVRRFEAVRFPGTGCGMALLLDPYPHEHTPQRLWKARITVPHARVETFLADRGRPISYAHVRERWPLTAYQTIFARDEGSAEMPSAGRPFTHELVVDLITRGVTVAPIVLHTGVSSQEVGEPPLREWFAVPESTAHQVRRARRVIAVGTTVTRALESAVGPDGEIAAASGWTDLMLGPDRPARVVDGVISGLHAPEATHLLLLEAVVGRAAVRRAYDAALAEEYLWHEFGDSSLLLP

SEQ ID NO: 72756 - protein, 388 aa, Streptomyces scopuliridis
  misc_feature (1)..(388): tr|A0A2T7T8F0|A0A2T7T8F0_9ACTN S-adenosylmethionine:tRN A ribosyltransferase-isomerase OS=Streptomyces scopulir idis RB72 OX=1440053 GN=Y717_04295 PE=3 SV=1
MSVLPALRVPEELSARVPAEQRGSGRDDVRLLVSRGTSVTHHAFRELPGQLRAGDVLVVNTSATLPAAVSGRLGPDPGGEPVVVHFSTRGDDGRWAVELRTPRRDSGAGTTLPRAGGPAGAVVRLPGGEHLVLDAPLAPGGSRLWWTRVSCADVPALLGRHGRPIRYGYTDRDQPLSAYQTLFARPSPDGAGSAEMPSAGRPFTARLVAELKSRGVRFAPITLHTGVASAEAHEPPYPERFEVPRSTAQLVNAVAADRGRIIAVGTTAVRALESAAGPDGVVRAASGWTDLVITPRRGVRVVDGLLTGLHEPEASHLLMLAAIAGRAALARGYEEALDGLYLWHEFGDVHLPPGGDRSRFALLKQHPVRLPCARCEPGHRTYITYELH

SEQ ID NO: 72757 - protein, 97 aa, Streptomyces showdoensis
  misc_feature (1)..(97): tr|A0A2P2GPK7|A0A2P2GPK7_9ACTN S-adenosylmethionine:tRN A ribosyltransferase-isomerase OS=Streptomyces showdoen sis OX=68268 GN=VO63_13470 PE=3 SV=1
MLATGAGASGRKPAVVRAAAGWTGLVVTPERGVRVVDGLLTGLHEPEASHLLMLEAVAGRPALRRAYAEAVRERYLWHEFGDLHLILPEENPHRTHC

SEQ ID NO: 72758 - protein, 375 aa, Streptomyces sioyaensis
  misc_feature (1)..(375): tr|A0A4V1NNZ9|A0A4V1NNZ9_9ACTN S-adenosylmethionine:tRN A ribosyltransferase-isomerase OS=Streptomyces sioyaens is OX=67364 GN=EST54_27490 PE=3 SV=1
MTAALRVPQELSAAVPAEQRGPGLDRDAVRLLVSRGTAEPGHHDFGALPELLAAGDVLVVNTSRTLPAAVDGRVGDGRGRGEPVVVHFSTRADRWHPAGRAVAGCWAVELRSPDGRGSTRPRAGGPAGTVVRLPGGARLVLEAPLDPGSARLWWARVTRGGVSELMRCHGRPIRYGYTRRDQPLAAYQTVFALDGPGGSAEMPSAARPFTAELVARLVSKGVQFAPVSLHTGVASAEAFEPPYPERFVVPPATAWLVNAVRARQQAAGRRRSARGGAGGRIVAVGTTAVRALESAAGADGKVRAAAGWTDLVVTPQRGVRAVDGLLTGLHEPTASHLLMLEAVADAEVLRRAYAAAVERRYLWHEFGDLHLVLPD

SEQ ID NO: 72759 - protein, 414 aa, Streptomyces sp.
  misc_feature (1)..(414): tr|A0A2T7L7B1|A0A2T7L7B1_9ACTN S-adenosylmethionine:tRN A ribosyltransferase-isomerase OS=Streptomyces sp. CS01 4 OX=2162707 GN=DBP12_28185 PE=3 SV=1
MTARGRCGSGDVALAVPGAGGEPSHSPGPGGAGMAAGADSPALDARPGRAGEATALEALRVPDALSARVPAEQRGAGRDDVRLLVSRGRSVAHHAFRELPEQLRGGDVLVVNTSMTLPAAVNGRVGGERVVVHFSTRGADGRWAVELRAPAGAGVTGPRPGGPAGAVVRLPGGRALVLEDPLGPSAGARLWWARVPEAVPELLRRYGRPIRYGYTNRDQPLSAYRTVFAVPSPDGSGSAEMPSAARPFTAPLVAELVRRGVLFAPLSLHTGVASAESHEPPYPERFAVPAATAWLVNAVRAAGSGRVVAVGTTAVRALESAVGADGVVRPAEGWTDLVVTPRRGVRVVDGLLTGLHEPQASHLLMLEAVAGREALRHGYEAALQERYLWHEFGDVHLILPDEERNAPNCSSNEW

SEQ ID NO: 72760 - protein, 247 aa, Streptomyces sp.
  misc_feature (1)..(247): tr|A0A1C4SVR4|A0A1C4SVR4_9ACTN S-adenosylmethionine:tRN A ribosyltransferase-isomerase OS=Streptomyces sp. Term itarium-T10T-6 OX=1839775 GN=GA0115253_106223 PE=3 SV=1
MRLPGGRALVLEDPLGPSAGARLWWARVPEAVPELLRRYGRPIRYGYTDRDQPLSAYRTVFAVPSPDGSGSAEMPSAARPFTVPLVAELVRRGVLFAPLSLHTGVASAEAHEPPYPERFAVPAATAWLVNAVRAAGSRRVVAVGTTAVRALESAVGPDGVVRPAEGWTDLVVTPRRGVRVVDGLLTGLHEPQASHLLMLEAVAGREALRHGYEAALQERYLWHEFGDVHLILPDEERNAPDCFSNEW

SEQ ID NO: 72761 - protein, 351 aa, Streptomyces spectabilis
  misc_feature (1)..(351): tr|A0A516R532|A0A516R532_STRST S-adenosylmethionine:tRN A ribosyltransferase-isomerase OS=Streptomyces spectabi lis OX=68270 GN=FH965_09410 PE=3 SV=1
MTVVVRVPEGLDAALPVERRGRGLRRDSVRLLVSRGSAVSHHAFTELPGLLRAGDVLVVNTSPTLPAAIDGRMGHARVVVHFSTLGLDGRWAVELRDPDGEGTTRARAGGPEGAVVELPGEARLVYEEPLSADSGRLWWARVPVDVPRLLRRHGRPIRYSYTERDQPLSVYQTVFAVPSADGTGSAEMPSAARPFTPRLVARLVSRGVQFAPVRLHTGVASPEAHEPPYPERFEVPEPSARLINAARAGGGRVVAVGTTAVRAVESATGPDGVVRAAAGRTGLVVTPERGVRVVDGLLTGLHEPEASHLLMLEAVAGRAAVERGYAEAVRRLYLWHEFGDVHLLLREEFAH

SEQ ID NO: 72762 - protein, 373 aa, Streptomyces spinoverrucosus
  misc_feature (1)..(373): tr|A0A4Y3VH96|A0A4Y3VH96_9ACTN S-adenosylmethionine:tRN A ribosyltransferase-isomerase OS=Streptomyces spinover rucosus OX=284043 GN=SSP24_20410 PE=3 SV=1
MTSALGVTPVEHVREWGKVPQELSARVPAEQRGPGLDRDAVRLLVSRGTEVSHHAFAELPRLLRAGDLLIVNTSPTLAAAVDGWIGHARVVVHFSTRGDDGRWAVELRDPDEKGTTRARAGGPAGTEVRLPGDVRLVLEEPLSARGERLWWARATGAEVRELLGAYGRPIRYSYTERDQPLSVYQTVFALPPADGAGSAEMPSAARPFTHRMVAELVSRGVQFAPITLHTGVASAEAHEPPYPERFAVPEASARVINAVRAGDGRVIAVGTTAVRAVESAAGSDGVVRAVEGWTDLVVTPERGVRVVDGLLTGLHEPEASHLLMLEAVAGAAAINRGYEEALRHRYLWHEFGDVHLLLPEEAGHTEHCSSNCW

SEQ ID NO: 72763 - protein, 630 aa, Streptomyces spongiicola
  misc_feature (1)..(630): tr|A0A388SVB5|A0A388SVB5_9ACTN S-adenosylmethionine:tRN A ribosyltransferase-isomerase OS=Streptomyces spongiic ola OX=1690221 GN=SSP531S_17100 PE=3 SV=1
MRSGAQSLESGMRTAVIAGSLDAPTLELARRLHGRGWSLVLDTADAGAVDGVGASARTPVTALAGDVRDESHQTALVEAARGLGGLDLLVSNAGVRPPLALCDQPPDAFRRLLDVTVLAPLGLLRTALPLLRESRGVVAAVSPHTGAEPGGPHGGYDAVKAALDRLAAEIAIEEPLVRVWTVDSDDHTQVPALLELLEHGAPSGHYDTAEILRGAGAGTSLPTGPTGPTDGTNSTDPAGPTDGTNGTNGTDPTDGTSASAPDTQRGGRRPPARGSTGLSRGNFSLPANLKANVPPEEHGVDRGDVRLLVGRKASGEVTHHHFSELPRLLRPLDVLVVNTSATAPPKVDGRAGSEPVTLRFSTRLDDGRWVVELSSAEGGTPAGTCVPGTVVAVDDHARVRVVLDHRLEPGSNRLWLARFLASGPATEYLRRRGRPFHEGAGDCHPPSAQQTVFAEAAEVASGTPTHQSAELPSAARPFTDQLVTALVTRGVVIAPIELHTRPTPGAPSRPPGPELFAVPPATAHLINHVRASGGRIIAVGTTAVRALESAADPRGGVRAARGWTDLVIGPRRAIRTVSGLLTGLHQAEASHLRLLEVLAGAELLTACYAQARAERYLWGEFGDVNLLLPD

SEQ ID NO: 72764 - protein, 630 aa, Streptomyces spongiicola
  misc_feature (1)..(630): tr|A0A2S1Z430|A0A2S1Z430_9ACTN S-adenosylmethionine:tRN A ribosyltransferase-isomerase OS=Streptomyces spongiic ola OX=1690221 GN=DDQ41_21750 PE=3 SV=1
MRSGAQSLESGMRTAVIAGSLDAPTLELARRLHGRGWSLVLDTADAGAVDGVGASARTPVTALAGDVRDESHQTALVEAARGLGGLDLLVSNAGVRPPLALCDQPPDAFRRLLDVTVLAPLGLLRTALPLLRESRGVVAAVSPHTGAEPGGPHGGYDAVKAALDRLAAEIAIEEPLVRVWTVDSDDHTQVPALLELLEHGAPSGHYDTAEILRGAGAGTSLPTGPTGPTDGTNSTDPAGPTDGTNGTNGTGPTDGTSASAPDTQRGGRRPPARGSTGLSRGNFSLPANLKANVPPEEHGVDRGDVRLLVGRKASGEVTHHHFSELPRLLRPLDVLVVNTSATAPPKVDGRAGSEPVTLRFSTRLDDGRWVVELSSAEGGTPAGTCVPGTVVAVDDHARVRVVLDHRLEPGSNRLWLARFLASGPATERLRLRGRPFHEGAGDCHPPSAQQTVFAEAAEVASGAPTHQSAELPSAARPFTDQLVTALVTRGVVIAPIELHTRPTPGAPSRPPGPELFAVPPATAHLINHVRASGGRIIAVGTTAVRALESAADPRGGVRAARGWTDLVIGPRRAIRTVSGLLTGLHQAEASHLRLLEVLAGAELLTACYAQARAERYLWGEFGDVNLLLPD

SEQ ID NO: 72765 - protein, 69 aa, Streptomyces stelliscabiei
  misc_feature (1)..(69): tr|A0A0L0L305|A0A0L0L305_9ACTN S-adenosylmethionine:tRN A ribosyltransferase-isomerase (Fragment) OS=Streptomyc es stelliscabiei OX=146820 GN=IQ64_09685 PE=3 SV=1
RVVDGLLTGLHEPEASHLLMLEAVAGRAAVDRAYEAAAEGRYLWHEFGDVHLILPEEAPHAEHCASNCR

SEQ ID NO: 72766 - protein, 280 aa, Streptomyces stelliscabiei
  misc_feature (1)..(280): tr|A0A0L0L4F1|A0A0L0L4F1_9ACTN S-adenosylmethionine:tRN A ribosyltransferase-isomerase (Fragment) OS=Streptomyc es stelliscabiei OX=146820 GN=IQ64_09680 PE=3 SV=1
MSTVAVGVPEELHARVPAEQRGPGLDRDGVRLLVSCGTRVSHHAFAALPGLLRAGDLLVVNTSPTLAAAVDGTVGHARVVVHFSTRGDDGRWAVELRDPDGRGTTRARAGGPAGTEVGLPGEVRLVLEEPLSARGERLWWARVSAPDVAGVLREHGRPIRYSYTERDQPLSVYQTVFALPSRDGAGSAEMPSAGRPFTARLVAELVSRGVQFAPVTLHTGVASAEAHEPPYPERFAVPEASARLINAARAKGGRRAGGRVVAVGTTAVRAVESATGPDGV

SEQ ID NO: 72767 - protein, 358 aa, Streptomyces sviceus
  misc_feature (1)..(358): tr|B5I2X4|B5I2X4_9ACTN S-adenosylmethionine:tRNA ribosy ltransferase-isomerase OS=Streptomyces sviceus ATCC 290 83 OX=463191 GN=SSEG_09833 PE=3 SV=1
MTLAVHVPEELSARVPAEQRGPGLDRDAVRLLVSRSTEVSHHAFGELPRLLRAGDLLVVNTSPTLAAAVDGRIRHARVVVHFSTRGDDGRWAVELRDPDGRGTTRARAGGPAGTEVRLPGGGRLILEEAVSGRLWWARVCGGEVLGLLREHGRPIRYSYTERDQPLSVYQTVFALPSPDGAGSAEMPSAARPFTARLVAELVSRGVQFAPVTLHTGVASAEAHEPPYPERFSVPEASARLINAAKAGDGRVVAVGTTAVRAVESAAGADGVVRARAGWTDLVVTPERGVRVVDGLLTGLHEPEASHLLMLEAVAGRAAIDRGYEEALRRNYLWHEFGDVHLLLPQEGPHAEHCGRNYR

SEQ ID NO: 72768 - protein, 347 aa, Streptomyces swartbergensis
  misc_feature (1)..(347): tr|A0A243RAN1|A0A243RAN1_9ACTN S-adenosylmethionine:tRN A ribosyltransferase-isomerase OS=Streptomyces swartber gensis OX=487165 GN=CA983_39235 PE=3 SV=1
MTSAVRVPEELSARVPVEQRGAGLERDAVRMLVSRGAEVAHHTFRELPRLLRAGDVLVVNTSATLAAAVDGWIGHARVVVHFSTRGDDGRWAVELREPDGRGTTRARAGGPAGTEVCLPGGGGLVLEEPLSGRSGRLWWARVAGPDVPGLLREHGRPIRYAYTERDQPLSVYQTVFALPSADGAGSAEMPSAARPFTARVVAELVSRGVWFAPVTLHTGVASAEVHEPPYPERFAVPEASARLINAARAGGGRVVAVGTTAVRAVESAVGADGVVRARAGWTRLVVTPERGVRVVDGLLTGLHEPEASHLLMLEAVVGRVAIERGYRAALQGRYLWHEFGDVHLVLP

SEQ ID NO: 72769 - protein, 377 aa, Streptomyces tirandamycinicus
  misc_feature (1)..(377): tr|A0A2S1SQF3|A0A2S1SQF3_9ACTN S-adenosylmethionine:tRN A ribosyltransferase-isomerase OS=Streptomyces tirandam ycinicus OX=2174846 GN=DDW44_07445 PE=3 SV=1
MSVLEALRVPDGLSARVPAEERGAGRDDVRLMVSRGTAVAHHAFRELPGLLRAGDVLVVNTSTTLPAAVNARLGGERLVVHFSTRGDAGPSGAAPTGGVWAVELRSPDGAGSTLPRAGGPAGARVRLPGGGVLVPREPLVEGSPRLWWAAVSVDVPALLARYGRPIRYRYTERDQPLSAYRTVFALPAPDGSGSAEMPSAARPFTESLVTELVRRGVQFAPVTLHTGVASAEAHEPPYPERFEVPAATAWLVNAARASRRTGGGRRTGEGGRAGEGGRIVAVGTTAVRALESAAGPDGTVRPSAGWTDLVVTPARGVRVVEGLLTGLHEPAASHLLMLEAITGREALTRSYTEALRHRYLWHEFGDVHLVLPAEDAH

SEQ ID NO: 72770 - protein, 344 aa, Streptomyces turgidiscabies
  misc_feature (1)..(344): tr|L7EZ47|L7EZ47_9ACTN S-adenosylmethionine:tRNA ribosy ltransferase-isomerase OS=Streptomyces turgidiscabies C ar8 OX=698760 GN=STRTUCAR8_02636 PE=3 SV=1
MQVPRELSARVPAEQRGPGLDRDDVRLLVSRGTAVSHHRFAELPRRLRAGDLLVVNTSSTLAAAVDGRAGHARVVVHFSTRGDDGRWAVELRDPDGTGTTRARAGASGAVVRLPGGVELVLGEPLTAGSPRLWWAWVDGPVLPLLREYGRPIRYSYTERDQPLSVYQTVFALPSRNGAGSAEMPSAGRPFTARLVTELVSRGVQFAPVRLHTGVASAEAHEPPYPERFAVPEASARLINAVRAGDGRVVAVGTTAVRAVESAAGPDGVVRAAEGWTDLVVAPGRGVRVVEGLLTGLHEPEASHLLMLEAVAGRAAIDRGYEEALRERYLWHEFGDVHLLLPAET

SEQ ID NO: 72771 - protein, 415 aa, Streptomyces uncialis
  misc_feature (1)..(415): tr|A0A1Q4V4R2|A0A1Q4V4R2_9ACTN S-adenosylmethionine:tRN A ribosyltransferase-isomerase OS=Streptomyces uncialis OX=1048205 GN=AB852_20030 PE=3 SV=1
MTVGRGAAPVFRVPDGLPARLPVERRGGGAGRDAVRLLVSRGPEVSGHMFRELPALLRAGDVLVVNTSPTLAAAVDGEVGRARVVVHFSVCGDDGRWAVELREPDGTGTTRARAGSRVDTAVRLPGGARLVLEESAGGGDRLWWARLVAGAAGRAAGTGVPELLRRYGRPVRYAYTERDQPLSAYRTVFALRSDDGSGSAEMPAAGRPFTARVVTDLVRRGVQFAPVRLDRGVAPPEAVGPPPAERFGVPEASARLINAARAGGGRVIAVGATAVRAVESAVEPLGASTGAGAPEGVSGGVRLGQGAGARGAADPTPRDGGAAGAPAVVRAARGWTDLVVAPGRGARVVDGLLTGLHGPRAPQRALLRALAGERAVARAYEEALHGLYLWHEFGDVHLVLPTENPHGERCSSNSR

SEQ ID NO: 72772 - protein, 347 aa, Streptomyces variegatus
  misc_feature (1)..(347): tr|A0A0M2GE53|A0A0M2GE53_9ACTN S-adenosylmethionine:tRN A ribosyltransferase-isomerase OS=Streptomyces variegat us OX=284040 GN=UK15_31535 PE=3 SV=1
MTPAVCVPEELSARVPVEQRGPGLERDSVRMLVSRGTDVAHHAFTELPRLLRAGDLLVVNTSATLAAAVDGWTGHARVVVHFSTPGDDGRWAVELRDPDGRGTTRARAGGPAGREVCLPGDVRLVLEEPLSGRSERLWWARVSGPGVPGLLRAYGRPIRYAYTRRDQPLSVYQTVFALPSADGAGSAEMPSAARPFTARLVAELVSRGVQFAPVTLHTGVASAEAHEPPYPERFAVPEASARLINAAEAGGGRVVAVGTTAVRAVESAVGADGAVRARAGWTDLVVTPERGVRVVDGLLTGLHEPEASHLLMLEAVAGRVAIERGYEAALQGRYLWHEFGDVHLVLP

SEQ ID NO: 72773 - protein, 151 aa, Streptomyces varsoviensis
  misc_feature (1)..(151): tr|A0A0L8QQE8|A0A0L8QQE8_9ACTN S-adenosylmethionine:tRN A ribosyltransferase-isomerase (Fragment) OS=Streptomyc es varsoviensis OX=67373 GN=ADK38_14300 PE=3 SV=1
MRAGEALRGMNPRDVLRVPEELSARVPVEARGGGLDRDGVRLLVSGRDGVSHHAFRDLPELLRAGDVLVVNTSRTLPAAVDGRLGAEPVVVHFSTRADDGRWSVEVRRPDGRGTTWRRTGDLTWAVVALPGGLRLVLEGPVDPAGDRLWWA

SEQ ID NO: 72774 - protein, 207 aa, Streptomyces varsoviensis
  misc_feature (1)..(207): tr|A0A0L8QQF9|A0A0L8QQF9_9ACTN S-adenosylmethionine:tRN A ribosyltransferase-isomerase (Fragment) OS=Streptomyc es varsoviensis OX=67373 GN=ADK38_14295 PE=3 SV=1
HGRPIRYGYTERDQPLSAYQSVFAVPDAEGHGSAEMPSAARPFTERLVARLVSRGVQIAPVSLHTGVASGETHEPPYPERFAVPPSTAWLVNAARAGGGRIVAVGTTAVRALETAADPARGGGGRTAEPGGGAVRAAAGWTDLVVTPERGVRVVDGLLTGLHEPEASHLLMLAALAGEELLCSSYTEAIEQGYLWHEFGDVHLILPH

SEQ ID NO: 72775 - protein, 424 aa, Streptomyces vietnamensis
  misc_feature (1)..(424): tr|A0A0B5I8A1|A0A0B5I8A1_9ACTN S-adenosylmethionine:tRN A ribosyltransferase-isomerase OS=Streptomyces vietname nsis OX=362257 GN=SVTN_08680 PE=3 SV=1
MALAVRVPTELSARVPAEQRGPGRGRDDVRLLVSRGEAVSHHSFRELPVLLRAGDVLVVNTSTTLAAAVDGRLGPEPGGEPVVVHFSTRGDDGRWAVELRTPEPSGSTRPRGGGPAGAVVRLPGGGRLVLAGPLVPGSGRLWWARVSVDVPGLLGGYGRPIRYGYTERDQPLSAYRTVFARPSPDGSGSAEMPSAGRPFTARLVAELVDRGVRIAPLSLHTGVASAEAHEPPYPERFEVPAATAALVNAARAGGGRVIAVGTTVVRALESAAVGPAGRTGPGPAGSRPGGAPGASGAGSGGPGAGAGLGGPGEGTGAGSGGSVRAVGAGGPGEGTGAGSGGVVRAVRGWTDLVVTPARGVRVVDGLLTGLHEPEASHLLMLEAVAGRPALRSAYAAAVRGRYLWHEFGDVHLLLPEEGPHPPHC

SEQ ID NO: 72776 - protein, 353 aa, Streptomyces virginiae
  misc_feature (1)..(353): tr|A0A0L8N0X0|A0A0L8N0X0_STRVG S-adenosylmethionine:tRN A ribosyltransferase-isomerase OS=Streptomyces virginia e OX=1961 GN=ADK75_08275 PE=3 SV=1
MPEHLVARIPAEQRGPGRGRDDVRLLVSRGTRQVSLHAFRELPGLLRAGDVLVVNTSTTLAAAVDARLGREDLVVHFSTRGDDGRWAVELRAPAGGGTTRPRAGGPAGAVVELPDGGRLVLEEPLAAGADRLWWARPHPAPYGVPALLRAYGRPIRYAYTERDQPLSAHQTVFAVPAADGSGSAEMPSAGRPFTPELVARLVSRGVQFAPLVLHTGVASQEAHEPPYPERYEVSPTTAGLVNAARAGGGRVIAVGTTAVRALESAVDEAGRVRPAAGWADLVVTPERGVRVVDGLLTGLHEPGASHLLMLEAVAGRAAVRLGYAEARARLCLWHEFGDIHLLLKDENRHHSHC

SEQ ID NO: 72777 - protein, 355 aa, Streptomyces viridifaciens
  misc_feature (1)..(355): tr|A0A1L9DSU6|A0A1L9DSU6_STRVF S-adenosylmethionine:tRN A ribosyltransferase-isomerase OS=Streptomyces viridifa ciens OX=48665 GN=BOQ63_34950 PE=3 SV=1
MTTLTELDLHVTVPPELSARAPAEARGGARDGVRMLVGRRATGAVEHRRFTELPEALRPGDLLVVNNSGTLPAALPGRLPDGTPVALHLSSAQPDQRGSHLVELRRPMPGSAASYYPPQESPARPGLHVALPAGGAAELVQPFTDRLWYAELSLPATLLPYLRLHGRAIRYGYVDRDWPIEAYQTVFASVPGSSEMPSAARPFTPTVVARLAGRGVLVAPVTLHTGVASPEAHEAPYAERFRVPATTARLVGHVRAGGGRVIAVGTTVVRALESAVGPDGTLQEADGWTELVITPVRGVRGVDGLLTGWHEPRASHLLMLAAVAGRPLLTACYREAVRQRYLWHEFGDVNLLLPD

SEQ ID NO: 72778 - protein, 347 aa, Streptomyces viridochromogenes
  misc_feature (1)..(347): tr|D9WZK2|D9WZK2_STRVT S-adenosylmethionine:tRNA ribosy ltransferase-isomerase OS=Streptomyces viridochromogene s (strain DSM 40736 / JCM 4977 / BCRC 1201 / Tue 494) O X=591159 GN=SSQG_01702 PE=3 SV=1
MTPAMRVPEELSARVPVEQRGPGLDRDAVRMLVSRGTEVAHHTFTELPRVLRAWDLLVVNTSATLAAAVDGWSGHTRVVVHFSTRGDDGRWAVELREPDGRGTTRPRAGGPAGTEVCLPGGVRLVLEEPLSGRSERLWWARVAGPGVVGLLREHGRPIRYAYTERDQPLSVYQTIFALPSADGAGSAEMPSAARPFTARVVAELVSRGVRLAPVTLHTGVASAEAHEPPYPERFAVPEASARLINATKAGGGRVVAVGTTAVRAVESAAGADGVVRPRAGWTGLVVTPERGVRVVDGLLTGLHEPEASHLLMLEAVAGRVAVERGYEAALQGRYLWHEFGDVHLVLR

SEQ ID NO: 72779 - protein, 378 aa, Streptomyces viridochromogenes
  misc_feature (1)..(378): tr|A0A0J7YUM6|A0A0J7YUM6_STRVR S-adenosylmethionine:tRN A ribosyltransferase-isomerase OS=Streptomyces viridoch romogenes OX=1938 GN=ACM01_43740 PE=3 SV=1
MTPAMGVPLFERGRAGWSVPEELSARIPAEQRGTGLDRDAVRLLVSRGREVSHHTFGALPRLLRAGDLLVVNTSRTLAAAVDGSVGHARVVVHFSTHGDDGRWAVELRDPDGRGTTRARAGAPGMRVWLPGGVRLLLEEPLEPGSGRLWWARVSPAGVAGTDGVAGLMREHGRPIRYSYTERDQPLSVYQTVFALPSTDGAGSAEMPSAARPFTARMVTELVSRGVRFAPITLHTGVASTEMHQPPYPERFAVPGASARLINAVKAGDGRVVAVGTTAVRAVESAVGADGVVRAREGWTDLVVTPERGVRVVDGLLTGLHEPEASHLLMLEAVAGRAAIDRGYEAALRGLYLWHEFGDVHLILPTEAPHSEHCVSNCR

SEQ ID NO: 72780 - protein, 377 aa, Streptomyces viridosporus
  misc_feature (1)..(377): tr|D5ZQ17|D5ZQ17_STRV1 S-adenosylmethionine:tRNA ribosy ltransferase-isomerase OS=Streptomyces viridosporus (st rain ATCC 14672 / DSM 40746 / JCM 4963 / KCTC 9882 / NR RL B-12104 / FH 1290) OX=566461 GN=SSFG_05583 PE
MTLAVRVPEELSARVPVEQRGPGLDRDSVRLLVSRGTAVSHHAFVELPWLLRAGDLLVVNTSPTLAAAVDGWIGHTRVVVHFSTRGDDGRWAVELRDPDGRGTTRARGRGGEPGAPRGGGGGGRAGGPAGTEVRLVGGARLVLEEPLSARGERLWWARVSRDVPGVLREHGRPIRYAYTERDQPLSAYQTVFALPSPEGTGSAEMPSAGRPFTARMVAELVSRGVQFAPVVLHAGVASAEAHEPPYPERFVVPEASARLVGAVRAGGGRVIAVGTTAVRAVESAAGADGVVRARAGWTDLVVTPERGVRVVDGLLTGLHEPEASHLLMLEAVAGRAAVDRGYEEALHGRYLWHEFGDVHLVLPEEAPHTPHCSSNHE

SEQ ID NO: 72781 - protein, 365 aa, Streptomyces wuyuanensis
  misc_feature (1)..(365): tr|A0A1G9QGB9|A0A1G9QGB9_9ACTN S-adenosylmethionine:tRN A ribosyltransferase-isomerase OS=Streptomyces wuyuanen sis OX=1196353 GN=SAMN05444921_10414 PE=3 SV=1
MSVLEALRVPDGLSARVPAEERGTGRDDVRLMVSRGSAVTHHAFRALPGLLRAGDVLAVNTSATLPAAVNARLGGERLVVHFSTRADGERAGTASGGGLWAVELRSPDGAGSTLPRAGGPAGARIRLPGGGLLVPREPLVEGSPRLWWAAVSVDVPGLMARYGRPIRYGYTERDQPLSVYQTVFALPEPDGAGSAEMPSAARPFTEPLVAELVRRGVQFAPVTLHTGVASSEAHEPPYPERFEVPAATAWLLNAARARRRAGGGGRIVAVGTTAVRALESATDPDGTVRPAAGWTDLVVTPARGVRVVEGLLTGLHEPAASHLLMLAAIAGREALARSYTEALRRLYLWHEFGDVHLILPDQDTH

SEQ ID NO: 72782 - protein, 374 aa, Streptomyces yanglinensis
  misc_feature (1)..(374): tr|A0A1H5U549|A0A1H5U549_9ACTN S-adenosylmethionine:tRN A ribosyltransferase-isomerase OS=Streptomyces yangline nsis OX=310779 GN=SAMN05216223_101779 PE=3 SV=1
MSAAAPAVVCETCDTEAARVDAGSLADLRLPPELLAAAPAPRRDAVRLLVGRRGSGEVTHHGFRELPGLLRAGDVLVVNTSRTLPAALNGRMAELGADPATGALVVVHFSTRRDDGRWVVEVRSPDGRGSTVRRPGGPAGAEVRLAGGGRLVLERPLVPDADRLWVASVRVPDVVRHLQRHGRPIRYGYTARDQPLSAYQTVFGTPSADGRASAEMPSAGRPFTAPLVTELVSRGVQLAPIELHTGVASAEAHEPPYAEPFTVPASTAWQVNAARAAGGRVVAVGTTAVRALETASDERGTVRAAHGWTELVVTPERGVRAVDGLLTGLHEPEASHLLMLRAVSGEQLLARVYAEALRGRYLWHEFGDVNLLLP

SEQ ID NO: 72783 - protein, 381 aa, Streptomyces yokosukanensis
  misc_feature (1)..(381): tr|A0A117Q2A0|A0A117Q2A0_9ACTN S-adenosylmethionine:tRN A ribosyltransferase-isomerase OS=Streptomyces yokosuka nensis OX=67386 GN=AQI95_22175 PE=3 SV=1
MRTGFRVPEGLSARVPVEQRGPGLDRDAVRLLVSCGTRVTHHAFSELPRLLRAGDLLVVNTSPTLAAAVDGRIGHARVVVHFSTRGDDGRWAVELREPDGRGTTHPRAGTRAGTEGIEGIEGTEVVLQGAGRLVLEEPLGPRGQRLRWARAAGDVLEVLRAHGRPIRYSYTERDQPLSAYQSVFALPPPDGAGSAEMPSAARPFTARLVAELVSRGVWFAPVTLHTGVASAQAHEPPYPERFVVPEASARLINAVKAGRTGRAAPAGPSGGGRVVAVGTTAVRAVESAAGPDGVVRAAEGWTDLVVTPQRGVRVVDGLLTGLHEPEASHLLMLEAVAGRAGVDRAYEEALRGLYLWHEFGDVHLILPEESPHTERCDGNSW

SEQ ID NO: 72784 - protein, 436 aa, Streptosporangiaceae bacterium
  misc_feature (1)..(436): tr|A0A3A4B4M5|A0A3A4B4M5_9ACTN S-adenosylmethionine:tRN A ribosyltransferase-isomerase OS=Streptosporangiaceae bacterium YIM 75507 OX=2339229 GN=D5H75_10630 PE=3 SV=1
MPSGGRLSIAGHLILERFSLSRPGFQQYRGLTAKAVQCSHGTAHPATRRGGRPVTLSAGATGSPGPLSPPAPVNQYDFDFSPSLVAQRPPEVRGTGRDDAKLLVLDRRSGLVEHRRFRDLGSYLSPGDALVLNNARVVPSLLRGEDGRGGPVVVNLFSPMDDGTWHCLVLPASAGAPGKVLRFGADGAVTGTLLGEDGAGVWRIRLDPGGTDVLDEIGEIAYPDYLVERPIDPGHYQTVFATRPGATLFPSAGRHFTSAMLDELRNRGVAVVEVTHFIAARWQHGYLRDWLGDEVDWPEDADIELTPGAAAPSLPFPRPERYEVSTRAADEINERRRAGGRVVVCGTSALRALETVTDERGGRVWPGSGWTNLIIGPGHRPRSCDSFLTNFHLPRSSELRLTAAFTGRQPLLDLYREEVIPNGYLFNEFGDSMLII

SEQ ID NO: 72785 - protein, 331 aa, Streptosporangiaceae bacterium
  misc_feature (1)..(331): tr|A0A3A3ZZ54|A0A3A3ZZ54_9ACTN S-adenosylmethionine:tRN A ribosyltransferase-isomerase OS=Streptosporangiaceae bacterium YIM 75507 OX=2339229 GN=D5H75_39590 PE=3 SV=1
MSAAEDTAPRILEAHEPPEARGLARDEVRLLVAGPSGLRHLRFRDLPDVLAPGDVLVVNNSATLPAAVRLDKIAVHFSTELDDGDWLVELRRLTPAATEPYAGGAAGEWLPLPGGRTLVLRGRHTPRLWRARLDTDVPSYLRAHGVPIRYSYVERDWPLSAYQTVFSTVPGSAEMPSAARPFTAELVTRLVSAGVAIAPITLHTGVASPEKDEPPYPERFEVPESTARLVNARTGRLIAVGTTVVRALETAARPGGAVEAARGWTEHVVTPEGGVRAVDGLITGLHEPRSSHLRMLTAIAGQDRLARAYTAAYAERYLWHEFGDSNLLLRS

SEQ ID NO: 72786 - protein, 367 aa, Streptosporangium canum
  misc_feature (1)..(367): tr|A0A1I3VQ45|A0A1I3VQ45_9ACTN S-adenosylmethionine:tRN A ribosyltransferase-isomerase OS=Streptosporangium can um OX=324952 GN=SAMN05216275_114173 PE=3 SV=1
MNAPVTDAMAPGFVLPHDLEAHEPPEARGLTRDGVRLLVSHGDTGEITHHGFAELPGLLHPGDLLVVNNSATLPAAVRLDRLAVHFSTEREDGTWLVELRRRLELRSGPGGGGAGQDTRRPGAAGAGAEMASEPYPGGAAGEWLPLPGGATLFLLERETPRLWRARLDREVPAYLRRYGVPIRYSYVERDWPLEDYQTVFGVRPGSAEMPSAGRPFTTGLVTGLVSRGIGVAPITLHTGVASPTADEPPCPEWFEVSEATARQVRLTRGSGGRVIAVGTTVVRALETAALTGGRVRAARGWTSHLVTPSTGVRAVSGLITGLHGPRSSHLLMLSAIAGGELLSLSYAEALGEGYLWHEFGDVHLILQ

SEQ ID NO: 72787 - protein, 370 aa, Streptosporangium minutum
  misc_feature (1)..(370): tr|A0A243RPI4|A0A243RPI4_9ACTN S-adenosylmethionine:tRN A ribosyltransferase-isomerase OS=Streptosporangium min utum OX=569862 GN=CA984_13615 PE=3 SV=1
MNTPVTDAMAPGFVLPHDLEAHEPPEARGLTRDGVRLLVSNGATGEITHHRFAGLPGLLHPGDLLVVNNSATLPAAVRLDRLAVHFSTEREDGTWLVELRRRLELRPGPSGGGAGQDARDPRRPGATGADAEMASEPYPGGAAGEWLPLPGGATLCLLERETPRLWRARLDREVPAYLRRHGVPIRYSYVERDWPLEDYQTVFGVRPGSAEMPSAGRPFTTGLVTGLVSRGIGVAPITLHTGVASPTADEPPYPEWFEVSEATARQVRLTRESGGRVIAVGTTVVRALETAALTRGRVRATRGWTSHLVTPSTGVRAVNGLITGLHEPRSSHLLMLSAIAGGELLSRSYAEALKEGYLWHEFGDVHLILR

SEQ ID NO: 72788 - protein, 371 aa, Streptosporangium roseum
  misc_feature (1)..(371): tr|D2B2Q3|D2B2Q3_STRRD S-adenosylmethionine:tRNA ribosy ltransferase-isomerase OS=Streptosporangium roseum (str ain ATCC 12428 / DSM 43021 / JCM 3005 / NI 9100) OX=479 432 GN=Sros_0506 PE=3 SV=1
MSTPVTDAMAPGFVLPHDLEAHEPPEARGLTRDGVRLLVSHGATGEITHHGFAELPGLLHPGDLLVVNNSATLPAAVRLDRLAVHFSTEREDGTWLVELRRRMERRSGPGGGGAGQDARDRRRPGTAPAAGTEMASEPYPGGAAGEWLPLPGGATLRLLDRETPRLWRARLDREVPAYLRRYGVPIRYSYVERDWPLEDYQTVFGIRPGSAEMPSAGRPFTAELVTGLVSRGIGVAPITLHTGVTSPSTDEPPCPEWFEVSEATARQAELTRESGGRVIAVGTTVVRALETAALACGRVRAARGWTSHLVTPSAGVRAVNGLITGLHGPRSSHLPMLSAIAGGELLSRSYAEALGEGYLWHEFGDVHLILQ

SEQ ID NO: 72789 - protein, 296 aa, Streptosporangium sp.
  misc_feature (1)..(296): tr|A0A2Z3V698|A0A2Z3V698_9ACTN S-adenosylmethionine:tRN A ribosyltransferase-isomerase OS=Streptosporangium sp. 'caverna' OX=2202249 GN=DKM19_00345 PE=3 SV=1
MSHRTFADLPSLLEPGDLLVVNNSATLPAAVRLDRLAVHFSTEREDGTWLVELRRRMRTASEPYPGGAGGEWLPLPGGATLRLLERETPRLWRARLDREVPAYLHRYGVPIRYSYVDEDWPLADYQTVFGVRPGSAEMPSAGRPFTTGLVTELVSRGIGMAPITLHTGVASPEKNEPPYPEWFEVPETTARQVELARESGSRVIAVGTTVVRALETAALATGRVRAARGWTSHIVTPSAGVRAVNGLITGLHEPRSSHLLMLSAIAGGELLSRSYAEALREGYLWHEFGDVHLILS

SEQ ID NO: 72790 - protein, 407 aa, Streptosporangium subroseum
  misc_feature (1)..(407): tr|A0A239IFY8|A0A239IFY8_9ACTN S-adenosylmethionine:tRN A ribosyltransferase-isomerase OS=Streptosporangium sub roseum OX=106412 GN=SAMN05216276_1019118 PE=3 SV=1
MSTPTTDAMASDFVLPYDLEAHEPPEARGLARDGVRLLVSRGGGSGAGEARRSTEGARGKARDARETRGCPEETRTDTRDIHGSGGDTTGARESTEDPHGKARETRGRGGEIGHRTFADLPGLLEPGDLLVVNNSATLPAAVRLDRLAVHFSTEREDGTWLVELRRRMETASEPYPGGAGGEWLPLPGGATLRLLERETPRLWRARLDREVPAYLHRYGVPIRYSYVDEDWPLADYQTVFGVRPGSAEMPSAGRPFTTGLVTELVSRGIGMAPITLHTGVASPEKNEPPYPEWFEVPETTARQVELAHESGSRVIAVGTTVVRALETAALATGRARAARGWTSHIVTPSTGVRAVNGLITGLHEPRSSHLLMLSAIAGGELLSRSYAEALREGYLWHEFGDVHLILS

SEQ ID NO: 72791 - protein, 342 aa, Subdoligranulum sp.
  misc_feature (1)..(342): tr|A0A1Q6SYU0|A0A1Q6SYU0_9FIRM S-adenosylmethionine:tRN A ribosyltransferase-isomerase OS=Subdoligranulum sp. 6 0_17 OX=1897022 GN=queA PE=3 SV=1
MLKKDFWYDLPKELIAQEPADPRDAARLMVLDRKNDKILHSVFHELPHYLEKGDLLVVNNSKVLPARLMGTKVPTGAVCELLLLRQVKGDTWECLARPGKRMQPGTKVEFGDGSLTAVVDETLPDGNKYVTFTYDTETLYEKLDEFGKMPLPPYITKQLEDQSQYQTVYAKELGSAAAPTAGLHFTPQLMDTIRSRGVNIAEVTLHVGLGTFRPVNEESIEDHQMHSEWYSVSEETAKLINETRAAGHRVIAVGTTSCRTLESVWAKYGKIVPCSGNTSIFIYPGVELKAIDGLITNFHLPESTLIMLIAAFYGYDKTMAAYKVAVEEKYRFFSFGDAMFIR

SEQ ID NO: 72792 - protein, 342 aa, Subdoligranulum sp.
  misc_feature (1)..(342): tr|A0A367GF00|A0A367GF00_9FIRM S-adenosylmethionine:tRN A ribosyltransferase-isomerase OS=Subdoligranulum sp. A PC924/74 OX=2086273 GN=queA PE=3 SV=1
MLKKDFWYDLPKELIAQEPADPRDSARLMVLDRKNDTIEHRIFHDLPEYLNAGDVLVVNNSKVLPARLMGVKVPTGAVCEVLLLRQAHGDTWECLARPGRRMQAGTKLSFGDGSLTATVDETLPDGNKYVTFQYDTQTLYEKLDEFGKMPLPPYITRQLEDQSQYQTVYAKELGSAAAPTAGLHFTPELLDTIRAKGVNIVEVTLHVGLGTFRPVNEDNIQEHQMHTEWYCVDDTAAEAINAARASGHRVIAVGTTSCRTLEAVWAKYGKIVPCSGTTDIFLYPGVELHAIDGLVTNFHLPESTLIMLISAFYGYEKTMAAYKVAVQEKYRFFSFGDAMFIQ

SEQ ID NO: 72793 - protein, 342 aa, Subdoligranulum variabile
  misc_feature (1)..(342): tr|D1PKT5|D1PKT5_9FIRM S-adenosylmethionine:tRNA ribosy ltransferase-isomerase OS=Subdoligranulum variabile DSM 15176 OX=411471 GN=queA PE=3 SV=1
MLKKDFWYDLPKELIAQEPAEPRDAARLMVLNRKNDTIEHAIFHDLPKYLEKGDLLVVNNSKVLPARLLGTKVPTGAVCELLLLRQVKGDTWECLARPGKRMQPGTKVTFGDGTLTAVVDETMPDGNKFVTFTYDTETLYEKLDEFGKMPLPPYITKQLEDQSQYQTVYAKELGSAAAPTAGLHFTPELLDTIRANGVNIAEVTLHVGLGTFRPVNEEEIEDHQMHSEWYSVSEDTANAINATRASGHRVIAVGTTSCRTLEAVWAKYGKIVPCSGNTDIFIYPGIDLHAIDGMITNFHLPESTLIMLISAFYGYEKTMAAYKVAVEEKYRFFSFGDAMLIL

SEQ ID NO: 72794 - protein, 342 aa, Subdoligranulum variabile
  misc_feature (1)..(342): tr|A0A2V2FP52|A0A2V2FP52_9FIRM S-adenosylmethionine:tRN A ribosyltransferase-isomerase OS=Subdoligranulum varia bile OX=214851 GN=queA PE=3 SV=1
MLKKDFWYDLPKELIAQEPADPRDSARLMVLDRRNDRIEHAVFRDLPRYLEKGDLLVVNNSKVLPARLLGTKVPTGAVCELLLLRQVKGDTWECLARPGKRMQAGTKVSFGDGTLTAVVDETMPDGNKLVTFTYDTETLYEKLDEFGKMPLPPYITKQLEDQSQYQTVYAKELGSAAAPTAGLHFTPELMDTLRAGGVNIAEVTLHVGLGTFRPVSEDDIEDHQMHSEWYSVSEETAAAINAARQSGHRVIAVGTTSCRTLEAVWARYGKIVPCSGNTDIFIYPGVELHAIDGLITNFHLPESTLIMLISAFYGYEKTMAAYKTAVAERYRFFSFGDAMLIQ

SEQ ID NO: 72795 - protein, 349 aa, Subsaximicrobium wynnwilliamsii
  misc_feature (1)..(349): tr|A0A5C6ZKJ0|A0A5C6ZKJ0_9FLAO S-adenosylmethionine:tRN A ribosyltransferase-isomerase OS=Subsaximicrobium wynn williamsii OX=291179 GN=queA PE=3 SV=1
MKLSHFSFKLPEELLAEHPSEIRDESRLMVLDRKNQTIEHKLFKDVIDYFKEDDVMILNNTKVFPARLFGNKEKTGARIEVFLLRELNEEQRLWDVLVDPARKIRIGNKLYFGEDETLVAEVIDNTTSRGRTLRFLYDGSYTEFRRKLTELGETPLPKYIQRDVEPEDAERYQTIFAKNEGAVAAPTAGLHFSKHLLKRLEIKGVHLPEVTLHVGLGTFNPVEVEDLSKHKMDSEEIFITKPAVDVINRGIREKRRVCAVGTTAMRTVESSVSSNGMLNEFSGWTNKFIFPPYEFSIANCMITNFHTPKSTLLMMVSAFAGHDFMKRAYEEAVKEKYRFYTYGDAMLII

SEQ ID NO: 72796 - protein, 359 aa, Succinatimonas hippei
  misc_feature (1)..(359): tr|E8LK25|E8LK25_SUCHY S-adenosylmethionine:tRNA ribosy ltransferase-isomerase OS=Succinatimonas hippei (strain DSM 22608 / JCM 16073 / KCTC 15190 / YIT 12066) OX=762 983 GN=queA PE=3 SV=1
MTVLRSDFNFDLPKELIANYPSAERTKCRMLCLDGNTGELCDRTFIDLKDFLRPGDLLVFNDTKVIPARLYGTKKTGGAVELLIERITGLNTALSHIRASKAPKAGSELFIDGGYVLNVTGRDGDLFMIETADGSSLLDLLDKVGHIPLPPYIEREDEALDKDRYQTVYSKVPGAVAAPTAGLHFDNAQIEELKSLGVNTAFVTLHVGAGTFQPVREDDIVKHHMHKEFVQLPEEVANAVKATHAAGHRVIAVGTTAVRSLESAATYARENGLGEIAPFHNDTSIFIYPGYQYQVVDCLITNFHLPESTLIMLVCAFAGYKNTMHAYHHAVKDKYKFFSYGDCMFITKRTKPMDLPPSA

SEQ ID NO: 72797 - protein, 359 aa, Succinatimonas sp.
  misc_feature (1)..(359): tr|R5EHX1|R5EHX1_9GAMM S-adenosylmethionine:tRNA ribosy ltransferase-isomerase OS=Succinatimonas sp. CAG:777 OX =1262974 GN=queA PE=3 SV=1
MLRSDFNFDLPLELIAEYPSKERTSCRMLCLDGKDGSLMDKHFYDLKEFLKPGDLLVFNDTKVIPARLYGKKETGGACEFLIERMTGESTALSHIKASKAPKAGTVIHIDGGYDVTVTGREGDLFKIETVGDKSLLDILYEVGHIPLPPYIERPDESLDRERYQTVYSKVPGAVAAPTAGLHFDEKQLAQLKNMGVNMAFVTLHVGAGTFQPVREDDILKHHMHKEFVHLSEEVAKAVIDTHKAGHRVIAVGTTAVRSLESAATYAKSIGATEEIVPFANDTSIFIYPGYKYQVIDCLITNFHLPESTLIMLVSAFAGYKHTMNAYKHAVEEKYKFFSYGDCMFIQKNEAALNDLPPSA

SEQ ID NO: 72798 - protein, 343 aa, Succiniclasticum ruminis
  misc_feature (1)..(343): tr|A0A1G6MX60|A0A1G6MX60_9FIRM S-adenosylmethionine:tRN A ribosyltransferase-isomerase OS=Succiniclasticum rumi nis OX=40841 GN=queA PE=3 SV=1
MKVIDFDYALPKERIAQHPVEPRDHSRLLVVDKTTGEMEHRHFYNLPEYLKPGDLLVFNDTRVIPARLYGFKDTGAHVEVFLLTRLNNTDWEVLVRPGKKLQVGAHINFSDELSGTIIDHTDFGGRIIRFSFDGVFEEILDRLGEVPLPPYITEKLEDKERYQTVYNRDPGSAAAPTAGLHFTKELLQKIKDMGCEEVFVTLNVGLGTFRPVTEENIEDHPMHREFYSVTPEAAAAINRAKAEGRRIIAVGTTAVRTLESAGVTGEVKAGGNWTQIYIYPGYQWHIVDALVTNFHLPQSTLLMLVSSLSSREVMLRTYEEAVKLEYRFFSFGDAMFITELDKK

SEQ ID NO: 72799 - protein, 343 aa, Succiniclasticum ruminis
  misc_feature (1)..(343): tr|A0A1I1YX89|A0A1I1YX89_9FIRM S-adenosylmethionine:tRN A ribosyltransferase-isomerase OS=Succiniclasticum rumi nis DSM 9236 OX=1123323 GN=queA PE=3 SV=1
MKVTDFDYDLPKERIAQHPMEPRDHSRLLVVDKNTGVMEHRHFYDLPEYLRPGDVLVFNDTRVIPARLYGFKDTGAHVEVFLLTRLNNTDWEVLVRPGKKLQVGAHIKFAEELSGTIIDHTDFGGRIIRFAFEGVFEEILDRLGEVPLPPYITAELEDKERYQTVYNRDPGSAAAPTAGLHFTKELLQKIKDMGCEEVFVTLNVGLGTFRPVTEENIEDHPMHREFYSVTPEAAAAINRAKAEGRRIVAVGTTAVRTLESAGATGEVKAGSSWTQIYIYPGFQWHIVDALVTNFHLPQSTLLMLVSSLSSREVMLHTYAEAVKREYRFFSFGDAMFITDLEHK

SEQ ID NO: 72800 - protein, 361 aa, Succinivibrio dextrinosolvens
  misc_feature (1)..(361): tr|A0A1T4VKM6|A0A1T4VKM6_9GAMM S-adenosylmethionine:tRN A ribosyltransferase-isomerase OS=Succinivibrio dextrin osolvens DSM 3072 OX=1123324 GN=queA PE=3 SV=1
MLRSDFNFDLPLNLIADYPSEQRTGCRMLCLDGSDGKLSDQHFYDLKNFLQPGDLLVFNDTKVIPARMYGKKDTGGAIEFLIERIISETCALTHIKASKAPKTRAVLHIDGGYEVNVIGREGDLFKIETVGGKSLLDILYAVGHIPLPPYIDRPDETLDRERYQTVYSKYPGAVAAPTAGLHFDEAQLEDLKAYGVNMAFVTLHVGAGTFQPVREDDILKHHMHKEFVHLTKEVADAVIATHKAGHRVIAVGTTAVRSLESAATFAKSQNSADEIVPFSNDTSIFIYPGYKYQVVDALITNFHLPESTLIMLVSAFAGYEKTMNAYKHAVADKYKFFSYGDCMFITKNPKADEDLPPSAKN

SEQ ID NO: 72801 - protein, 359 aa, Succinivibrio sp.; identical to SEQ ID NO: 72797
  misc_feature (1)..(359): tr|A0A316SJM7|A0A316SJM7_9GAMM S-adenosylmethionine:tRN A ribosyltransferase-isomerase OS=Succinivibrio sp. OX= 2053619 GN=queA PE=3 SV=1

SEQ ID NO: 72802 - protein, 360 aa, Succinivibrio sp.
  misc_feature (1)..(360): tr|A0A3C1W1L8|A0A3C1W1L8_9GAMM S-adenosylmethionine:tRN A ribosyltransferase-isomerase OS=Succinivibrio sp. OX= 2053619 GN=queA PE=3 SV=1
MLRSDFNFDLPLELIANYPSKDRTACRMLALDGNTGALSDKHFYDLKNFLKPGDLLVFNDTKVIPARLYGKKDTGGACEFLIERLLSENSALSHIKASKAPKAGQILHVDGGYDLEVKGREGDLFIIETKDQTSLLDILYKVGHIPLPPYIERADEDLDKERYQTVYSKVPGAVAAPTAGLHFDKEQLEDLKAYGVNQAFVTLHVGAGTFQPVREDDILKHHMHKEFVHLSKEVADLVIKTHQQGHRVIAVGTTAVRSLESAASYAKEIGSKDEIVPFSKDTSIFIYPGYKYQVIDGLITNFHLPESTLIMLVSAFAGYKHTMDAYKHAVALQYKFFSYGDCMFITKNDEANKDLPPSAK

SEQ ID NO: 72803 - protein, 72 aa, Succinivibrionaceae bacterium
  misc_feature (1)..(72): tr|A0A3C0C8Y8|A0A3C0C8Y8_9GAMM S-adenosylmethionine:tRN A ribosyltransferase-isomerase (Fragment) OS=Succinivib rionaceae bacterium OX=2053620 GN=DCL74_02895 PE=3 SV=1
MLRSDFNFELPRELIAEYPSAERTGCRMLCLNGADGSYEDRHFYDLKNFLKPGDLLVFNDTKVIPARLYGKK

SEQ ID NO: 72804 - protein, 290 aa, Succinivibrionaceae bacterium
  misc_feature (1)..(290): tr|A0A3C0C9L7|A0A3C0C9L7_9GAMM S-adenosylmethionine:tRN A ribosyltransferase-isomerase (Fragment) OS=Succinivib rionaceae bacterium OX=2053620 GN=queA PE=3 SV=1
GGAVEILIERILSQTSALCHMRASKPAKAGSCVNLNGGRKLLVSGREGELFKIETVNGQSVLDVLNAEGHIPLPPYIDREDEPLDRERYQTVYSREPGAVAAPTAGLHFDEPQLQELKKLGINMAFCTLHVGAGTFQPVREDDISAHHMHSEFVHLSKEVADAVIKARREGHRVIAVGTTAVRSLESAALQAEKDGCSDVIAPFSADTSIFIYPGYRYRAVDALITNFHLPESTLIMLVAAFAGYSHTMKAYEHAVKDAYKFFSYGDCMFITKNEKAYQDLPPSALAKQD

SEQ ID NO: 72805 - protein, 350 aa, Sulfitobacter brevis
  misc_feature (1)..(350): tr|A0A1I1ZP82|A0A1I1ZP82_9RHOB S-adenosylmethionine:tRN A ribosyltransferase-isomerase OS=Sulfitobacter brevis OX=74348 GN=queA PE=3 SV=1
MKLSDFDFDLPERLIATRPAVPRTSARMLVADGDTIHDARVSDLTDWLRAGDLLVLNDTRVIPARLSGQRRRDSKQGPVTAKIEVTLLEPRSDGTWSALLKPLRKVHEGEEIVFSDQLSATLEGTADGQGHLRFNCAGEDFDTALAGAGSMPLPPYIAAKRPADAQDMTDYQTVFARNSGAVAAPTASLHFDDELLARLQDLGVEFVHVTLHVGAGTFLPVKVDDVSQHKMHAEWGQVSEDAAARIAAAKRQGRRVIPVGTTALRLIETAARGGEITPWQGDTDIFITPGFEFRVADALMTNFHLPKSTLMMLVSALMGPAPIRAIYAHAIAEEYRFFSYGDSSLLLPKA

SEQ ID NO: 72806 - protein, 354 aa, Sulfitobacter delicatus
  misc_feature (1)..(354): tr|A0A1G7PP68|A0A1G7PP68_9RHOB S-adenosylmethionine:tRN A ribosyltransferase-isomerase OS=Sulfitobacter delicat us OX=218672 GN=queA PE=3 SV=1
MKLSDFDFDLPEDLIATRPANPRSSARLLVAEGEVLHDQRVTDLTNWLRPGDRLVLNDTRVIPARLSGLRHRASAQGNVQAKIEVTLLEPRGDGTWSALIKPLRKLKIGEEVIFSDDLRATLEAVEDGQGHLRFNCTGDDFDAALNAAGAMPLPPYIAAKRAADAQDMMDYQTVFARHAGAVAAPTASLHFDAPLLEALAAKGVAFSHVTLHVGAGTFLPVKVDDISEHKMHAEWGKVSAKAAEEITATRVAGGRVIPVGTTALRLIETAARGGEIAAWEGDTDIFITPGFTFNVTDGLMTNFHLPKSTLMMLVSALMGVQAVKDIYAYAIAEKYRFFSYGDSSLLLPQAQKPA

SEQ ID NO: 72807 - protein, 341 aa, Sulfitobacter donghicola
  misc_feature (1)..(341): tr|A0A410XZ81|A0A410XZ81_9RHOB S-adenosylmethionine:tRN A ribosyltransferase-isomerase OS=Sulfitobacter donghic ola OX=421000 GN=queA PE=3 SV=1
MNIEDFDYDLPESLIAQTPLKNRDQSRLLVLNRKNGNMEHLHFKDVINYFNPGDTLVLNDTRVMPARLFGLKEETGAKVEMLMLTQIEGNDWEVLLKPAKRIKVGNQLNFGDGKIIAECIEELDQGGRIMRLHYEGILQERLDELGEMPLPPYIKERLDDPDRYQTVYAKESGSAAAPTAGLHFTDELLESIKAKGVNIAFITLHVGLGTFRPVSVDNIDDHEMHSEYYQMTQETADLLNETRKKGHRIISVGTTSTRTLETIRRDHSEFVEKSGWTDIFIYPGFEYKAIDGLITNFHLPKSTLVMLVSAFSSREYILNAYQKAVEMEYRFFSFGDAMLII

SEQ ID NO: 72808 - protein, 354 aa, Sulfitobacter donghicola
  misc_feature (1)..(354): tr|A0A073IL45|A0A073IL45_9RHOB S-adenosylmethionine:tRN A ribosyltransferase-isomerase OS=Sulfitobacter donghic ola DSW-25 = KCTC 12864 = JCM 14565 OX=1300350 GN=queA PE=3 SV=1
MKLSDFDFDLPEELIAVRPAQPRSSARLLVAQADAIHDQHVSDLVSWLRAGDRLVLNDTRVIPARLTGARHRETGQGPVSAKIEATLLEPQADAGVWSALVKPLKKLKQGEEIVFSPELSATFEGIDQGLAYLRFNLTGEDFDTALDAAGAMPLPPYIAAKRPADSQDKTDYQTVWAKTAGAVAAPTASLHFDAALLQQLRDLGVSFTYVTLHVGAGTFLPVKVDDISDHKMHAEWGQVSAQAAQEIAQTKAEGGRVIPVGTTALRLIETAGRQGEIAPWEGDTDIFITPGFQFNVADALMTNFHLPKSTLMMLVSALMGQETIRNIYAHAVKTGYRFFSYGDASLLLPARKSD

SEQ ID NO: 72809 - protein, 354 aa, Sulfitobacter dubius
  misc_feature (1)..(354): tr|A0A1I2QT24|A0A1I2QT24_9RHOB S-adenosylmethionine:tRN A ribosyltransferase-isomerase OS=Sulfitobacter dubius OX=218673 GN=queA PE=3 SV=1
MKLSDFDFDLPEELIATRPANPRSSARLLVADGAVLHDRRVTDLTDWLRPGDRLVLNDTRVIPARLSGVRHRASAQGAVQAKIEVTLLEPRGDGTWSALIKPLRKLKIGEEVIFTDALRAKLEAVEDGQGHLRFNCTGDDFDAALNAAGAMPLPPYIAAKRAADAQDMTDYQTVFARHAGAVAAPTASLHFDEALLAALAAQGVEFSHVTLHVGAGTFLPVKVDDISEHKMHAEWGRVSAKAAEEITATRVAGGRVIPVGTTALRLIETAARGGQITAWEGDTDIFITPGFEFNVTDGLMTNFHLPKSTLMMLVSALMGVQQVKDIYAHAIAEKYRFFSYGDSSLLLPKAQKPA

SEQ ID NO: 72810 - protein, 351 aa, Sulfitobacter geojensis
  misc_feature (1)..(351): tr|A0A196QPI2|A0A196QPI2_9RHOB S-adenosylmethionine:tRN A ribosyltransferase-isomerase OS=Sulfitobacter geojens is OX=1342299 GN=queA PE=3 SV=1
MKLSDFDFDLPETLIATRPAVPRTSARLLVAEGDAIHDQRVTDLTTWLRAGDRLVLNDTRVIPARLFGVRVRDSSQGRVEAKIEVTLLEPRGDGTWSALIKPLRKLKIGEVVTFSPDLSATLQDTQDGQGHLRFNCTGPDFDAALNAAGAMPLPPYIAAKRPADAQDKTDYQTVWAKHAGAVAAPTASLHFDEALLAQLQEMGVTFTYVTLHVGAGTFLPVKVDDIAEHKMHAEWGSVSAAAADEIAETKAAGGRVIPVGTTALRLIETAGRAGRITAWEGDTDIFITPGFTFNVADALMTNFHLPKSTLMMLVSALMGTEQIKTIYAHAVTQGYRFFSYGDASLLLPPKP

SEQ ID NO: 72811 - protein, 354 aa, Sulfitobacter guttiformis
  misc_feature (1)..(354): tr|A0A420DIN3|A0A420DIN3_9RHOB S-adenosylmethionine:tRN A ribosyltransferase-isomerase OS=Sulfitobacter guttifo rmis OX=74349 GN=queA PE=3 SV=1
MKLSDFDFDLPETLIAVRPAQPRSSARLLVAEGGKIHDGHVTDLTKWLRAGDRLVLNDTRVIPARLTGVRHRDSAQGPVSAKVEVTLLEPQAEAGVWSALVKPLKKLKPGEDVIFSDNLRATLVGVADGQGYLRFNLEGDDFDTALNAAGAMPLPPYIAAKRPADAQDKIDYQTVWAKNSGAVAAPTASLHFDAPLLEVLRDMGVVFSYVTLHVGAGTFLPVKVDDISEHKMHAEWGQVSAQASAEIAATKAAGGRVIPVGTTALRLIETAGKGGTITPWEGDTDIFITPGFIFNVADALMTNFHLPRSTLMMLVSALMGAQTIRDIYSHAINENYRFFSYGDASLLIPPRKSD

SEQ ID NO: 72812 - protein, 348 aa, Sulfitobacter indolifex
  misc_feature (1)..(348): tr|A9E6X4|A9E6X4_9RHOB S-adenosylmethionine:tRNA ribosy ltransferase-isomerase OS=Sulfitobacter indolifex HEL-4 5 OX=391624 GN=queA PE=3 SV=1
MKLSDFDFDLPEELIATRPANPRSSARLLVAEGAQLHDRRVTDLTDWLRPGDRLVLNDTRVIPARLSGLRHRASAQGAVQAKIEVTLLEPRGDGTWSALIKPLRKLKIGEEVIFSDDLRATLEAVEDGQGHLRFNCAGDDFDAALNAAGAMPLPPYIAAKRAADAQDMTDYQTVFARHAGAVAAPTASLHFDETLLAALAAKGVTFSHVTLHVGAGTFLPVKVDDISEHKMHAEWGRVSAEAAEEITATRAAGGRVIPVGTTALRLIETAARDGQITAWEGDTDIFITPGFTFNVTDGLMTNFHLPKSTLMMLVSALMGVQQVKDIYAHAIAEKYRFFSYGDSSLLLP

SEQ ID NO: 72813 - protein, 350 aa, Sulfitobacter litoralis
  misc_feature (1)..(350): tr|A0A1H0PUM8|A0A1H0PUM8_9RHOB S-adenosylmethionine:tRN A ribosyltransferase-isomerase OS=Sulfitobacter litoral is OX=335975 GN=queA PE=3 SV=1
MKLSDFDFDLPERLIATRPAVPRTAAKMLVAHNDAIIDSTVSRITDWLRPGDRLVLNDTRVIPARLTGYRSRDSAQGHVQARIEVTLLEPRGDSDWTALIKPLKKLKLFEAVVFSSDLSARLEGIENGQGVLRFNCTGPDFDSALNSAGAMPLPPYIAGKRPADAQDLTDYQTVFARKAGAVAAPTASLHFDQMLLDQLAAMGVDFSHVTLHVGAGTFLPVKVDDIADHKMHSEWGQVSAQAAAEIIETKAAGGRVIPVGTTALRLVETAARSGIIQPWEGDTDIFITPGFEFNVADALMTNFHLPKSTLMMLVSALMGQKTVQNIYKHAIESNYRFFSYGDASLLFPKT

SEQ ID NO: 72814 - protein, 354 aa, Sulfitobacter marinus
  misc_feature (1)..(354): tr|A0A1I6Q763|A0A1I6Q763_9RHOB S-adenosylmethionine:tRN A ribosyltransferase-isomerase OS=Sulfitobacter marinus OX=394264 GN=queA PE=3 SV=1
MKLSDFDFDLPDRLIATRPAVPRTSARLLVADGPVLHDKKVSDLPDWLRAGDRLVLNDTRVIPARLSGQRHRDSAQGPVQARIEVTLLEPRADGTWAALIKPLKKLKIGEEVLFSDDLRATLEAVEDGQGHLRFNCGGDDFDRALNAAGAMPLPPYIAAKRPADAQDMTDYQTVFARNKGAVAAPTASLHFDEALLAQLAAMGVTFSHVTLHVGAGTFLPVKVDDISEHKMHSEWGQVSAQAASEIAETKAAGGRIIPVGTTALRLIETAGRSGSIQPWEGDTDIFITPGFTFNVADALMTNFHLPKSTLMMLVAALMGQDAIKTLYTHAIESNYRFFSYGDASLLFPRAQKTA

SEQ ID NO: 72815 - protein, 348 aa, Sulfitobacter mediterraneus
  misc_feature (1)..(348): tr|A0A061SQV1|A0A061SQV1_9RHOB S-adenosylmethionine:tRN A ribosyltransferase-isomerase OS=Sulfitobacter mediter raneus OX=83219 GN=queA PE=3 SV=1
MKLSDFDFDLPEDLIATRPAVPRSAARLLVAEGDTIHDQQVTDLTKWLRPGDRLVLNDTRVIPARLSGLRFRDSAQGRVQAKIEVTLLEPRGDGTWGALIKPLRKLKIGEEVIFSDDLRATLQTVEDGQGHLAFNCTGDDFDAALNAAGAMPLPPYIAAKRAADAQDKTDYQTVWARNTGAVAAPTASLHFDEPLLAALRGKGVTFSHVTLHVGAGTFLPVKVDDISQHKMHSEWGQVSADAAAEMAATKAAGGRVIPVGTTALRLIETAAKGGAIRAWEGDTDIFITPGFEFQIADALMTNFHLPKSTLMMLVSALMGQGRIKSIYAHAIAERYRFFSYGDASLLLP

SEQ ID NO: 72816 - protein, 348 aa, Sulfitobacter mediterraneus
  misc_feature (1)..(348): tr|A0A2T6CGU1|A0A2T6CGU1_9RHOB S-adenosylmethionine:tRN A ribosyltransferase-isomerase OS=Sulfitobacter mediter raneus OX=83219 GN=queA PE=3 SV=1
MKLSDFDFDLPEDLIATRPAVPRSAARLLVAEGDAIHDQQVTDLTKWLRPGDRLVLNDTRVIPARLSGLRFRDSAQGRVQAKIEVTLLEPRGDGTWGALIKPLRKLKIGEEVIFSDDLRATLQAVEDGQGHLAFNCTGDDFDAALNAAGAMPLPPYIAAKRAADAQDKTDYQTVWARNTGAVAAPTASLHFDEPLLAALRDKGVTFSHVTLHVGAGTFLPVKVDDISQHKMHSEWGQVSADAAAEMAATKAAGGRVIPVGTTALRLIETAAKGGAICAWEGDTDIFITPGFEFQIADALMTNFHLPKSTLMMLVSALMGQGRVKSIYAHAIAERYRFFSYGDASLLLP

SEQ ID NO: 72817 - protein, 354 aa, Sulfitobacter pontiacus
  misc_feature (1)..(354): tr|A0A1H2UFS5|A0A1H2UFS5_9RHOB S-adenosylmethionine:tRN A ribosyltransferase-isomerase OS=Sulfitobacter pontiac us OX=60137 GN=queA PE=3 SV=1
MKLSDFDFELPERLIATRPAVPRTSAKMLVAQGDHITDTTVANISDWLRPGDRLVLNDTRVIPARLSGVRRRDSAQGPVQARIEVTLLEPRGDADWTALIKPLKKLKIDETVVFSADLSARLIGVEDGQGRLRFNCSGDDFDAALNDAGAMPLPPYIAGKRPADAQDMTDYQTVFAKNAGAVAAPTASLHFDQLLLDQLAEMGVRFSHVTLHVGAGTFLPVKVDDIADHKMHSEWGQVSAQAAAEISATKAAGGRVIPVGTTALRLVETAARSGNIQPWEGDTDIFITPGFEFNVADALMTNFHLPKSTLMMLVSALMGQKTIQKIYNHAIESNYRFFSYGDASLLFPKTQINA

SEQ ID NO: 72818 - protein, 358 aa, Sulfitobacter pseudonitzschiae
  misc_feature (1)..(358): tr|A0A221JZ76|A0A221JZ76_9RHOB S-adenosylmethionine:tRN A ribosyltransferase-isomerase OS=Sulfitobacter pseudon itzschiae OX=1402135 GN=queA PE=3 SV=1
MKLTDFDFDLPDELIATRPAVPRTSARLLVADTAQIHDARVSDLGRWLRAGDRLVLNDTRVIPARLSGLRARMSAQGATEARIEVTLLEPRADGTWSALVKPLKKLKIAEVVQFSDALSATLDGVEDGQGHLRFNLAGDDFDAALAEAGAMPLPPYIAAKRPADEQDKHDYQTVWARHSGAVAAPTASLHFDDALLAELAAMGVAFTHVTLHVGAGTFLPVKVDDVTTHKMHAEWGHVSATAAAEIAATKAAGGRVIPVGTTALRLIESAAQDGTVQPWDGTTDIFIYPGFTFQVADGLVTNFHLPKSTLMMLVAALIGQNRIREIYAHAIAEKYRFFSYGDASLLLPLGTDDPNRPQ

SEQ ID NO: 72819 - protein, 359 aa, Sulfitobacter pseudonitzschiae
  misc_feature (1)..(359): tr|A0A073IW88|A0A073IW88_9RHOB S-adenosylmethionine:tRN A ribosyltransferase-isomerase OS=Sulfitobacter pseudon itzschiae OX=1402135 GN=queA PE=3 SV=1
MKLTDFDFDLPEGLIATRPAVPRTSARLLVADAAQIHDARVSDLGSWLRPGDRLVLNDTRVIPARLSGLRARMSAQGATEARIEVTLLEPRADGTWSAMVKPLKKLKVGEVVQFSEALSATLEGTAEGQGHLRFNLTGDDFDAALAEAGAMPLPPYIAAKRPADAQDKHDYQTVWARHSGAVAAPTASLHFDEALLAELAAMGVTFTHVTLHVGAGTFLPVKVDDVTTHKMHAEWGHVSDAAAAEITATKAAGGRVIPVGTTALRLIESAARNSGTVQPWEGETDIFIYPGFRFQVADGLMTNFHLPKSTLMMLVSALIGQDRIREIYAHAITESYRFFSYGDASLLLPHGAGDPNRPQ

SEQ ID NO: 72820 - protein, 354 aa, Sulfitobacter sp.
  misc_feature (1)..(354): tr|A0A1J0WHL1|A0A1J0WHL1_9RHOB S-adenosylmethionine:tRN A ribosyltransferase-isomerase OS=Sulfitobacter sp. AM1 -D1 OX=1917485 GN=queA PE=3 SV=1
MKLSDFDFDLPEDLIATRPAVPRSSARLLVAEGDALHDGVVTDLTEWLRAGDRLVLNDTRVIPARLTGMRTRQSAQGAVSARIEVTLLEPRADGTWAALVKPLRKLRQGERVVFSRDLDATLEAVSDGQAHLRFNCTGADFDAALNAAGAMPLPPYIAARRPADAQDRTDYQTVWARHAGAVAAPTASLHFDQPLLEALAAKGVTFSHVTLHVGAGTFLPVKVDDITQHRMHAEWGRVDADAAAEIAATRAAGGRVIAVGTTALRLIETAARDGEIGPWEGDTDIFITPGFRFNVTDALMTNFHLPRSTLMMLVSALMGQQAIRDIYAHAIDRKYRFFSYGDASLLIPASKKIW

SEQ ID NO: 72821 - protein, 349 aa, Sulfitobacter sp.
  misc_feature (1)..(349): tr|A0A345RAK0|A0A345RAK0_9RHOB S-adenosylmethionine:tRN A ribosyltransferase-isomerase OS=Sulfitobacter sp. JL0 8 OX=2070369 GN=queA PE=3 SV=1
MKLSDFDFDLPDALIATRPATPRTSARLLVASGDRITDAQVHDLGTYLRAGDLLVLNDTKVIPARLSGIRKRDSAQGQTKARIEVTLLEPAADGTWSALIKPLKKVRIGETIEFPLGLTATLTGTGDGQGQLQFNLSGDDFDHGLAAAGAMPLPPYIAAKRPADERDKTDYQTVFARNVGAVAAPTASLHFDQALLAQLQDMGVRLTYVTLHVGAGTFLPVKVDDVTTHKMHAEWGQVSAEAAAAIAQTKTAGGRVIPVGTTALRLIESAARETGSVAQWQGDTDIFIYPGFAFRVTDALMTNFHLPRSTLMMLVSALMGQDRIARIYEHAISQGYRFFSYGDSSLLIP

SEQ ID NO: 72822 - protein, 348 aa, Sulfobacillus acidophilus
  misc_feature (1)..(348): tr|G8TW14|G8TW14_SULAD S-adenosylmethionine:tRNA ribosy ltransferase-isomerase OS=Sulfobacillus acidophilus (st rain ATCC 700253 / DSM 10332 / NAL) OX=679936 GN=Sulac_ 2478 PE=3 SV=1
MTPPIEWNLGMTVTEAAAPPEAVGRSRAQVRLLVVDRRRGVVRCEEFTGFPSWLGPGDVLVYNDSRTIPAALPALWDGVPARVHLAVRLSSRRAIVEKRRADGGPDPALSDRNASVAILSRLGDLMALGRVVRRFHPESRLWVIDTDRDLYELAPLVGDPIRYGYVDRPYPLYYYQTIFGRVPGSAEMPSAGRPFTYEIVARMVERGVILCPITLHTSVSSHEVTQGLARYPVLPEYYHIPRRTVRHITEARQDGRRIIALGTTVVRGLETWAASGFGRRRGWTRYLITPNNPPLVVTNLVTGLHDNFSSHLALLYAFVDPPFLREAYRQAGLAGFRWHEFGDLSFIV

SEQ ID NO: 72823 - protein, 363 aa, Sulfobacillus benefaciens
  misc_feature (1)..(363): tr|A0A2T2XFW8|A0A2T2XFW8_9FIRM S-adenosylmethionine:tRN A ribosyltransferase-isomerase OS=Sulfobacillus benefac iens OX=453960 GN=C7B46_09945 PE=3 SV=1
MKASQLNLEIHAPAAIVPSELRGIPRDGVKLLVMDPSTKTIRHALVQDLYKFLRRGDLVVVNDSAMIGARLSALHDGTPLTVHLAGELGENSVLIERRQSTGAPDWTPFPLGSRLKIVDDGGQPVSSGVIVQHFHPRSRLWVVNTETSWYRIAQQLGRPIRYQYIAQDLPMSSYQTIFGHRPGSVEMPSASRPFTLEMMSKLREIGVEFSPITLHTTVSSHEIDSSWEDHPAFPEWFEVSETTARRVNGAIRHRHRIIALGTTVVRALESAYDERLQRIVATAGWTRRLITPELPPRVVDGLITGLHDNFTSHLALLYAFVEPDWLKLVYHGAVQSGYLWHEFGDLCLIASGSNKLEEGLTSP

SEQ ID NO: 72824 - protein, 362 aa, Sulfuricaulis limicola
  misc_feature (1)..(362): tr|A0A1B4XF49|A0A1B4XF49_9GAMM S-adenosylmethionine:tRN A ribosyltransferase-isomerase OS=Sulfuricaulis limicol a OX=1620215 GN=queA PE=3 SV=1
MRKSDFNYSLPPELVAQYPASPRSASRLLHLDGASGACRDMKFADLPALLRAGDLLVFNDTCVIPARLLGYKDSGGRIEVLIERLLDVHRVLAQVRSSKPPRPGQKLILDGGATAVVQGREGEFYVLEFEIGVKLKESPLPLKGGEGEGKGEGVDESVTEILDRIGHVPLPPYIARADEGADRERYQTVYARHRGAVAAPTAGLHFDEAMLGRLKEMGVDSAFVTLHVGAGTFQPLRVEDIREHRMHAEYVRVLPGDSDKINSAKKEGRRVVAVGTTVVRALETAARDGRLDPFEGETDIFIYPGYRFQIVDALLTNFHLPGSTLLMLVCAFGGTENVLNAYRHAVEGRYRFYSYGDAMFVD

SEQ ID NO: 72825 - protein, 342 aa, Sulfuricella denitrificans
  misc_feature (1)..(342): tr|S6B682|S6B682_SULDS S-adenosylmethionine:tRNA ribosy ltransferase-isomerase OS=Sulfuricella denitrificans (s train DSM 22764 / NBRC 105220 / skB26) OX=1163617 GN=qu eA PE=3 SV=1
MKTSDFDFDLPPELIAQFPTQERSQSRLLHLNGVSGALADGRFCDLTQLLKPGDLLVFNDTRVIKARLFGVKDSGGKLEVLIERVLDEHHALAQIRASHAPKLDSGLLLAGVIAATVEERQGELYRLHFAGETPLLELLEQYGSLPLPPYITHAPEALDESRYQTVYARQPGAVAAPTAGLHFDPAMLESLEKMGVKIAYVTLHVGAGTFQPVRVENIAEHHMHSEWYTVPQRTVDLIRQARTAGGRVMAVGTTSLRALESAAASGELEAGSSETNIFIFPGYRFRVVERLLTNFHLPKSTLLMLVSAFGGMENIRCAYRHAVEQRYRFFSYGDAMLIERKE

SEQ ID NO: 72826 - protein, 342 aa, Sulfuricella sp.
  misc_feature (1)..(342): tr|A0A0E9ME03|A0A0E9ME03_9PROT S-adenosylmethionine:tRN A ribosyltransferase-isomerase OS=Sulfuricella sp. T08 OX=1632857 GN=queA PE=3 SV=1
MKTSDFDFDLPPELIAQFPTQERSQSRLLHLDGANGELADEQFSDLPKFLKPGDLLVFNDTRVIKARLFGVKDSGGKLEVLIERLLDEHHALAHIRASHAPKPGSGLLLAGEIAATVEERQGELYRLRFAGETPLLELLEQYGSLPLPPYITHAPEALDETRYQTVYARQPGAVAAPTAGLHFDPAMLETLEKMGVKIAYVTLHVGAGTFQPVRVEEIAEHHMHSEWYTVPQRTVDLIRLARAEGGRVMAVGTTSLRALESASAGGELEAGSGETNIFIFPGYRFRVVERLLTNFHLPRSTLLMLVSAFGGMENIRRAYRHAVENRYRFFSYGDAMLIERQQ

SEQ ID NO: 72827 - protein, 370 aa, Sulfuricurvum kujiense
  misc_feature (1)..(370): tr|A0A2D3WIQ2|A0A2D3WIQ2_9HELI S-adenosylmethionine:tRN A ribosyltransferase-isomerase OS=Sulfuricurvum kujiens e OX=148813 GN=queA PE=3 SV=1
MEFLFLSFVLLIRHRKKKPIWLKTKKRRLTNLDPLLTSSYHYELPDELIATHPIHPRDHARLLVYNRSDKTITHARFDALESFLPQNCGIIFNDTKVIKARLYGKKESGGAIELLINRPLDAYAINVYIKGRVKLNTLLLFDADLTARITALNEDGSREVNFYLRECRIRFEELLPILEKVGHIPLPPYLGREDNSEDEREYQSVFAHYEGAVAAPTASLHFSDKLFEAVCSSHPHAFVTLHVGSGTFKPVEAEIITDHPMHSEYFDISASAQELLHSDIPLLSIGTTSTRTVEYHVRTQELSGEANLFLHPNNPPQRVNHLLTNFHLPQSTLLMLVASFVGLEETHRIYQSAIDEKYRFFSYGDAMLIL

SEQ ID NO: 72828 - protein, 340 aa, Sulfuricurvum kujiense
  misc_feature (1)..(340): tr|E4U0G6|E4U0G6_SULKY S-adenosylmethionine:tRNA ribosy ltransferase-isomerase OS=Sulfuricurvum kujiense (strai n ATCC BAA-921 / DSM 16994 / JCM 11577 / YK-1) OX=70903 2 GN=queA PE=3 SV=1
MLDPLLTSSYEYTLPEELIATHPIHPRDHARLLVYNRSDKTITHARFDALESFLPENCGIIFNDTKVIKARLYGKKESGGAIELLINRPHDAYAINVYIKGRVKTGTILLFDDTLHAKVIQLHDDGSREVNFYHHENLIRFEELLPILEKIGHIPLPPYLGREDDSEDEREYQSVFAHHEGAVAAPTASLHFTDELFDAVCSSHPHAFVTLHVGSGTFKPVEAEVITDHPMHSEYFHISTDAQNLIRSDLPLLCIGTTSTRTVEYHVRAKETQGEANLFLHPNNPPLRINHLLTNFHLPQSTLLMLVASFVGLEETHRIYREAIDQNYRFFSYGDAMLIL

SEQ ID NO: 72829 - protein, 342 aa, Sulfuricurvum sp.
  misc_feature (1)..(342): tr|A0A1G3SK27|A0A1G3SK27_9HELI S-adenosylmethionine:tRN A ribosyltransferase-isomerase OS=Sulfuricurvum sp. RIF OXYD2_FULL_44_160 OX=1802249 GN=queA PE=3 SV=1
MTNLDPLLTSSYHYELPDELIATHPIHPRDHARLLVYNRSDKTITHARFDALESFLPQNCGIIFNDTKVIKARLYGKKESGGAIELLINRPLDAYAINVYIKGRVKLNTLLLFDADLTARITALNEDGSREVNFYLRECRIRFEELLPILEKVGHIPLPPYLGREDNSEDEREYQSVFAHYEGAVAAPTASLHFSDKLFEAVCSSHPHAFVTLHVGSGTFKPVEAEIITDHPMHSEYFDISASAQELLHSDIPLLSIGTTSTRTVEYHVRTQELSGEANLFLHPNNPPQRVNHLLTNFHLPQSTLLMLVASFVGLEETHRIYQSAIDEKYRFFSYGDAMLIL

SEQ ID NO: 72830 - protein, 341 aa, Sulfuricurvum sp.
  misc_feature (1)..(341): tr|A0A0C2VWX3|A0A0C2VWX3_9HELI S-adenosylmethionine:tRN A ribosyltransferase-isomerase OS=Sulfuricurvum sp. PC0 8-66 OX=1539066 GN=queA PE=3 SV=1
MENSLFLTQTYDYALDDSYIATHPAHPKDSAKLLVYHRKSGTITHTTFAHLLEFLPPDAALLLNDTKVIKARLYGHKKSGGAIELLLNSPQNDNRFLVYIKGRVKVGTQLLFDEDLTAQVEALHKDGTRSVTFWQGDTQLDFVALEAILARIGHLPLPPYIKRADTLQDTQDYQTLFAQNIGAVAAPTASLHFTPELLEATLARHAHAFVTLHVGAGTFKPVEHEDIRHHTMHSEVFALSDEAKKLIDSPVPIIAVGTTVTRTVEYYVRTQEHMGQANLFLHPHNPPQRVNHLITNFHLPKSTLLMLVASFVGVEKTLALYEEAKRQNYRFFSYGDAMLIL

SEQ ID NO: 72831 - protein, 345 aa, Sulfuriferula multivorans
  misc_feature (1)..(345): tr|A0A401JGU3|A0A401JGU3_9PROT S-adenosylmethionine:tRN A ribosyltransferase-isomerase OS=Sulfuriferula multivo rans OX=1559896 GN=queA PE=3 SV=1
MRTTDFDFSLPDELIAQFPPSSRSSSRLLHLDGASGQLADRLFTGLPAYLRRGDVMVFNDTRVIKARLYGRKASGGQVELLIERVTGDHEALAFIRASHAPQPGSTLSVADAVTLTVLAREHDLYRLRFDGSASVLDVLEQYGALPLPPYIERAADSADDARYQTVYARHPGAVAAPTAGLHFDEAMLAQLDAMGVIRTHVTLHVGAGTFQPVRVDDLAEHTMHSERYTIPQATVDAIAQAKAQGGRVLAVGTTSLRALEAAAQSGTLIAGAGETSIFITPGYRFKVVERLLTNFHLPKSTLVMLVSAFAGLDHIRHAYAHAVAERYRFFSYGDAMLIERKDHGI

SEQ ID NO: 72832 - protein, 345 aa, Sulfuriferula plumbiphila
  misc_feature (1)..(345): tr|A0A512L895|A0A512L895_9PROT S-adenosylmethionine:tRN A ribosyltransferase-isomerase OS=Sulfuriferula plumbip hila OX=171865 GN=queA PE=3 SV=1
MRTADFDFSLPAELIAQFPPSSRSSSRLLHLDSASGQLADCQFTDLPGYLRRGDVMVFNDTRVIKARLYGRKASGGQVELLIERVTGDHEALAFIRASHAPRPGSALSVADTVTVTVLAREQDLYRLRFDGSASVLEVLEQYGTLPLPPYIERAADGADDARYQTVYARHPGAVAAPTAGLHFDQAMLAQLDAMGVIRTHVTLHVGAGTFQPVRVDDLAEHTMHSERYTIPQATVDAIAQAKAQGGRIVAVGTTSLRALEAAAQSGTLIAGAGETSIFITPGYRFKVVERLLTNFHLPKSTLLMLVSAFAGLDNIRHAYAHAVTERYRFFSYGDAMLIERKYHEI

SEQ ID NO: 72833 - protein, 342 aa, Sulfuriferula sp.
  misc_feature (1)..(342): tr|A0A1Y0G618|A0A1Y0G618_9PROT S-adenosylmethionine:tRN A ribosyltransferase-isomerase OS=Sulfuriferula sp. AH1 OX=1985873 GN=queA PE=3 SV=1
MRTDDFDFELPDALIAQFPPAVRTASRMLHVDPKNRQLTDRLFTDLPTYLQAGDVLVFNDTRVIKARLYGQKISGGQVELLIERVINEHEALTFIRASHAPKTDSQITIAEQVPLTVLGREHDLYHVRFDVPQTVLEVLEQYGALPLPPYIERAADRADDARYQTVYARHPGAVAAPTAGLHFDETMLAQLDAMGVIRAHVTLHVGAGTFQPVRVDNIADHVMHSERYTIPQATVDAIAQANAGSGRIVAVGTTSLRALEAAAQSGHLQAGEGETSIFITPGYRFKVVERLLTNFHLPKSTLLMLVSAFGGMDMMRQAYAHAVARKYRFFSYGDAMLIERAD

SEQ ID NO: 72834 - protein, 344 aa, Sulfurifustis variabilis
  misc_feature (1)..(344): tr|A0A1B4VDS7|A0A1B4VDS7_9GAMM S-adenosylmethionine:tRN A ribosyltransferase-isomerase OS=Sulfurifustis variabi lis OX=1675686 GN=queA PE=3 SV=1
MRKSDFYYELPPDLIAQYPPSERTHARLLHLDGASAVPVDRTFVDLPRLLRAGDLLVFNDTRVLRARIHGTKDTGGRVELLVERVLGERRASAHVRASKPPKPGQRIALEGGAACRVERRTGELYDLAFDRPVLETLERHGHVPLPPYIDRADEPGDHARYQTVYARVPGAVAAPTAGLHFDEALLAQLDAAGTERACVTLHVGSGTFQPLRGDEVEGQRLHAERVVVSAQAADRVNRAKGEGRRVVAVGTTVVRALEASAREGRARAFDGETDIFIYPGFRFRVVDALLTNFHLPESTLLMLVCAFGGTERVLAAYRHAVRQRYRFYSYGDAMFVEPRTGATA

SEQ ID NO: 72835 - protein, 336 aa, Sulfurihydrogenibium azorense
  misc_feature (1)..(336): tr|C1DXU9|C1DXU9_SULAA S-adenosylmethionine:tRNA ribosy ltransferase-isomerase OS=Sulfurihydrogenibium azorense (strain Az-Fu1 / DSM 15241 / OCM 825) OX=204536 GN=que A PE=3 SV=1
MKLSDFDYHLPKELIAKYPVEPRDSCRLMVLNREKKSIEHRVFRDIVDYLQEGDLLVLNDTKVIPARLIGKKEKTGANIEVFLLKPVEDNIWEALIKNVRRLKPKDKIVVAQDFFVEFLERQEDKVIVKLHSKDIKEDLEKYGHIPLPPYIERPDEEKDKQLYQTVFAKKEGSVASPTAGLHFTEELLKKVKDKGVNITYITLHVGLGTFKPVKEEDITKHKMHEEFYSIPKESLDLIEKTKESGKSVIAVGTTVVRTLESFVLTGKTEGFTDIFIYPPFEFKIVDKLITNFHLPKSTLLMLVSAFASKDFILKAYNEAVKQKYRFFSYGDAMFII

SEQ ID NO: 72836 - protein, 336 aa, Sulfurihydrogenibium sp.
  misc_feature (1)..(336): sp|B2V7F8|QUEA_SULSY S-adenosylmethionine:tRNA ribosylt ransferase-isomerase OS=Sulfurihydrogenibium sp. (strai n YO3AOP1) OX=436114 GN=queA PE=3 SV=1
MKLSDFDYHLPKELIAKYPAQPRDSCRLMVLNRKDKTIEHRIFRDVIDYLKPGDTLVLNNTKVIPARLIGKKEKTNANIEVFLLRPIEDNIWETLIKNVRRLKKNQKIIISDDFYVEFLSKDDEKAIVKIHSKDIKSDLEKYGHVPLPPYIEREDEEKDKDYYQTVFADKEGSVASPTAGLHFTKELLEKIKEKGVNIAYITLHVGLGTFKPVKTEDITKHKMHEEYFTIPKETLEMIKKTKENKKSLVAVGTTVVRALETYGKFGKTEGFTDIFIYPPYEFKIVDKLITNFHLPKSTLLMLVSAFADRDFILRAYNGAVKEKYRFFSYGDAMLIV

SEQ ID NO: 72837 - protein, 336 aa, Sulfurihydrogenibium sp.
  misc_feature (1)..(336): tr|A0A2J6WYQ7|A0A2J6WYQ7_9AQUI S-adenosylmethionine:tRN A ribosyltransferase-isomerase OS=Sulfurihydrogenibium sp. OX=2053621 GN=queA PE=3 SV=1
MKLSDFDYHLPKELIAKYPVEPRDSCRLMVLDRKNQTIEHRIFRDIVDYLKEGDLLVLNDTKVIPARLIGKKEKTGANLEVFLLKQVEDNVWEALIKNIRRLKPGDRIFISEDFFVEYLSREEDKGFVKLHSKNLKEDLEKYGHIPLPPYIERPDEEKDKQLYQTVFAKKEGSVASPTAGLHFTTELLEKIKSKGVKIAYVTLHVGLGTFKPVKDEDITKHKMHEEFYSIPEETLTMIKETKEKGKSVIAVGTTVVRTLESYAITGKREDYTNIFIYPPFEFKIVDKLITNFHLPKSTLIMLVSAFATREFILKAYNEAVKEKYRFFSYGDAMFIM

SEQ ID NO: 72838 - protein, 147 aa, Sulfurihydrogenibium yellowstonense
  misc_feature (1)..(147): tr|C4FL88|C4FL88_9AQUI S-adenosylmethionine:tRNA ribosy ltransferase-isomerase (Fragment) OS=Sulfurihydrogenibi um yellowstonense SS-5 OX=432331 GN=SULYE_1342 PE=3 SV= 1
KIKEKGVNIAYITLHVGLGTFKPVKTEDITKHKMHEEYFTIPKETLEMIKKTKENKKSVVAVGTTVVRALETYGKFGKTEGFTDIFIYPPYEFKIVDKLITNFHLPKSTLLMLVSAFADRDFILKAYNEAVKERYRFFSYGDAMLIV

SEQ ID NO: 72839 - protein, 190 aa, Sulfurihydrogenibium yellowstonense
  misc_feature (1)..(190): tr|C4FJ30|C4FJ30_9AQUI S-adenosylmethionine:tRNA ribosy ltransferase-isomerase OS=Sulfurihydrogenibium yellowst onense SS-5 OX=432331 GN=SULYE_0571 PE=3 SV=1
MKLSDFDYHLPKELIAKYPAQPRDSCRLMVLDRKDKTIEHRIFRDVIDYLKPGDTLVLNNTKVIPARLIGKKEKTNANIEVFLLRPIEDNIWEALIKNVRRLKKNQKIIISDDFYVEFLSKDDEKAIVKIHSKDIKSDLEKYGHIPLPPYIEREDEEKDKDYYQTVFAEKEGSVASPTAGLHFTKELLEK

SEQ ID NO: 72840 - protein, 342 aa, Sulfurimonas autotrophica
  misc_feature (1)..(342): tr|E0UPU2|E0UPU2_SULAO S-adenosylmethionine:tRNA ribosy ltransferase-isomerase OS=Sulfurimonas autotrophica (st rain ATCC BAA-671 / DSM 16294 / JCM 11897 / OK10) OX=56 3040 GN=queA PE=3 SV=1
MSNKELLTSSYDFTLPDELIASYPASPRDHAKLLVYDRATDTITHTFFYNLEEFLPKECALIFNDTKVIKARLFGQKPSGGKIELLINRALNACDVNVYIRGKVKAGSEIFFEDNLKAKVTKLNDDGSREVNFYQNDTLLRFEDLLPIIDKIGHIPLPPYIQRADEDEDANEYQSVFACQEGAVAAPTASLHFTPAQHERICKNHKHAYVTLHVGSGTFKPVEADIITEHPMHSEYYDISPQAQAILDSNIPIVSVGTTSTRTIEFYARHKEQTKGEANLFLHPNNKPLRVNHLLTNFHLPKSTLLMLVASFVGLQKTQELYAEAIKEKYRFYSYGDAMLIL

SEQ ID NO: 72841 - protein, 342 aa, Sulfurimonas denitrificans
  misc_feature (1)..(342): sp|Q30PZ7|QUEA_SULDN S-adenosylmethionine:tRNA ribosylt ransferase-isomerase OS=Sulfurimonas denitrificans (str ain ATCC 33889 / DSM 1251) OX=326298 GN=queA PE=3 SV=1
MSSSELLTSSYDFTLPEELIATQPANPRDSAKLLVYDRASDEISHVHFYDFEKFIPKNCALIFNDTKVIKARLFGQKESGGKIELLINRALDAHNIHVFTRGKVKIGTKISFGLELFAKIIELLEDGSRVVNFYKNDSILRFEEILPIIDKIGHIPLPPYIQREDNKDDEIEYQSVFAKEEGAVAAPTASLHFTKEQHERVCTKFTHAYITLHVGSGTFKPVECEKILEHTMHSEYYDISDRAKELLDSKVSILSVGTTSTRTIEFYARNKEHQRGEANLFLHPKNKPLRVDHILTNFHLPKSTLLMLVASFVGVDKAQELYKIAIEKEYRFYSYGDAMLIL

SEQ ID NO: 72842 - protein, 342 aa, Sulfurimonas gotlandica
  misc_feature (1)..(342): tr|B6BIN2|B6BIN2_SULGG S-adenosylmethionine:tRNA ribosy ltransferase-isomerase OS=Sulfurimonas gotlandica (stra in DSM 19862 / JCM 16533 / GD1) OX=929558 GN=queA PE=3 SV=1
MNNPELLTSSYDFILPDELIATHPASPRDHAKLLVYNRRTNEIKHCHFYDFEKYIPKDCALIFNDTKVIKARLYGHKLSGGKIELLINKPLDANNINVYIRGKVKDETKILFDEDLEAVVLKLNDDGSRVVNFFQKNKLLRFEDILPIIDRIGHIPLPPYIQREDNAEDASEYQSVFARQEGAVAAPTASLHFTEEQHERVCKNHDHAFITLHVGSGTFKPVEAQTITDHPMHSEYYEISNKAKELLDSDKPILSIGTTSTRTVEFYARHKEMQRGEANLFLHPNNKPIRVNYLLTNFHLPKSTLLMLVASFVGVEKAQQLYANAIKNNYRFYSYGDAMLIL

SEQ ID NO: 72843 - protein, 348 aa, Sulfurimonas hongkongensis
  misc_feature (1)..(348): tr|T0JSY2|T0JSY2_9HELI S-adenosylmethionine:tRNA ribosy ltransferase-isomerase OS=Sulfurimonas hongkongensis OX =1172190 GN=queA PE=3 SV=1
MLQSPRVSKDELLTSSYDFLLPEKLIASYPANPRDSAKLLIYNRQTKEIIHTHFYELESFIPKECALIFNDTKVIKARLFGKKASGGKLELLLNRPLDATNINVYIRGKVKVSSEIFFGNGLVAVVKELKDDGSRVVNFTKEGKLLRFEELLPIIDKIGHIPLPPYIQREDNTDDAKEYQSVFAKEEGAVAAPTASLHFTQEQHERVCKNYRHAYVTLHVGSGTFKPVEVETITDHPMHSEYYEISDDAKELLDSNLPILSVGTTSTRTIEFYVRNKEQQRGEANLFLHPQNKPLRVNHLLTNFHLPKSTLLMLVASFVGVQIAQKLYREAINKEYRFYSYGDAMLIL

SEQ ID NO: 72844 - protein, 342 aa, Sulfurimonas sp.
  misc_feature (1)..(342): tr|A0A2D3VXW7|A0A2D3VXW7_9HELI S-adenosylmethionine:tRN A ribosyltransferase-isomerase OS=Sulfurimonas sp. UBA1 2504 OX=2015903 GN=queA PE=3 SV=1
MHTQEYFTSSYDFELPSELIATHPAHPRDHAKLLVYNRQTQEISHAYFYDLENFLPKDVALIFNDTKVIKARLFGHKKSGGKVELLINRPLNAKDISVYVRGKVKPQTQLFFDNDLIAIVKELHEDGSRVVVFERDGTELRFEELLPIIDKIGHIPLPPYIQRDDNEEDAQEYQSVFASQEGAVAAPTASLHFTHEQHTRICANYKHAYVTLHVGSGTFKPVETNIITEHPMHSEYYEISEAAKTLLNLDTKILSIGTTSTRTIEFYTRNKTQLSGEANLFLHPNNKPLRVDYLLTNFHLPKSTLLMLVASFVGLEKTQELYAEAIKEKYRFYSYGDAMLIL

SEQ ID NO: 72845 - protein, 341 aa, Sulfurimonas sp.
  misc_feature (1)..(341): tr|A0A4U2Z567|A0A4U2Z567_9HELI S-adenosylmethionine:tRN A ribosyltransferase-isomerase OS=Sulfurimonas sp. SN11 8 OX=2574727 GN=queA PE=3 SV=1
MSNKELLTSSYDFALPKELIATHPANPRDSAKLLVYNRATGEVSHLKFSDLETLIPKDCALIFNDTKVIKARLFGKKESGGKIELLINRALNAHDVNVYIRGKVKIGTEIFFANDLVAIVKELHEDGSRVVNFYQNATALRFEELLPIIDKIGHIPLPPYIQREDNKEDESEYQSVFAKEEGAVAAPTASLHFTKEQHERVCKNFAHAYVTLHVGSGTFKPVECETITEHPMHSEYYAISDAAKKLLDSDIKILSIGTTSTRTIEFYARSEKQRGEANLFLHPNNKPLRVDHLLTNFHLPKSTLLMLVASFTGLEKAQELYKTAIEEKYRFYSYGDAMLIL

SEQ ID NO: 72846 - protein, 348 aa, Sulfurirhabdus autotrophica
  misc_feature (1)..(348): tr|A0A4R3Y4T3|A0A4R3Y4T3_9PROT S-adenosylmethionine:tRN A ribosyltransferase-isomerase OS=Sulfurirhabdus autotr ophica OX=1706046 GN=queA PE=3 SV=1
MRTSDFDFDLPEELIAQFPAEKRAQSRMLWLNGAGGELRDMHFSELTQILRPGDVLVMNDTRVIKARLYGKKESGGRIEILVERILDEHHVLAHMRAGHSPKPGSKLLLDGNVEVTVIGRQDEFYHLRFDVEKTVLEILDEHGSLPLPPYITRVPEFPDEERYQTVYARAPGAVAAPTAGLHFDEAMLVRIKEMGVTLAYVTLHVGAGTFQPVRAESVAEHKMHSELYHVPEETVAAIRRAKQSGGRVMAVGTTSLRALESAAASGELSAGQGDTNIFIIPGYRFKVVERLLTNFHLPKSTLMMLVSAFGGLENIRQAYRHAIAQRYRFFSYGDAMLIERQTEGQNEI

SEQ ID NO: 72847 - protein, 340 aa, Sulfurisoma sediminicola
  misc_feature (1)..(340): tr|A0A497XAH7|A0A497XAH7_9PROT S-adenosylmethionine:tRN A ribosyltransferase-isomerase OS=Sulfurisoma sediminic ola OX=1381557 GN=queA PE=3 SV=1
MTFTLDDFDYHLPPECIAQAPLAERSASLLLVMRGAALDDRAFTDLPDFLVPGDLLVMNDTRVLHARLFGRKDSGGQVEVLVERVTGDDEVLAQVRASKPPKAGGTIHLEEAFDAEVLGREGEFYRLRFPGDAVELIEHHGRLPLPPYIERAAASADEERYQTVFARERGSVAAPTAGLHFDAPLLERLRQRGAGIAHVTLHVGAGTFQPVRVHELSEHRMHRERYVVPQATVEAIAATRQRGGRVVAVGTTTLRTLESAANADGSIKVGAGETAIFITPGFAFRVVDVLITNFHLPKSTLLMLVSAFAGMDEIRAAYRHAMESGYRFFSYGDAMLLFRK

SEQ ID NO: 72848 - protein, 341 aa, Sulfuritalea hydrogenivorans
  misc_feature (1)..(341): tr|W0SI61|W0SI61_9PROT S-adenosylmethionine:tRNA ribosy ltransferase-isomerase OS=Sulfuritalea hydrogenivorans sk43H OX=1223802 GN=queA PE=3 SV=1
MPLTLADFDYALPPELVAQAPLPQRSASRLLVVDGERRTDSQFVDLPQWLRAGDLLVMNDSRVLHARLLGRKESGGQVEVLVERLLEPDVVLAQVRASKSPQPGSRLRLEDVLDVEVLGREGEFYRLRFAGDAAELIEQHGRLPLPPYIERTAEAPDELRYQTVYARETGSVAAPTAGLHFDHDLLAKLREKQVEVAYVTLHVGAGTFQPVRVENLAEHRMHTERYLLPQSTADAIAATRARGGRIVAVGTTSLRVLESAALDGKLKVGAGETALFVTPGFKFRVVDLLITNFHLSKSTLLMLVSAFGGLEEIRDAYRHAIAARYRFFSYGDAMLLHRKST

SEQ ID NO: 72849 - protein, 347 aa, Sulfuritortus calidifontis
  misc_feature (1)..(347): tr|A0A4R3JXZ2|A0A4R3JXZ2_9PROT S-adenosylmethionine:tRN A ribosyltransferase-isomerase OS=Sulfuritortus calidif ontis OX=1914471 GN=queA PE=3 SV=1
MKTADFDYALPEELIARYPLAERTASRLLHVDGPNKRFSDRRFAELAEFFRAGDLLVFNDTRVIKARLFGEKASGGRIEALIERVLSEHEAIAFIRASKSPKPGMRLRFADSFEAEVIERSDDLYRLRFDPAKTVLDWLEAYGELPLPPYLERRPEAADEARYQTVYAREPGAVAAPTAGLHFDEAMLDALKAKGVATARVTLHVGAGTFQPVRVDDIHEHKMHSERYEVPNETVAAVELAKAHGGRVTAVGTTSLRALESAAHSGSLRAGQGETDLFITPGYEFRVVERLITNFHLPRSTLLMLVCAFGGMDLMLAAYRHAVEQRYRFFSYGDAMLIERIANQDAI

SEQ ID NO: 72850 - protein, 350 aa, Sulfurivirga caldicuralii
  misc_feature (1)..(350): tr|A0A1N6E4T8|A0A1N6E4T8_9GAMM S-adenosylmethionine:tRN A ribosyltransferase-isomerase OS=Sulfurivirga caldicur alii OX=364032 GN=queA PE=3 SV=1
MRAMKMFKRQDFDFELPESLIAQQPTAERPASRLLVLGPDGVEDRIFRDIEAYLQPGDLLVFNDTRVMPARLFGQKATGGKVEILIERVLSEREALAHVRASRSPRPGSELLIKGQVPVAVLGREAELFRLQLEDGDWKGVMAAHGHIPLPPYIARSDEAFDHERYQTVYARKEGAVAAPTAGLHFDEALLSRLKEKGVEQGFVTLHVGAGTFKPVQVDDIREHRMHSEWIEVSPELVAQVEATRARGGRVVAVGTTAVRCLESASVEGRLQPMQGETDIFITPGYRFQQVDLLITNFHLPESTLIMLVSAFAGYERTMNAYRHAVAEKYRFFSYGDAMLVYPKEDPDEI

SEQ ID NO: 72851 - protein, 317 aa, Sulfurospirillum barnesii
  misc_feature (1)..(317): tr|I3XXX8|I3XXX8_SULBS S-adenosylmethionine:tRNA ribosy ltransferase-isomerase OS=Sulfurospirillum barnesii (st rain ATCC 700032 / DSM 10660 / SES-3) OX=760154 GN=Sulb a_1514 PE=3 SV=1
MEPRDEARLLVFNRQTGTLTHTLFKELFQFLPENSAVILNDTKVVKARVFGKKQSGGEIELLLNAPLHENFYSVYIRGRVKEKMRLFFDEALEAEVVELKEDGTRIVAFFRDKVPLHTKALFDTLETIGHIPLPPYIKREDTKEDTIDYQTVFAKEQGAVAAPTASLHFTDSMFEALKQRYETHFLTLHVGAGTFKPVEAEHIADHVMHSEMYAIPEITCKLIDSQKPLLAVGTTVTRSVEYYARTKESMGKCNLFLHPNNPPLRINHLLTNFHLPKSTLIMLVASFVGIEKTLELYEEAVKEQYRFFSYGDAMLII

SEQ ID NO: 72852 - protein, 114 aa, Sulfurospirillum cavolei
  misc_feature (1)..(114): tr|A0A2D3W8R2|A0A2D3W8R2_9PROT S-adenosylmethionine:tRN A ribosyltransferase-isomerase (Fragment) OS=Sulfurospi rillum cavolei OX=366522 GN=CFH80_05680 PE=3 SV=1
QDHVMHSEIYAIPEATCRLIDSPKPLLAVGTTVTRTIEYYARTHHQQGACNLFLHPKNPPIRVNYLLTNFHLPQSTLIMLVASFIGIEETLKLYAIAVKEKYRFFSYGDAMLIV

SEQ ID NO: 72853 - protein, 308 aa, Sulfurospirillum deleyianum
  misc_feature (1)..(308): tr|D1B302|D1B302_SULD5 S-adenosylmethionine:tRNA ribosy ltransferase-isomerase OS=Sulfurospirillum deleyianum ( strain ATCC 51133 / DSM 6946 / 5175) OX=525898 GN=Sdel_ 1454 PE=3 SV=1
MVFNRSSGQITHTFFKHLFDFLPEDIGVLLNDTRVVKARIFGKKESGGEIELLLNAPLQENLYSVYIKGRVKKGMRLFFDADLEAELIELKEDGTRLVAFFRKNEALHTKALFDILEIIGHIPLPPYIKREDQEEDSVDYQTVFAKEQGAVAAPTASLHFTDSMFEALKKRYETHFLTLHVGAGTFKPVEAEHILEHVMHSEIYTIPELTCKLIESKKPLLAVGTTVTRTVEYYARTNIPVGKCDLFLHPNNPPLRVNHLLTNFHLPKSTLIMLVASFIGIEKTLELYEEAVKEKYRFFSYGDAMLII

SEQ ID NO: 72854 - protein, 308 aa, Sulfurospirillum halorespirans
  misc_feature (1)..(308): tr|A0A1D7TKV7|A0A1D7TKV7_9PROT S-adenosylmethionine:tRN A ribosyltransferase-isomerase OS=Sulfurospirillum halo respirans DSM 13726 OX=1193502 GN=SHALO_1819 PE=3 SV=1
MVFDRHSGRITHTHFKHLFDFLPSDIAVLLNDTKVIKARVFGKKESGGEVEVLLNAPLQENLYSVYIRGRVKVGTKLFFDEKMLAKIIELKEDGTRVVAFFQAEKPLHTQALFDVLDKIGHIPLPPYIKREDTDEDSVDYQTVFAKEQGAVAAPTASLHFTDTMFEALKKRYETHFLTLHVGAGTFKPVEAEHIKDHVMHSEIYAIPPFTCKLIESPKNILAVGTTVTRTVEYFVRTKEPVGKCDLFLHPQNPPLRVNHLLTNFHLPKSTLIMLVASFIGIEQTLELYEEAVKERYRFFSYGDAMLIV

SEQ ID NO: 72855 - protein, 307 aa, Sulfurospirillum multivorans
  misc_feature (1)..(307): tr|A0A5B9TTA6|A0A5B9TTA6_SULMU S-adenosylmethionine:tRN A ribosyltransferase-isomerase OS=Sulfurospirillum mult ivorans OX=66821 GN=SMN_2048 PE=3 SV=1
MFDRHNGRITHTLFKHLFDFLPSDIAVLLNDTKVIKARVFGKKQSGGEVEVLLNAPLQDNLYSVYIKGRVKVGTKLFFDEKMEAEIRELKEDGTRVVAFFQAEKALHTQALFDVLEKIGHIPLPPYIKREDTDEDSVDYQTVFAKEQGAVAAPTASLHFTDAMFEALKKRYETHFLTLHVGAGTFKPVEAEHIHDHVMHSEIYAIPSLTCKRIESPKNILAVGTTVTRTVEYFARTKEPMGKCDLFLHPQNPPLRVNHLLTNFHLPKSTLIMLVASFIGIEKTLELYEEAVKEKYRFFSYGDAMLIV

SEQ ID NO: 72856 - protein, 342 aa, Sulfurospirillum sp.
  misc_feature (1)..(342): tr|A0A432SM50|A0A432SM50_9PROT S-adenosylmethionine:tRN A ribosyltransferase-isomerase OS=Sulfurospirillum sp. OX=2053622 GN=queA PE=3 SV=1
MPKPDPLLVDSYDYDLPSHLIASRPAEPKDSAKLLVYDRNTGSITHTVFREILNFVPQTYAVILNDTKVIKARIFGQKESGGKVELLINSPLPQNRFLVYIRGRVKEGTKLFFENGLQATVVQLHEDGTRTVQFSRHNRTLDFPALHELLEEIGHVPLPPYIKREDTEADAQDYQTLFAQKIGAVAAPTASLHFTDALFHKMQQQYETYYVTLHVGAGTFKPVEAANIKDHVMHSEFYEIPEATRKIIDSKKKILAVGTTVTRTVEYYVRKHLPNGQSDLFLHPQNPPQRVDALLTNFHLPKSTLLMLVASFTGLEKALEIYHEAIEEEYHFFSYGDAMLIL

SEQ ID NO: 72857 - protein, 307 aa, Sulfurospirillum sp.
  misc_feature (1)..(307): tr|A0A290HQE8|A0A290HQE8_9PROT S-adenosylmethionine:tRN A ribosyltransferase-isomerase OS=Sulfurospirillum sp. JPD-1 OX=220622 GN=SJPD1_1833 PE=3 SV=1
MFDRKTGRITHTLFKHLFDFLPADIAVLLNDTKVIKARIFGKKESGGEIEVLLNAPLQENCYSVYIRGRVKAGTELFFDEHMHAKIIELKEDGTRVVAFFQEGKALHTKALFDVLEKIGHIPLPPYIKREDTNEDSVDYQTVFAKEQGAVAAPTASLHFTDAMFKALKKRYETHFLTLHVGAGTFKPVEAEHIKDHVMHSEIYAIPSLTCKLIESPKNILAVGTTVTRTVEYFARTKVPVGKCDLFLHPQNPPIRVNHLLTNFHLPKSTLIMLVASFVGIEKTLELYEEAVKKKYRFFSYGDAMLIL

SEQ ID NO: 72858 - protein, 351 aa, Sulfurovum lithotrophicum
  misc_feature (1)..(351): tr|A0A2T4CQD3|A0A2T4CQD3_9PROT S-adenosylmethionine:tRN A ribosyltransferase-isomerase OS=Sulfurovum lithotroph icum OX=206403 GN=queA PE=3 SV=1
MSLDLRTENYDYELPEGFIATSPVYPRDHAKLLVYDRKTDTITHTTFQHLLEFLPKECDVFLNDTRVIKARIFGVKEAQSVNKKGFAQGGGKVELLFNKPLDAHHYLVMIRGKVHIGTKLLFDDDLVATVTTFNEDGSRVVTFSHKGQEIRFEELVLILDKIGHLPLPPYMQREDNKEDETDYQTLFAKNAGAVAAPTASLHFTPELFEALEKRHATHKITLHVGAGTFKPVDVEEILSHPMHSEYFHIPEASAHVLDSDRPLLAIGTTVTRTLEYYVRTKKTQGECDLFLNPSNPPQRVTHLLTNFHLPKSTLIMLVSAFIGREKTLDLYKEAIEKKYRFFSYGDAMLIL

SEQ ID NO: 72859 - protein, 350 aa, Sulfurovum riftiae
  misc_feature (1)..(350): tr|A0A151CDD5|A0A151CDD5_9PROT S-adenosylmethionine:tRN A ribosyltransferase-isomerase OS=Sulfurovum riftiae OX =1630136 GN=queA PE=3 SV=1
MSSHTPSPELLTKNYDYELPEGFIATKPVHPRDEAKLLVYNRKDDTVTHTTFKHLLDFLPENCDVFLNDTRVIKARIFGHKVSAEGQGGGKVELLFNKPLDAHHYLVLIRGKVKVGTKLLFDEGLGAIVTALNEDGSRIVTFTHHDKEIRFEDLVQVLDEIGHIPLPPYMQREDNKEDETDYQTLFAKKAGAVAAPTASLHFTPELFEALQKRHRTHKVTLHVGAGTFKPVEVEEILAHPMHSEYFHIPPEAVEILESDRNILAIGTTVTRTVEYYVRTKKTQGECDLFLNPYNPPQRVTHLLTNFHLPKSTLIMLVSAFIGREKTLQLYKEAIDKNYRFFSYGDAMLIL

SEQ ID NO: 72860 - protein, 340 aa, Sulfurovum sp.
  misc_feature (1)..(340): tr|A0A0C2ZQ08|A0A0C2ZQ08_9PROT S-adenosylmethionine:tRN A ribosyltransferase-isomerase OS=Sulfurovum sp. FS06-1 0 OX=1539064 GN=queA PE=3 SV=1
MNSELLTSSYDYELPAHLIAQSPVYPRDHAKLLVYNRKTNTTIHTTFKHLLDHLPKTCNVFLNDTKVIKARIFGSKASGGKVELLFNKPLNATTYLVLIRGKVTIGTELFFEDSLIATVKELNNDGSRVVTFTHHNKIIRFEELVIVLDKIGHIPLPPYMQRQDNEQDETDYQTLFAKNAGAVAAPTASLHFTPELFTALQKRHQTHKITLHVGAGTFKPVEVEHILEHPMHSEYFDIPKESAELLKTQTPILAIGTTVTRTVEYFTRTQKTHGECDLFLNPSNKPQRVTHLLTNFHLPKSTLIMLVSAFIGREKTLELYHDAIQREYRFFSYGDAMLII

SEQ ID NO: 72861 - protein, 345 aa, Sulfurovum sp.
  misc_feature (1)..(345): tr|I2K4T0|I2K4T0_9PROT S-adenosylmethionine:tRNA ribosy ltransferase-isomerase OS=Sulfurovum sp. AR OX=1165841 GN=queA PE=3 SV=1
MNEELLTKNYDYELPEGFIATAPVQPRDHAKLLVYDRKTDTVTHTTFKHLLEYLPKECDVFLNDTRVIKARIFGHKRSLNNQGGGQVELLFNKPIDAHHYLVLIRGKVKIGTELLFDDELVAMVTELNDDGSRIVTFTHHGKEIRFEELVLVLDAIGHIPLPPYMQREDKKEDETDYQTLFAKNAGAVAAPTASLHFTPELFAELEKRHKTHTVTLHVGAGTFKPVEAEEILDHPMHSEYFEIPESSAKVLDSDTPVLAIGTTVTRTIEYYARTKKTHGECDLFLNPSNPPQRVTYLLTNFHLPKSTLIMLVSSFIGRKKTLDLYKEAIEKKYRFFSYGDAMLIL

SEQ ID NO: 72862 - protein, 411 aa, Sunxiuqinia dokdonensis
  misc_feature (1)..(411): tr|A0A0L8V809|A0A0L8V809_9BACT S-adenosylmethionine:tRN A ribosyltransferase-isomerase OS=Sunxiuqinia dokdonens is OX=1409788 GN=NC99_28690 PE=3 SV=1
MSEKSSIKPVFDQSAQALNYELPDERVAKYPLAERDASKLLVWKNGQIEDASFQSLADFLPESSLLVFNNTKVIRARMPFQKKTGAQIEIFCLDPAHPADYQLAFQQTRRCSWNCMVGNLKKWKHEPLERLVDVDGKAVTLVAEKLSQSREHVLVEFSWNDDSVDFASLIEASGILPIPPYLHRDTEASDLERYQTIYSKIKGSVAAPTAGLHFTDSVFASLKKKNISCTEVTLHVGAGTFKPVKAATIADHEMHAEQFVVSRQLIEQLLRKEGKLIAVGTTSIRTLESLYWLGVSVMNDANQSPANLHVEQWAPYENADQQPVKIVLQALINYMDRHQLTVLIASTQIIIVPGYQFQIVDGMITNFHQPQSTLLLLISAYVGNDWQRIYQHALDNNYRFLSYGDSNLYLK

SEQ ID NO: 72863 - protein, 349 aa, Sunxiuqinia dokdonensis
  misc_feature (1)..(349): tr|A0A0L8V6B8|A0A0L8V6B8_9BACT S-adenosylmethionine:tRN A ribosyltransferase-isomerase OS=Sunxiuqinia dokdonens is OX=1409788 GN=queA PE=3 SV=1
MKLSKFKYKLPEELIALHPSKNRDESKLMVLHRDSRKIEHKLFKDITEYFDDQDVMVFNDTKVFPARLYGNKEKTGAEIEVFLLRELNREQRLWDVLVDPARKIRIGNKLYFGEDDMLVAEVIDNTTSRGRTLRFLFDGPYDEFKKTLYSLGETPLPKFIQRAVQPEDKDRYQTIFAKHEGAVAAPTAGLHFSRELLKRLEIIGVDFGYVTLHVGLGNFRSVDVEDLTKHKMDSEQIWIRDEACDLVNNAKTKKKNICAVGTTVMRTLESSVSTQGHLKPFEGWTNKFIFPPYEFSVANRMITNFHLPMSTLLMMVAAFGGYDFVMEAYQKAIKEGYRFGTYGDAMLIL

SEQ ID NO: 72864 - protein, 411 aa, Sunxiuqinia elliptica
  misc_feature (1)..(411): tr|A0A1I2HCM1|A0A1I2HCM1_9BACT S-adenosylmethionine:tRN A ribosyltransferase-isomerase OS=Sunxiuqinia elliptica OX=655355 GN=SAMN05216283_10412 PE=3 SV=1
MNKKTSTTPVFDQSAQALNYELPDAKIAKYPLAERDASKLLVWQNGTIQDANFGTIAEFLPEESLLVFNNTKVIRARLPFQKTTGAQIEIFCLDPHTPADYQLAFQQTKSCSWNCMVGNLKKWKQEPLQRRIPINGKEVVLTAKKISQSEGNVLVQFSWDDESVDFSSLIEACGILPIPPYLHRETESSDLERYQTIYSKVKGSVAAPTAGLHFTDQVFQTFQQKNITTAEVTLHVGAGTFKPVKAATIADHEMHAEQFLVTRELLVRLQKQRNPIIAVGTTSIRTLESLYWLGTSFIDNEDQAPDSLHISQWQPYQNTTEASKTQALQALIDFMDKHSINHLTASTQIIIVPGYNFRVVDGMITNFHQPQSTLLLLIAAYLGDNWKQIYQHALDNNYRFLSYGDSNLYLK

SEQ ID NO: 72865 - protein, 349 aa, Sunxiuqinia elliptica
  misc_feature (1)..(349): tr|A0A4V3BYT4|A0A4V3BYT4_9BACT S-adenosylmethionine:tRN A ribosyltransferase-isomerase OS=Sunxiuqinia elliptica OX=655355 GN=queA PE=3 SV=1
MKLSKFKYKLPENQIALHPADNRDESRMMVLHRESRKIEHKLFKDITDYFDDKDVMVFNDTKVFPARLYGNKEKTGAEIEVFLLRELNREQRLWDVLVDPARKIRIGNKLYFGEDDMLVAEVIDNTTSRGRTLRFLFDGPYDEFKKTLYGLGETPLPKFIQRPVQPEDKDRYQTIFAKHEGAVAAPTAGLHFSRELLKRLEIIGVDFSYVTLHVGLGNFRSVDVEDLTKHKMDSEQIWIKEDACNVVNDAKTNKKNVCAVGTTVMRTLESSVSTQGHLKPFEGWTNKFIFPPYEFSVANSMVTNFHLPMSTLLMMVAAFGGYDFVMEAYQEAIKEGYRFGTYGDAMLIL

SEQ ID NO: 72866 - protein, 356 aa, Superficieibacter electus
  misc_feature (1)..(356): tr|A0A2P5GSG8|A0A2P5GSG8_9ENTR S-adenosylmethionine:tRN A ribosyltransferase-isomerase OS=Superficieibacter ele ctus OX=2022662 GN=queA PE=3 SV=1
MRLADFSFELPESLIAHYPQPERSACRLLSLDGPTGALTHGTFTDLLDKLNPGDLLVFNNTRVIPARLFGRKASGGKIEVLVERMLDDKRILAHIRASKAPKPGAELLLGDDESIQATMTARHDALFEVEFHDERPVLDILNAIGHMPLPPYIDRPDEDADRELYQTVYSQKPGAVAAPTAGLHFDEPLLERLRSKGIEMAFVTLHVGAGTFQPVRVESIEDHIMHSEYAEVPQEVVDAVLAAKARGNRVIAVGTTSVRSLESAAQAAKNDLIEPFFGDTQIFIYPGYHYKVIDALVTNFHLPESTLIMLVSAFAGYKHTMNAYQQAVNAEYRFFSYGDAMYITYNPSAINERVGE

SEQ ID NO: 72867 - protein, 347 aa, Sutterella megalosphaeroides
  misc_feature (1)..(347): tr|A0A2Z6I7Y3|A0A2Z6I7Y3_9BURK S-adenosylmethionine:tRN A ribosyltransferase-isomerase OS=Sutterella megalospha eroides OX=2494234 GN=queA PE=3 SV=1
MQEQFLSDFDFELPPELIAQYPLADRSASRLLHITTDVIEDKRFTDIESYLRPGDLLIANNTRVIKARLLGRKETGGAVEALVERVTGEKSAIAMVRASKSPKPGTKLIFSADGAEETVIVTGRQGEFFVLEFDRPVLDVLEAFGKVPLPPYIEHAAEKSDEGRYQTVYAKYPGAVAAPTAGLHFTDELLERLKERGVDIEYVTLHVGAGTFQPVRVEKLSEHHMHSEWYSMPADVAEKINRAKAEGRRVIAVGTTSLRTLESAADRIGHVEAGARDTALFITPGYTFRIVDALVTNFHLPKSTLVMLVSALVGRERILEAYRHAVDAKYRFFSYGDACFIEKAPGA

SEQ ID NO: 72868 - protein, 353 aa, Sutterella parvirubra
  misc_feature (1)..(353): tr|H3KCS0|H3KCS0_9BURK S-adenosylmethionine:tRNA ribosy ltransferase-isomerase OS=Sutterella parvirubra YIT 118 16 OX=762967 GN=queA PE=3 SV=1
MREQHLSDFDFELPEELIAQYPLAERSASRLLRITPETLVDGHFTDVEELLRPGDLLIANNTKVIKARLLGHKETSGAVEALIERVTGERTAIAMIRASKSPKPGTAVYFEAGDARERVVVTGRQEQFFELEFERPVLDVLSEFGRVPLPPYITHAADAADEGRYQTVYAEHPGAVAAPTAGLHFTEELLARLRAKGVDVDYVTLHVGAGTFQPVRVENLSEHHMHSEWYEMSEATAARINAAKAEGRRVVAVGTTSLRTLESAADRAGHVVPGARDTALFITPGYDFKIVDALITNFHLPKSTLVMLVSALAGRNRMLSAYAHAVAERYRFFSYGDACWIERDPRVPTDPTL

SEQ ID NO: 72869 - protein, 352 aa, Sutterella sp.
  misc_feature (1)..(352): tr|A0A5B7ZKH0|A0A5B7ZKH0_9BURK S-adenosylmethionine:tRN A ribosyltransferase-isomerase OS=Sutterella sp. KGMB03 119 OX=2584944 GN=queA PE=3 SV=1
MTEQHLSDFDFELPPELIAQYPLADRSSSRLLHITEDVIEDKTFRDIEGFLRPGDLLIANDTKVIKARLLGSKETGGAVEALIERVTGPDTAISMLRASKSPKPGTRIYFRAQTEGAAGKEAEAEVLGREGEFYSLRFQGPVLDILEAFGRVPLPPYIEHAPEKSDESRYQTVYAHHPGAVAAPTAGLHFTEDLLSRIRNKGVDIEYVTLHVGAGTFQPVRVENLSEHHMHSEWFSMPEDVAAKINAAKAEGRRVIAVGTTSLRTLESAADRPGHVEAGARDTRLFIMPGYKFRIVDALITNFHLPKSTLVMLVSALVGRERILEAYAHAVKEKYRFFSYGDACFIEKAKNA

SEQ ID NO: 72870 - protein, 348 aa, Sutterella sp.
  misc_feature (1)..(348): tr|A0A139JX44|A0A139JX44_9BURK S-adenosylmethionine:tRN A ribosyltransferase-isomerase OS=Sutterella sp. KLE160 2 OX=1574262 GN=queA PE=3 SV=1
MQEQHLSDFDFELPPELIAQYPLENRTASRLLHITKDVIEDCTFTDIEGFLHEGDLLVANNTKVIKARLLGRKATGGNVEALIERVTGERTAISMVRASKSPKPGTVLYFEADGIEEPVMVTGRQGQFFELEFERPVLDVLEAFGRVPLPPYITHAAQKSDESRYQTVYARYPGAVAAPTAGLHFTEDLLGRLAAKGVDIEYVTLHVGAGTFQPVRVENLSEHQMHSEWFNMPEDVAARINRAKAEGRRVIAVGTTSLRTIESAADAVGHVAAGARDTSLFIMPGYRFRIIDALITNFHLPKSTLVMLVSALAGRERILEAYRHAVEEKYRFFSYGDACFIENARLAG

SEQ ID NO: 72871 - protein, 348 aa, Sutterella wadsworthensis
  misc_feature (1)..(348): tr|K1JVL2|K1JVL2_9BURK S-adenosylmethionine:tRNA ribosy ltransferase-isomerase OS=Sutterella wadsworthensis 2_1 _59BFAA OX=742823 GN=queA PE=3 SV=1
MQEQHLSDFDFELPPELIAQYPLENRTASRLLHITKDVIEDCTFTDIEGFLHEGDLLVANNTKVIKARLLGRKATGGNVEALIERVTGERTAISMVRASKSPKPGTVLYFEADGIEEPVMVTGRQGQFFELEFERPVLDVLEAFGRVPLPPYITHAAQKSDESRYQTVYARYPGAVAAPTAGLHFTEDLLGRLAAKGVDIEYVTLHVGAGTFQPVRVENLSEHQMHSEWFNMPEDVAARINRAKAEGRRVIAVGTTSLRTIESAADAVGHVAAGARDTSLFIMPDYRFRIIDALITNFHLPKSTLVMLVSALAGRERILEAYRHAVEEKYRFFSYGDACFIENARLAG

SEQ ID NO: 72872 - protein, 349 aa, Sutterella wadsworthensis
  misc_feature (1)..(349): tr|R5Q5L5|R5Q5L5_9BURK S-adenosylmethionine:tRNA ribosy ltransferase-isomerase OS=Sutterella wadsworthensis CAG :135 OX=1263111 GN=queA PE=3 SV=1
MQEQHLSDFDFELPPELIAQYPLADRAASRLLHITEEVIEDCTFRDIEKFLRPGDLLVANNTRVIKARLLGAKATGGAVEALIERVTGEFTAIAMVRASKSPKPGSKLFFAAPGTDLKAEVEVTGRAGEFFELKFAEPVLQVLEAFGRVPLPPYIEHAPEKADESRYQTVYARHPGAVAAPTAGLHFTDDLLNRLKAKGVDIEYVTLHVGAGTFQPVRVENLSEHHMHSEWFSMPEDVAARINEAKAQGRRVIAVGTTSLRTLESAADRIGHVEAGARDTRLFIMPGYKFRIVDALVTNFHLPKSTLVMLVSALVGRERILEAYAHAVREHYRFFSYGDACFIEKARGA

SEQ ID NO: 72873 - protein, 52 aa, Sutterellaceae bacterium
  misc_feature (1)..(52): tr|A0A3D4GA82|A0A3D4GA82_9BURK S-adenosylmethionine:tRN A ribosyltransferase-isomerase (Fragment) OS=Sutterella ceae bacterium OX=2026794 GN=DIU26_05950 PE=3 SV=1
TNFHLPKSTLVMLVSALCGRDEILAAYKHAVDEKYRFFSYGDACFLEKKVNQ

SEQ ID NO: 72874 - protein, 354 aa, Sutterellaceae bacterium
  misc_feature (1)..(354): tr|A0A350CY44|A0A350CY44_9BURK S-adenosylmethionine:tRN A ribosyltransferase-isomerase OS=Sutterellaceae bacter ium OX=2026794 GN=queA PE=3 SV=1
METKEQHLSDFDFELPESLIAQYPLKDRAASRLLHVKPDGSVEDLHFRDILNLLQPGDLLVFNNTKVIKARLNGKKETGGVFEAMTERVTGTYEAISMMRASKAAKPGTILYFDHPEGKEPARAEVLGREGEFFRLKFDRPVLEVLDEYGKVPLPPYIQHAAEKSDESRYQTVYAKYPGAVAAPTAGLHFTDELLQQIRDKGCEEVFVTLHVGAGTFQPVRVENLSEHIMHSEWYSISPEAAEKINKAKAEGRRVVCVGTTSLRTVEASASQNPEGKVRAESADTRLFIKPGYEFKVCDAMVTNFHLPKSTLVMLVSALCGRDEILAAYKHAVDEKYRFFSYGDACFLEKKVNQ

SEQ ID NO: 72875 - protein, 352 aa, Suttonella indologenes
  misc_feature (1)..(352): tr|A0A380MYR0|A0A380MYR0_9GAMM S-adenosylmethionine:tRN A ribosyltransferase-isomerase OS=Suttonella indologene s OX=13276 GN=queA PE=3 SV=1
MSPYQKSDFHYELPEKLIARYPLAERSASRLLVAQVQDEQNLMLSDQKVSDLPQFIQPQDLLVFNNTRVLPARLFGEKSSGGKIELLIERLQDTHHVAAYIRASKAPKIGATLHIGGYQVQVQGRNEALFYLYSDSPWAEIMQRLGEMPIPPYLERQADESDDERYQTVYAKHLGAVAAPTAGLHFDSALLAALSAKGIASTEVTLHVGAGTFQPVRHEDLSAHVMHKEWLSVSEENVAAVEACKARGGRVIAIGTTSLRALESAAQSGRLQAFAGDTDLFITPPDYRFRVVDALFTNFHLPESTLLMLVSAFAGMENTRRIYAHAIAQQYRFYSYGDAMFLPQRLDNQRES

SEQ ID NO: 72876 - protein, 347 aa, Suttonella ornithocola
  misc_feature (1)..(347): tr|A0A380MXY9|A0A380MXY9_9GAMM S-adenosylmethionine:tRN A ribosyltransferase-isomerase OS=Suttonella ornithocol a OX=279832 GN=queA PE=3 SV=1
MYHQTKKSDYQYELPESLIARYPLAKRSDSRLLVATPFKDRVEIIDSGVVNFAEYLRAEDLLVMNNTRVLPARMYGTKASGGKIEIMVERTLDEHHVRAYLRASKSPKVGSELFIHDYVVTVAEKKDGLFTLSSFIPWQEIMQINGEMPIPPYMDRNAEALDSERYQTVYAKTPGAVAAPTAGLHFDGDLLAKIAEKGIARAEVTLHVGAGTFQPVREEDLNAHVMHEEWLSVPEETVEAVKQCRARGGRVIAIGTTSLRALESAAQDGQLLAGSGDTNLFISPGYRFNVVDALFTNFHLPESTLLMLVSAFAGMENIRTIYRHAVEEQYRFYSYGDAMFLTNQLSN

SEQ ID NO: 72877 - protein, 345 aa, Swaminathania salitolerans
  misc_feature (1)..(345): tr|A0A511BTV2|A0A511BTV2_9PROT S-adenosylmethionine:tRN A ribosyltransferase-isomerase OS=Swaminathania salitol erans OX=182838 GN=queA PE=3 SV=1
MQISDFDFDLPRENIALEPARPRDSARLLRVAAGQALSEARVSDLPSLLEPGDLLVVNDTAVIRAQLAARRGEAKIGITLDRILSDGSWHALAKNARKLKPGDTLHFGSDPVTAAVVENEGDGAISMRFSAEGEAFDDFLKRAGVLALPPYIDRPTGPTAQDDSDYATIFERYKGAVAAPTAGLHFTPDLLAALDARGVRRHTLTLHVGAGTFLPVRDEIASHKMHAEWGRIDAQTAQLINDTRASGRKIVAVGTTSLRLLESAADERGVVHPWEGETSIFIKPGYRFRAVDRLMTNFHLPRSTLFMLVCALAGTETMREAYRHAIAEGFRFYSYGDACLLDRAP

SEQ ID NO: 72878 - protein, 347 aa, Swingsia samuiensis
  misc_feature (1)..(347): tr|A0A4Y6UKN1|A0A4Y6UKN1_9PROT S-adenosylmethionine:tRN A ribosyltransferase-isomerase OS=Swingsia samuiensis O X=1293412 GN=queA PE=3 SV=1
MTDELTPFDFDLPHDHIAIEPARPRDSAKLLHVRPGHELQTYTVRDLPSFLREGDLLIANNTEVIRAQLSAKRGEAKIGITLDRILADGSWHALARNSRKLKPDDILHFNDDPVTATIITNEGDGAISLRFSVEGDEFDAFLERVGALALPPYIERPLGPTPQDDNDYRTIFSEKRGAVAAPTAGLHFTPELLEALAQKGIERRTLTLHVGAGTFLPVRSSIAEHKMHAEWGEIDASTADLINQTKARGGRIIAVGTTSLRLLESAAQEDGTVQPWQGETSIFIKPGYRFKAVDLLMTNFHLPRSTLFMLVCAFSGTDTMRNAYHYAISNHLRFYSYGDACLLERRS

SEQ ID NO: 72879 - protein, 367 aa, Swingsia sp.
  misc_feature (1)..(367): tr|A0A4Y6U9Y0|A0A4Y6U9Y0_9PROT S-adenosylmethionine:tRN A ribosyltransferase-isomerase OS=Swingsia sp. F3b2 OX= 2558361 GN=queA PE=3 SV=1
MVAQRTIPPAPSPQAAGDSMAPFDFDLPKARIALSPARPRDQARLLHVQGGQRTFHHVRDLPGLLRPGDLLIVNDTAVLHAKLAALRVAERGTAHIGLTLDRPLADGSWHVLARNARKLRPGDNLRFEGSTATATVLTNEGDGAATLRFSVEGASFDHFLETCGVLALPPYIDRPNGPTADDERDYTTLFAAHKGAVAAPTAGLHFTPELMAALAERGVERHSVTLHVGAGTFLPVRGALADHKMHSEWGHVSAATANAVNKAHQEGRRVVAVGTTSLRLLESACQPDGTLAPWRGETDIFIKPGYRFRCVDALMTNFHLPRSTLFMLVCAFAGTEPMRAAYSSAIEAGMRFYSYGDACLLEKAPEA

SEQ ID NO: 72880 - protein, 341 aa, Symbiobacterium thermophilum
  misc_feature (1)..(341): sp|Q67Q93|QUEA_SYMTH S-adenosylmethionine:tRNA ribosylt ransferase-isomerase OS=Symbiobacterium thermophilum (s train T / IAM 14863) OX=292459 GN=queA PE=3 SV=1
MRLSDFDYDLPKELIAQKPVEPRDASRLMVVHRASGAIEHRCFRDLPEYLRPGDGLVINETRVMPARLLGSREQTGGAMEVLLLKRLDRDRWETLVKPGKKARPGERIVFGDGLLVGTVVGPTDYGGRVIDFHYEGVFENLLERLGQMPLPPYIHEQLEEPERYQTVYAREWGSAAAPTAGLHFTAELLDRLAARGVEIHRITLHVGLGTFRPVEVEDPTQHKMHSEFYHVSPEAAAGINAVRKGGGRLVAVGTTSVRTLETVADEDGTVRPGEGWTDIFIYPGYRFKAVDALVTNFHLPKSTLLMLVSALAGHDLIMRAYREAVAQRYRFFSFGDAMLIL

SEQ ID NO: 72881 - protein, 234 aa, Symbiobacterium thermophilum
  misc_feature (1)..(234): tr|A0A1Y2T4N8|A0A1Y2T4N8_SYMTR S-adenosylmethionine:tRN A ribosyltransferase-isomerase (Fragment) OS=Symbiobact erium thermophilum OX=2734 GN=A6D92_07520 PE=3 SV=1
IVFGDGLLVGTVVGPTDYGGRVIDFHYEGVFENLLERLGQMPLPPYIHEQLEEPERYQTVYAREWGSAAAPTAGLHFTAELLDRLAARGVEIHRITLHVGLGTFRPVEVEDPTQHKMHSEFYHVSPEAAAGINAVRKGGGRLVAVGTTSVRTLETVADEDGTVRPGEGWTDIFIYPGYRFKAVDALVTNFHLPKSTLLMLVSALAGHDLIMRAYREAVAQRYRFFSFGDAMLIL

SEQ ID NO: 72882 - protein, 436 aa, Synechococcales bacterium
  misc_feature (1)..(436): tr|A0A354B4Y4|A0A354B4Y4_9CYAN S-adenosylmethionine:tRN A ribosyltransferase-isomerase OS=Synechococcales bacte rium UBA10510 OX=2055795 GN=queA PE=3 SV=1
MNTDLAKLDPADLQLSSYHFELPQERIAQRPLEPRHAAKLLVVEPNYRASAGDGVSAAGQASGLGAAVQARHLQVWDLHQELRPGDLLVVNDTRVLRARLQGRRANGGAVELLVLEPWLPAPGQNQPSSQNQPSNQNQPSNQNELAHQNQSVSSAGPGQWLCLAKPAKKLNPGDWIEVQASGQPNLRLQVLAREPETGGRIVQFPSDCLDAPALEPLLVRYGAIPLPPYIHSHREEDNDRYQTCYAARPGAVAAPTAGLHLSEQLLAAIRARGVQIATTTLHVGLGTFRPVETDDLSQLQLHSEWVEVTAALVEAVAACRSRSGRVIAVGTTSVRSLEAVAQLYGGQLAAHTGPVNLVIQPGYRFAVVQGLLTNFHLPKSSLLLLVSALIGRRRLLNLYAEAIEKNYRFFSYGDAMWIPPEAVIESSRPELHFENP

SEQ ID NO: 72883 - protein, 115 aa, Synechococcales bacterium
  misc_feature (1)..(115): tr|A0A3D0P9T2|A0A3D0P9T2_9CYAN S-adenosylmethionine:tRN A ribosyltransferase-isomerase (Fragment) OS=Synechococ cales bacterium UBA8647 OX=2055797 GN=DEO90_05635 PE=3 SV=1
MIDPRDSLLSSYDYELPEACIAQRPLEPRHAARLLMVEPEAGCRDRQVWDLLEELEPGDLLVVNDTRVLRARLQVRRAGGGLGELLVLEPQGQGQWLCLARPAKRLRPGDSIALV

SEQ ID NO: 72884 - protein, 359 aa, Synechococcus elongatus
  misc_feature (1)..(359): sp|Q31KP1|QUEA_SYNE7 S-adenosylmethionine:tRNA ribosylt ransferase-isomerase OS=Synechococcus elongatus (strain PCC 7942) OX=1140 GN=queA PE=3 SV=1
MNEPSPSDWHLDAYDYELPPDRIAQSAVEPRDHARLLVFPDREQLWHRHFYDLPQLLRPGDLLIVNDTRVIPARLYGQKIETGVPVEVLLVEEHGPGYWLTLVKPGKRLKPGSAIAFGPNPEDPLLVADVEASDPATGGRWLRFRGEAEAFWSQLATLGEMPLPPYIHTTASDPERYQTVYSRELGAVAAPTAGLHFTPELLTTLADMGIATAPVTLHVGIGTFRSVDVEDIRQHEMHSERMMVPAATVEKIQATKAAGGRVIAVGTTSVRAIEGAAASGELKPGSDRVNLFIYPGYRWQIIDGLITNFHLPRSSLMMLVSALIGRDRLLSAYATAIAEQYRFYSFGDAMLILPDAKLP

SEQ ID NO: 72885 - protein, 359 aa, Synechococcus elongatus
  misc_feature (1)..(359): tr|A0A3G6WZ08|A0A3G6WZ08_SYNEL S-adenosylmethionine:tRN A ribosyltransferase-isomerase OS=Synechococcus elongat us PCC 11801 OX=2219813 GN=queA PE=3 SV=1
MNESSPSDWQLDAYDYELPADRIAQTAVEPRDHARLLVFPDREQLWHRNFYDLPQLLNPGDLLIINDTRVIPARLYGQKIDTGVPVEVLLVEEHGPGYWLTLVKPGKRLKPGAAITFGPNPEDPLLVADVEASDPATGGRWLRFRGEPEAFWSRLATLGEMPLPPYIHTSSSDPERYQTVYSREMGAVAAPTAGLHFTPELLTTLADMGVATAPVTLHVGIGTFRSVDVEDIRQHQMHSERMVVPAATVEKIQATKAAGGRVIAVGTTSVRAIEGAAASGELKPGSDRVNLFIYPGYRWRIIDGLITNFHLPRSSLMMLVSSLIGRDRLLSAYATAIAEQYRFYSFGDAMLILPDAKLS

SEQ ID NO: 72886 - protein, 372 aa, Synechococcus lacustris
  misc_feature (1)..(372): tr|A0A2P7ED65|A0A2P7ED65_9SYNE S-adenosylmethionine:tRN A ribosyltransferase-isomerase OS=Synechococcus lacustr is OX=2116544 GN=queA PE=3 SV=1
MQQLNQDQLLSGYNFELPVEAIAQRPLEPRHRARMLKVEGGGQGCSHLQVWDLAQQLRKGDLLVVNNTRVLRARLKARRATGGLVELLVLEPAALGGGQWICLAKPAKKLKAGDWLELEAPDQPPQRLQVLGCNEASGGRILQFPSECIDAAALEPLLVRYGSMPLPPYIHQQDASDDERYQTRFASRPGAVAAPTAGLHLSDELLDAIRAGGVEIASITLHVGLGTFRPLEIENLSGLQLHSEWVEVTADLVAAVAACRARGGRLIAVGTTSVRSLEAVAQLNGGLLKSHCGPVDLVIQPGYKFKVVEGLLTNFHLPKSSLLLLVSALIGRERLMALYLEAIEKKYRFFSYGDAMWIPPEAVLNSAKSEAC

SEQ ID NO: 72887 - protein, 353 aa, Synechococcus lividus
  misc_feature (1)..(353): tr|A0A2D2Q4Y0|A0A2D2Q4Y0_SYNLI S-adenosylmethionine:tRN A ribosyltransferase-isomerase OS=Synechococcus lividus PCC 6715 OX=1917166 GN=queA PE=3 SV=1
MSLTDFSLDAYDYYLPPERIAQQPATPRDHARLLVVDRETARDHWFYELPQLLQPQDLLVLNDTQVIPARLMGHKVGEPGRSVEVFLLEELSDRQWLALVKPGRKLRPGAVIQLGSLQATVQAIDPATRGRVIEFDLPPGDRLWPYLDEVGDIPLPPYIQTPIQDAQQYQTVYAQRPGAVAAPTAGLHFTPDLLSKLAYCGIDHCFITLHVGIGTFRPVEVNDIRQHRLHHEWIEVSAATVAKIKAVQRAGGRIIAVGTTVIRSLETAAQSGELQPFRGKSDLYIYSGYQPKIVEGFITNFHLPRSSLMMLVSAFIGRDRLLQLYDYAIAQAYRFYSFGDAMLILPTAWQSSA

SEQ ID NO: 72888 - protein, 370 aa, Synechococcus sp.
  misc_feature (1)..(370): sp|A5GJ95|QUEA_SYNPW S-adenosylmethionine:tRNA ribosylt ransferase-isomerase OS=Synechococcus sp. (strain WH780 3) OX=32051 GN=queA PE=3 SV=1
MADPRDLQLSAYDYELPEARIAQRPVEPRHAAKLLMVPPLEASSLQGRHGTVWDWQNELRSGDLLVVNDTRVLQARLRVRRSGGGLGELLVLEPRGEGRWLCLARPGKKLRPGDQVWLEALEQDPLPLQVLASDPASGGRIVQFPPAFVDAMAIEALLQRYGEVPLPPYITCHDDSDQERYQTRYASRPGAVAAPTAGLHLSDDLLQAIRARGVQMSSVTLHVGLGTFRPVETEDLSELSLHSEWVEVSTQLVEAVQACRQRGGRVIAVGTTSVRALEGAAAAGGGDLQPLKGPVDLVIQPGYQFRVVDGLLTNFHLPKSSLLLLVSALIGRERLLDLYALAIANDYRFYSYGDAMWIAPGAVLMDARPR

SEQ ID NO: 72889 - protein, 363 aa, Synechococcus sp.
  misc_feature (1)..(363): sp|A5GUY6|QUEA_SYNR3 S-adenosylmethionine:tRNA ribosylt ransferase-isomerase OS=Synechococcus sp. (strain RCC30 7) OX=316278 GN=queA PE=3 SV=1
MLIDPRDSLLSSYDYELPEACIAQRPLEPRHAARLLMVEPEAGCRDRQVWDLLEELEPGDLLVVNDTRVLRARLQVRRAGGGLGELLVLQPQGQGQWLCLARPAKRLRPGDSIALVADGEPDLPLQVLAVEESSGGRLIQFPPECVDAASLEPLLLRYGVMPLPPYIHQQDESDNARYQTCFASKPGAVAAPTAGLHLSEELLAALTQKGIERASVTLHVGLGTFRPVETEDLSQLELHSEWVEVSEALVQAVAACRKRGGRVIAVGTTSVRSLEGVAALHGGVLQPFRGPVNLVIQPGFRFAVVQGLLTNFHLPKSSLLLLVSALIGRERLLQLYQHAITAGYRFYSYGDAMWIPPECSRQP

SEQ ID NO: 72890 - protein, 366 aa, Synechocystis sp.
  misc_feature (1)..(366): sp|Q55850|QUEA_SYNY3 S-adenosylmethionine:tRNA ribosylt ransferase-isomerase OS=Synechocystis sp. (strain PCC 6 803 / Kazusa) OX=1111708 GN=queA PE=3 SV=1
MDQDKYLSSYDYHLPADCIAQTPAVPRDHSRLLVVKDPFTVDHQHFYDLGNYLKPGDLLVLNDTKVMPARLHGQKENGVAVEILLLTECTENQWIALVKPGKRLKLGAKVKFPARDGEKPDLWATILQRDDATGGRLLEFVLEPGQRLWDVLPDYGEIPFPPYIGDRQATNDQYQTIYAEKLGAVAAPTAGLHFTEELFTKLAQQGVQTAKVTLHVGIGTFRPVEAENILDHVMHQEWIDVPPTTVEVIEKTRASGGRIFAVGTTVVRCLEGMAQESDFPRQPLQPFRGQTDLFIYPGYQWRLVDGLITNFHLPKSSLLMLVSALISRPRLMAIYETAIAKGYRFYSFGDAMVILPEACRGQEKIR

SEQ ID NO: 72891 - protein, 385 aa, Synechocystis sp.
  misc_feature (1)..(385): tr|A0A068MSH7|A0A068MSH7_SYNY4 S-adenosylmethionine:tRN A ribosyltransferase-isomerase OS=Synechocystis sp. (st rain PCC 6714) OX=1147 GN=queA PE=3 SV=1
MQLSFSFLAFCPLLIFPMDQDQYLSSYDYQLPPQCIAQSPAVPRDHSRLLVVKDQFTVNHEHFYDLGNYLNSGDLLVLNDTKVMPARLHGKKDNGVAVEILLLTECRENQWIALVKPGKRLKLGAKVKFTARDGEKPDLWATILQRDEATGGRLLEFALEPGQRLWDVLPDYGEIPFPPYIGDRQATDDQYQTIYAEKLGAVAAPTAGLHFTEELFTKLTQQGVQTTKVTLHVGIGTFRPVETENILNHVMHQEWIDVPPTAVEAIAQTKANGGRIFAVGTTVVRCLEGMAQECNFPSQPLQPFRGQTDLFIYPGYQWRLVEGLITNFHLPKSSLLMLVSALISRPRLMAIYETAIAKGYRFYSFGDAMVILPEACQGRETAEKS

SEQ ID NO: 72892 - protein, 349 aa, Synergistaceae bacterium
  misc_feature (1)..(349): tr|A0A3C0QH31|A0A3C0QH31_9BACT S-adenosylmethionine:tRN A ribosyltransferase-isomerase OS=Synergistaceae bacter ium OX=2053624 GN=queA PE=3 SV=1
MTGPDFSKTSTFDYYLPKELIAQDPVEPRDSSRLLVLHKDSGTREHRIFKDIKDHLRKGDLLVLNDTRVLPARVPGIKKNGNAEVEIFFLSPAAEPNKWTALVRPGRKLKEGTHVQLGEDVEIVVGESLEDGVRNVYFAPSADPFAIIHKYGTTPLPHYITETHAEPERYQTVYSRPEKENSVASPTAGLHFTKELLKEIRTMGVDEAFVTLQVGLGTFRPVKTENLSEHIMHSELCEISDITARKIADTKMSGGRVIAVGTTVVRTLESFAIRYGEVRPGMLDTRLFITPGFNFRIIDALITNYHLPKSTLLMLVSAFGGYDRIMEAYREAVDLKYRFFSFGDSMFIC

SEQ ID NO: 72893 - protein, 349 aa, Synergistaceae bacterium
  misc_feature (1)..(349): tr|A0A3B9TRX4|A0A3B9TRX4_9BACT S-adenosylmethionine:tRN A ribosyltransferase-isomerase OS=Synergistaceae bacter ium OX=2053624 GN=queA PE=3 SV=1
MHNNDYFDINAYGYYLPQELIAQNPAEPRDSSRLMVVDRENGRITHSIFSNLHSFLKSGDLLVLNDTKVFRARLKGVKKGGQTEAEILLLRPLDRLEKEWEALVRPGKRLSPGAVVILKDKTEIVIGESAEAGTRRVGFPGGCNVRALMERIGEVPLPPYIKKTSAPSERYQTVYADKSGSAAAPTAGLHFTERVFRRLHESGVEKAFLTLHVGLGTFRPVKENDIRNHKMHEEYCSIDKETAEKINRTKRGGNRVIAVGTTVVRTLESLADERTGEVNPGSLWTKAYIYPGYAFKAVDAMVTNFHLPKSTLLMLVAAFAGRNLILEAYEEAVRMRYRFFSFGDAMLII
